United States Patent Application Publication US 2019/0348154 A1 - sequence listing, part 114

SEQ ID NO: 429753 - DNA, 1653 bp, Serratia marcescens
gtgaaaagcccaataattaatgcttccggcgatgcagaggccgatgtcgtcattgtcggttccggtattgtgggcggtctgatggcggatgctttggtgagccagggctactcggtgctggtacttgaggcaggcccgcgcattgagcgcgcacaggctgtggaaaactggcgcaatatgccactgcacaatcgtgcggggtcggattttcaggggctttacccgcaatcggagtacgccaccgcgccgctctatttcccggagaacgactatatcaaactgaccggccccaatggctctggctttaaacagggctatttgcgtgtggtggggggaaccacctggcactgggccgcttcttgctggcgcaaccatcccaatgattttcgcatgaaatctctctatggcgtggggagagactggcctatttcttacgaagatatcgaaccgtggtacgcgaaagccgaagaggaaataggcgttgccggcccgaataatccggagtggcagtcccctgcggaacgcagcgggccttacccgatggacatggtgccctgggcctacggcgacagacgcattgctgagattgttaatcctcacggttttaaatcggtgcccattccgcaaggccgcagcacccggccctggaacggacggcccacctgctgcggcaataacaattgccagccgatttgcccgatcggggcgatgtacaacggtattcaccacgttgaacgggccgaacacaagggggcgaaggtgatccctgaagcggtggtgtacaaaattgacaccgacgacaataaccgcgtcaccgccgttcactggtatgacacggcgcacaactcccatcgggcgatcggtaaaacgttcgttctggcctgcaatgggattgagaacccgcgcttgctgctgctggcggccaacgaaaagaacccgaacggcatcgcgaacagctcggatcaggtgggacgcaacatgatggatcactcgggcctgcactgctccttcctggcgcgagaggccctgtgggttggccgcggcccggcgcagagcagctgcatggtggggtatcgtgacggcgtgttccgcagcgaccactccgccaacaagatcatcatcaacaacatcaaccgggtgatcccctccgcccttgaagtcctgaaaacgggcaaggtcggcaaggcgctgcaggatgaagtgcgcgatcgcgccagccgctcggtggatctctccatcagcctggaaccgctgccggacccgaacaaccgtctgaccctgagccccactcgcaaagacaagcatggcctggcctgcccggacatccactacgacgtcggcgattacgtgcgcaaagggctggaagtggtcaaaacccagctacggcagattggcgacttgttcgatgcgcaagagtttgtgattaacgacaagctgaatgccaacaaccacattatgggcggcacgatcatgggcagcgaccccacgaactcggtggtgaacggtaattgccgcgctcacgatcacgacaacctttggatcccgggtggaggcgccatggtttcagccagcgttgtcaacaccacgttgacgatggcggcgcttggactcaaggcggccaatgacgtacttcgagccctggagagcaaatga

SEQ ID NO: 429754 - DNA, 1398 bp, Serratia marcescens
atgaataaaatcacccacgcgctggcagcgacgctgctgctgggaagcggttttgcggcgcatgcccaggacggcgatctgatcgctaaagggcaagcgctggctatcgcctcggactgcatggcctgccatacgaatacgcagcagcagggtaaaccttttgccggggggtacggcatcgcttcccccatgggcactatctacgccaccaatattactccatcggtaaaatacggtatcggcggctattccgaagcggcgtttgccgacgtgctgcgcgccgggatccggaaagatggggcgtatctctatccggccatgccctacaccgcctacacccgtctgagtgatgacgagatccacgctctgtatacctatttcatgcatggcgttgccccggtcgatgagccggccaagcaccaaaccgatctgccgtttccgttcaacatccgcctctccatggcggtgtggaacaggctttatttggacaatcggcgcttcaccccggatctgacgaaaggtgaggcgtggaacgaaggggccgcgctggtgcagggcccggctcactgcggaacctgtcatacgccgcgtaatgtgctgatggcggaagacaattcgcgcttcctgatgggggcatcgttgggctcttggtacgcgccgaatatcaccgcagatcgccaagaagggatcggtggctggagcgagcaggagttagtggcctacctgaaaaccggtcgggcggaagggcgcgcgcaagcggcggggccaatggctgaagccgttgagcacagcttccaatacctgaccgaccggcagctgcaggcgatagcgacttacctgaagaccgtgccgtcacagggcgatgagcgccagggcaatagctttagtcaagcgcattacaacgttgagcaccatctccgcggcatcaattcgcccaacgccaaccacacgctcaatagcggcgaggcgctctacagcggctactgcgccagttgccatcagccggatggcagcggcagtttgaaccaggcctacccttcgctgttcaacaactccaccacggccgcgagcaatccgtcaaacctgattgccgccattttgcagggggttgatcgccgggttgacggtaagcacgtcctgatgccgagctttggcgccggttcctatgtcggagaactgacggataagcaggttgccgatatcgctaacttcgtgctgcagaaatacggcaacagcacgctgagcgtgactgaggccgacgtgagtgaggtgcgcgccgggggcccgaaaccgctgttggcgcgcgcacagccgatgattctgcctggcatggccgtcgcggcggtcgtcattattctgctggtcctattctggctccgccgccgcaaggcacgttaa

SEQ ID NO: 429755 - DNA, 144 bp, Serratia marcescens
atgcgcaagcataacgtgaccaaggttacgctttcagggataactctcatgaatatgaggtgctttactataattccgggacagagtgaccgcagtggcattgcctggttgttgaaagaacaatcttcaattccccctgaataa

SEQ ID NO: 429756 - DNA, 393 bp, Serratia marcescens
gtgacaccgttggctaccgggatcgtcagcagcggcgtagccgaagcgcaagtgaccgaggccgtgcgccacggtgaaatcctgaccatcaaagtgcgtttcaaagggttgaaagacaaccttaatgggcaaggcttgtatagcagtctggataaaagcagccttgagaaatccttctatattctggtgggtaataaaaaatacctgctgcttaccgatagcaataatgtcccactggcctctcccagcgtgtcattcagctcaagttcaggcattccctatgtcgccacctggtttggcagcttccctgcgcctccacctgatgtgaaagaggtgtacctgacgatcgccaacgtcgagccgctcgggccgatagccattacggatcgttga

SEQ ID NO: 429757 - DNA, 609 bp, Serratia marcescens
atgaacggcctcaggaaagccgcctgtgtgggtgggatgttagcctttgggttggtgtcattgggttcatgggctgacagcggagagccggcatccgtggggaaaccggtgatactcgatcttaaggccacccggctggatttggttggtttgccttcggggctgaatgccggcgtccttgatctgcagagtaaggcagcggatttggctaaacaatccgccgacatttccgtcagagacagcaaaaatgccgtaacgttatcgatgcgcagcgatgtgctgttcgctttcgacagcgatgcgattgctgctaaagcggagcctgcgctgcaacaggtggcgcaatttatcgcggccgaaccggtagggaacgtggtgatcgaggggcacaccgatgcggtgggcagcgataaatataatcaggatctgtcgctgcgacgcgcacgtgcggtggctgtttggctgatcgcacatggggtagaaaaatctcgtctgagtgaacggggaaaaggggaggctgaaccggtggcttccaacgacacgccgacgggccgggccaagaatcggcgggttgacttcgtgttgccgaaaaccgctgccgccggttaa

SEQ ID NO: 429758 - DNA, 162 bp, Serratia marcescens
atgattgatgaacataatcgcgtcgccaaaagcctgtatcccactttcggctttcgctttagcgaccccgacaaaatgcggggtcagaacgtctcgaaatacagctcgcgcaacagccaggatatttcgttattggtgcggttcaggacgtctattctgtga

SEQ ID NO: 429759 - DNA, 723 bp, Serratia marcescens
atggtcaccgatataggaaaagaatattatcagtactgcctgcagatgattagcaccgcagagaaagcggaatgcctcattattaacaaaagcgaaaaacccactggaaaaataaaactaacctgctcaaacattctcctggatcttggcctaacggaagtcctggcgaaattcatgctgcaataccccaaggtcaatttgcatgtgaaaatatttaatcgcaacgtggatattatttctgaagggtatgacctctcattaaaactcatcgccgatgaacccaaaaacagcaacttggtgatgcgtcgaatttgcgctgtgcccaccgcatttatggtcgccccctctgcaactattcagtaccaaagtatcaatacgcccgaagatctctccagtttgccaacggtcgggtggttatcgacccatcttcaggccgcctggacgtttcaacaagccgatcgcgaagtcaaaataaacaacgagtcgcgcatggtgtgcgatgacattcgcctgatcaaggaatcgatcgtaaaaggcgtcggtgtgggctgcctgccgctgaaattagcccgccaggaactgctcgacggcagcctgaaaacgctgctcgacgactggacattggaacaacacaagattgtcgcgttttacccttccagacaaggactccccccttcggtaagggcgctgattgatttcatcgttgatgaactggccgaataa

SEQ ID NO: 429760 - DNA, 630 bp, Serratia marcescens
atgacttttaaatataaccgattagataaggcacaggccgccgtgttattagtcgatcatcagacggggctactgtccctagttagagatcaggatccggataaattcaaaaataatgttttggcgctggccgatctggctaaatacttcaatttaccgacgatactgaccacgagttttgaaaacggaccgaacggccctttggtgccagagctaaagcaaacgttccctgacgccccctatattgctcgtcccggcaatatcaatgcctgggataatgaagatttcgtcaaggcggtaaaggccacgggcaagaaacaactgatcatcgccggcgtggtgaccgaggtttgcgtggcgtttcctgcgctctctgcgttggaagaggggtatgaggttttcgtcatcaccgacgcatccggcacgttcaatgcgattacgcgcgatgcggcttgggatcgcatgtcccaggccggtgcgcagctgatgagttggtttggcgcggcgtgcgaattgcaccgcgattggcgaaatgatatcgaagggttggggaacctgttctctcaacatatccctgactatcgcaatctgatgaccagcttcagtttgctgacctcaggtaaacagtaa

SEQ ID NO: 429761 - DNA, 918 bp, Serratia marcescens
atgagcatcgaaaaactaacccgggagccgctttccatcggcatcgagttgccgctggacaacgattggtccaccagcgggcagctgaaacgccagcaggatgggcgaccgttcggcgtgccggacatgagcgaacacgctgcgcgcatcaagctggccgatgagctcggctttcgcgccgcctgggttcgcgacgtgccgctgtacgatccggacttcggcgacgccgcgcaggtgtttgagacctttacctacctcggctacctgtccagcctgacgcgcaatattctgctgggcaccgcggccgtggtgctgccgctgcgccagccgtggctggtacgcaaagcggcttccacgctgcaaacgctgagcggcgatcgtctgctgctcggcgtcgccagcggcgatcgccctgtggaatacccgctgttcggcgccgattacgccgcgcgcggtgaacgctttcgcaccagcgtcggcattctcaaaggggaagccgacagcgcgctccagcctggattgcgcctgctgccggccacgccgccgccgccgctgctggtcgccgggctggcgcaacaaacgcctgagtgggtgggaaaaaatatggatggctggctgtcgtatcccggcacgcctgcggaccacgtttcgcgggtcaaactctggcgtaacgtggccggtgacaaaccctacgtcagctttattcatctcgacctcacagataacgccgacgcgccgattcagcgccatcgcttcggcatcaagagcggccgcaatgggttgattcaggaactgagcgccatgcgtgacgccggggtcaaccacatcggcctgcatttccgccgcaaccagcggccgctggaagagacgatgcaggagatcggccaactggtgttaccggaattccatcgcgcctga

SEQ ID NO: 429762 - DNA, 555 bp, Serratia marcescens
atgaaagtgatttattatggggtggcagccatagccatcagttttggggctaacgctaactgcacgctaacgaccacacaaaacagcatttatctgggggagcacaatattgggacactgtctcagcaatccactctgctgcacagcgccccattgcagtatcggttgacttgcgatgagccagtgcagttgcaggggttcactctgcgggagaatagaaacctggcagaaggaggcggcgcaaccgatgcttctagctatctcagcctcacggttgatgaattacgcaacgatgatggtgagcccctttccttttcactcgcccccgggcaaccacgccaaagacatctacccaactatcgtttatccgtcgatcgggaagcattacacatccttgtaccggataacgaggttgggcaacacttcacactgtcattaacagtctccagtttcgccgcggccgcgacacaactgcgtcaacagcaacgcgataacatcccgctgtcgacccaattgctggtcagtgctaactatcttgatcccgacgttcggtga

SEQ ID NO: 429763 - DNA, 2412 bp, Serratia marcescens
ttgaaattgcatataccgctacgtctgctggcgttttgtctgcctataggctatgcctcgaccagcctggctgactacgatattgaaatgatgcgcgcacttggattacccagtgagattgctgattacttttcctctggagcgaaattccccgcaggaaaacaagcgctattcatcaacgtcaacggacaaaatcatggacggcatgaagtcaacatagacaaacaaggcgaatggcaatacgacgctgaactcgtagaaagtctagggttatacccctgcaagctcaacactcaggcagatatgctgatgagccaatgttatcgaggcagtcgcatcgacaatgaaaccggtaataatcaattgattttgctgttgcccgagcgctatatccgtcgacaaccggcggactatgaatttggcggccatgccctgatgctgaattataccgcgagccgattcgacagccaaactcacagcagtgattacgcggcgttggaaaccggctttaacagcaataattggctgtttcgccataatggcacctataacaagtcagaacgacatcaggggtacacgccttataatagttatctgcagcggacattgacggatcacgacgccatgatgcgtttgggacgagcgacgttatcagattcgctttacagcggcattaccttagatggcctgcaatggctgcctgactcgtcgttgtcattgagtcaacgcagtgatgtgccggtagtcgaaggtatcgccgagagccaagccaaggttgagatttttcagaatggcagattagtttacgctacgcaggtgcagccgggcactttccgcctgaccgatatccctgcgcagttcgacgcggtcgatttgtccgtcaccgtcacggaaagtaacggtagccgcaaacaattcatcgtcccttatctgacgacctcaggacgcgctactccccgccagggcagttactcccttgctctcgggcgcactcacagcctggaaaaaagtacagaaatgcctttcatcactggctcattctctttgccatggctcaaccaccaccaggtgagagggggaagtttcctcagccgcgattatcgcggcatcgccgccggttatagcattgccaatagcgattatcgttttacagccttgagccacgtggcgcagtcgccaagtggaaagggcaccaagctgcagctgaatagtgcattgcccctgataaaaaaccttaagctgaacgccggttacagcatccagtcagagcgataccgttcgcccacacagcttcgttctccacgtaaagatgacggcgaaggaacttattggcccgtatcgcacggcgcatcatcttcacaccaacgtcaaagctacagcctgggcctaggctggcaccataaatacattggaaatctatctttaggcgttacacgcgctgaagggggagataagcaacaaaatcaacgagtctacgccttctggaaccgtcaatttggcgcagccaccgttggcgttagcctggaaaaagagcgcagccgcgaggttcgcgataacgataccagggtgttcgccaccctttcattaccgctgggaaaaaaccgacgttatagcgccaatatgataagcaacggaagacatcgtagcatcagcaactcgctttccggccaagcgttgaatggcgatctggcttatggactcaatgcaacacagggcacccaatccaacaacggcacctactcaggcaatgtgaactatttgagtccgttcacaacgctttccggcagctatagccatctgtcagaaaatcagcaggcattttactacagtgcctctggctccctggtggcagacagtagcgggctaacgctctcaccacagaaaatcggcgataccttcggcgtcttgacgataccgggcctcgccggaatcagcgtgtctacgccaggcggaaaggtgaaaacctatggcaagcaaggtaaggcggtcatcccaaggctgcgtgagtatcaaccaagcctgattaacgtagacacaagcaccttacctcccggtgccgatatcgataacggcgtgcgcaagatcaatctggcacgtggcagcgttaaacatatcaatatcgatgccattaatacattgcgggccattgtccagattagctatgcagacggcaccagacccgctatcggcagcatgattttggatgaacaacaacgagtggtcgcttttaccaatgatcagggcgcagccttcattgaacatcagaaagcacaccacgcgaagaacgatgcgtcctcacaacgcttcagcatgaaaaattcgtcgggacaggcatgttatttcacaattgctgcagacacctcttcccgcaatcgtgccggtatcagccactccgaagccgtgtgtcgctaa

SEQ ID NO: 429764 - DNA, 711 bp, Serratia marcescens
atgaaaggtctcatccattatctcaccgcaatatttatattgcttattccattttatggtcaagcaaccattaaactggaaaaaataagcctcttggtcaatcaagagaaaggagagacaacggtaagagtcgataatatcggtaattatcctgtgttgctattctcatccgttgttaaaaatgcattaagcaagcaaggagaagatcccttattcattctttctccgccagccgcgcgtattgatccgggtaaatctcagctggtacgcgtcatgcttgccgatccctcgggacttgataaaacccgtcagcaaatgcgccatatctatttccaggaaattcccgatatgggagaaaaaagcaaccagcttaaggtgaatactcggcatcgggtcgtcgctatcgccacaccctccgcgctggtggaaaacaaatctccctggcaaaccttgcattggcaacaaaatgggcattctatacaagtcaaaaatctcagcccttacgttgtcaggttagcccctaccctcaccgtacaacccagtaaccagcagtttgttttagaacaaccttatttgctgcctgggcaaacgatcggtacacgtaagagcgataggcttaccagccccccctcccgtttgcgcttcacgccaatcagtaacacggggcgcgccatacccgatatcacggtcaaccttgccccaatccagtga

SEQ ID NO: 429765 - DNA, 690 bp, Serratia marcescens
atgaagaaatatttatttttagccctgctacctctgtcgtgcacgagcgtactggccgcaaaaacagccagtacgtctgtaaatttctccggagaaatttacaataacaccagctgcagtattgctgccaacaccaatagcattgatcttggccgccattccagcgaagcttttgataaagtaaatcctgtccagttggaaggcaacggcatgggcagcatcccgttcaccgtaaactgcacagcaccgaccaacatgggtattgaagttaccagcgccagcggcgatgccgattatcaatatatggacagaagcttcaccgcatcgctggcaaaagacgccagcaataaagatatcgccgtgctgggccttgcactgtcagatatcgctatggatggtgaaaccgtgcgtgcggcgctgattcctgaaggcgatgatattttcgatttaaccaatgtaactgacggtgcagatcacgaacaggctatgttctctgttgcctcaggtaatcgctttgcggtcacatcagatgctaattacgacaacatggcgatcggccagaatctgagcggcacattcaactaccgttcattccttaccccgcttagctacattgatgataaaagcatccaaatgcaagatagcattgcattgcaagcttctgtgaatctttcggttcactacctgtaa

SEQ ID NO: 429766 - DNA, 1122 bp, Serratia marcescens
atggttcttttgctgttagcggcgagcggggccgtttgcgccgccgatgacggcattcccgcgctgttgaagtttgccgaacaacggcaggcaccaccggccgcgcccagggaagaaaccgtgcgtaaatcggcgcccgcaccggtcaccaaaccggccaccaaaccggccgccatcgtcggggcagacagcgttcgtttaacgtcgctgaagcagtctttgcaacaacaggcggagaaaatccgtcagttggagcggcagttggcggcggctcaggccgcggcggcggcgaaacgggagcgggtcgtcgtcgatattcggccgctggccgatgccctgaagggattgcggcaagccgttgcgccggtgccagaggtgggcgcattggccgcttcgctcacgcgggccgaacagcgcagcgcaagtttggcggcgcaactggcacagcagcagcagcgggtagagaccttgctggccgaacggcagcaggcggccaagccacccgtgctggccagtgaggcggacaagctggcatatgccgccggcgtgtcgctcgggcgcgacattctgcatctgcagcaggagaaccggcgcgcggggctggaggcggagagtccgctgttgttggcgggcatcgccgataccctggccgggcggttgcggctggatgaggccgccatcgacagcgcgctgcgcacggcgcatcagcgcttgcagcaggcgcagcagacgcaggctccgcctctggacggtaaagactatctggccgcttttacccgtcaggagggcgtcaagcaggatgcgctcggtttctactaccgggtggactatgccggcagcggggcgatcggcgccgacgatcgggtagatatcgtggtgcgcgaaagcctgaccgacgggcgggtggtcaaagacatggagctggcggggacggtgatctcgcagccgttgacgcgctatccgccgctgtttcgcgccgctatcgagaagctgcagcgccacggctcgatcacgctggtggtgccgccggcgctggcgtacggcaaacagggcagcccgccggcgatccccccgaatgccaccatgatttacaccctgcgcatcgctgacgtgcagccgtga

SEQ ID NO: 429767 - DNA, 2193 bp, Serratia marcescens
atgaaaacgcacacctttgccccagcggctccgaataacgcgctcagcgccggcattgtgcaggcgatcggctgggtggacgccacacgccgacaatccgcccgcctggagcgggaagccgatcgcctgacgctgcgtctgcgcggttgccataaccgcgccgtccagttggaaaacacccggcctgcgcaggtcgccatcggtttgtatggccacaacgccgccgccaaggcccatctgctggcggcgctggcgcctggcgccaaacgcttcaacgcggacctgtcgctcgcggtgcgctactgcacggcggccgaaacggggcccgccgattatccgatcgccctcgcgctgctcaacgaagcgcagtggttggccatcacgatcgacgccgccgcgatgcgcggctttcgcccggactgggacgcccgcgccatcgccggccatttgcaagcgttggcgcgccaccgccaagccgtcgccctcgatggcctcgatggcaacgccgtgctggcgctgtgggacaaccaacgccgccacggcggcaaagagcaacccacgctcgacaggcacttctggccgcaggccgtgacgctggcgccgcagctgagcatcgacgatcgcgcgcgcctgtttgcaccgctgtggggagaggaggcgacgttgacggcgcgttatcgccagttggcgcacgcgctgcataccctcggcggcagccgacaggttcatgccccgcgccgcgcgttggcgctgctgaccgcaaacgccgtaccggaaaacgccacgatcgccgtcatgaccgaaaacggcgatgaacgggagatcgcactgagcgatctggcctggctgaccgccgaagtgaccaccgttctgccgcagacggcgcaggcgggcctgcccgccgaggtggcgctgatcgacctgcccggcagccgcagctgtccgcaggcggagccggcgcagcgtctgcaacaggcaaagcgcgcccatttattgacccgctgctcggacggcctgcacgccaatctgttgctggtaaccgatgccgccgccacgccgcaggacgccgcgcgcgtcggccaggcgctcggcgattgggtcaaccacacccagggggaaaccccggcgctgcgccaacgccgcaagcccggtttaatctgggcaatcacgccgttcgactcgcgtcaggaaggcaaagcgcggcccgacgacgccgtccagcgtcaggtcggcgagcccggcgacagctgggccacgctgctggcgctggatgaacaggactgtcgccgcatggtgaactacctggccgctcaggcgcgtccggcccacaagcaagcgcgcctgctcgaacagcgtgaggaattgcagcgcgagctgacggaaagcctgctcggcaactggctcaccgccgccgatccgcacgcgacgcagcaacgcgcgcaacagctgctgcgcgcactacaggcacaggccggccgccacggcgaactgctggagcggttgctaccccagcgcgatacgctgcgccagctttatcagcaacagcagcacaccgcaccggctccgacgatggcgccttcaccgttcgggctggatatcgatctgttcggcgagcaagaccctgcggcgcccggcgagcagcccgcatcgccttttgccgcacggatcttcgcagactgggtcaatcatctgcgtgcgctgccggacagccgccggttgctggatctgctcggcgtcgagaaaccacacctggaattgctggtcgatgcgctgatcggcgccgcctgccgcctgcagctcgacgacgaactggagcgtgcactgtgcgccgggggcctgccggaacagggtgaagatcggcagatcagtcaggcgctggcgctactgggcgacttcgtcgcctggctcggcttcccgcggcgcgatgtggcaacgcgccccgaaagccgcgtcaatcccggccagccgatctttaccccgccgccgcagccggcggtggattggagcggccagcagcggctaacccggctggcgccgacgccgaccaagaataccgcgttttatatctatgactggctgatcggcctgcaaaccctgctggcggagaatgccgcgcaggcgcagcccgcgctggcagacgagcagcgcgccgacctggcggcgatcgtcgccaccctgcgcgctgtgccgtag

SEQ ID NO: 429768 - DNA, 900 bp, Serratia marcescens
atgatcgatttacgtcagttgaaatactttgtcgcggtggcggaagaggagcacgtcggccgcgccgccgaacggctgcacatttcccagtccccactgagcaggcagatttcccagcttgaggaacgcctcgggttgatgctgtttgagcgcaatcagcagcgcatccgcctgacggccgacggccagacgtttctggccgaaacccgcgcgctattgacgcacgccaaccggcttgagtcgctcgggcgccgcctgggacggggggaagacggcgggctgtgcatcggctatatcgaaaatgcgatgcactccggcgttttgtcgaacgcattgcgggcgctgcgggtgtcccggccggatgtgcacatcgtgctttacagccagccttcttccatgcagctcgaagggctgcggcagcgtagcctggacgtggcgctggtcaatacggcgccggatcgcgacgatcaggatttggactatacgcaggtgttggacgatcgcatgctgctggccctgccgcagacgcatccgctggctgaaagggagacgctgcagccggtggatctcaccgatcaggcctggatctcggtgatccacaaagaggatgcccattcgcgcgacgacttcgtggcggcctgtgtgaaggccgggtttgatccggatattcggctggaagcgggcgagccgctgaccgcgctggggctggtcgccgccgggttggggatgacgctgatccagcacagcctgcggcataacgcgccgcagggcgtggtgctgcgcgagctgccctggatgcaatacaccacgcagctgtgggcagtgtggcacaaggccaacctgcgcccgctggtcacccattttcgcgaagtgatgtcggccgggccggcctgccactga

SEQ ID NO: 429769 - DNA, 1011 bp, Serratia marcescens
atgagcatcaaaaatattttacccggcaagatcggtttgggcggcgcgccactcggcaatatgttccgcaacatcccgcaagaggacgtgcaagccaccgtcagcggcgcctgggatctgggcatccgctacttcgacaccgcgccgctctacggttccggcctgtcggaaatccgcatgggtgaagtgctgtcgcaatacccacgcgacgagtatgtgctgagcaccaaagtgggccgcatcatgctggacgaagaagaagacacctccgcccgcgatctgggtgagaaaggcggtttgttcgaacacggtttgaagaacaagatcgtcaacgactactccgccgacgccacgctgcgttccattgaagacagcctgaagcgcctgaaaaccgaccgtctggacatcgtctggatccacgatccggcccaggacttttacggcgacaactggattgagcagttcaacatcgctcgcaccggcgctttccgcgcgctgacccgtctgcgtgaagaaggggtgatcaaggcctggggcctcggcgtcaaccgcgtcgagccttgcgaattggcgctgggcctgagcgaaacgcagccggacgccttcctgctggccggccgttacagcctgctggatcatgaacgcgccctgcagcgtttgatgccggaagccctggcgagcaacgtcgacatcgtcgtcggcggcccttacaactctggcgtgctggccggcggcgagcactacgaataccagaaagcgtccccggcggtgctggcaaaggtagcgcaaatcaaggcgatcgccgctcgcttccaggtcgacgtcaaagccgccgcgctgcagttctcgctggctaacccggcggtcgccgccgtgatccccggttcgagccgccctggccgcatggccgaagatctggctgcgctggacgccgttatcccggctgaattctgggccgaaatgcgccgtcagaaactggtggccgacaacgcgccgctgccgattcgttaa

SEQ ID NO: 429770 - DNA, 798 bp, Serratia marcescens
atgaaactggatctatcaggcaaagtcgccgtcgtcagcggctccacctccggcatcggcctcggcatcgcgcgcgggctcgccaaaacgggcgccaccgtcgtgatcgtcggccgtcagaaaaccggggtcgataacgctatcgccgacatcagcgccaacgtgcccggcgcgcaggtgcgcggcgtggtcgcggatctcgggacggaacaaggggctgctaccctgttcgccgcggaaccgaaagccgacgtgctgatcaacaacctgggcattttcaacgataaagacttctttaccgtgcccgacagcgagtggatgcacttctataacgtcaacgtcctctcgggcgtgcgtctggcgcgccactatgcgcagagcatgaccgagcagggatggggacgcattattttcgtgtcgtccgaatccggcgtcgccatcccggcggacatgatcaactacggcgtcaccaaaagcgccaacctggcggtgtctcacggcctggcgaaacgcctcgccggcaccggtgtgacggtcaacgccatcctgccggggccaacctttaccgaaggcctgcaagaaatgctggcggatgcggcggccaaatccgggcgcagcgcacgcgatcaggccgacgagttcgttaaaaccgaacgcccaagctccattattcagcgcgcggcggacgtcgatgaagtggccaacctggccgtttacctcgcctctccgctgtcttcggccaccaccggcgcggcgctacgcgttgacggtggcgtcgtagatacgctggcaatgtaa

SEQ ID NO: 429771 - DNA, 417 bp, Serratia marcescens
atggctactacatccgtctctatggacatcccggcatctgccgacaccgtatggcaactgatcggcggcttcgacgccttgcctgactggctgccgttcatcccaaaaagcgtcgtttctgaaggcggccgcgtgcgtaccttaaccaccgccgacggcggcaccgtcatcgagcggctggaagcgttcgacaatcgtcaacgcagctacagctactccatcatgcaagcgccgttcccggtggtgaattacctgtccaccctgtcagtgcacgccaccgacgacgccaacgtggcgcgcgtggaatggtcgggcagcttcacgccggtcaacatcagcgacgacgaggccatcgccctgttcagcggcatctaccagggcggcctggatgcgctgagcgacaacttccctcgttaa

SEQ ID NO: 429772 - DNA, 411 bp, Serratia marcescens
gtgcgccccttcaacttgcaacggctggatcatgtggttctgcgcgtgcgcgatatgcagaacagcctgcgtttttatacccagatcgtcggctgtgatatcgccaaacagcggccggatttggggctggtgcacctgcgcgccggtgcctccatgatcgacctggtggacgtcaacggcgtgctggggaaaaaaggcggcgaagcgcccgatcctcataggcaaaatgtcgatcacgtctgcctgcgcatcgatccgttcaacgaagaggcgttgttgacctatctgcgatcgcaggggatcggcgttgatcccgccgaatcgcgctatggggcggaaggcgacgggccgtccatttatttcagcgatccggacggtaatcgcgtggaattgaaagggccggcgggatga

SEQ ID NO: 429773 - DNA, 237 bp, Serratia marcescens
atgagaaaaccgatcgcctcggtgatttttgtcctggtattcgctgtcttgccgaacatcattccctctcggctgctgctgacaccggacatggcgtgggaaatggttcacaagtctaatgaatggggtctcggcgatccgcaagcgctttcgaccgcctacctgctaatgctttatgcagcagcagcggcggtcgcggggttgtgtctgcgttttatgccaaaaaaatcggcctaa

SEQ ID NO: 429774 - DNA, 1077 bp, Serratia marcescens
atgaaaacaacccttcccttttggtcagttgatgcatttttgtactgggtcacgcctcgcagatatacagctgaatggtcttcagagctcatgtcacgcgtttctggttttttagatgcatacataatgtttgacactgtcattattccagaaagatataaagaggaaggtatattaaaaaaacttgatcccaaccaatctatatttgaatatgttaaatcaaatgctctcataaactccgatgatctgtgcaatggactgacaatagatttatcacttaatattcctgacataaactctttaaaaaaagatgattacttatggttttctcaacatactggatattgcagtccagaagattttgatgaaatggtaagtgaaaatttcatgtcattttcattgttaaggctgtggcagttgtctttaattaatgaaattactgaacttacagagtgttgtgcgatcctcccattgtcacttcgtgacatagatctatttcaaagaaaagaactaccttttcacttaaataaaattaacgaactgaatgtccattatcaatcgatgataaaaactgtgtcagtagctgtcggtgaacagtttaatgattacctagaaaatattccgccatttctatcattagtcatcgatcaatcattaagccaagaacattcaatcgaggtcattgccaaaattagagaggattataaggaattacgatctagcggatcgttatacagctcagagataattctcagcaagggacttaggaataagaaagaaataattgacgagtggaatgaatcatgggataaattgcttaagagtagttttaaaaaaccttctttgttcaaacgaaagctttctttaggtgatatttcaaaggctgtagtcacgccacaaaaagcaggactttcaagtataatccagctttttctagagcatattgaagaatactcttcctataaacggtttaggatatactgtgatttatatactgaactggatagcattacgttttcaaaaaataaattagaaaaaacattctctgtcaacctaaaaaacaagttatcaatctaa

SEQ ID NO: 429775 - DNA, 873 bp, Serratia marcescens
gtgcaattcagtgacataataaaaatggtgcaagacatttggtcattttcctggccccctttggtaatttgtggccttgcatattttatggctcgtttctttcaccctgccggtaccaccagttcgttacagaaaattttatcaggaatgaaaaaatacggagataagcttgaaagtactcgcacgatccttgaaccatatggcctaacgaagttagtgcctactatttcaattattatgctcgttagtggcatgtttcttctaaacgggccgattactagccttgtcagcaacattcctccatatgtttcttataaccccgctttacttgccactaaggcaatgtcagaagctcagcaactcgcgctaattcgaaagtacccaatggcacaaagtgttgtcgaggcatactacctcgcgctcagaagtgctgaattggaatcgaaaataaaaccagactacgaaggattaagtctatggaaccaagcgcaagaccttctcaagttcgcactggtttttgccactatcatgcttatcgttagtctcaaggcgaagtttccccttggtaaacaaattacaaaatatttattggttttagttgtgcttatgttcctatggacaatttccttagctggtcttctctttcaacaagaacgagtcattaatgaggaatcagatatggtggttattcctttaataaaggatgcaagtcccttacttacattgcctattacagaaaaagaaatggatgaattaaaccaagtatctcatgagatgagccagaattggtggcaggtctatgttatagatgagtatcgctgggagtgggtgaaaaagacattctatcctaatagtgaacctaaatggcattga

SEQ ID NO: 429776 - DNA, 327 bp, Serratia marcescens
atgaacaatattccctctatgccgcagttagggatttatgtatcaaaaatagatcccacccttcgcatcactgtaaccgacgttgatattgttgatgactctcctgatgatgaattgttttatctagtccgttggatcgagggagaagatgaaagtgatatgtctgcgatggaatttgagctagacccagtagagcggcaggctttcgttgagtctgagcaattagtgtttgagcgcgatccatacatggattcagcccccgaaaattcaaacgttgcgaaaattcgggatttactcatgaagactaaacagaatgatcgttcgtaa

SEQ ID NO: 429777 - DNA, 375 bp, Serratia marcescens
atgataaagggtatcagcaatacggccgagacagcgcgcgggctggtgggaacgatgaaagtgcgcgccgatcttaactcagcggccttcagcgagatgttgggggcagccgacggcaaggtgcggcaaaacaaggcggatccgctgtcgcgcatcaccgcgcagacggtgcaaaacatgacggcgctgtttgccttcgcgccgaaagcggcggccactcacaccgcggcggccggtacgctctccttcgagcagcgggtgacgctgacgcaaagcgccgagctgctgcaaacgcggacaaactatctgcggatggcgctgcaattgcacaatccgggcaaagcgttcagcgcgccggcgttgctcaagctgtga

SEQ ID NO: 429778 - DNA, 1629 bp, Serratia marcescens
atggtctggactacgcacaccgtttttaaccaacccaagccgctgggcaacagcaacctgtttctctccgatacgccgctgcgcgaagcgttgcagcgtgaacaaggcggttgggacgccgaggtattggcctcgctgggccagcagctcggtacccaggagtcgctggagctggggcggctggctaacgccaacccgccggaactgttgcgctacgacgccactggccagcggctggacgacgttcgctttcaccccgcctggcatattctgatgcagggcctgatcgccaatcgggtgcacaacctgccctggcaggaggatgcgcgcatcggttccttcgtggcgcgcgccgcgcgctttatgctgcatgcgcaggtcgaggccggcacgctgtgcccggtgaccatgaccttcggcgccacgccgctgttgctgcaggctttaccggccgagtttcgctcctggctgacgccgctgctgtcggaccgttatgacgctcacctgctgccgggcgggcaaaagcgcggcctgctgatcggcatgggcatgacggagaaacagggcggctccgatgtcttgagcaataccaccaccgccacgccgctcggcgcgcgcgggccgggcgaagcctaccggctggtggggcacaagtggttcttctcggtgccgcagagcgatgcgcacctggtgctggcgcaggccgaaggcgggctgtcctgcttcttcctgccgcgcattttgccggacggcagccgcaacgccattcgccttgagcggttgaaagacaagctgggcaaccgctccaacgccagcagcgaggtggagtttcaggatgccacggcctggctgctgggcgatgagggcgacggcgtgcggcatatcctgaagatgggcggcctgacccgtttcgactgttcgttgggcagccacggcctgatgcgccgcgggctgtcggtggcgctgtatcatgcgctgcagcggcaggcgttcggcaagctgttgatagaacaaccgctgatgcgccaggtcttggcgcgcatggcgctgcggctggaagggcataccgcgttgctgttccggctggctcgcgcctgggaaagccgcagcaatgaaggcgaactgatctacagccgtctgctgacgccggcggccaaatacagcatttgccgccagggcatgccgttcatcgccgaggcgatggaggtgctgggcggcatcggttactgcgaggagagtgaactgccgcgcctgtaccgtgaaatgccggtgaacagcatctgggagggctctggcaacatcatgtgtctggacgtgttgcgcagcctgcacaaactgccgggcgcgctcgagatgttgcagttcgagctgcagccggtgcgcggccagaatcggttgttcgatcgcgcctggcggcagtggcagcagcgtgcccggcaaccgcgtgaagagatggggcggctgctgacccagcagctgttcgacctgtgctgcgccgcgcagctgctgcagcacgccagcccgcagatcgccgacgcctggtgtcatctgacgctggatcaccgtggcgagagcctgctgtcggtcgaggtgtgcgaactgctgctgagtcgcgccatcggcggttag

SEQ ID NO: 429779 - DNA, 630 bp, Serratia marcescens
atgcacttccatatattggttgagggtgattctgaagttagattccttagcaaagtgatgcctttcttgcatggtgacaaaggcgttactcattcttggaacatacataaacatcgcggagttgggaaaatacctgacaacttaaatgcaactccaaataaaaaagacaatacacttcttcataatctacctgcaaaactaagagcttatgaaaatatcgcaaacccgattaatcgggttatagttttaattgatatagatagtaatgtaaaatccgacttactcacatcgttaaacaatttaaaaaacacctgcgcacccaatacagatgttagatttgttctcgcttgcgaagaactcgaagcttggtacttaggtgaccggaatgccttgattcaatacaaacccagcatcaacttagccatattgaacacttatgttcaagatagtatttgtggtacatgggagactttaatgcgagccgacgaaccgtcgttattaagacctaaaacgccttactggaagtcactgcaaaagaaagtggagtggtcgaaaaaaataacaccacatatggacttttcaaacaatgcctcaccttcattcaactatctaattaatgaacttagttag

SEQ ID NO: 429780 - DNA, 1251 bp, Serratia marcescens
atggcacttattgaaggtttgagaattaaaaattttaggactttgagagacgttacattaggaaaaacgttaagtaataaaacacaaaaaccgctatcaccacttactgcagttataggtcgaaatggtagtggtaaaagttcattatttgatgcctttggcttcttagccgattgtttaacgtttggagttgatgatgcctgccataggaatgggagaggtggatttagcaaactaaaatcctcaggctctgatggggatatggagttcgaggtctactatagagaatcaacctctgaacgcccaatcacgtacgaattatgcatcggtcttgatgcactcatgcggcctatcgttaaacgagaaagattaagacaaaggagaagaaaacagacacatggatggcctttttcatttcttgaattaagtaatggtgttggtcgcgtatggtcaggtgatgcattggcatcaactacagacattgaaaactcattaaaagaggaaagcaaccaaactattagcgttgaattagacaatccccaacaattaggaattgctacgttagggaatttaaaagaacacccacgcattactaaatttaggcgatttattgagggttggtatctatcatactttacccccgacagagcaagggacttacctcgttccgggccacaaaagcatctaaatagaattggtgacaatctcgggaattacgttcaatatatggagaatgcacacccaagaatattcgctcaagttttgaatgagacagcaaaaaaaatacccggaataaataaaatagagacagaagcatctccagatggaaggctactattaaagttttggaacgaaggtttcagtgagccattctatgctcaacaagtatcagatggaacattgaagctatttgcttacctgttattattgcaggatccagatccagcaccattcatttgcatagaagagcccgagaacggtttgtatcataagttgttacagtcgctcgctaatgagatacgtagccatgcatcaggtaagaaaaactcatcgcaagtctttataacaacgcatcaaccatattttgtagatgcattagaaccagaagaagtttggatactggagaaaaatacagatggtttttctgatttaagaagggcaacagattatcctgaggttgttgccatgtatcaagaaggaatccctttaggtagcctttggtatagtgaccatattgatgaaaggatctaa

SEQ ID NO: 429781 - DNA, 255 bp, Serratia marcescens
atgatgcgctgtccgttgtgcactcatgcatcctatactcgcaccagtcgctatatcacggagcggacgaaagaagcctattaccaatgtcaaagcctgacctgttcttgcacattcaagacggtggaaagcgtcgataaaatcctgtgccagccgatacaggcgcaaccggtcgatgagaacgccttgccaccgccggagaaaaggacgttgaaccgctatcgccgctacaacagcaatcataccctgcactaa

SEQ ID NO: 429782 - DNA, 909 bp, Serratia marcescens
atgtcacaacattttacaaagattttactccatccccgttactggattacctggtttgggctaggtttgctctggattatcgtccaacttccctatccggcactgcatttattaggttctactctggggaggtcatccagaccttttcttaaaaggcgcaggcgcattgccgacaaaaatatagagctctgtttcccggaaatgacaacaaaagcacgggatcagttggtcagaaaaaattttgtttccttggggttagggttgatggaaactggtatggcttggttttggagtgatgccagggtgaggaaatggtttgaggttgaaggtattgaaaatctaacgaaagctacccgaggcgtgatggttttaggcgttcacttcatgtcccttgaattatgcggaagagttatgggggtatgccatccaatgatggctacttaccgtccacacaataatctgcttatggaatggatacaaactaaaggtcgaatgcgctcaaacaaagcaatgattaatcgacgcaatctacttgggtttgtccgggcactgaaagccggcgaggctgtttggtttgcacctgatcaggattatgggcctgagggtagtgtttttgcgcctttcttctgcgttaaaaatgcagccactacgaacggaacttttgttctatcgaaactcgcaagagcagacttgattactttgagcatgatccgacttagtaataaaaagggctatcgtatgtttatcagttctccgcttttagattatcccaaaggtgatgagattatagcagcaaactacataaataaaattatcgaaaaggaaatctgccgagcccccgaacaatatctatggatgcatcgtaggtttaagactcggcctgaaggagagctttctgtttataaatga

SEQ ID NO: 429783 - DNA, 234 bp, Serratia marcescens
atgaaatcagaagacacccttgactggtaccctgcacagttacccccagtgaaaattatccttggtgaggcggtgctggccgtgggaaaacaaggcaggccgattaacacccgaacgttgcttgaatacctccaggtaatgcaactcaaacagaaaagacgagatgataaagtcgtaatgcaaaccgcaatcgaagttctcagggacaatcagcgcattaacggcaggctttaa

SEQ ID NO: 429784 - DNA, 8583 bp, Serratia marcescens
atgaaaatgaaccccagggaatggtttagccactcccgaattctggcaaaaaaaaccgaacgatcgccgcttgccgctaacgatcctgcaggtgagggggcggtacgatcagagttgttttcaacatctcagatggaacgttacggccaaaagttggcacgtgcccataaattatctccagataagcttccctactaccttctcaaaaggctcggcaacaatgaggccgctatcacgcagaactgctacgagcttaactcaggtataaaagcgagcattatgcctgccggggagtggttgttggataattactaccttattgaggagcaaattcgcatcgttcgccaacacttgccgaaaagcttcggcaaaggtctcccatccctaatatcgcctcagaattgtccgcgaatttatgatattgcatcggaagccattgcgcacggcgatggccgctgggacactgccagcctgaccagctatatcacggcctatcaacaggtcaccccactgacgttgggcgaagtttgggccctaccgggcatgctgcgcctggctctgattgaaaatcttcgccgcatcagcatggaagtcgtaaaggctcagcgggaacgaaacctggcagatgcgtggataacaagaattttcgaatgtgcagagaatgctcccgctgacttaatcatggtagtcgccgatatggcgcgctcacgtcctccgttgagcagtgcatttgtcgcggagttagtacggcgtctgcaggggcatggcaatgcggtgtcgttgcctctgacctgggttgaccagtgcctggcggaacaggggatcacaaccgaggcactgattcatcgcttcaatcaacagctcgctgccagtcagctttcagtcagtaacagcatcgctgggttgcgtttactgagcgaaacgaactgggctgatttcgctgaggcgataagcaccgttgaacaggtattacgccgtgatcctgccggtatctatacccaaatgcactttgatactcgggatcattaccgccacgtcattgagattctggccagagatagcggcctcagtgagcctgaggtagccagccggttactggctcttaccagggagaacgctcccgacacatcgaagtcccacattggctattatctggtaggcgaaggtcgagaggagttggaaattcatctgctggctgacacctcaacgtttatacgcctgcggcacagtttcaatagaatatccctgctgtcatggcttggcagcctgagtttgttgaccacagcaacggtggccggggtattgcatgaaactgcgcagcaaggaacgtattggctgccgatcgttgtggcattgcctcttgtcattgctgttagccaattagcaagtgatctgctcagcgatgccaccactcgttttcgaatcccccgcccattgccgaggatggatttttcagccggtattcccgtagatagtgcagccatgatcgtcatcccttgcatgctgacaagtcacgaaagcttcagcaaactcctcaccagtcttgaagtatgttggctggggaatcaaaacgaaaacatctgtttcgctctgctcaccgattttgccgatgcagaaaataaacaagcgtctgcagacagagccctcctcagacaggcgatcgccgatatgcaggcgcttaaccgccgctatccatcccgacaccctcgtttttatctgctgcaccggcagcctgaatggaacccttctcagcggacctggatgggttatgaacgcaagcggggcaaactggcgttgttgaacgactggctgcgccatcctgcggcgcaatttgtcagcgttgcagacatgcctgctcatcttttaccgggctatataaaatatgtcattacgctggacagcgacacggtgctgccacgcgatacggtacacaagctggtcgcgacgatggcgcatccgttgaataagccagagtatgatccggtacgccagagggtggtcaaaggattcggcattctacagcccggactggcggaggcgatgccgcataatggccaggggcgatacgcggccatgcgcagcagcgcacctggcaataacccctattccatgatgtcttccgatatctaccaggatctctttggggaaggatcgttcgtgggcaaggggatttatgatgtcgatacctttgttcaagccacggccaacgtttgtcctgaaaatctggttctcagccatgatttactggaagggtgctacgcgcgttcggggctgctgagtgaagttttactctacgaacagtaccccaataattacctttcggatgttgcacgccgctcacgctggatccggggtgactggcaactgctgaactggctgaaactacgcgtcagaaaagcggatggatgccgggataagaatcctctatccgcactatcttactggaaactgtttgataatttgcgccgcagtctcgtcgccccctctttactgatattgctgttcttgaccctgctttgggtgcctaatccgatttattggcttggcgtgctggcgctgatatggctgttacctgcaatgctgagcatcctctatgacctgctgcataagccccttcgccgccacctgaaaccgcatttgttgctggtagcttcaggggcgctgaagcgtctgtcaggcatcgggcttaattttgcgatactgccgcacgaagccggatattcattgtatgcgattatcgtgacgctatggcgtctgggcgttagtcagcgcaatctcagccagtgggtcagccatcgccctgacgacaatcaggccagaacttcggttggccgtttctaccaggctatgtggctgaacgtcgttggcggagtggcactcaccattctgaccgtacatattgcgccgcagctgctggcgatcgctttgccggtcagtgtgttatggtgcctggcccccctgctgatgaaagggttgagccgccaacccgttcgtaaggccttttcgccgaaccaagagcaaaaacagctgctacgccagacaagccgtgaaatctgggcattttttgagacctttgccacggcgcaagagaactggcttccgcctgacaactatcaggaaataccgcaaccgacagtggctcaccgtacttctcctaccaatattggcctttccttgctggccaatctgacggcctgggactttggttatctttccggcggggaggtattgcagcgcgtgtcgctaacgcttgatacgctggacaaaatggaacactaccggggacatctctataactggtatgacacccgtacgctggcaccactcagcccacgctacgtttcaagtgtcgacagtggcaatatggcgggtcatttactgacattgcgtgaagggctatctgccatgcgccatcagcctgttttaaacatcgaacagatgctggccgggctgaacgatacgctggatattctggagaaacattggggctcaagcgcgcctaccgctttgcggctactgcgcaaacactgccaaagtgcggtgtcactgtctccgccagcgcttttcagcgaactgaaaaaaatgcgcactcagtgcaaccatctgacaacgcaatgtcatcaagactccccccttcagggacgctggacaaaacatctggaaaatcagctggtgcaacttggccatgaatggtcgctactactcgactggttgccagcgtcctggaacaaacagacgctgccgacgctgaactggttggcccgtgcgacatttaccggagaaggaacgcctccggcgtccgtgacggcgcaagctcaaatgcggctgaaaattatcgccgagcttgaacaacggctgaatgaccatgctcggatggatttcgcctttctgtacagtgaggcaaccagtctgctcagtgtcggttacaactgtgacacgaatacgtcagacaaaagccattacgatcttttcccatctgaaatccgactgaccagtttcctcgccattgcggcgaatcagttgccactcaaaagctggtacgcgctggggaggttgttcaccaccatagacaatgaaactgccctgatgtcatggagcggttcgatgtttgaatacctgatgcctaatctggtgatgcccatgtggccaggcagtctgcttgatgagatgagccagtcggcggtgatgcgccagatacactggggtaaagagcgtggggtgccttggggggtatcagagtctggctatcatgcttttgatgttcagcaaaattatcagtatcaggcatttggcgtgccagggctcggtctgcgtcggggacttgccgatgatatggtggttgccccttacgccaccctgctggcgctgatggtctcaccgcaaaaagcgtgtgaaaacctgttccgattgcaaaaaaatggcgcacagggtgagtatggcttctatgaagcgctggattataccccttcacgcctcgcaaccggtcaactgtatgcggtagtgcaatcctggatggcacatcatcaaggcatggcatttcaggcgctcgcccacgtgctgcttgacgcccccatgactgagcgatttatgtccagcacgctcttccagtcagcgagtttgttgttacaggagcgcgtgccggatgcggtcgatctctacagcccgcgccgtcattttgaatctcatgaaggaagggtcaaacccgctcgctatgaacctcgtattttcaacggggtggacaccccggttccggaaattcagctgttgtccaacagccattatcatctgatgttgacggctggcgggggaggctacagtcgctggaataatattgccctaacgcgctggcgaagtgataccacccgggataactggggaacgttctgctatatccgcgatatgcagacgggtgagatatggagcaatacctggcaaccgacaggcaacgctatcgggctcgacgaagaagtgatatttaccgatgcgggggcggaattcaggcgcaccttcgggacgctcagcgtcaaaacccaggttgttgtctccccggaggatgatattgaactacgacggatcaccctggtgcaccggggccgccagccgcgctccctggaactgacaacctacgccgaagtggtactggcgtctgatgccagcgatctggcacacccagcgttcagcaatttgtttatccagaccgagcttgatcctgaacgtgacgctatcctctgccaccggcgcccgcgctcgccggatgagtcgagcccttgcctgtttcacatgatggtggtgcatggcggtcaccataagagcgtctcgtttgaaacagacagggcagagttccttggacgaggcagaagcccagccgatgctcgggccatcgaggaaggcggagcgctcagcaacacatcgggctcagtgttggatcctatactggcgatacgtcacgccatcatcctgcagcctgggcaaccggttacgattgatatcgtttatggcattagtgaaagccgccagcaaagcctggcattgctcgaaaaatatcgcgactatcctatcgctgaccgcgtgtttgaactggcgtggtcgcatagtctggtggtattacgtcagatgaacgccagtgaagatgatgccaccttgtttaatcgtcttgccagcgcagtactttatcccagtcaggagttgcgtgccgagggccaaaccatcagccataatcggcgtggtcagtccggcctgtggggctgggcaatctcaggtgatctgccgatagtgctgctcagcatttccagcgaggaaggcgtcgcctccgtcaccaccctgattcaggcacaccgatactggcggctgaaagggctggaggtggacttggtgatcttgaataacagcccagggggataccagcagggattgcaaaatcagattatggatttaatttatgccgggtcagaagccagtctgctggataaaacgggcggcctttttgtgcgtaatggcgagcacctcaccactgaggataagctgctgctgatgagcgtggcttgtctttacctcgatgaccgtgcgggtggaattaatgaacagcttaaccagcgtattcacaccccaaaacctccggccagaccgttgattccgcatattgtttcggagagtaaccaacataccgattgggcccccgataccagccagttgcgccatttcaatgggtacggcggattttctcatgacggccgggaatatcagattgtgctccgggaaaatgagtcaacgcccgccccttgggcaaatgtactggcgaatgcccgttttggcagtgtgatttcggatgcggggcaggcctatagctggtatgagaatgcccatgaattcaggttaacgccgtgggagaacgatcctgtgagcgatcgtagcggtgaggcgtattacctgcgtgatgaagagagtggtgagtgctggtcaccgacgattttacctacgcgcggacaaggggattatctgacacgccatggttttggctacagcgtatttgcccatcgggagagtggtatagacagtgagctgacggtatttgttgccgaagaggccccggttaaacttgcaatcctgacgctcagtaacaattcgggacgcactcgtaaactgtccgtcacgggctacgtggagtggacgctcggagagtcacgaactcgctccgcccctcatatcgtgacacatgctgccagtatccctggcggttgcggtgtgatggcaaataacttttatggtgacaacggtggcgagcgcactgcattttttgccgtcagcggtaattattgttcgttgatgggagatcgccgggagtttattggccgtaacggttcgttgcgcagcccatccaccatgaaactgcgcagactctcgggtaaaaccggcgccggcctcgatccctgtggagccgtccagtcagcggctacatttattgacggggaccagagaacgtttatttttgtccttggcgcggcagataatcatgcccaggctcaggagatgcttacccgctatctcaatgaggatgcggcccgcctggagctgaaccgcgttcaccactactggcaccatgtgctcgataaaatcgtggttaatacgcctgatacatctgtgaatttgctggtcaacggctggctgttataccagaccgtagcctgtcgccttatggctcgcagtggttactaccagtccggcggtgcatttggttttcgcgatcagttgcaggatacgctggcactgagtcatgccgatccgaaccgaatgcgcgaacagataatgctgtgcgcatcacggcaatttatcgaaggagatgtgcaacactggtggcaccctccacacggcagcggggttcgtacccgctgttctgatgactacctgtggcttccgcttgccgtttgccactatgtggaaacgacgggggatatgaatgtgctggagatgcgcataccgtatctggaaggtcgcctgctccagcccggtgaagagtctatctatgacacgccggtcgtcagcggcaccgaagagacattgtggttacactgcgtcaaagcgattcaacatggactgaggttcggtgagcatggcctgccgctgatgggggcaggtgactggaatgacgggatgaaccgggttggtatcgaaggcagaggtgaaagcgtctggctgggtttcttcctgtatgacattttgcagcggtttgccgcactggcagagcgcaggcaggatgacagtatcgccttgatgtgtcgttcgcaggccttacacctgcaaaacaatctcgaaacccacgcctgggatggcgaatggtaccggcgcggttattttgacgatggtactcccctgggatcgaaagcctcgcaggactgccggatagatgcgattgcgcagagctggtctgtattgtccggggctgccagcacgggacggtgcgcacaggccatgcaggcgctggataagcacctggtagataacgatggcgggttgataaggctgttaacaccaccattcgatggttatggacctaacccgggttacatccagggttatctgcccggcgtgcgggaaaatgggggtcagtatacacatggcgccatctgggccgttatggcatttgcacggatgggaaatgcagaacgcgcctggcaactctggtcaatgatcaacccgataaatcatacccttaatgcaggctcggtcgggatttataaggctgagccttatgtcatgagtgctgatgtctatagtgtcgctccccataccggacgagcgggatggagctggtataccggttccgcaggctgggcctaccgcttacttaccgaggaatttctgggtataaaacgctccggtgctatctttactgtccatgccagattgccggatgagtggccctctttttcgatgtcatatcaacatggtgaaagccagtatcagattatggtttcacgcggagagggagagtatcgtgtcacactggatggcatcgtactgcctggcgacaacattcctttgcgggatgatgggaaaaatcatacggttgaaattattcaaaactga

SEQ ID NO: 429785 - DNA, 150 bp, Serratia marcescens
atgatcggtaatgccaacatcaccccgccgaatccgcgccgctacctgtaccgcgcctacctgtcgtttatggccgcaagaggctatcagcacgtgatgaacctgacggcgttcggccaggcggtgccgcagacgctgaaaaaactatga

SEQ ID NO: 429786 - DNA, 1359 bp, Serratia marcescens
atggctaagtataaagcgtatccggagtataaggattctggggttgagtggttgggtgatattcctaggggctggactataagtagagtaaaatatttggctccatttcaggttggctggaccccgtcaactaagaatgatgccaatttcattggcgataatctatgggttaatatttctgatttaaaagaaaaatttatttcgtctacagcaaaatgtatctctgataaagctgcaaaagaagcatcaatggatatcacccctagggggtctctgctgtatagctttaagttgtcggttggtgcagtttcatttgcaggatgtgatctatatacaaatgaagctatcgcatcatttttaaatcatgctcacctgcctctctcatacttgtactatgcactcccgatatttattattgaaaatgcgtctactaatatctatggtgcaaagatattaaaccaagagcttataaaaaatgcatttttacttgcaccttcacatagtgaagcagaaaaagttgctaattttttggatcacgaaaccgcaaaaatcgataacctgatcgagaagcaacagcaactgattgaactgctgaaggaaaagcgtcaagcagtgattagccatgccgtcaccaaagggttaaaccctaatgtgcggatgaaagattctggtattgagtggttgggggaagttcccgagcattggcgagtcagtcgagttaagaattttgcaaaaattgaaagtggacatactcccagtaaaactaaatcagagtattgggtcaattgtatcatcccatgggtctcattgaatgactcaaagcagttaaaagatgttgattatattgatgatactacctataaaataagtgagctagggatggctaattcatctgctcatttgttacctgctcgtgctgttgtttttacacgtgatgcatcaataggactcagtgctataacaacaaaacctatggcggtatcgcaacatctgattgcttggctttgtaatgagagatttgtcgtccctgagttcctgcttcttgtgttttatgcaatggaaaaagaatttgagcgttatactttcggcgctacgataaaaacaataggtatggataatgttagagggctgagatcagcatttccaccaattgatgaacagcataaattgatagaatgggcatttaagaaattagaaaaaattaaattttccattaataaagtagaagatataatttcccttctccaagaacgccgcaccgcccttatctccgccgccgtcaccggtaaaattgacgtccgtgattgggttgcacctgatatgcaagacgctgaggagccacaggagaccaccgcatga

SEQ ID NO: 429787 - DNA, 2067 bp, Serratia marcescens
atggatatcgttgccgatattgaagcaggtaagctgactctcgatgaagtgatcggttctctggccgaatataaagactattcgcattcagagtgggatcgtcgttaccgtgaattcacggcgtcacttcagcaaacgccaacattttctgagcccgaaacggatgatctggttaaacggctttggtacgagcgcgacaacggtattgccagtatccggcagggcgttccatcgttggctgaattccaacaaagcctgccgttattcagagagctgaccgagcgtattcgtcgccagcctgatgaacaaacttaccaatatgtagaagccgctttgcagcaagccaaggagagcggactgctcaagcggatgtattggagcttgcggaatcgcgtctttgcggcgtttacaccggcaacctgcaccagtacggtggacgagaatgcatttaccaaagcggcgacgtttctgaatgatcgattttccctggcgctcacgcttaccggaaattggctgcaaaaaaaccatgaactgaagaatgcgattaacgcacggttaccagatgcggacccttactatgtcaacatggcaatctggcatctttacgaattgctgcgtgagcgcgatggcgagcagaagcaacaggaagtggctaaccatcttgccgtagaaagccataaagtcgtgagcccgcagataccacagcactcacctgttaacgctatctactttggtccaccgggcaccgggaagacttttgtcttgcagcaaaagatgaaggagtacaccacccaagcggcttccgctgactatgatgcttggttagattctcgtctcgaaacgctgaactggatgcaggtgactgcgttagttttgttagatcttaatagaaaagccaaagttcgtttgctgattgagcatccttggttccagcgtaaagctctactgaatggccgcagcagtaatctatcgcaaactgcgtgggcaacgctgcaatcctttaccgtgccagagtctactacggttgaatataaaggccgccgtgagcccgcgattttcaataaaacggcagagagtgagtggttcctggttaagccgcagctagaacaagtggaagaccttatctcgctttatgatgagttaaaacgaggcccacaaaccgcagaggcgattcagcgatttgccgcagtcaccttccaccaatcctatggttacgaagagtttattgaagggatgcgagcccgtgcagatgacaatgggaatatttcttaccccatagagccgggtattttcatgcggttatgccagcgggccaaggccgatccggcgcatcgctatgccatttttattgatgagatcaatcgtggcaatatctccaaaattttcggcgagctgatttctcttatagaaatcgacaagcgggctgggatgagcaatgcaatgagtttgcagctgtcttatagcggccaagtattcagcgttcctggcaacgtagacattattggtgcaatgaacaccgcggaccgttcgttagcgctgatggataccgcattgcgtcgccggttcgattttattgagatgatgccggatctttcattgctcagcggggcgaaagtaaagggcattgagcttgagtctttgttagagaagattaatagccgaattgaggcgctctacgatcgtgagcataccttagggcatgccttctttatgccagttaaaaaagcctgtgatgcgaaggatgaagacttggcatttaaacagctgaaggcggccttccagaagaagatcatccccttattgcaggaatacttctttgatgactggaacaaaatccgtttggtgctggcagataatcagaaacaaaacgacagcctccaattcgtgatggagcaaagcgacgatctggagattctttttggtgccgatcatggtttacggcgccacgatcagcaatcaaccgcctacgaactgaaagcgtttgagcatgaagtctgggatttgccacaggcttaccgtgcgatctatcaacctgaagaagccacccaggctgtacaaaatgggtaa

SEQ ID NO: 429788 - DNA, 1122 bp, Serratia marcescens
ttggcaactgcaatagaggcgttatcttcaaaagaatccgttttaaaagccatcgaagaatataaaaaaattggccgagatgaattcttaaaacaacataaaattaagcgatttaaaaaacacacccttctttataatggcgagaagtacgatatacgaggcattgccgctagagcatacagtgaacagcatggctatccgtttaagggaatcaacgccgatagcggaacggaaaaagctatccaatttctcaaagacctcggttttgagatcgtcgaaacaccgcatccttttgactatttaaccgaaggcaaactatacacacgcaaagcacttatcgagctctacggcgggcagctgcaaggcggtatctggaccccgcgggaattcccggtgatctttatcttcaccggagaaagcggtgaaacctacggctataaagatggtcagctagaggatggacgctacgcctatacaggagaaggccaaaaggggcctatgacctttattagaggtaataaggccatccgtgaccataaggaagatggcaaagacatcttcctatttgaggacaacaagaaagaaaaaggcgttcgctatcttggcatgttcgagtgcgattcttgggattacattcagtgcttagacctacaaaagaaggacatgcgacaggggatcgttttcaatttattccctgtatcgtctgctcaaagtattgtggataccgccatatcaacaaaaattggccagaagacggaaactctcaaagaattacgagtgaaggctataaagtcatcagcgatgtcaggtaaacgccaacaaggtgacagtaaacaatcttggttcaatcgcagtaaggacgtgaaaaattacgtactgcaacgtgccaatggcatctgtgaatcatgtgaacaaccagcaccattctaccgggagaacggcgagccctacctcgaaccccaccacaccaaacgcttagccgacgaaggccccgatcacccgcagtgggtgggcgccatctgcccgacttgccatcggcggattcatagtggggtggatgggaaagaggtgaataagaaactgatggtaaagttggagttgaaagaggctgcatataaatag

SEQ ID NO: 429789 - DNA, 732 bp, Serratia marcescens
atgatgttcgatcctttcggcgattttgatgccaacggctatttgcaaaatagcctgaagcttaaagatcccgatgaaataaaaaaggcagaacatctttcattcgaattaagcatcgaagacgccctcagctacctcgcccaaacgcagcccataggctacccgtctattctgaaagttcacgaaatcctgttctctggtttctatccttgggcgggaaaggacagaaacacgctggtcccccatcttgccgtcttcaaaggctcaaagaacgaaccgcgccatacggtcttcgaacgtcctgattctatccgcagagccgttgattatgcgctgcggcttgcagctgacgaacaacgcttcagggaacggccaggggaagtcatgggattattggctttcgcacatccctttctggacggcaacggccgcacaattttgttagtcttcatggagctcagcttccgtgccgggttcagcattaactgggcagaaacgaataagcatgactacctccaggctttgactgacgagataaacacccccgctcagagacatctcgaccaatatctgcaaccttttgtcatcgacatagtcagccgcgatgattggccaaacatcatcggtggaataaaaggactggatggtttagataaagaaaatatcgcctacggcagtatggacgatcctgaagtgcagaaaatttatatgacttaccgtggcgaacaataa

SEQ ID NO: 429790 - DNA, 264 bp, Serratia marcescens
atgacccaaagagccatcgttagcgttgccagctatgttcatcaactggctaaagaccatgaaattacacattcccgcgacggcatgagccgtatggcggtggccattaccggcctggctgacgacgctgtcgaattggatgaggtggaacaattactggttaaccttaaacgaaaaggtatcctgaccaaatctgaaattctcagccttcaggggcgttatttccgcgaacagagggccgttcgcaagaaattcaaagcatga

SEQ ID NO: 429791 - DNA, 1095 bp, Serratia marcescens
atgtcagcagcaaaccactcgcagcagccgattcagttcgcctactgggtgccgaacgtttccggcggcctggtgatcagcaatatcccgcagcgcaccggttgggacatcggttataaccgcaagctggcgcagatcgccgagcgcgccggtttcgactacgcgcttacccagatccgcttcaccgccggttacggcgcggaaaaccagcacgagtcggtgtcgttttcgcaggcgctgctggattctaccgagaagctgaaggtgatcgccgcgctgctgccggggccgtggaaccccacgctggcggccaaacagatcgccaccatcagccatctttccaacgcgcgcattgcggtgaacattgtcagcggctggttccgcggcgagttcaaggccatcggcgagccgtggctggatcatgaggagcgctacctgcgttcggaagagtttatccgctgcctgcgcggcatctggactgagcccagcttcaccttcgccggcgatttctaccgtttccgcgactactcgctgaagccgaagccgctggcgccgttgccggaaattttccagggcggcagctcacgcgcggcgcgcgacatggcggcgcgggtctcggactggtatttcaccaatggcaacagcgtggagggaattcgccggcaggtggaggatatccagagcaaggcgcaggccaatcaccatcgggtgaaggtgggggtgaacggtttcgtcatcgcccgcgagagcgaacaggcggcgcaggcggtgctgcaggagatcatcgatcatgccaacccggaggcggtgcagggcttcgggcacgaggtgaaaaacgccggggcggcctcgcccgagggcgagggcaactgggccaaatccaccttcgaagatttggtgcagtataacgacgggtttaaaaccaacctgatcggcacgccgcagcagatcgccgagcgcatcatcgcgttgaaagacgccggggtggatctgctgttgctggcatttctgcacttccaggaagaggtggagtacttcggccgcgaagtgatcccgctggtgcgcgaactggagcgccagcgggcggcggcctga

SEQ ID NO: 429792 - DNA, 402 bp, Serratia marcescens
atgacaagacgttatctctctttgctgtgcgtactgctactgaacggctgtcaatccactcagccctggtaccatccgttggatgtctcgctcaaagacaatcaaccttgctttgccgtgcctatcaacagcgttcgcagcggcgacaaactgcaaaaccggggagtgatcgtctcacgacaggaacaacagcaatggcatatcgtctggacctcaccagaaatcactccgttgcctgacctgaaaccggggcaatgcgtcacctatccgcaagtaaactgggcagcgggagaatactcagtcttgctcggcatctcgatgaataacgacacggaaaggcgtaaatacatgaaagaattcaacttaagaattaatcccaagggagaaatacagctacagtaa

SEQ ID NO: 429793 - DNA, 381 bp, Serratia marcescens
atgcgtacatttaaaactcgttggtttagcaagaaggctcaggcgcacggcattaccgataaggcattatgtcgggcggtacacgatgtacaacggggtttggctgtggatttaggcggtggtgtatttaaaaaacgtcttaatcacaatcgggaccgtgcgttggtattagcgaaaaacggtcggcattgggtgtatgtttttttgtttgccaagcaggtccaggccaatatctctggggcggaattgcaagcttttcgcaagttggcggtgcattttggcgcgttgagcgacgaaatgctccaatccttggtcgtaaagaacgaatggatggagatttgccatgaagaaggaaaaaacgtttcggagtccggcctttga

SEQ ID NO: 429794 - DNA, 363 bp, Serratia marcescens
atgatgaaaacaaatggcagcgtcgtgggatggaaaccggtctgcaaggcgatgccgctgaagatcgggcccagcgccaatccggtggtgaatgacagcgtcgcgatcaacgccgcatttttgccgccgtcgcgcggcccaaaccgcaccaacgcgatgttcgccgcgccggttagcgccccggtgcccaccccggccaacagccgcgccatcagcatcatggcaaaggtatcagcctgcgcgaacagcagggcgccgctcaacaccaccagcaatgccggcacgatcatgctgcgtaaatcctttactttgccggccagattgccgacgccgaacaaagagatcagcacgccggcggcatag

SEQ ID NO: 429795 - DNA, 876 bp, Serratia marcescens
atgactcccctgctgtttcacaaatatcacggcctgggcaacgactacctggtctgtcaccgttcggtcgccgatcgtctgagccaggaacagatccgcctgttgtgccacccgcattacggcatcggttccgacggcctgctgatcgacagcggtgacgccgtcaatcccaccctgcgcatcatcaacccggacggctccgaagcggagaaaagcggcaacggcctgcgtatctacgcgcgctatctgtttgacagcgagcgcgtagggcatcagccgtttctggtgcacaccgccggcggcgacgtgcgttgccaggtggcggaagacgcgcatcagataaccgtggagatggggcgcgccaatttcagcccggcggcgctgccggccttgatcgatctgccggaggcgctgaactatccgctgcccctgagggaggggacgttaagcgtttcgctggtgtcgatgggcaacccgcactgcgtggtgccggtggaaaaactggatctggcgcaggtgcatcggctgggaccgcagattgagcgccatccgctgttcccgaaacgcaccaatgtacaactggtggaagtggtcgatcgccagacgctgcgcatcggcatctgggagcgcggcgccggctttacccttgcctccggcagcagcagctgcgccgccgccagcgtgatgcgcaagttgggacgagtcggcgatcgggttagcgtgcggatgccgggcggcgaactgcagatcgccttcagcggcgattttcaggtcagcatgcgcgggccggtgcataaaatcgccaccctgacgctggacgaagactgctttgccggcggcgcggggctgtttacgggatccaccccagcagcctga

SEQ ID NO: 429796 - DNA, 231 bp, Serratia marcescens
atgggctacttttggcaaaagggacaatggcgtaggggggcgcgcgaaggcaggcgtaaatatgtaaccgatattgacgggatagcgattaagttgctgctatcaagttttcacgttttagtttttattaactatttttcaaatagatatttgctttgttttttgttatgtcaaattttgatgtttttactctcatttttattggttttttattttaattttaaatattaa

SEQ ID NO: 429797 - DNA, 780 bp, Serratia marcescens
atgccgcaacttgccgatattatcgatctgtccgcccatcccatcgacgacgccgcattccgcgcccgttgcaggcaaacgctggcgcgcgccggcgcgctggtgctgccgggatttctgcgccccgccgcgctggcgacggtaaggctggaaggtgccgaacagcaccacgcggcgttttacgccagcagcaaacacaacgtgtatctacggccgcaggacgacgcgctgccggccgaccatgcgcgcaaccggctggtggtgtcatccaagggctgcattaccgacgaggatatcccatcgcagtcgccgctgcgtgcgctgtacgatgctccggcgtttcgcgagtttctctgcgcggtgttggatgaggcgcagctgtatccctacgccgatcggctgtcgtcgatcaacctgcattacgcccacaccggtcaggaactgggctggcattttgacaactcctcattcgccatcacgctgctgatccagaaaccgcaggggggcggccgtttcgaatacgtggagaacctgcgcgacgccgaccgcggcgagatgaactatgccggggtcacgcaggtgctggacggtgagcgggcggtcaaacagctggcgatggaggagggggatttagtgctgtttcgcgggcgcaacgccatgcaccgggtgacgccgaccgaaggcgacaccacgcgcatgctggtggtgctggcctacaatgcgcagccggatgtcatgctgtcggaaagcgccagaatgacgttttacggccggttatag

SEQ ID NO: 429798 - DNA, 1434 bp, Serratia marcescens
atggcaaagactcgcattatcgctaccatcggccccgcttctcgccacataaacaccttggcagcgctggaaaaagctggcatgtccgtcgcccgattgaacggttcgcacaacacgctcgactggcatgcggaaaccatcgcgctgctgcgtaaaacgttgccggatacgccggtgctgctggacattcccggtagaaaaatccgcacattgcaattgaaacacgaaccctcgttcactaaagggcaaacgttgatcctcacgaccgatacttcgcataacggggaggaaaaagtcccggtggggtatggccggttgcatgaacggctgacggtgggagataaggttttcgccgatgatggcaccctctcgttccaggtcgtcaacatcatcgatcgggacatccatctgcaggccgacatggacggccaactaaaaagccgcaaaggtatcaatgtgcctggcatcgatctcgggcaggcgctgataacggagaaagaccgcgacatgatcgccttcgccaaagcgcatcaagtggactacatcggcatcagcttcgtcgaaagcgccgcacatatcaacgcaatcagagcgctgatcggaagcgatacgccccgcatcgtggcgaaagtggaaaacagcggcggcatagaacatctggaggaagtcatcgccgccgccgacgttatcatgatcgatcgcggcgatctggcggtggaaacctcgatcgaccacgtttccctctaccaaaaacagatcctccgtgccgcctcccacgcgggcaaacccaccatcgtggcgacggaattgctgcacagcatgatagagaacccgctgccaaccaaagcggaggtcagcgacatcaccaacgcggtgctggacggcgccgcggcggtgatgctttccggtgagaccgccgtaggacgttatccgctggaggccgttgcccgcatcgccagcgtagcccagttggcggaacagcatttggcgcatgccccccactcatctccccctgcacaggccgacgatattcgacaggctatcggcgcccttacccgcgccttgccgatctcccgggtggtggttttttctcgcacgggttacagcgtgcgcatcgccgccatggccaacatcggcatcccaatcgtcgcattcggcaacgatgcggcgacggtgcgcagttggaatatgctgccgggtatcaccggcctgacattgcctcggatcgatctgacacaaccggcaaccgaacgtttggcactgaacgtcctgtcagacaatggattgataaatcggcatgatgttttgctgctggtcagcgcccagcaagacaatcagcatatcagcggtaatatcttgcgcacgctcagcgccgaggcctacctgcactctgacgcggcgcaggagcttcaccggaacgaagaggtggcatga

SEQ ID NO: 429799 - DNA, 735 bp, Serratia marcescens
atggataatcatgcgttgttctatctggtgattgcgctatttgccgtaatccaatcggttttcggcatgggcatattggtgttcggtacgccgacgctcttgatgctgggcgttgatttctcctctgtacttgggctgctgctgccgtcgtcggtgctgatctctctgacgcagacgcttggtgcccgccgcattgcttttcccgctcgtgaaaagatcaatatgctgatttgcgccattttcgtcattctggcgctgagcctggttttgcattcgacggtgaaagtgaatgtcgatctgctggtgggggctatcctgctgttttccgccttgatgcgctttcgcctgtcactgcaagaaacattgaaacgttacctcggcaaacatcagcgcgcttatatcgcgatcatgggcctgatacatggcgtcaccaacatgggtggcgccttgctggcactctacgctgccgccagccatcgagagaaactggagataagaaccaccgtctcccgttactacctgatgttcggtttaattcaattggccacgctggccagcattaaatggcaagctctgagcctcgacggtttcaccgcggcaccgctggctctgcttgtgtatctggtcgtcggcaatctgctgttcaagagagccagcgctcccgtttatgaaaaaatggtgaccggctttattgccttctatggcgtggtcgtcctcactaaaggctatttatag

SEQ ID NO: 429800 - DNA, 933 bp, Serratia marcescens
atggcgacgactctcttttctctgattccggtgatatttttaatcgcaatgggattcacactacggcacaagaacctgatcgatcgggctttctggctgccctgcgaaaagctgaattacttttatctcttcccggcgctgatgtttatccaggtcggcaaagccgacctcagccagtttccagtgcggccgattgccctgtctgtgctgggcgccgtcttgattggcgccttgtcattgtacctctggcgaatctggctaaaacagcccgggccggttttctcttcggtcatacagggcgctctgcgccccaatacctacatcggggttgccgcagcggcggcgactttcggccacaccggcctgacggtgacctccatcagcatcgccgtcgccatcccgctgttgaacgtggcctcgattgtcgtactgatgcattacggccagggtacccgccccggcggcaaacagatcgccaaagcgctggggaaaaacccggtgatcctttcggtcttggccggtctggccttcaacgccagtgacttgtcgcttggcgcggcgctggagaacattctcactattctcggcggcgcctctctgccattggggttgctggcggtcggcgcagggctggatatacaggcggcgcgtacggcgcagggccccgtcctacaatcgaccttcgtcaagttgttgctggtaccgctattgacgctgggaatcggcatcgccctgggcatctccggcccggtgttggcgactatcgtcctgtttaacgccttaccctgtacaccttccgcctacatcatggcgaaactgctgggcggcgattatcgcttgtcggccggcatcatcacgattcaaacgctactggcggcggtcaccattcctgttattttgctgctgacccagttttcagctcatccagcttaa

SEQ ID NO: 429801 - DNA, 621 bp, Serratia marcescens
atggatttaaccttgaaagcgcagcgatttgccaatgaagctcaccatgcctgcaatcagcggcgcaagttcaccggggagccgtatatcgtgcatcctgcagcggtggtggttctgctgcagcgagccaagccgacgccagaaatggtcgccgctgcctggctgcatgatacggtagaagatacggcggtgaccctggcggatatccggcgagaattcggcccgacggtcgagcgttatgtggaaatgttgaccgacgtgcagcctcgcagctatggcggtgagcgtctgcaccgtaaaaatgccaatctgcagcacagcgcgcaggcctgcgcggaagcgcagaccatcaaactgtgcgacttgattgacaacagcaggagcattaccgattacgatgtctcctttgcccgtcactatctggtggaaatggcgcgtttattggccgttttatcggcgggcgaggccggcctgttggccctggcccgccgacagtgcgcagaagctgtcgaacgcctcaaccgtcgttatggaaacgacggctggttcgacacgttgtggcagaggtatgaggcccatcttaagctggatgagctgaaaactgggtcagcagcaaaataa

SEQ ID NO: 429802 - DNA, 1542 bp, Serratia marcescens
atgtcactccgttcacggcgctgggttatctcgctgtttatcctgttggcctggggcagtggctggctgatgctgtggacgctcggcttctatctgacccacaacggcaatcaggcagcgctgtttctgtctcacggcgtctatctcgcgctgctgatcttgctggcgcgccgctattggcccgctctgataataccgccggtgctgctgctgttctggctgcacggcgaacgcctgctgagcggctacggcctgctggccgcgccgttcatcaccctgctcccggccgcgctcgcgcagcgattctggcgccgttttccgctctactggcagcggctgacgctgctgctggctaccgtgaccgccgcctcgctgctcaataccgccctgctgtcgcctttcgcgcacagcccggcgatgttgctcggcctggcgtcgtttaccggcggcgttttgctgaccccgttcgtctacctgatctttgaatttctgcgccaacagcaccgttaccacctgctggggctggacaccaccaatccgccgctgcgcgcctccttaatcatctggtgcagcctgtttttcgttatcggcatcggtacgcagatggtgctatcgccggaaatcgagcgcctgctgctgatcgtggtgtttttgccgaacgtggtgatggcgtggaagttcggttggcagggcggcgtgttgtccggcctgctcggcagcatgatgatcaccctcgcccggcaggtcggcgtggggttcggcaatctggtcgagctggaaatctttctggcgacgcaggcgctgctcggcatcggcctgggcatcgccatcagccgccagcaacacctggcgcaaaacctgcaccattatcgccgacgcctggaagaagagctggcggcgcggcgggcgctgaccgaaaaactgatccacaccgaagaagacacgcgaaaaaacctggcgcgcgagctgcacgatgaaatcggccagaacatcaccgcgattcaaatccagtcgcagctggtcaagcgggcgcgcgatccggcgcaaacccaggccgccgcgaaccagatagccgatctcgcccggcgcattcatcactccacgcgccagctgctgcgccagcttcgcccgcccgcgctggacgagctggcgttcaaagacgcgcttcaccacctgctgaatgaattcgcctttagcgaacggggcatccgttgccatttcgactaccgactcatcgacacgcccgccggcgagacggtgcgcttcaccctctaccggctgctgcaagagctgctcaacaacgtgtgcaaacacgccgaagccagcgaagtcgccatcgtcttgtatcaacagggtgagcttttgcacctcgaggtgcgggacaacggcatcggcatccgtgcggacaaggagcctggcttcggcattcaggggatgcgcgaacgggtcagcgcactcggcggcgaactgacgctggaaacgcagcgcggcacccgggtaattgttaacctgcccacaaatttgcaacaaaccgccgactaa

SEQ ID NO: 429803 - DNA, 279 bp, Serratia marcescens
atgatgagccatacccacagagatcaaaagaagctgttggcgcgggtgcgccgcattaaagggcaggccgaagcgctggaacgcgcgctggagagcggcggcgaatgttcggctgttctgcagcagatcgcggcggtgcgcggcgcggtcaacggtttgatggcgcaggtgctggaagggcatgtgcgcgaacatctggctgccgcggacgctacgccacatcagcgcgagcaggacatcgagcaattgatgaccgttttacgttcttatatgaagtaa

SEQ ID NO: 429804 - DNA, 969 bp, Serratia marcescens
atgacgtctcacgcgcccgttttgcaccgcgaacacagccacgtttttgacgatggtaacccattggccgaaagaaacaccagatgggcggtgatactcaccgccagtatgatggctatcgagatcgccggcggctggctgtttaactcgatggcgctgctggccgacggctggcacatgagttcacacgcgctggcgctgggcctgtcagtgctggcttacggcgccgcacgccggctggccaaggatcgccgctttagcctcggcacctggaagatcgaagtgctggccggttacaccagcgcggtgttgttggtgctggtggcggcgctgatgctgtttcagtctgggcagcggctgctgaatcccagcccgattcattacaacgaagccatcgccatcggcgcgatcgggctggccgtcaacctgctctgcgcctggctgttgcgctgtggcggccatcatcatcatcacggggatgaccacgacgacactcatcatgacctcaacctgcgttccgcctatgttcacgtgctcgccgacgccgccacctcggtactggcgctcatcgcgctgttcggcggtaagctttggggcgccgcctggctcgatccgctgatgggcatcgtcggtgcggcgatggtggccgcctgggcctatagcctgatgcgcgatagcggaaagattttgctggatgccgaaatggacgcccccgtggcgcaagacatccgccaggccctggccgcttccggccacgcgctcacgctgaccgatctgcatgtaggccgcatcggcaaaggaaaatatcattgcgtcctcgccctgagcagcgccgatcgcgccctcaccgccgatcgggtgcgccaactgttggccacgcatcccgaactggtgcatgtcactgtcgagatcaaccgtccgccgttggcgcaaggggttgtattgttccaccgaaaagatctagcttaa

SEQ ID NO: 429805 - DNA, 990 bp, Serratia marcescens
atgatcggaattgaacaacccgccgtggcgcgccgcgccgtcggccccagtctcggcaagcgctgggaaaaactgctgcatcacccggcggtcttgccgtttatcggctttgtgatcctgttcgtgctgatgagcctgttgaacgacagcttcctcagcgtcaacaacctgaccaacgtggcacgccaggtgtcgatcaacgccatcatcgcggtgggcatgacctgcgccatcctgaccggcggtatcgatctctcggtggggccggtgatggcgctggccggttcggtcgccgccgggctgatgctggcggcggtgccgatcccgctggcgatggtggcggcgctggcggtcggcgcgctgttcggcctggccaacggcgcctgtatcgcctacctgcgcatgccgccgatcatcgtcaccctggcgtcgatgggcatcgcccgtggcctggcgctgctctataccggcggctacccaatctccggcctgcccgacgtcttctccttcttcggccgcggcacgctgctgggcattcaggtgccgatcctgatcatgctcggtgtgtacgtgctggcctggctgatgctcaaccagctgccgttcggccgctacgtctacgcgatgggtggcaacgaagaggcggcgcgcctgagcggcatccgcgtgccgcgctacaagatgctggtgtacgtgatcagcggcctgaccgccgcgctggccgggctggtgctgacctcgcgcctgatgagcgggcagcccaacgccggcgaaggcttcgagctggacgctatcgccgccgtagtgctgggcggggcggcgatctccggcgggcgcggcgccatcgtcggcacgctggtgggggcgatgatgctcggggtgctcaacaacggcctcaatctgatgaacgtgtcgccatatatccagaacgtggtgaagggcggcatcatcctggccgccatctacctcagctccgtgcggcgcaaatag

SEQ ID NO: 429806 - DNA, 207 bp, Serratia marcescens
atgacctataaccaaaaaatctggttgggggttttactgctgtgcgccctgttttggggggcggtgataagcggcgcctgttcgctgtataaccgggcagatcgcctcaatgcgcaccaggcgcagaacgagttcgccgcgcgccacagtctggcccccagctcgaagcaaagcgcgcaggcgtccacctcccctcggaatgggtag

SEQ ID NO: 429807 - DNA, 219 bp, Serratia marcescens
atggggcaatttttcactttagcgccggtgcccgccggtttccgctgtggccgcagcgactatggagcagccgaggtttcctcgacccgttatccagcttacaacccccttcttttagaattaagtcgctcgttgcgaagtttccccgcaaccttaagtcttggcgtgtccgccatccgcaaggctcaaggtaagggggggctgaacaatgtccgataa

SEQ ID NO: 429808 - DNA, 822 bp, Serratia marcescens
gtgaacgataaccctcacttcactgacgctgactgcagcgaatggcgggcgggcccctggctgatcgcccttggcggccgcgacgcggcaggccgggagtatcggttgggcacgcgcgaatacgactggcatcagcatgtgcgcgggcagttgctgtgcgtcgaaagcggcttgttgcatgtacgcacggcgcagggcgattgggtgcttccgcctcagcgggcgggttggatcccaccggcgacggagcaccgggtgcaggtctgcggcgcactgagcggctggagtttgctgctggcgccggaggcctgccacgatctgtcgaatgtaccctgcgtcatcggcattagcgccgtgctgcaggcgctggctcagcgagcagaaggctgggacaagcgcagtgcgctcaccctggagcaggatcgcatggcgcaggtgatgcgggacgagatacgtttggcgccgacggaaccactgcatttgccgatgtcgtcccatccgcgcctggccggcgttctgcaggccttgctgacgcagccggggagcgagcgttcgctggaggcgtgggctgaatggggggcgatgtcgccgcgtaccctgcggcggctgatgatcggcgagacggggttgagttttgcacagtggcgccagcaggcccggttgtcgtatgcgttagcgaagctggccgaaggcgagacggtgctgcagatagcggaaacgctgggatatgcctcgccgagtaattttatcgccatgtttcgcaaagcctttggcgattctccggcacgttatttttccgcatcggcgggaaaggggcgctaa

SEQ ID NO: 429809 - DNA, 789 bp, Serratia marcescens
atgttagaaaagaaaatcattaaaaatacgttggctctgctgataatatccagcattccacccagccatgcaagtaataacgataacagcggaacggcatttaccgtgagccttggcgcggcatcatcgcctaaatacagtggttcgaatgagcaaacctggggagccgcaccgcaatttcatttccaacaggataacttttttgtcgattcaatgaatggtgctggttttcgtttccaaagcgagaacggtttatatttcattccaacgataggctatgattcagggcgaaccgatgaagattcaggttggcgtaaaggctctgacgcgcttaaaggcatgggggatatttcagcaaccgttaacactggcttagccttgggatgggcggtaacgccatggttggtcttagagggaaaagccaccctgccgctgagtgatggccaggggatatcttacgcgacctccgtcgatttcattcctgttctggatgaggaggataccgtcgcgctaaaaatcagcgcattatttgcagactctcgctatatgaacacctggtacggcgttaatagcacgcaaagcgctaattcgggctactcacgttataacagctcgggcggttattacggtaccgacgtgagcctgacgtgggcgcatcagtttaccgaaacctggggtggatgggttggcattaaccatacctggctgggggataacgccgccaatagccctatcgttaaacaaaaggaggggacaacgggagtcgtggcaataagctacacgttctaa

SEQ ID NO: 429810 - DNA, 699 bp, Serratia marcescens
atgcaaaataaacgggttctagtcattgaagacgatgtcgatgcggcaaatgtactggaggcttaccttaagcgtgaaggctataatgtcgcggtggtggggaatgggctgattggtttgaatacggctttaacctggaaacccgatctcatattactagatgtgatgttgcctgatatgaatggaacggaaatattggcggcgctcaggcgcaaggtgaatacgccggttatcatgatcacggccatgggggaacctcatgataaaattggcgctcttcgttatggtgcggatgattatatcgttaaaccctataaccccggtgaagttatggcacgtgtgcaggcagtgttaagacgaagcggcggaagtcagctggctggcgaagaaatattgcgctgggaaaggctcgaactggatatcgctaatatggtagcgagagtcatcacgagcgaggacggcgcccatgttctggatttaacattaaccgaattttccattctcagtacgttaatgaaagcgtcgacacggccactgagtcgtcagctattacttgaaaaatgtttacctgaaagcgatgcgctcgaaagagtggtggatacgcatgtttataatctaagacgaaagcttgaagcggcaggcgttgataacgtgatttttaatgtgcgcggcgtcggctataggttttgcaaatcatga

SEQ ID NO: 429811 - DNA, 1176 bp, Serratia marcescens
atgaaaaggaaaaataaatctcttttgttttgggtgtctgttcgcatcgtcatcgtcgccatcgtgacgctttttaccattattctggcgatgtggggcatttttgctgcccagtatttttatgtcattcatgaaatgccggcatcggtttacgaaagattcttggtgctgcgcgagaaccccagcctggacatagaggcgtttcatgagatcgtcgatacgtattgggggctggattacagtacaccttcgctgacttctttaaattggggatggctgcttattttcctgatcgttgtcgttccattgataacgttaatgtgcgtgcgcatcgcacgccctcttaccgcccaattccgaaatctcaccgacgttgcggaaaccgtggctcagggaaattttaagcaacaagccgagctggtccaggcgtgtcctgatgaaataataaggttctcaataaatttcaatgagatggtcaataaactcgctttatacgagcgtgaaataaaagcgtcgcatgtggcgttggcccatgagttgcgttcaccgttgaccggggctatgggccgccttcagggcatgatagacaacgtgtttcctgcaagtcaggcacagctgaatatggtgatgacgcaattaaaaaacctgagttatttgactgacgatctgtatttcctctctctggccagtgcgggccaactgaaattaagtaaaaacgtttttactatcaatagtgtgttaaaggagagagtcgcctggcttaaacctcagttggaggctgcgggcatgtccatctctatcgaggagggcgggccgcttcattttattggggatgaattcagactaggtcaggtattcagcatacttatcgaaaatatgcttcgttattgtagccagggcgatcgaatgtgcattcgtctcgaacagaccgcacaggaaatcgtgttggcttttcaagatacggggcctggcgttgcacaggattatttgccgcaaatgtttgagcgttttactcgcggtgagacttcccgcgcgcgcgattccggcggcagcgggctcgggctctccattgcgaaagcgatttgcgctgcccatcatggaacgataaaggccagtctgccggccggcaaagggctgttaatcacgataaacttgcccctgccggcagtgtcataa

SEQ ID NO: 429812 - DNA, 903 bp, Serratia marcescens
atgccgcaaaaaattgatttcaacctgatctatgcgctgaatctgctgctggaagaagggagcgtgagcggcgccgccgagaagatgaatctgagcgcgccggcaatgagccgcattctcgggcgcatccgccggcagttcgacgacccgatcatggtcagagccggtaagcatctggtgccgacgccgcgtgcgctggagttgaaacgccagctcggcgacatcatcgagcaggccactgcgctgatcgcaccgagtgatgcgttcgaacccggcaagctgaccagaaccttcaccattcgcgccaacgatatctttatcggcgcgctggcgggcggattgctggagacgctgcgggaatcggcgccgctgagcggcctgaaattcatcgccgaaagcgacggcgaggatgatgcgctgcgcagcggcaaagtggatctggtgatcggttcctcacgcgactggcacccggaaatcaagacgcagagcctgttcaccagcacctttcaggcgctggtgcgccctgggcacccgatcataggccgggtaacgcccgaaaccctgacccattacccgcatatcagcgtttctcgccgcggacgcacgcaggggccgatcgacgacgcgctgcgcgatctcggcctgcagcgcaacgtcgccctgaccctgccgggctttcattcggcgatgatgctgaccatgaaatcggactttatcctgccgctgccgcgccacgtgctgcagggggtgagcaacatccacctgccgttggcggagctcgagctgccgctcgagctggaatcggtgtttatcgtccaggcctggcacccgcgcctggatcgcgatccggcgcaccgctggctgcggcagaccatcaagcagttctttttgcagcgggagtga

SEQ ID NO: 429813 - DNA, 774 bp, Serratia marcescens
atggctttcatcgcagatattgttacccagcttcgccggctcgaatcggcgctgaacgaggcgctgttgcggctgcaacaggcgcaagacaccgaggcgctacacgacctgcgcgtctgcctgcgccgcattcgcagcctgctgcgtccgttgcgcggctgccccggcgcaacgcggctcgatcgggccgccgccgagttgggcaagctcacgacgccgctgcgcgatctcgaggtgctgatcgtcgaattggcgcaccatcgcctcgattggcaggccaacgtgcgccaaagcgattttcaggcccgctgccgccaactgctcgccaacccgctgctcatcagcttcccttcgctattgcacgcctggccgcaccgctttcgccgcatcgcgcagcgccccgccaaacaccgtgtgaaccgacgcctgcagcgccagcagcggcaattgcgccgggcgttggctgataccggctacgatcgccaccgtctgcggctgctggtcaaacgcctgcgctacgcggccgaagcctacccgcaacgcctccccctctctcccgccgcaatggcgggcctgaaagcggtgcaaaacgccctcggcgattggcacgaccgggaggtctggtgcctgcaggcagaacatcaggcggatctctggcccttgttgccccgatggcaagcagagcaacaccaggcgctggccagagcggacatcttgctcgttgccttatcacccgcactggtggcgaaaaccggcggcgcatcacgatcctga

SEQ ID NO: 429814 - DNA, 261 bp, Serratia marcescens
atgaacgagatcagggatgacatcgctgatttgcaacagcggcagaacagcatcaaattcgccgagttagcgaaagtctgcgtgcgatggtttgggccgccgcgcataaacggtagcagccatcgcgtttatcgcatgccctggccaggcgatccgcgcatcaatatccaacgcggcaacaacggcgcggccaaggcatatcaggttaagcaggtcatcgccgcactggccagaatggaggaagaacatggaaaagcatga

SEQ ID NO: 429815 - DNA, 249 bp, Serratia marcescens
atgagtatttcggctaaacgcgtcagctttgacgatacgacgatgtgggtcgaactaagtgacgccagaattattggcgtgccgctggcctggtttccccgtttgttgaacgcgacggaagaacagcgggcggggtatgagctcagcgctcgcggcatccattgggacgcgttggacgaggatgtttccgttgagggattgctgaaggggcgtggcgacgtgacgcaccgccctcataatgccgcctga

SEQ ID NO: 429816 - DNA, 243 bp, Serratia marcescens
atgccagtgatattccgttataaaggctataggttctttttttattcaaatgatggtgacccgcttgagccgccgcatgttcatatcagagacgctgaggctgaagcgaaattttggttggttcctggcgtgcagttggcgcgtaatgatggctttaacgccagaacgctaaaagagttggctggtctggttgatacctatcaggcattgtttttggaggcttggcatgagtatttcggctaa

SEQ ID NO: 429817 - DNA, 234 bp, Serratia marcescens
atgactaaggccgtgttttatcatgccggctgcccggtatgcgtgagtgccgaacagcagctgttgggactgttgagcgataacgtgcaggtggaagtggtgcacctgggggaacgcccaacgcgcgtggcggaagctgagcgcctcggcgtgcagagtgtaccggcgctggtggtcgatgggcaggtgctgcacatcaacttcggcgcggcgttggcggatctgaaggcctga

SEQ ID NO: 429818 - DNA, 546 bp, Serratia marcescens
atgctaaaactgtttgatctgcttgaacgcctgaatagcctgcaacgcagctggctgcgcagccacgaagaattggaaagcctgccgccggtgcagctgagcgcgctctactatctggcacgctgtaatcattactccaacacgccgatggccgtggcggaataccttggcctgaccaagggaacggtgtcccaatcgctgaaaaagctggagctgaacggcatgatcgcccgcacggcggacgcaaaggatcgccgcagcgtgcggctgcggctgacagaaaaatcgcgaagtttaatggagactctgtttcctcctgcctatctgcagcaggcgcaagacgccatgcagcaggacggcgaacagttgcaggcgctgttaacccagctgctgcgccaactgcagcggcaggaaaatgcggcgctgttcggcgaatgccaccgctgccgctatcaccagcagcgcaatggccaaccgttttgcggcctgacacaggaaccgctgccgctcgacagcgtgaacctgatctgccgagaattcgcctaa

SEQ ID NO: 429819 - DNA, 1620 bp, Serratia marcescens
atgcgcgttaaaggtataacccctcaggatctggccgcttacggcattcacgacgttagcgaaatcgttcacaacccgagctatgaactgctgtttaaggaagaaacagacccatctctggaaggttttgagcgtggggtagtcaccaagctgggtgccatctccgtcgataccggcatcttcaccggccgttcgccgaaagacaaatacatcgtccgcgacgacatcacccgcgataccgtgtggtgggccgatcagggcaaaggcaaaaacgacaacaaacccctcagcccggaagtgtgggccgatctgaaacacctggtcaccgagcagctttccggcaaacgtctgttcgtggtggataccttctgcggcgccaacgctgactcgcgcctgaaagtgcgtttcatcaccgaggtggcctggcaggcgcacttcgtgaaaaacatgttcatccgcccgagcgacgacgagctggctgacttcgagccggacttcgtggtgatgaacggcgccaaatgcaccaacccgaactggcagcaacaaggcctgaactcggagaacttcgtcgccttcaacctgaccgagcgcatgcagttgatcggcggcacctggtacggcggcgaaatgaagaaaggcatgttctcgatgatgaactacctgctgccgctgaaaggcatcgcttcgatgcactgctcggccaacgtgggcgagaaaggcgacgtggcggtgttcttcggcctgtccggtaccggcaagaccaccctttccaccgatcctaagcgtcagctgatcggcgatgacgagcacggctgggacgatgacggcgtgtttaacttcgaaggcggctgctacgccaagaccatcaagctctctgaagaagccgagccggacatctatcacgccatcaaacgcgacgcgctgctggaaaacgtcaccgtgctggccgacggcagcatcgacttcaacgacggttcgaaaaccgagaacacccgcgtttcttacccgatctaccatatccaaaacatcgtcaagccggtgtccaaagcgggtcacgccaccaaagtgatcttcctgaccgccgacgccttcggcgtgttgccgccggtatcacgtctgaccgccaaccagactcagtatcacttcctgtccggtttcaccgccaaattggccggcaccgaacgcggcgtaaccgagccaacgccaaccttctccgcctgcttcggcgccgcgttcctgtcactgcacccgacgcagtacgccgaagtgttggtgaaacgcatgcaggccgccggtgcccaggcttacctggtcaacaccggctggaacggcaccggcaaacgcatctcgatcaaagatacacgcggcatcatcgacgccatcctgagcggtgaaatcgacaaggcggaaaccgttaccctgccaatcttcgatctggcgatgccgaccgcgctgccgggcgtgaacccagagatcctcgatccgcgcaatacctacgccagcctcgagcagtggcaggaaaaagcgcaggatctggccgagcgcttcatcaccaacttcgacaaatacaccgacacgcctgcgggcgccgcgctggttagcgccggcccgaagctgtaa

SEQ ID NO: 429820 - DNA, 495 bp, Serratia marcescens
atggatagccgtttgtcatccgggctgcgcttttggctgaacttgccgggctggctattgctggtggcgcaagggctgggcatcggcacgctggcgctgttgggcggcggttggctgctgcaagacgaatggcgtcagcgggaaaacgcggcggagcggcaacagcgcctgttgcaacagatttccatggtacagcaccaactggacgaggcgccggaagcccctatgccgccaacgccgatcggtccgaccaccgccggcgatctggcgaacgtgctgcaacaagcggggggcgccttgttgcgctggcagcggcaggaaaaaccgctgcggcaaacgctgagtttgcgcattgattatgccggtttgttggcgctgttggaggcgctgcccgccgatttgcgtctcgaacaattgagcgtggaaacggcgccgcagggcatgacggcgcggttggtgttgcaggatgccgccgaggagcaggccgatgagtaa

SEQ ID NO: 429821 - DNA, 210 bp, Serratia marcescens
atgactacgattagctacacggcggcgagaaacaatttggccgaggtgcttttggaagcgcaaaaacagccggtggaagtgacgcgccgcggacacgatgaggtttacatcatcagtaaggccgactatgaggttttgatcaaagccaaagtgaaagcgcgcattcaggctaaacacgcggatacgattaaggcgctggcgaatagatga

SEQ ID NO: 429822 - DNA, 357 bp, Serratia marcescens
atgatctttttgaccgcagaggatattgcggagttcaatgctgaaattgtgcctcacggccgccaggaaggcagcaaagttgaggctgtagccaaccgcgtgctcaatgcttaccactacgagaacgtcacagacgtttaccgcttggccgcgctctatctcatcgccatcagccacggtcacatttttcttgatggcaacaaacgtacggccttccaaagcatggcgctatttctcggtattaatggcattgcactgcgggaagacgcagaactggtcgaaattacggttgaagcagctcaaggccgcctcaacgttgaacaagccgctgaacacttacgccggctaaccgaataa

SEQ ID NO: 429823 - DNA, 939 bp, Serratia marcescens
atgtcggttaacaaccctgtcgcccgcctgctggccgaacaccccacgctgatcctggacggcgcgctggccaccgagctggaagcgcgtggctgcgatctgaccgatccgctgtggtcggccaaggtgctgattgaaaatcccgagcttatctatcagatacacctcgattatttcaacgccggcgcccagtgcgccatcaccgccagctatcaggccacgccgcagggcttcttgcgccgcggcctggatcaggatcaatcgctggcgttgatcgccaaaagcgtgcagctggcgcaacgcgcgcgccgcgattatctggccgcgcacccgcaggcggcgccgctgctgatcgccggttcggtgggcccgtacggcgcctatctggccgacggctcggaataccgcggcgactaccggctggcgcaggatgacatgattgccttccaccggccgcgcctcgcagccctggccgccgccggcgtcgatctgctggcctgcgaaacgctgccgtcgttcaccgaactgcaggcgctgctgacgctgctgcaggagttcccgacgctcggcgcctggttcgccttcaccctgcgcgacagccaacatctcagcgacggcacgccgctgacggaagtcctgtccgcgctgcgcggcaatccgcaggtactggcgatcggcatcaactgcatcgcgctggacaaggtcgctccggcgctgcgccaactgggcgcgctggccgacaaaccgctgctggtctaccccaactccggggagcactacgatgcgatcagcaaaacctggcacgcctgcggcggcgagcacggcagcctggtcgatcaggcgacagagtggcgcgcgctcggcgcacaattgatcggcggctgttgtcgcactacgccgcaggatatccgcgccatcgccgcgcgctgtaagaaatga

SEQ ID NO: 429824 - DNA, 2127 bp, Serratia marcescens
atgaatccgctgttattcaccccgcgccgtcgcatcgcggccgcgctctggctttctttaggcctcgccggcgccgcgctggcgcaaccgcagccgccgttggcggaacgcgcgccgaaagcgctgacggcgcatggcgagacgcgcaccgacgattactactggctgcgcgacgacagccgaaaagaaccgaaggtgctggactacctgaaggcggagaaccgctataccgagcagatgatggcgccgtaccagaagctgcgcgccaccctgtatcaggagatgctgggccgcatgaaccctgacgatcgttcggtgccgtatcagctcaacggctatcgctatcaggaaagctacgctgccggtaaagatttcgcgctgtatcaacgccaggcgctcaccgccgacgcgccatggcaaaccttgctggacgccaatcagcgcgcggtcggccatgcctactatcgcctgggggcgatggacgtcagcctggacaaccgccgcctggcggtggccgaagatctgcagggccgccgccaataccgcatctccctgcgcgagttaggcagcgaacgctggtcgccggaaacgctggaaaacacctccggcaatatggtgtgggccaacgacaaccaaaccctgttctacgtgcgcaaccacccgcaaacgctgttgccataccaggtttatcgccatcagtacggcacgccgacagcggaagataagctggtgtaccaggaaaacgacccggcgttctacctcagcctcggccgctcgtcctcgcgcgattacctgattctgaccatcagcggcaacaccacctctgaggtgcgcctgatcgacgccaaccagccgcagcgcgagccgcagctgttcgccgcccggcagaacggccgcgagtattacctcgatcactaccggggcgagttctatctgcgttccaaccatcaggatccgaacttcggcctgtaccgcacggcggcggcgggcaagccttggcagacgctgatcgcaccgcaggcgcagcacgaggtggaaagcttcagcctgttccgcgactggctggtggtgcaggagcgtgccaacgggctggtgcagctgcggcaaatcagctgggacggcaaaaccgagcgcgccatcccgttcgacgacgccagctacatggcctggctgggctataacccggagccggacagcgatcgcttgcgctacggctattcggcgatgaccacgccgacccgcacctatgagtgggatctgaacaagggcgagcgcaccttgctgaagcagcaggaggtgaaaggcgtcgatccgagcctgtatcacagcgaacgcatctgggtcacggcgcgcgacggcgtgaaggtgccggtctcgctggtgtaccgcacatcgctgttcaaaaacgggcataacccgctgctggtgtacggctatggcgcttacggcatgagcatggatccggcgttcagcgccaaccgcatcagcctgctggatcgcggcttcgtctatgcgctgatccacgtgcgcggcggcggcgagctggggcagagctggtacaaacagggcaagctgacgcacaaaccgaacagtttcaacgacttcatcgatgctacccaggcgctgatcaaagacggctacggccaaccggggcgcatctacgccatgggcggcagcgccggcggcttgctgatgggggcggtgatcaatcaggcgccgcagctgtacaacgcagtggtggcgcaggtgccgttcgtcgacgtggtgactaccatgctggacgacagcattccgctgactaccggcgagtacgaggagtggggcaacccgcaccagccggccgcctatgcgctgatgaaatcctacagcccgtacgacaacgtgcgccggcagcattacccgaacctgctggttaccagcggcttgtacgactcgcaggtgcagtattgggaaccggccaaatgggtggcgaagctgcggcgcttcaagcagggcgattcgctgctgctgctttccactgacatgaccgccggccacggcggcaaatcgggccgcctcgcgcggctggaaaacggcgcgctggagttcgcctttattctggcggcggatcggcaggcgcagaaataa

SEQ ID NO: 429825 - DNA, 1137 bp, Serratia marcescens
gtggcaattactgtttattcgaagcgatttaaaagagaactggataaagagcaattagaaagcttatatcttaaaaatgtatcagaaaacttagatgattttcgaagattcgtacatgaagacgcagaatgcccgatgtgcaatgttacaggtgcacattatgtatctgaaggttattcaaggataaccaataaaaaggtaaagcaggcgcacttcgcatttagaaagcctgacgacacggatgcacataaggttttttgtgaccattatgctggcccagacaaagtcagagattcaggtggtgacgccttcattaagttcggaaaggatggttcagaagttacgatattagtaagagaactggtttgtcggggcattgaaaataatatcttcaaccagactgatatcagaaacatgagaaagtggtttactgatctgcgtgagtcgggaaatattgtcatcagttatagtccacacgttattaatcttcttagagcatcattttatagtcagagtgatactggtaaatatgaagttcaggacggcatgcaacacaagtcatggtttaatataaatgatgaggtatataaatcactaaaacacaaatacccaccgttctttcatattgattttaataataaagaaaacaaaccacttatgaggttgtacagtaatactttagcacgtcaggcgtatcgccttatcataaaggataaaggaataagggtatttgacaggcgagagctaaatgataaatatgtggcagcaatccaattatcaacaactataactaagcagtatgatttcctcaggagaaaatttaccactccactatcaataatgagaaataatcagttacttgctgtctccgcgctgcttctatttgtatctgactgggatgaagaaatagctagagagaaatttaatatgctcaccaatgccggaacttcaattatccctgatgccggaaatgttatcggcatgaacccattcattcattatgatgcatggaaagtaatacatcgagttcaggatttgattgattcattacctgatttctctaatcttgatgaagagtttcaggcagaaaagcagcggctatctgaactttacggactaaataaggataaggcatag

SEQ ID NO: 429826 - DNA, 789 bp, Serratia marcescens
atgagatacataattaataataagattaaatatcatgaagatagatcagagttggtggatatcaatgctgagctaccgcctcaaccgctcaccgccaccctgaaccgcctgctgtccgcattggtcagaaacaataacctggtgctctcccgcgataccctgctgacgcaggtatgggaagcgcacggccaggtggcctctggcaataacctcaataacaccatttccatcctgcgcaagatgttcgccgccctgggcgaggacgacattatcgtcacgctgccgcgccagggatttatgtttaccgccacttcgttgaagacgacggacagcttggcggagagttcgccggagacgccgatcccggcggctgcagaaagcgccttgccgaccaagccgctgcgagcgcagcgatttaagcgcctcgggttggccgcgttgctgctgttggcggcggggagcggtctgtgggcctggcaggacgccggctatgcgccgatcagcacggtaagtgtaggcaacatcggcagctgtgaggtgaagtttatcgcttcttatcataagaccggttccggcaaggcggatttggcgcacttgcaaacgttgctggataaacgaaatcatattcactgtagtgaaccggcgacgctgctctattacgacagccagtcggtggtaccaggcagcgcagaacgcgtgcgatcttcttacttcttttattgtccgcagacggcgatggcggcgggcaaagcgcaatgcgagaactactatgaaagtctggaaaaataa

SEQ ID NO: 429827 - DNA, 492 bp, Serratia marcescens
atgaaagtctggaaaaataaccggatatggcattaccgttacgcgctgttagcctttgcggcgctggcctgctgttgcgccgccgcttatgtgctgttcgctatgccgcaggtgccggaatgccgggcgtcgatgcgggtgcataatcaggataaagatgcggcgatggagcgtgtgctgctggtgagcatcgtgcctgagggcgcgcgacagctcactatgttgatgagcggcagtttttttgatggtgatacacgttatgtggtcgatcgctccgtggaaatgagttaccagcgtcgcggcagcaactacaccatgtgggtaacgaaaaatacccgcaagccgcaggactctgttattcgcgaggatatgaatcgccggttacctatcgccgggcagcagctgcatatgcgcatcgagcgtatcgatcggcatcactatctgtttactgataaccattcgccgctttttgtctgcgtgactggcgcataa

SEQ ID NO: 429828 - DNA, 744 bp, Serratia marcescens
atgattttcattataaatgagagcatcctctataacgaggaggaaggcacattgatgcatatcgataatgccagcaatagaattgctttactgaagccgaccagcaggctgctttcgttattcatcaagaataataacaagctgttgttgcgagagaggttgcttaatgatgtttgggtcgatcatgggctgaaagcctccaacaataacttaaacaattacgtttccggtttacgtaaatcactggcgcagtttggcgccgaggagattatcattacctatccacgtcaggggtttaaattcattgctagaaatattcatgaagcgaatgaaaataaggtggaaatatatagagaagaaaagcatcgtgaaacggaaatagcgtctacgccgccccccgggacttctccccccggcatccgacgagcattacaacgcttaataatgattgccgctgcctgcctggtgccttttgccatcattgtgctgtatcaaaacagcacgcgcatcagcgtttatccccttgggaattaccaaagctgccaggtgtacagtatgactttaggtggaggcagcctggagaacatcaagcaggtgatacaacaggcgggcttcaattgccgtacgcgggccgacgtctattattacgctaacattcttaatgagagcactaaccaggatgaacagcaggtcacctactgcccgcgtaccggcaacagcccttgcatcaatataactatatag

SEQ ID NO: 429829 - DNA, 549 bp, Serratia marcescens
atgaaactgaacaaaattatgattgcagcggtattggccttcggcgcttcttctatgatggcccaggcagctaacaccggtaaggttcactttgaaggttctattgcgaaagctgcatgttcaatggatcagaagagcgttgagcaaactgtaaaaatgggccaaatcggcgactccagcctgctgaatggccgtgattccgctgttaagactccgttcgatattgtgctgagagactgtattttgcctgacgctcctactgagacggcgatgacgatcactttcaacggtcttaaaggtgttaaagacgatatgctgcaattcggtccaatgagcaccgctaaaaacgccggtgtcgttatctctcatggcgcggacactgttaagctgggtacgccaattaacattggtgtactgaaagcgggcgcagatactgaatatactctgaatttcacctctcacctgcgtggtaatggagacgataaaaataaaccaattcaagccggtaccttcttcagtactgctaacttcattgtaaattacaactaa

SEQ ID NO: 429830 - DNA, 546 bp, Serratia marcescens
atggcccttattggcaaaaatgtagtggcgccttccctattggtcgcgatttttacggcccagacgatgccggcaacggcttcggttattggctggggaagagtcaatatggaaggcgctattgtcaacgcggcctgcgcccttgaagcggccagccgtgatcaaaccatcgatatgaaaattttgccggtggaacaaattacccgtgatgggcacgggctgacccgcccctttacgctgaagctggtgaactgcgggctggcaggggaaaacagtaccaataccgggcgccagcatttccgcatgatatttgacggtaatgcggaaggaaaaaacttcggcgtcatcggcgatgcccgtggcgtggcgttacgcattgtcgatagcatcggcacagatatttaccctggggtgccgatgtcaatagaaaataccctaacaaaagattatcgcttgaattattcaatgcagctggtggctaacagccaggtattgcgcgcaggggattaccgctccgccattcgttttaaattggattactactga

SEQ ID NO: 429831 - DNA, 2556 bp, Serratia marcescens
atggatgcgagaaaatttaaatcgggggcgctcccgttaagtttattagggatatgtatttctctggctctctgcggcctggcgttgccggggcgggcggatgatgcaattcagttcaacactgacatcctggatatcaacgatcgtaaaaatatcgatctcggccgcttttccaaaggcgcctttattatgccgggcaagtacagcatgacggtagtggtgaacaagcagccattggatgagcagccggtggttttctatccgccggaaaacgatcccgatggcagtgcggcctgcgtctcgccggagctggttgaaaaactgggccttaaaaccgagtttctcaagcagctgcgctggtggcataacgagcagtgcctggatctgagcagcctcaagggcatcgaggccaggggcgatctggcggtgtcggcgctgtatctgaacattccccaggcctatttagagtactcctcgccggattgggatccgccggcgcgctgggataacggcattcccggcctgctgctggactacaacttgaacggccaggtgcagcagaatagtaacggcggcggccagacgcagcgcctgggcggtaatggtgcggtgggcgccaacctgggcgcctggcggctgcgggccgattggcagaccagcctcaatcaccagaccggctcgggggaatcgagccagagaacgtttgactggagccgctattacgctttccgcgcgttgccgcagtggggcgcgcgcctggcgttgggagaggattcgctgcagagcaacctcttcgacagcttccgctttaccggcttcagcctgatgtcggacgacaacatgctgccgcccaacctgcgcggctatgcgccggaggtgaccggcatcgccaaaaccaacgccaaagtcaccatcagccagcaggggcgcgtgctgtatgaggcgcaggtcgccgccgggccgttccgcatccaggatctgagcgattcggtgatgggcaagctggacgtcaaggttgaggaacaagacggcagcgtgcagcagtttcaggtggacacagccagcattccttatctgacgcgccctggcatggtgcgcttcaagttcgccggtggtcggccgtcgaactgggagcaccaggtgcaggggccaacctttgccaccggtgaattctcctggggggtcagcaacggttggtcgctgtacggcggggctatcgccggtggcgattataacgcgctgtcgctggggctggggcgcgatctgctggtgctcggcgcgctgtcgtttgataccacatattcgcgggccagattgccgattgacgacggcaccaaaaaaggcggctcgtaccgtttgagctattcgaaaagctttgatgaatacgacagtcagatcaccttcgccggttatcgcttctcggaagaaaattttatgaccatgagcgaatacctggacgcgcgttatcacggcttgcggaacggcaaaagccgagaaatgtacaccatcacctttaacaagcagttccgtgatctgggggtcagtacctatctcaactacgaccaccagacttactgggataagccgaccgacgaacgctacagcctggcgctgtcgcgctatttcaacctgggatcgtggaaaaacctgagcgcctcactctcggcttatcgcaacaagtccagagggaccaacgacgacggcatgtatctgagcctgacggtgccgtggggagaagataccaacctcagctacagcagttcgtggaaccgtaacaataacaaccagcgggtgggctactaccaacggttggatgaacacaacaactatcagctgaccgccggcagctcgcgcaacggcggctccgccagcgcgttttacagccacgacggcgacgcggcgcgtatcgacgccaacgcgagttatcaggggggccagtactccgcgttcggcatgagcctgctgggcggggccacgcttaccgcccagggggcggcgctgcaccgtagcggaagcttcggtggtacccgcctgatgctggacaccgatggcgtggccggggtgccggtacgtggctatggcgccacgagccgcaccaacatgtttggcaaagcggtggtgacggacgtcggcaacttttaccgcagccgggcgagcatcgatctgaccaacttatcggacgaggctgaagcgacgcagtcggtggtgcaggcgacgctcaccgaaggggccattggctaccggcgcttcaacgtgatttccggccagaaagcgatggcggtgatccgcctggcagacggcagcacgccgccgtttggcgccgaggtgttcaaccgccgcaggcagcagaccgggattgtgaatgacggcggcagcgtttacctcagcggtatccgcgccggtgaacaaatgacggtgcattgggaagggaaggcgcaatgcgaaatcgatctgccggcgttgcgcacggatgttgctctgagcgatctgctgctgccgtgccggcgcgtggccgcaggcagtgaaggccaggcagatgcgccggaaaacccgtaa

SEQ ID NO: 429832 - DNA, 750 bp, Serratia marcescens
atgcgaaacaacactgtaaaaacgctgtcggtagccggcctgctaaccaccaccttgctgagcggccaggcgcaggccgctatcgcgctggatcgtacccgcgtgattttaaacggcggcgataactcggccagcatgagcatcaccaataaaaacacccaactgccttatctggctcagggctggctggagaatgagcagggtgaaaaaatcaacagcccgctgatcgtgttgccgccggtgcagcgggtggagccgggcgcgcaaagccaggtcaaggtacaggcgctgccggccgccaaggcgctgccgcaggatcgcgagagcctgttctacttcaacctgcgcgagatcccgccgaagagtaacaaggccaacacgctgcagatcgcgctgcagacccgcatcaagctgttctaccgcccggcggcgatcgtgccgaacaaaaatgccgcgtacagcccgtggcaagagcagttgacgctgacccgccagggcgcgggctttagggccaataacccgaccccgtattacatcacgctggtcgatgcccgcagcagcaagagcggtaaaaccgccgccggttttgaaccgctgatggtgccgccgaaaggcagcgtggcgttaggcgccactggcctgggcaatgcaccggtgctgacttatgtcaatgactatggcggccgcccggatctgaccttcaagtgtggcaccggtgattgtcaggtggtgcctgagaagcaaggataa

SEQ ID NO: 429833 - DNA, 606 bp, Serratia marcescens
atgcaaataatcgatagcggctgcaacagccaggagagaggcgctttaacgcgacgggcaggccaggcggcgttattggcgctggttttgctgacgaatcgggcagagtcaggtaaccacggcatgctgtttgtgcatggcgcgctgaccgaaggcgcctgccggctggagatgtcttcggcctaccaggatatctggctgggtgaaaccaccacgagcagcctggcagtgcccggcaaccgcacgcagccggtggccttccaactgcgcttgcgtgactgcacgcgcatgggggcggccatcagagacactcgcctcggttaccggctgtgggatgcctaccagccggcggtcacggtgagcttcaccgccccggccgatgcggataacccgcagctggtgcaggtgcagggtgccgcaggcctggggctgcggctgttggatgcggataaccgcgatgtgcggctgggcagccgcagccggccgcagctgctggcattgggcgataacgggctgcagttttatgtgatggcggagcgcacgcgtgcgccgctgttggcaggcgcctaccgcgcggcgatcgatttccggctgaactatgactga

SEQ ID NO: 429834 - DNA, 573 bp, Serratia marcescens
atgggcgatacagggcgacgcacgctggccatcggcggcgaatatctccttctgggctgcgcgctggcggccagcactgctgccgcttcggcgctcaccctgctggcggtgctgagttttggccagctggcgcaggctgcgacggtgaatgttacggtgaaaggtgaagttttcggcaagccaaagtgtgaaatcaacggcggcaatgatatcgatgtgcccttcggcgaactgaatatcgcagacattgacggcgttaactacggcaagaaaaagatcccctatagcgtgagctgcagtggcgatacctccggctcgaacggatacatgaaagtgtcattgcagggcaatatcgcgagttttggcgtcggtttgctgcgcacccgcgagaaggaagatttggcgatcaagctggtgttcgaaaatggccagcagctgaagctgaatgagtggcataactttttttatcccaattatccaccgctctatgccgtaccggtcaagcgcggcggcgccaagttgagtggcgggaacttttccagttccgccacattattagtcgaggttcaataa

SEQ ID NO: 429835 - DNA, 513 bp, Serratia marcescens
atgaaatatattccagggctggccgccttggcctgtatggggttgctggccagcggcgcggcgcaggcgataaatgtgaactttaccggtaagctggtggcggcgcccgactgcgtcctcaacacgggtaaagatatcagcgttgattttcaggaagtggtgggcaccaaggttgatggtaaaacctacaagaaaatgcagatcccctacaccgtcagctgtagcggcggttcaccaggcagcggccagcttaaggtgatgctgggctatacgactgtcccatggggcgattacagctcgatccaggcccaacccctccagcaatttgctaatttcgggttgcgtatcatcgaaggggacgcggataaaacctatgtgcctaacaccaaggtggtggttgccgatcagaataatccgcctaagttctacgccgtgccgatcggcaaagagaacgcgggtttacctgtgggaagtttcaccgcgtcggcaaccatgaccgccatatatgagtaa

SEQ ID NO: 429836 - DNA, 810 bp, Serratia marcescens
atgaaaaatatttttttattgctgatcgtattttttggcggcatgaatgtggcccgctctgctgacttcgaggccattcctcgtatcgagaataaagatgcatactatgctcatctctcttttacgttcctcaatgtttcatcggattcgacattacctaactattgttttcaatctaaaaacccctgcatgatggctctggtgatgaccgtgggggggaacccagttttaagcgtgccgttggtcgatgctaacagttcatgcaacacggcggattgcaataccagcacgcgaacggcccggaccatgggggagctggcgccgttaatcaggtacttagggcgcaatgggcaaagctcgccaagagagctgaggcaggttggcggttgggatattcaactctgcttaagtttctcaaatcctaattttgctaagttcggttgtactccctcgatacccaagacgctcacttgcgatatcctcgatactaacgcagtcgtcgatttcggttcattcagcaacgacgtgacggcccggcaggctacggggaccatcaaggtaaattgttccagcgaggcttacttgcgcgttaagtttaattccaatgtcaccaatatgccgttaagccaggatgggcggcttaccgccagcctgaagtttagggatctgatcgctggcgtgggcgataattatgtaaaagtacctggtggcaacagagaaatatttatagacggtgagcttcggaataataacacctcacacaccggcccgttttctgttcctgtggtggccattattgagttaatgtaa

SEQ ID NO: 429837 - DNA, 909 bp, Serratia marcescens
atgtttctacgtcaagggcacacgatgaaagggtttttattatttctgggcatattgctgggatggaccaactgggcgaatgcggcatatcacgacgcgcccaccagcgtcagaaaaggagaggaaccggggacttatctgatcaccactacgctgaatgatatagcaccgatacccagttggaatatatgtcactacaccacatctaataccggatattcatgtggctacgtctttgggctctactctgctcattgggatggcaatgtctatcccggtggagccatgatctctatacctttggttgatcgaaccccccctaaccagtgtaatacgagtaactgtaataccagtttagggactgcccaaaccattggggaattggtgccgctgatgaagctccgtggcggattcggagtaaccaagtcggcattgtaccgtccgggggccgaggggaaaaggccggggtttaaaacctgtatctataattggcgagcttctgctgtcgggaatgtcagtggcagcctgtttgactgcagcgagcttattcctctgacagcaagctgcgatattcttgacactgatgccgtagtcgattttggtccaatcagaagcgatgttgccagccggcaggccagcggttcatttaaagttaattgctcgaatgatacggatatacgagttaagtttgcctccagtgtaacggatatgaagttaagtcaagatggcaggcttagtgtcagcttgaaagtgcgaaacgcgaagcccggcgttaacgctctggagagctttgttacggtggttgctggtacgcaagagatatttatcgacggcgatctcaaaaatgcgaacacctcacacacgggacccttttctacttcggtagtggccattgtggaggttgcataa

SEQ ID NO: 429838 - DNA, 537 bp, Serratia marcescens
atgaaatcgatcaatattgtgattgatgacgaaaatcgctatttcgctaccggcttgcggttaagtattgcgaaatatgcgcagcagtataataaagtcgcgcatttcctgccgccaggcagcgatgagcggcctgacatcgtgttgacctcacaaatccggcgcgcccggtgttggactgcctattcaagggcacacgtcgtcaccattaaagaaaggcagaccgttgcagccaggcgagcgaagcgagtgctttaccgaaccgacgatcaacaacggctgtttacgctgttgaccgatgccctggccaatcccggcccggtatgccatttttccggtctaatgctgacccctcgtgagcggcaggttatcggctatatgcggcgtgggttggatcaatcgcaaaccgccagaataatgggggtgagcgttaaaacggtgcacagccataaacgttcggtaatgggtaagctgatgttaaatcgcagccatgattttatgtattggttactatcaccagaggcagagtattcctaa

SEQ ID NO: 429839 - DNA, 285 bp, Serratia marcescens
atgaaaaagacagcggctttacttattggcgcttgcatcatgatggcatcttatgcacatgccggttttaacggcaatcataacgtgcagggcaataatggcaacgccagcggtgccggcaatagcgattttggccaatgcatcaatggtcaagggaaaaatggcgggcaatgtgcgggcaacaccaacacaggcgccaagcctaaagaaaaagataaaggcgaagtcatgaatgcgatttgtgaatcgccgtttatgaaaaaatactcgccgctatgccagtaa

SEQ ID NO: 429840 - DNA, 1101 bp, Serratia marcescens
atgctttttgactcgtattctttaaacggtttatcgctgaacaatcgcatcgtcatgccgccaatgacccgctctcgggccggcgccggcgacgtcgccaccgacatgatggctgaatattatgcccagcgcgccagcgccgggctgatcgtcagcgaaggcacgcagatcagccagcagggccagggttatgcctggacacccggcatttactccccggaacacatcgccggttggaaaaaagtgaccgacgccgtacatcaggccggcggcaagatcttcgcgcagctttggcacgtcggccgcgtgtcgcataccattttacagcctggccacgccgcgccggtctcctcctccgccatccaggccgacggggtcaaggtgttcgtggatgtcgaaggtcgcgggccggaacatggcgtgggtgaaatggtgcagcactccgcaccgcgtgccttaacgcgggaagaaattccggcgatcgttaacgactacgctcaggcggcacgcaacgccatcgccgccggtttcgacggcgtagagctgcacggtgcgaatggttatctgatcaatcagtttatcgactcgcgggaaaaccagcgcgacgacgaatacggcggttcactgcaaaatcgcctgcgtttcctgcgggaagtcgcgcaggcggtagcggatgccatcggcaaagagaaactgggcgtgcgcctggcgccgctgaccaccctgatgggctcgcaggacgataccccggaagccacctatctggcagcggccagcgtgctgaacgatatcggcgccgcttacattcacatcgccgaagcggactgggatgatgccccggtgatgccggcagcgttcaaagaatcgctgcgcctgattttccgcggcacgctgatttactccggcaaatacacgcgtgaacgcgctgaagaagcgctggccaaaggctgggcggatctgatcggcttcggtcgcccgttcatcgccaacccggatctgccccaccgcctgcgacacgggctggcgctgaatgcgccaatcaaagagaaattcttcggcggcagccgggaaggctacaccgattacccgacgatcggataa

SEQ ID NO: 429841 - DNA, 744 bp, Serratia marcescens
gtggcgctgattcccacggtggcggcatttccgctgcagcgggcttttatcccgctgctggaagcgctgacggcggggctgccacgccaattcccggcactcatccacagcatttacctctacggcagcgtcgcgcgtggcgaagcccttcccggcgtgtccgatctggacatcacgctgttgctcaacaagccagccgatagtgaggcgttacagcgccttgaggcgtggcggcaagcctttcagctggagcagcggatcgtgagcaaggtcgactttgatatcggcagcgttgatgaggcgttggcgccggagcatcacgattcctggggattttggctgaagcatcactgccgctgcctgtggggcgaagacctgtccgccgcttttccgctgtttcagcccgatcggcgcatcgcgttggcggtcaatgccgatttgccccgcgtattggcgcgttatcgggagcaactactgcaggccaggacggtatcggatgagaggcgcttaaagcgcgaagcggccagaaaactgatccgagccaccaatatgctgcgcgccgagggaagcccgttctggccgataacgttaaccgactatgccgaacagctgttggcgctttatgcagagcagcgagatgaaatggactattggttagcgcacgcggtgggagaggcgaatgacgcggattttagcgacagaatgatgcgatttctcgactggatcgaagcacagaaaaaataa

SEQ ID NO: 429842 - DNA, 1446 bp, Serratia marcescens
atgaacagagccgtgatcccgctgctgctgattgcgctgagcggctgccgggcggtggggccggactacgctcggccgcagaacgcgctgcccgagagctggggtgagcaggccggcggcggggcgctgccggtggcctggtggtcgatattcaacgatgcgtcgctgtcgcaactggtgcagcgcgcggcggccggcaacctggatctgcagctcgccacggcgcgcatgcagcaaagccgcgccttgctgggcgtgacagaggcggcgctgatgccggatctgagcctggacggcgcctatcagcgccagcgcgccacctcggtgggcagcatggatccgtccggcaacggcggagaggcggattataacctctggcgcggcggatccagcgccacctgggagctggacatgtggggcaagctgcgtcgcgcgtcggaaagtgcgcgcgccggctttgccgcttcgcaggagaaccggcgcgcactgctgacgtcggtgacggcggaggtggcgagcgactatctacgcctgcgcgccacgcagcaacagctggcggtggcgcaggaaaaccgcgccacggcgctgcgcacgctgcagctgacgcaaagtcgttatcagagcggcgcgggcaacgaactggatgtcgatcaggcgcaggtgcagttggcgcaggtggatgccctgctgccgacgctgttcgataggcaggaacgcttgatcaacgccatcagcctgctgttgggcgagcggccgggcgcgctgaaagcgatgttggcgccgacgaagcccctgccgacgctggcgcgcgcggtgccgatgggcgtgccgtcggatctggcgctgcgcaggccggatattcgcgaagcggcggagcgtttgcatcaggcaaccgccgagatcggcatcgccaccgccgactactatccgcgcatcacgctgaccggcaatgcgggctatcaggcactggcactggcggatatgggcagttggtccacgcataccttcgccatcggccccgccctgtatttgccgctgttcgacggggggaaaatcacccaacgggtgcgcctgagcgaataccggcagcaggaaatggccatcgcctaccagcaaacggtgttgcgcgcctggcacgagatcgacgacgcgctttccggctatcgcgcccagcagcgccgccagacgcacctgaccgaggcgctggccgccaaccgacacgcgtttgcgctggcgcgcgacagctatctgaacggtgcgagcgattttatccacgttctgagcacgcagcgtgcgctgctggatctgcagtccgcgcaaattgtttcagaggaggagacggcgatcgccgtggtgaatatctatcgagcgctgggcggcggctgggaacacacctacccgtcggcggcgccacaggagaaggctgatgcacaacacgctgaataa

SEQ ID NO: 429843 - DNA, 312 bp, Serratia marcescens
atgaacaagagaactaagcgtacttttacccctgagttcaggctggaatgtgcacagctgattgttgataagggttactcatatcgacaagccagtgaagcggttaatgttggttctaccacgcttgaatcttgggtacgccagctcagacgagagcgtcagggtattacgccttctgccacccccattaccccagagcagcagcgtatccgcgagctggaaaagcaggttcgccgcctggaggaacagaatacgatattaaaaaaggctaccgcgctcttgatgtccgactcactgaacggttcacgataa

SEQ ID NO: 429844 - DNA, 207 bp, Serratia marcescens
atggaacgcttcttccgcagcctgaaaacagaatgggtaccagcgaatggctacgtgggcaaagacgaagcccggcggcaaatcaatcgctatatattgaattactacaatagcgtcagaccacaccactataacggagggctgacgccggaagaatcagagaacaggtaccgttcttactgtaaaaccgtggccaatattacttga

SEQ ID NO: 429845 - DNA, 411 bp, Serratia marcescens
gtgttctggcgttgcaaataccacctgatttggacgccgaagtatcgatttaaaatcctccgcgacaaggtgggcaaagagctctaccgaacaatttatatcctctgcaacatgaaggactgtgaagttcttgagctaaatattcagccagatcatgtgcatctggtcgtgatagtccccccgaagctatcgatttcgacgttgatgggcgtcctgaaaggacgcagtgcaatccggctttacaatcgtttcccacatatacgaaagaagttgtggggcaatcatttttgggcaaggggatactttgtcgatacggtaggagtaaacgaagaaattatcaggcgatacgtgaagtatcaggataagaaggaccaagagatcgaacagcagatggagttgttgcaggattaa

SEQ ID NO: 429846 - DNA, 1305 bp, Serratia marcescens
atgagcaatgccttgaaagggctgttatggctgattatcgccgtggtggtgttggcgggaggatacgcgctgtactcgctgctgcggcccaccggcgcggagcctgcggcgccgatcgccggggcgccggccggcatgaccgacaaactggcgcgcggcgagtacctggcgcgcgccgccgactgcgtggcgtgccacaccgcgccgggcggcgcgccttatgcgggcggtttcgctttcaagctgccgttcggcaccatttacggcaccaacatcaccgccgacaaggaaaccggcatcggcaactggagcgacgatcagttcgtgcgcgcggtgcgtgagggcatcggcccgcagggcaacctgtatccggcgatgccttatacctcgtacaccgaactgagccgcgacgacgtgctggcgatcaaggattatctgttcagcctgccgccggtgaaacaggccaacccgcaaaacgatctgtcgttcccgttcaaccagcgttggggcatgaaattctggaacctggcgttcttccatgagcaacgcttcgcgccggatctcaacaaggacgagcagtggaaccgcggcgcttatctggcgacggcgctgggccactgcggcgagtgtcacacgccgcgcaatctggggttcggcctcaaccagagcaagcacctgagcggtgaagtggtgcaaggctggttcgccgccaacatcacgccggacaaacagaccggcatcggcggctggagcgaccagcagctgtcgcaatatctggccaccggtcatgcgccggggcgcagcagcgccggcggcccgatggcggaagcggtggaaaacagcctgcagttcctgacgccggaagataatatggcgctggtgaaatacctgcgcgatatcgagccgatcgccggcgacggcgccgcagcggtgaacttgcagccgaagggcgcgggggcttccacaccgatcctgccgggcgggcaagacagctcgctcgggcgccgggtgttcgccaacgactgcagcggctgccaccagtggaatgggccgggccgccagagcgagtatgcgtcgctggtcggcagcacggcggtgaacgatccgcaggggcgcagcgtggtgcaggccatcctgaaggggacaagcatcagcgtcggcgagcggcatgagatgatgccggcgttcggcagcgcgtattccgacgaggaagtggcggcggtcgccaactttgtggtcggccatttcggcgacaagcagggcaaggtcaccgccaaacaggtggcggagcagcgcaagcagtaa

SEQ ID NO: 429847 - DNA, 909 bp, Serratia marcescens
gtgtacgatctggcggataacctactgggcgagcgcagcccgcagaacgacatcgacgcgcacctgccgctggcgccgatcgccgacaaccgtctgacgcactggcaaaaactgttttaccgttatgacgcctggggcaacctgatcagccggcgcaacggcctttacgaacagcactaccgctacgacgccgacaaccggctggtgcaggcgcacggtcgcggcccgcagggcgaattcgaggcgcagtaccattacgacgcgctgggtcgccgcagtcgcaaagcggtgcgctacaagggcaaaaccgaacagacgacccgtttcctgtggcagggttaccggttgctgcaggagcagcgcgacgacggcagccgccgcagctggagctacgatccggccagcccgtggagcccgctggcggcgctggagcaggcgggcgacagccgctcggcggatatttactggtatcacaccgatctgaacagcgcgccgctggaggtgaccgacgcggcgggcaacctgtgctggtccgggcaatacgacaccttcggcaagctgcagggccagacggtggccggcgcggcgaagcggcagggcgcgcaataccagcagccgctgcgctataagggcaaaaccgaacagacgacccgtttcctgtggcagggctaccggttgctgcagggccagacggtggccggcgcggcgaagcggcagggtgcgcaatatcagcagccgctgcgctacgccgggcaatatcaggacgacgaaagcggcctgcactatacaacctgttccgctactacgaacccgaggtggggcgtttcaccacgcaggatccggcagaatatgaaaaaatggtttccacaggtaaggttgtgcaaagcacaacgggaacaacccatgtag

SEQ ID NO: 429848 - DNA, 267 bp, Serratia marcescens
atgctcaaaaaaataagtgattggatcttatccaatagccattatgaagttaagtacaatgctaatgattttacagatagtctggttgttgatatagatgacgatacgaagattgcgcgttttacggtgtgggatgatgcatcttgtatgttggagatcattgatgttgaaaccgggaactatataattaatgaacgaagagaattatcagacgagggaactgtaatagaagcatttaaagagtttgtatcgttgcttagaaattag

SEQ ID NO: 429849 - DNA, 354 bp, Serratia marcescens
atgaaggtgcaagcaataaagactaagtatgggatcattcaagggcgagatgccttgattatctctgaacatgaagtgagtctttctcctttcacatttaaaattaaagcgttgctttcgtcatcggcatgcgagttagaggttttgaatgaggctgatgtgaaaatagagttcttttttagtgatatagaaaggatgtctatctataaagtcgatgactatccttatgagaagtattcagagtcaagctttgacctgctggaggaatacagttcaggaaaagcaagggttgcgttaagtacctatgatcatgttttcgatgttacaggtagttttaaaatattgtatgaataa

SEQ ID NO: 429850 - DNA, 396 bp, Serratia marcescens
atgtccgagctcgtttccgcatccggcaaaccggtgaaaattcccggcccggaccatccgattacgctgacccgccatccgacgcgggtcgtggtgcgcggcgccggccaaatcctggccgacagccgtcatgtactcatcttgcaggaagccaactatccgccggtgttttactttccgcgtgaggatgtgaatatgcggctgctgcataaaagcacgcatgtgagctactgcccttataagggcgactgcagttatttctccctcacgctgaacgacccacagggggacaatgtggcctggagctatgaaatgccttacaacgccgtggtggcgatcaaggatcatctggcattttatcccgacaaagtcacggcgatccgtaccgaagcctga

SEQ ID NO: 429851 - DNA, 1200 bp, Serratia marcescens
atgagcaccaccgccactaacggcgccccgtccgccaacgtcgtgtttctgctggccgccggcgccggtctcagcgtcgcttcaatctattacagccagcccatgctcggcatgatgggcgccgatttccacgccggcgtcgccgatgccggcatggtgccgacgctgacccagttgggttatgcgctgggcattttactgttggcgccgctgggcgaccggtacgatcgccggcggatcattctgatcaaaggcgcgctgctgacgctgacgctgctgctttgcgcgtttgccgcctcattcccgctgttgttgctcagcagcctggcgataggcctgaccgccaccgtcgcccaggacattatccccgccgccgccacgctggcgccggaggccagccgcggcaaaaccgtcggcgcggtgatgaccgggctattggccggtattctgctgtcgcgcgtgttcagcggcgcgctcgccgagttcgccggctggcgcagcgtttacgcgctggcggcgctgggcgttttgccgatcacgctggctatctggcgcatgttgccgcgtcttcgcccccataacgcgctgagttaccccgcgctgctgcgctcgctggggcatctgtgggccgcgtatcccgagctgcggcgtgcaacgctggcgcaaggctttctgtcattgggcttcagcgctttctggtcaacgctggcgttgatgctggcggagcgctaccagatcggcagcgcggcggccggcgcgtttggtctggcaggggcggcgggtgcgctggcggcgccgttggcgggaagcctggccgatcggcacggccctgacgccgtgacccgcatcggcgcggcactggtcctggccgccttcgccctgatgtttctgcttccgctgttgccgctcccggcgcagctggcgctcattgcgctgagcgccgtcggattcgatctgggcatccaggcgacgctgatcgcacaccagaccatcgtctacggtcttgatccggcggcccgtagccgcttgaacgccctcttgttcaccggcgtattcatcggcatggcgaccggcgccgccctcggcagccgcattctggcaagcgcgggctggccgggcgtcgtggcgctggcaacggcggcgggggccgtggcgctgtggatccgctgcgggcgcaaaacggcacgcgtagcggcctga

SEQ ID NO: 429852 - DNA, 1236 bp, Serratia marcescens
atgaaaccggaaaaaataaacacccagaaaaaagttgttgttattggcggtggttcatctggaataagcgtcgtggcaagcataaggaagcgagttaaaggcattgatataacggtaattgaacctggcgactgtcattattatcaaccggcatggaccctggtgggcggcgggctttttgatatcaatgaaacgcggcgttccatgcgcgccgtcatccccccaggaaccgcatggattcaggatagcgtggtcagagtggagcccggcccaaaatatgtcgagacccgccaagggcagaaaataaactacgacttccttattgttgcctgcggcctcgttttacgttgggataaaatagagggtcttgaagaaacgttgggaatgaatggcgtcacctctaattatcgttttgatcttgcggaatacacctggaaactggttcgtgaaatgcaaggcggcgaggcgatattttctcaaccaccaattccgataaaatgcgccggcgcgccgcaaaaagccttatacctttcatgcgatcactggcggcgacaaggtgtccttaataatattaacgtcaatttttgcctggcgggcgcggcggtattcggcgtgccgcaatttgttcctccgctgaccgattacttgaaaaaataccgcgcacaggtcaacttccggcataatttagttcgcgttgatgggcagcgtcggcaagcgaccttttctctggacggtgatgaagaaggcaaacgcgaagtgacactgcccttcgatatgctgcacgtagtgccgccgcaatctgcgccggcgttcatttcgcaaagtgggttgtctgacgagtcaggttggtgcgacgtggataaattcaccctacggcataagcagtggcagacgatttttgcggttggcgactgttgtgccacgccaaatgccaaaaccctggcggcggctcgcaaacaggtggtggtggtggcagagaacatcgcggcgcagcttaacggcgcccctgatgcggcacggtatgatggttatggctcctgcccattgacggtagagaaaggcaaggttgttctggcggagtttggttacgacagtaaattgctccccacctttcctctgttcgacaacacgcatcccagccgtatggcatggtggctgaaggcctggtttttacccaaattttactgggcgggcatgttgcgcggggtcgaatggtttgccaaaagcaaaccatag

SEQ ID NO: 429853 - DNA, 786 bp, Serratia marcescens
ttggattttttccattttactttttataccctgatgttattggtgataaccggaggaatagtcggatttctcttggccctgacaggcggaggcggctccatcgtttgtgtgccgctgctgctgtatatggtgcaaatcccggatacgcatttggtgataggcaccagcgccatgtccgtcgccgtcagtgcgctgctcaacctttttgcgcacgccgccaaaggaaacgtccggtggcgaaccggcattgtcgtgtcgctggtcgcggtggcaggaacgctggcaggttcacagatgggaaaaatcacggacgggcgctatctaaccctgcctttcgctttgctgatgctgattgtcgccggattaacgctgaaaaaaaatcaccgggccggcaacgggttggcttccccggatgcaacctttcatcccgccatcgtgtggcccagcgtgttggcgctcggcgcggtggccggctttctgggtatcggcggcggatttttagtggtgccggcgctgctctggtttttccgcttttcgctgcttgaagcggtggccacctcgctggtggtggtttctgccatgggtttatcgacgagcgcaagctatgccttgtccggcaaggtgtcgctcgtcatcacgtgctggctgatcgtcggcggtgttctggggggcgtcgtgggggttgcgctcaccgagcgcctgaagaaacgcgaggacattatccgtgtgctctacgccgccatgctcttggtgctggccctttatatgctttttaaaagcttataa

SEQ ID NO: 429854 - DNA, 1587 bp, Serratia marcescens
atgagcgtaagtactattactatccgtaaattactacaagcagtatctgacggcgaaatccggatccctgcatttcaacgagattttgtttgggaacccgatagagtacaatttctaatggatagtctttttaaaaaatacccagtaggaaccttgctgttgtggaagacaaaagagaagcttgaacatgataaaatgttagggccatttaacttgccagctccaaaaaaagattatccaattgattatgtccttgacggacaacaaagaataacctcaatatttgccacatttcaaactgaattggaaaaagataagagttttggaaattggctagatatatattttgatattgatgcaaagagtgatgttcaagactctcagtttattgccttagaaaaaactgatgtaaaaaaaaatcatgtccctctaaatctactttttgacatacagaatttcggtaaatatgtcagagagttttacgaccaaaataggattcgagaaattgacgaactacaagctgcttttcttgatgtgcaaatccctgttgaaactgttgaaatagatgatcactcaaaaatagcgatcatatttgaaagagtgaacagagggggaatgcctttagatacatatcaactgctttcggcttggacgtggagtggtgattttgatttaagggcaaagtttgaggagctgggggacgacttagatgatcatggttataaagaactcggcgatgaagcagatttattattaaaatgctgtgccgcagtaataaaaggcgatgcttcagctaaatctgttgttgagcttaatgggacagaagttaggaataaatttaagaagtttcagacaggtattttaggggctgttgaattcttaaaaaaagactgtaaagtcgcctcatttaaaaacttaccttacaaatcaatgctaataccattatctcgttgtttttcaactgaaaaaagatcaggtttccatccatcttcaaagcaaaggcaagctttagtgaaatggttctggcacagttgtttttctcgtcgctactcaaacagtgtcgatacggctgtaaaactagacgtgctagctatggataaacttctaaaaaacgacttagccgatctggagtctaggacatatactgtgacgcctgattttttcacaaaaaacatattccaaatgacctcagtaaataccaagacattcatacttttccttgccaataggaaacctctttcgttcctttcaggttcaaaagtagatttagagaaagtattgttagcatgtaataaaagagaataccatcatatattcccgaaagaccatcttgagaagaagctcaagctaaaaaataaagtagatatatatccgttggcaaatttctcgttcttatcaaaaagagataatgcatcaattcagaattcatcgccatctgaatatgagaaaagaattgatcctgataaaaaagaaaaaatattaagctcatcttacatccctaaagatggattaagtctaccatacaaggactttataaaggcacgaagcattctattagcaaaagaggcaaacaagttaatcagctag

SEQ ID NO: 429855 - DNA, 813 bp, Serratia marcescens
atgcatgcatcaaccacgccggttttctccctgcactacgtgggaatcaacctgaaacggggcgtcgcctcggatcgtttcgaagcgttcgttcgccataaaggcgtcgccatcccggcctatcccggctggcgatggacgctgctgcgcggcctgcgcggcgagcgtgaaaatcagtacctgatggtttatcaggctaaagacgccgccacctacgcgcgctatatcgacggcaacggcgagctgaccgacgaggcgcacgccttttggcggcagcgtccggaggccgccgcgctgattgaggagtggaaaaccttcgcgaccttcgccgaactgccgaccctttacacctgttaccgtctggtggccgagaatagccgcagttcattgccgcccggccccaattaccgcagcgaaccagggaaggaaagcattcagcgtgtcatcggcattcataacctggcgcttaaagcgggcgtctcgccagagcggtttgaacggttcattaccgacaacatccaccgcgtggaagactacccgggctggaagtttcacctgctgaagggccagagcggcaaccggctggaccaatacgcggtgatgctgatcattgaaagtctggcgtcgctcaacgcgttccatccggagctcgatgtctcaaccgagcaagcgctcaggttcgtggccgagcatcaggacaccgaacgcatgtacgacgagtggaaaacactggcgtcgttctccggcgcgccgcaaatctacacggattacctggcgattggcggcaacgagaatgacgcccatcgggcgtaa

SEQ ID NO: 429856 - DNA, 1173 bp, Serratia marcescens
atgatgctgccttggctaaccggcgaggccgcagagaatcatcgccggcaaatcgccacccgagcgatcttcttcctcgccgggttgggcatggccgcctgggcgccgttgatccctttcgtgaaagcgcgattgggcatcgatgacggcgcgctcggtttgctgctgttttgcctcgccgccggctccatggcgatcatgcccttcgccgggtatctgatcgccaaactggggtgccgcgccgtgttgctgggcgctggcgccttgctgtgcatcgacttgccgctgttggcgttactcgatgctccgctgttgatgggggcggcattgggggtatttggcgccgtcaacggcatcatggatgtggcgatgaactcacaggcgataatcgtcgagcgggagagcggccaggcgaaaatgtccggttttcatggcttctacagccttggcggcattgccggcgccggcggcgtcagtctgttgctgctgacgggtctcgccccggtccaggccatcggcctgatcgccctcctcatcgcgatcctgctgctgatcgtcgccggcgatttactggcgcacggcggcatcggcgagcggcgacggggcggcgcgcggtgggcgctggcccacggcaagatcctgtttatcgccctgctctgtttcttcgtgttcctgaccgagggggcgatgctcgactggtcggcattattcctgcatgccgagcgcggcgtggccaaatcgcaggcggggatcgggttcacgctgtacgccgtcgccgtggcctgcgggcggctgtatggcgacaggctgatcggcgcaatcgggcgctatcgcactctgttgctcggcagcctgtgcgccgcggcgggcgtgctgttgaccgtcaccgtccctctggcatcggccgcctttggcgggttgatgctcgccggcctgggcatcgccaacatcgttcccattctgttcaacgccgtcggcaatcaaaaacaggtgccgcccggccaggcgtttccggccgtgacgctggtcggctatctcggcttattaaccggcccggcgctgatcggttttatcgccaattacaccagcctggccctggctttcggctgcacgttgctgtgcctgttgctggtcagcatcagcgccaaagccgtgacgaacacatctcactaa

SEQ ID NO: 429857 - DNA, 810 bp, Serratia marcescens
atgacgacgacagtctccgatcccaaaccggtattcagcttctattacatcggcatcgataccgaagccggcgtcacgccacaacagtttgaaaccttcgtgcgcgaacaaggcgtgcatatcccctgttatcccggctggcgctggacgttgctgcgcggcctgcgcggcgaacgcgtcgggcaatacctgatgctgtacgagattgacagcgccgagcagcgcgatcgttacgtcaccgccaccgggcagcgaacggcgcacgcgcacgaattctggcggcggcatgccgccgcgcaggaaatcctcgccgagtggcgaaaactgggcacctacagcctgctgccgacgctgttcagcgattatcgcctgctggctgagaacagaaaaagcgacgtgccgcccggcccgcgctaccgggaacggccgggcgaaccgcccgaggcgcgcattatcggcatccacaatctggcgctgcgcgaaggcgtgaccccggcgcaattcgaacgctttatcgccgaaaatcaccatcgcattgaggattatccgggctggaagtttcacttgctgaagggagagcgaggcaatcggctcgatcagtacgcggtgatgatggaaatcgtcagcctggcggcgctggacgtgttctatccggagcccgatatcgccaccgccgaagcggcaaccttcgccaaagcgcatcgcgacaccaagcaaatgtatgaagagtggaagcaactggcgtcattttccggttcaccgcagatttataccgattatctgtccgtcgcgcagagccgatcgtcatga

SEQ ID NO: 429858 - DNA, 1449 bp, Serratia marcescens
atgaacgacgaagccttgcactcattgctggatatcgatgaaaactatcccacgccgcgggtgaacgcgttcctggcgcaaccggaaaaccgggcctttctggagtacgtccataaggatccgttcggctgtcacgtgttccccggcgatctcgtcgactacccgctggccgcgttttttgccgatatggaggccgacattcgccaggcgggcaaaatccacctctgggcctatatcccgacctgccgctatcgctgccatttttgtcagtaccccacggtgatcctcaatcccaaggcgcccgcctctcaggcggtattccgcgatttggtcgatttcaacatcaaggaggcgcaaatgtggctggcgcgcgtgcccagcctggccgaagtggaaatcggcgaattcaacgtctttggcggcacgccgtccttgctgccggagccggaactgcgccgcatgatggccttctacttcagccactttaacttcaccaacgccaccctgcgcttcgaaggggagcccggcaccctgaacaaagcctatctggcgctgctgaaagagctcggcttcagcaaaatcagtttcggcacccaatccttcaatgacgacatcatcaccgcctgcgggcgtatgcactcggccgaagagtgcgtggagaccattcatcatgcgcgcgcgctcggcattgattgggtcagcgtggatctcatttacggcatgctgggccaaagcgtggacgacgtgaaatacgacatggaaaaaaccctcgagctgaatctgtcgcacgtcgtctgcaccaagctgcacatggatgagtttattaaaaatcgcaccggcgtctcgggcgagcgcgaaagcctgtggcagaaaaaggggctgatcagcatcaacaacctgcgcttccctgggctgggcaagcagtaccaaatgcgcgagctggtcgagaactacctgaatggcggctataccgaacaccccaccatgtattttcaccgcaatgaccaacagccggaaaagtggaaagcgctcatcaccgatctcgacaagcagtatccggaagtggcgatcggtttgggcggcagctccaaatcgacgcgatccgaagccatcaacatcaccggttacaagaagtacaaggaggcgctcaaccaagaccgcctgcccatcgaggaaagccgcggtttctccccgatccagcgtgaagtgaacgccttcaaaatggcgctctccaccttgctgccggtggacgatcgggtgtttaaacggcgctttgacggcaacagcctgtttgctaacccggtcatccgccgcacgttgaaaaccctggtggataaagcgctggtcaccgtcgatggtccgtgcgtgacgctcacgcccatcggcgtcacgctggtcgaagccattatcaatacccaattttccgccgcattcgccaatcaggagtga

SEQ ID NO: 429859 - DNA, 1278 bp, Serratia marcescens
atgcgtgatactgtttttgtgtctgtcgtactgcccgtttataatgaaagcgaccgtattgaggcggttttactttcgctgttcaatcagcacaccaagaatgaattaatcacccacgacacttacgaactgattgtcgttgataacaactccaccgatgattccgtcgctaaaataaacgcgtttagtgaaaggcatccggctatggccattcatgttatcgccgaaacggtgcagggtgtctcctcggccagaaaacgcggcatggactatgcgtcgctgcgttctaaagcccgcgacagccggctgggaaataaacgcaagcactatatcgtttccgccgatgccgattgcaccgtggatgcattttggctttacgagctggtgaataccatgatcgagcaacaaggcgacctgggcacctgcaactattactaccctcccgcagagtttgagcaccgccccaacctgttccgcgagatccaaaaaacgctgcgtctgcgcgaattttcgttctccctgttcggcggcttccccgacggcaaagggttcggggtggagcgcagcctgtatgacgcggtaggcggcatcgaaatcttctaccagctcaaccatggccgctttgtcgaacacctgtccgacgactgggacttcggcattaaggtcatcgcctacggcggcaagccggtttacgctcgccatgcttacgttgagatcaacagccgccgggtggacaccattctcgatgaggtgatcaacggcatcgcctatggcaaggacggcatcattatcatgaaggatgtccggccggacgttgagcggcagaaaaccgcgctggcggacgccacgccggcggaggcgaaacaggcctgggactactcggtcaaggactacacgccaaagaatatcttactgccggtgctgctcaatccgtatctgctgttggaaaacagcgaagtgcgcgatttcttctccggcccgctggccgacagcctctaccgccgcattcacgagctgaaacacgagatgcgcctcatcgatttcaaaccgatccatgcctataaaacccccgcctatcggctctacctcgaatttcgcgatgcgctgtttgccgccatgcggcgcgccgtcggtgacgatatcggcttcccgcccgcattgccggcctgcttcgatacgatcaaagacgaggatttcacccgctttgtttattacttctgtgaagaccgcgagtccggcgaagcccacaactatttcggcaacggaggggtcttctga

SEQ ID NO: 429860 - DNA, 1377 bp, Serratia marcescens
atgcacgaaaggcaagagaagaatgcaatgttcatttcgttcgatgccgtctcggtctcggggatcacggtggaagcaatgaagattgccaaacgactgcaagcctgtggatttcgctcttatcttgatttgggatacgacatcaagattgataagggaaactttaataaaccctatcagcatgagcatgacatctaccgcgatgtctttacgctggtccgcctggacgacatcacgtcgattccagattaccaccccgcctttctcgagtacgcgcacgcggcgttgatcggccagaaaacgcccattgacgagcaagaaaaagccgctttgttgcataccatcgcgttgacggcgcggcagctggcggatcgcctcgtcgcccaatgggaagcgctcgcaatcagccatgtggtggtggaaaacggcacgctgccggaaaacatcatctataccaaagcgctgtatctggcgatcgaagattatggccgacgttatcgactgacgcgtttcgtcatctggcgcgatcatgacctgatgtggaacagcgaaaaaaaggtgctcaaatacggcccgccgccttattctcacgccatcaaacctatcccttcaaaatacattacctatgtcacgctcaatcacgatctgaagcaaaagctggaggcctggtgcaatcatgatgtccatgtcgaggtaaagaaaaatacctatgacttctcggacagtcatgaaagaacgaatgtcagaaagcagatgaatattcgcgacaatgatcttctcattgccagaaccacccgcatcatccctcagaaaagattggatcgcgatattgtgcttatcagccggcttaacgatttatttatccgcgaccacaacacgcgacgcgcctatttggcgatcgccggcaatgaatatgaaaatccgtcatgttatctgcaactcgccaaattggcgcaggaactgaatgttctcccctatgtcaaattcgtcggcatgcttccccatgtcgatatgcgctcggaaaacgacgcgttttgcatagaggacctctatcactcttgcgacctggtctcttttctcacctcgtatgattatgatagctatggcaatcctatcggcgaagcgatcagttgccgccgttgctatatcaccactcgctacgaatattatcacgaggtctacggccggcatgggtttgaagcgcccgtcatgccgatctccgagttacaggatgggccgccgaacgacgaattcatccagcaagtctaccggttcattaataataaggagaagatgaaacgcgtggcggaaaagaattacgcgctgggcaagcggattttatccaacaacgtcatggagttcttaaatatcagctaa

SEQ ID NO: 429861 - DNA, 2106 bp, Serratia marcescens
atgagcctgttgcccgagcagaaaaataacaaaaatccgatcgacctctacagcgaaatcgtagacgacttgccgggtctgatttgcttcggcaaccgccttggcggttacttcaacaagcagtggcgcgactataccggcgcaatcgccggtgagcacggcgccgcagactggctcgaggccctgcaccctgacgatcgcgaacgcctggccgcgcaatggcgccaggccatcgttgccctctcctcgttcgccggcgaagcccgtctgcgcgagcgcagcggcgcctaccggtggtttatgctggcgtttaacgcccgccaggacggcaaggcgctggagcccagctggtacctcaccgccaccgacatccatccgcaaatgctgcaacgccagcaaaacgttcaggcgctctctatccagcaagacatgctggacgccagcgtcgactgcatcaaagtgatcaatcgcgacggcacgctgcgccacatgaaccgctccggcagcctggcgctcggcctcgatccggcgcaaaaagagtttggcatgccctggctggggctgttgtcgcccgaagttcgccgccgcggcagcaaagcgttgcgcagcgtcaaagccggtaagaatgcgcgtttcgcgggattgagcgtgacgccgcagggcaaaaaacagcattgggacaacatcctctctcccgtcagcgatgagcacggcgccgtggccgagatcttgtgcgtctcacgggatgtgacgtcgcagcgcgtgatggagcaacgcctgctgcttgccagcgagtatgacgaactgaccggcctgcccaaccggcgcctcttcaagaaaaagctgaagcaagagatgaagcgcgccctgcacggcaacaagtcgctcgggctgatgctgctggatcttgaccatttcaaactggtgaacgatacgctgggccacgcggcgggcgatcatctgctgcgggtgctgggcaaaaggctcagcgcctgcatgaatacccattcgttcgtctctcgcctcggcggcgacgagttcgccgtcgtgatcagcgacgtcgaaaacgagcaggatattttccgcatcgccaacaagtttctgctgcagctggagacgccggtcacccacggcggcaagacgttgcattgcggcatgagcatcggtggcgccatctatcccaaagatgcccgcgatgcgtcagagctgatgaagtgcgccgataccgcgctgtatgaactgaaagaaggcggccgcggcggcgtctacatgttcgacagcaagatgatggacaaagcccgcgcccgcgccagtcagctcaactacgcgcgccagatcgtgcgcgataattgcattcgccccaactaccagccgaaggtcagcctcgccgacggcagcatcgtcggcttcgaagcgctgctgcgctggcattgcccgcaaaacggcatacagctgccggcgacggtcagcgaggccttcaacgactacgaactggcgaccaaaatcagcgaagccatgcagctgaaagtcttcgccgatatcgcccgctggcgtgcggccggcgtggcagtgcggcccgtttcgctgaacgtgtcgccgatcgagtttttacgcgacaactacgccgaaaccttcctgcaacgcctgctgaagttccacattccccaccacctgatcgaactggaagtgaccgaacacgcgttcaacaagcacggttcgaaatacgtactgcgcgcgctgcacatgctcaaagagatgggtatccgtatcgcactggacgacttcggcactggccactcctcgttcagccatatcatggactacccgctggactgcattaagctggactgcgacttcattcaacgcatgaacaccgaaccggcgatcctggcgatcgtggaaagcatcggcattctcggtcaaaagctgtcgatcgatatcatcgccgaaggcgtggaaaccgagcagcagcgccaaacgctgtgcgaagccggtttccatatcggccaggggtttttgttcagcccggcggtgggatcccagcaggtgccgacgctgctgcaggcgatacttcagcctgccgaaggcggcacggcgaatcgttaa

SEQ ID NO: 429862 - DNA, 2436 bp, Serratia marcescens
atgtcagatgccaatgcacgttcgggcataaaacttacgctgtggtgttgcctgttgggcatcatcctggccgccaccggcctgttcttcaccgtcgccggcggcaaactgctctcgctgggcggcagcgcctacttcctgattgccggcctcgtcatcctgctgtcggccattcagtttttccgccgcaagtcctcagcggtttggctgttcctggcggtgttcatcagcaccgtcatttgggcgccgttggacgccggttttgatttttggccgttgatttcccgcctgatggtgccgaccggcctgatgctgctggccttcctcacctggccggcgctgcgcaagcgcgaaggcaaagcgccgttggccaagccggcttacctgctctccgccttgctggcggtcggcatggtcggcgcctttgtccaaatgttccagccgcatcccaccgttgccttcagcggccagccgctgccgctgatcccggttgataaagcgcaacagcagaaagattgggataactacggcaatacgccgggcggcagccgtttcgtcgcgctggatcagatcacccgcgataacgtgcgggagctgaaagtcgcctggacgttccatacgggtgacatccctatcagccctgatggcaacggcgcggaagatcagcaaacgccgctgcagatcggcaaccgcattttcctgtgcacgccgcataacaatgtgatcgccgtcgacgccgacagcggcaaagaaatttggcggcgagaagtcaacgccaagtcgcaggtatggaaccgctgtcgcggcctggcctacttcgacgtcaacaagccgttgcccgcgccgagcgtgccgggttcaacccccgccgcgcccgtcgcgctggcggccggtgacagctgccaacgacgcatattgatgaacaccatcgacgcgcgcctgatggcgattaacgccgacaacggcgaattctgccaacacttcggcaaccagggcgtggtggacctgaaggccggtctgggcgacgccgccgatcctaaatatcaactgacgtcagcgccgacgctggccggcaccaccgtggtggtcggcgggcgcgttgccgataacgtgcaaaccgatatgcccggcggcgtgctgcgcggcttcaacgtgatcaccggcgaaatgcgctgggcgtttgacccgggcaatccgcagccgaacgctgccctgaaaccggatcaacacttcgtgcgcagcaccccgaactcctgggcgccgatgtcgtacgatccggcgatgaacacggtcttcctgccgatgggcagctcctccgtcgatctgtggggcgccaaccgcaacgcgctggatcaccgatacggcgcctcggtgctggcgctcgacgcgaccaccggcaaagagaaatgggtctatcagaccgtgcataacgatctgtgggacttcgatctgccgatgcagcccagcctgctcgacttcccgatgcaggacggcaccacccgccctgcgttggttatcggcaccaaaagcgggcagatcttcgtgctggatcgccataccggcaaaccgctgaccgaagtgaaggaactgccggtgaagacccgcaccattccgggcgagcaatattccgccacgcagccgttctccgtcggcatgccgcagattggcgcgcagaagctcagcgagtccgacatgtggggcgctacgccattcgatcaattgatgtgccgcatcagctttaaatcgatgcgttatgacggcctgttcaccgcgccggacaccgacgtttccctcagcttccccggctcgctgggcggcatgaactggggcggtctctctaccgatccgaacaaccgttatattttcgccaacgatatgcgtctgggtctgtgggtgcagatgatcccgcagaaagccgacgcaggcgcgccggccggcaacggcggtgaagccgtgaataccggcatgggcgcggtcccgctcaaaggcacgccgtatgccgtcaataagaatcgcttcatgtcgccgctgggcattccttgccaaaaaccgccgttcggcaccctctccgccatcgatttgcagacgcgcaaagtggtgtggcaggttccggtaggaacggtgcaggataccgggccgttcggcatcaaaatgcgcgcgcagatgccggtcggcatgccgacgctgggcggcacgctggcgactcaaggcggcctggtgtttatcgccggtacgcaggattattatctgcgcgcctttgattcgtccaccgggcaagagctgtggaaagcgcgcttgccggtcggcagcggcggcacgccgatgagttacgtctcgccgaccaccggtaagcagtatgtcgtcatttccgccggcggcgcacgtcagtcgccggatcgcggtgattacgtcatcgcctacgcgctggataaataa

SEQ ID NO: 429863 - DNA, 2310 bp, Serratia marcescens
atgacactcgccgcctcgtggcagctcgataacggtttggccgtcagggcgattagcacccctgacgccgaggccgccgccgcgctggtgcgcatcgaggcgggcagctttcaggcgcctgccgcctggccgggcctggcgcatctgctggagcatatgctgtttcgcggcagcgtgaactttaacgcgcaggatgggctgatgggctggacgccggcggtcggcggccggttaaacgccacgacccaggccacgcaaaccgcgtttttctttgaggtgggcgccgaacagctggcggaggggttggccaggctgatcgatatgctcgccgtcccacagctggcggctgaggcaatcgcccaggagatcgaggtcatcgacgccgaatatcgcctgctgcgcgccgacgttgaaacccgctgcgaagcggcgcagcggcagatgttcagcggcattgacgcgttgcaccgctttcatatcggcagccgcgccgctttcggcagcgatattcccgcgttgcagcgggtgctgcggcagtttcaccaccactattaccgcgcgccgaacatcacgctgtggctgcaaggcccgcaatcgctcgagcagttgcatgcgctggcgcagcgctacggcggcgccttgccgccgggcagcatcgcgccgcccgaggcattgccgccgctggccgccgggcaagattacacgctgtctctccccggcgcgccgcagctgcggttggtgtttgccctgccgcactcccgttcacgcggctggctgcggcggctggagcgtttattgctggacgaagcccctggcgggctgctggcacggctgcgcgctcacgcgtgggccgacgccgttaggctggattacgcccgctgcgctgaaaacagcgccctgctgagttttatttttaccgtcaatcacggctcggcgtctgaagccgcccacatcgaaagcgccttgctggcctggttgcaggcgcttatcgcgctgacaccggctcagcttgcgcatttcgggcaactggcaaaccgcgatttccaccgtttggcgccgctcgatcagttgcgcgccagagcatttgggctgccgccggtggagccgaacgacgattggccacggcatatttcggcgctgattagcgcgccgcatcgccgtctggccatgctgcctgagggaggcggtgaaacgcgtgaaattcaagggctgccgttggcgctcgcgcccttcgtccgcaccgtgccgacgcccacaatagatcctttccgctttttctccacctcggcggcgctgccgatcccgcccctgccggccggccaggcgccgctgcggcatctgcaccccgacgaagcgcagccggtgctgctgctgcgcccatcgccgcatggcgctctcagcgaagaacaggcctgtggtttgcaggcggcattgcgccctggagcggccgagttagcccatcgggagggacatttaagcttcgagcgccaccagggcgtgtggttgttacagctggcgggcagcgcagcgctgatctgccacggtctgaacgtcgtgaatcgagccctggcggcgctgccgccggccgtcatcaacgaggcggcgagaaacctgcgccacgcgcagctcaaagcgcaaaacgatatcgccattcgccgcctgttagcccaattgccggcggcgttgagcgtatcaacggcaacggccccactctggcatgccaccctggtcggcggcgacggcgagttaaaacggcggctgtcgcatttgctgtatgactttccttttcccataaccgacgaggctcagcggccggcgcctctgcatcaccaccccgtcaccctgacggaaagcggcgcagaacacgccttgctgcaattttacccgctgccgaacgacgaagccgaagggcgttgggcgctgcgcgtgctggcccggctttacgcgccgcgttacttccagcagttgcgcgtcgagcgcaacgtgggttacgtggtgcaatgcgcctttcatcgcagcgccgatgccgaaggcctgctgtttgcactgcaatccccgacgttcgccgttgcgcagctgcggcagttaaccgacgaattcttgctgcagatgcgccatgaactggcgcacctcggcgccggcgaactggcgctggcgcaacaggcgctgcggcaaagcgtgcagcgcctcagcgccgagccgttgcaacgcgcccgggaaatcgccctggaaaatcgccaccgggtggcgcaggttgcctctctgcctgccgcgcagctcgtacactggcagaaacggatattcctctaa

SEQ ID NO: 429864 - DNA, 135 bp, Serratia marcescens
atgcgaatttttctcattggcttcgaactatcacgatgcatgcaaaggagcaccgctatgactacctggaccaaacctgagtttgttgacctgcgtctggggctggaagtgacgctgtacatttccaaccgttaa

SEQ ID NO: 429865 - DNA, 663 bp, Serratia marcescens
atgagtaccctgaccactgcccccttagcgccgctgctaagccgcctgtttcaacaggcatcccgccgctcgccggcgcttgccgccctgttccgcgacgtgccggacgcagagcaaagccggctgatgcagagcaaaaccgagtatcgcgaactctaccaccgcctgaaggatttcccgctggccgtgtcgccggcaaccggcgcattgctgtatatgttggcgcgcggttgccgggcgcaaaacatcgtcgaattcggcacgtcgttcggcatttctactctgcacctggccgccgcactgcgcgataatggcggcggccgattgattacctgcgagtttgaaccgagcaaagcggtgcaggcgcgcaacaacctgactgaaggcggcgtcgtcgatctggtggagatccgcgtcggcgacgccctggaaacgctgcgcgacgatctgccggccacggtcgatctgctgttgctcgacggcgccaagggactttaccccgatatactcgacctgcttgagaaccgtctgcggcccggcgcgctgatcgtcgccgataacgccgatgacagcccggattacctggcgcgggttcgcgctccagcgtcgggctatctctccacgccgttcgcggatgacgtcgagctgtcgattcggctttaa

SEQ ID NO: 429866 - DNA, 642 bp, Serratia marcescens
atgactgaacgccgcagtaagcaaatttcctcgagaaaacaaccacaacaggcgcgatctgccgaactggtttccgccattctgaccgctgctattcaggttttggcgcaggagggggcggcacgtttcactaccgccagagtggctgaacgtgccggcgtcagcgtcgggtcgctttatcagtatttccccaacaaggcggcaatcctgtttcgtttgcagagcgacgaatggcgacagaccaccgatatgctgagccgtattttggccgaccgcgagaaaacgccgtacgagcgcctgcggttgctggcgcaggcatttatccgttcggaatgtgaagaagcgcagatgcgcgtagcgttgaatgatgcggcgccgctttaccgagatgcgccggaggcacaggcggtgaaggcgaccggcaagggtatcgtgcaggttttcatgtgcgaagcgttgcctgatgtgccgccgttcactcgtcggttggcgggcgatctgatcgtcggcacgttgggggcggcgggcaagcaattctccgaaacgccgcgaaccgataccgagatcgcgtcttatgccgatgcgatggcggacatgttctgcgcgtatttagccgatttaaacgggcgtgtggcgcggtaa

SEQ ID NO: 429867 - DNA, 1284 bp, Serratia marcescens
atgagctatgaaattgaaaacgtaaccgccagagagattctggattcgcgcggcaaccccaccgtcgaagttgaaatgactgcggcgggcgtcgtggcacgggcttcggttccctccggcgccagcaccggttcacgcgaggcggtggaacaccgcgacggcgatccgcaccgttacggcggcagaggcgtactggaggcggtgcaaagcgtcaaaacggcgatcaatgaagcgctgcgcggggtagatgtacgccaacaaggggagattgaccgccggttgatcgcactggacggcagcgagaacaagagccgattgggggccaacgccctgcttggcgtttctctggccgccgcccgcctcgcggcgcaattgtcgcagctgccgctgtatcgttatctgggcggtctcggcgccaacctgctgccggtgccctgcatgaatatcatcaacggcggcgtgcatgcccgctggcaaggtgcggactttcaggaatttatgatagcgccgctgggcgcgccgtcgctgcgcgaggccgtgcgctggggcagtgaagtttatcaggcgctgcgccaaattctgttggagaaaggcctgtcggtcggcgttggcgacgaaggcggttttgcgccggcggttgcctcgaaccggcaaccgctggagctgatcgtgcaggcgatagagaaagccggttatcaaccgggagacgatatcgccatttgcatggacccggcctcgagtgaattctatgccaacggcaaataccgcctgcgcagcgaaaacgctgaactggatgccgaacagatgacggcctattaccagcggctggtgcaagattttcccatcgtgttgattgaagacggtttggccgaggacgactgggcgggctggcgcattctcagcgacgccctgggcgatcaggtggaactggtcggtgacgatctgttcgtcaccaacgtgaaatacatccagcgcgggattgatgaaagattggccaatgcggcgctgatcaagctgaaccagattggcacgctgagcgaaactttcgccgccgtgcagctttgccaggcaaatggctggggcgcctttatctcacaccgcagcggcgaaaccgtcgacagctttatcgccgatatgacggttgcgatgcgagctggccatgtgaaaaccggcgcgccgtgccgcggcgagcggatcgaaaaatacaatcagctgatgcgcatcgaagaccaattgggcagcgcggcggtatatgccgggcgcgccgcctttaaacaccgttaa

SEQ ID NO: 429868 - DNA, 1779 bp, Serratia marcescens
atgttacgacatctcagtaagaacgaagacgagcgcctggcggccatcgatgcgctggcggggttgggcgccggccatgacgacgcgatccatcaggtgctgacgatcacccgcaagctgttacaggccgagggctgcctcatttacctgcacggaacgcgcaagatttggatccgcgagcacattgacgtcgggttcgaggagatcgatttcgtcagccccttgttcaatttcgttcgtctgagcggcgaggcgttgatttgtccggacacccatgcggatgaacgctttgcctcggatcccatggtcaacggcgccgcggcgatccgccactgcgccgccatcccgctgtgcacccgcgaaggctatacgatcggcgcgttctgcctcgtgggttcgcagccaaagcatctgactcgccgtcaggtcgaactgctgcgcagcatggccaccatcgtcggcgagctgatcgaagcgcagagtgagatcggcctggtcgatgccatcactcgcttgcccaatcgacagcggctgatgggggaactcggcaatttactggacacgggcaaatacgcgttattgctgttcgatacgatagatatccaatacgcctacgagatggcgcgttctttcggcctgtctacggtagagttactgctgggggatatcagccatttcctgaaagagatgtttctcagtgagcgcatgctgtacagcatcgcgcccggacgtttcgccgtcattatcgaggcgcagcacatgccgcaggcgaagcgcgatctgttgcgttgcgccgaccgtttgcatcacgaagtgagaggcgccgtgccgctgcgcctggagcttaatgccggttatgcgttgttttccgcgccgcatgccgatcctcccgagattttgcgccaggcgaccagcgcgctgcatgattcgatcgacgaggggcgagccgtctccctctatagcgagccgaaggatgcggcgcgcaagcataatttcaatatttttaatgagttggcgcagagtctgaaggaaaataatcgcgggctatttttggaataccaaccgcagattgatttggcgagcggcaggatcgtcggcgcggaagcattgctgcgttggctgcatgaacgttggggggcgatcccggcgggggagttcattccgctggtggaaaatacctcgctgatcaaaccgttgaccgagtttgtcatcgcgcagtcgattgaacagttgttgttgatgcgtgaagcggggatcgcgtttcccatctcgatcaacgtgacggccggcaatctggccgagcggcactttgcggcgcggttgaatgaagccatcacccggcgcgggctgcaggcgggggacattgagatagaatgcctggagtcgcaacgcattcaggaaagcagcgcggcgttggcctgtctgcatgcgctcaaggccaacgggcatcgcatcgcgctggatgatttcggcgccggctacagcaatttaaactatctgcgccatatccccgccgacgtcgtcaaactggacgcctccctgataagactgctgaagagcgatgcggaaagccgcatcatcgtgcaaagcatcatcgatatgctgcataaactcaactatgaagtcttggcggaaggggtggaagacctggagtcactccactacctgaccgagtatcggtgcgatgtcgtacagggcttctatttttcaccggcggtgacgttggaaaagctgtgcgcgctcgtcgacattcacgggcagcagcggcgaaatgcctga

SEQ ID NO: 429869 - DNA, 1971 bp, Serratia marcescens
atgaatggaacatcatcacgcattgttatcgtgggcgccgggattgtcggggcatcgatcgcctatcatctcgcgcgtcaggggcagcgcgttatcgtcgttgagcaggcgcatcccgcggcgggggccacaggcagctcgttcggctggatcagcgaaggcgtgccagagggcgctcccgacgcgtttctgcggcgcgagatcgtggctgactgggtgcggctgacgcaggagatcccggaattgtgggtgaattggtccggcgcgctcagctatggtcaggcgccggcgacgcaaaaccccgacaatcggcgtctgtcctccgccgaggtgatggcgctggagccgtcgctcgggctgctcgatagccaggcctattttgcggcgcgcgatggcgcggtcgatccgcaagaagtgacacagcggctgctcgaacgggtaggcgcgttgggcggcgagttgcttctgggacgtgcggtcagcggatttctgcgcgaggccggtggtcagataaccggcatcgttaccgaggagggcgcgatcgccgccgaacgggtagtgctcgcctgcggtacggggatctcggcgctgctggacggcagcgaattctcgttgccgatcgaggcgtcgccggcaattttgttgcgctatcacgcggcggcgcaggcggtgaacacgctgattgcgggcgacgacatcgaagtgcgtcatgcgcaaaatggcgatctgctcgcggcggaggattatcctgcgggcggcgatgtcaaacgcgtggaagaggacgcgcgatcggcgattcaaaaccgcctgcacggctcggcgccattgcaactgcaggcgtgttcggtggggctgcgccccaggccgcgcgacggttatcccatcctcgggccgctgggcgtcacctgtctctatgtggcggtgatgcatccggccgtgatgtgcgctccgacgttgggtcggctggtcagcgacgagctgttgcacggcgttaatcccgccattcctcacggttaccgcccggcgcgatttattgatgatgggggtgaagggggggatatcatcgcgattgccggtcggttcgcgctggataccgcgcagccgccgctcagtctttatccctatgcgccggtgtataagataggggagcacgtcctgaagcgcacccgtccgacgtcgggcgaagcccaggcgctggcggcgtatctcaccgcgttgcgtcgtcagggcgttgacgtcgtggcgccgacggcctgtccgcaagagatagcgggcagtatgtgggtggtttatccctttgtggcgggagaaaaatatgcgggccgcgatgagcagattatcgcggcgggcaggctgttgggaaggatccacgcgttatcttcggcagacaataacgctgggctggcggtttatgacgagtatgcactgactgaagacgatatctcagcggatctggacgagatcgccagtcatgcggcaagccaggggctgacgctcgacatcgaggcgctaaaaacgcgtatgctgcagattgccgggcggcagacggcgcttagcgcacgggatctcccttgcgtggaaacgccctatgactttaaagccgataatctgatttatgtcgcgcaggataggccagtgctgatcgaccccgataacgcgctgtttttgccgcgcgtgttcgatctggcgctggtcctgctgctgttccacaacgcgctggactcggcgcccgaccgcgtgttcaccgtacgggaatggcggctgtttttgacgggatacggtgagtctgtcgcgttgacggccggcgaagtgcaaagctggcatcaggcggtagagcatctgtttctcgacgaagtcctgtggctgatggcggactttgccgatggctggcgcgatcctcggcaaacggcgctgttcttctctctgatcgggctgctggataatctttccgactacggattaacaccgtaa

SEQ ID NO: 429870 - DNA, 1386 bp, Serratia marcescens
atgacaaaattatcggtcgacccgatcgaagaattgatcgctttcgcttcgcaggtagatgcgtgcatgattccccccgccgtcctggcattccagtgtaaacggctcatggataatcttggctgtctcgccgccggctacgatcaaagcggcgttgacgcggcgctgtcgctggccagacgctggagcggcaacgccgaagccagcattatcggcagcgaagagcggctcgccgcgcctcaggcggcgtttgtcaacgccgtacgcgctcgcgcgctcgattattgcgacgtgctttctcctggctggcaccccagctcctcggatattcctgtggccttggcggctgcggaactgtcgggtgcttccggcctcgacaccttggctgcgttggccgttgggcaagacttcgctcaacgcatcaacctcgccgcgcaggcgaacggctttttctaccgcggattcgactcgaacatcctcggcctgttttccggcgcagcgatcgccgcccgcctgttgcgcctggacctgcacgcctttaccgacgctatcggcctggctttcgattttggcatcggcaccttccaacactatcaggacaagacgctggcggtacgtatcagccagggattggtggctcgccatgcgctggaagcggttttaatggcgcaggctggaataagtggccctaaacgcgtcctgagcggcgagaacggatttttcaatctctatgccccgggcgaacccgacctgggattgctgacccaccacttgggcaccgcctttctgggtgaagaagcgacctgtttcaaactctacccgcactgcagcattctgctggcgctgaccgaagcgctgttgaacgacggcccgcatcggcagttgtccgatcccgcacgggcgaagatcactctgcatgcctcgccgaccatgcgcatggtctgcggcgcgccatacgagccgcagaaaacggccgaaatcgatgcgcaattcagcgcgcgttacatcatcgccaacgcgctgctgcgcggccaggccagcgcacgtgaattcagcgcggcttcagcgacagaacctacggtcgttgctctggcgcagcgtatcgaagttcatgaacaacatgccttcgataggtttgaccgcttcgaactacacatcacgccggagcagggtgatacgctgcggctcgaggccgagtttggccgcggctggccggagaatccggccgacatgcaggatattcgtgagaaatttcttcactgctgtgcgcaatcacccagtgagggattacgcctcaatgcgcgaaaactgatggcctgcatcgagaatctggtcgaagcgccttcgttacaagccttgttggccgcaacgcgagaagtgcgctag

SEQ ID NO: 429871 - DNA, 1551 bp, Serratia marcescens
atgtccggtatgcgcaggatttcgctcgttgccgccatctgtctgggtacatttatggcgtcgcttgatatcagcattgtcaatgtggcgctgcccacgatgctggaatcgctgcaaaccgacatgtcgggcctgcagtgggtcgttgacgcctatgccctttgcctttccgcgttaatcctttcctccggtccgctgggcgacagatttggccgcaagcgtatttggctgtacggcgttgcattgtttaccgtcggttcgatcgtttgcgcattcgcctcctctctcggcatgctgctgacgggccgggtgatacaagggatcgccggcgcagccgttatccctggggcattgtcgttattgactcatgcttttccggaggaacagttgcgcacccgcgcgatcgggatctggtcttcggtcaatgccctttcgctggtgattggcccggttttgggcggcttgctggtgcataccaccggttggccaggcatattctggatcaacattccggtcgggatcgtcgcgttgatattgggcggttgggggctgcgagaaagctcgcatcctgagcacgctgcgcttgacccgctggggcaagggttgagcatcttgtggcttggcgcgctgacctacgggctgattgccgccggagaattcggttggcacagtgtgcaatcgcgttttccgttgtacgccgccctggcgctgttggcgctgtttctctgggtggaaacgcgggtcaaacgccccttgctgcagctgagcctgtttcgcaacgccgattttagcggctataacctcgcctcttttgtactcggtttttccgcttacagcagcgtcttcttcgtctcgctatttctgcaacaggcccagggctggagccccgccgacaccggttggcgcatggcgccggaatttctcgccatggcgctggccgcttccggttttggccgcctgtccgccaaactgagcgtgaactcgctgatgatcgtcggttatggcctgatgggcgttgccctgctgttgctgacgcagctgcacgccgattcgccttacgctctggtggcgctctatttggccctgcttggtttcggcatggggctgtccatgccggcgacaagcgccttggtgatgcgcaccgttgcgccgcaacgttccgggatggcgtcggcaacgatgaacgcgctgcgacaaaccggcatgacgctgggcatcgccttgttgggcacgctgatgagcatgaaagcggtgaccaccttgactgcggctttgcaaacgcaaggcgtggaacaggccgccgcaatcgcccggacggcggtcatcgaacaacagcaaacggccgttgatgcattgagcgcgagccgcatgcaagcgctgacgcacagcgccttcgccgatggtttcgggatcgccatgctgtgtgccggattactcagcatcgtgatgaccgtgtggctgctgatcatgctgcatccgcgtttccgtctgcatcctcaggccggaaacgccgtgctgaacaagtcacctgaacgactgaacgaggaatga

SEQ ID NO: 429872 - DNA, 609 bp, Serratia marcescens
atgaagacaaaagagaagatgaaagaaacacagcctcgaaccaaaccggcggaagtgcgcttggatgaattgatggatgcggcgcagaagctgtttatcgaaaaagggtttgaagcgaccaccatcagcgatatcgtccgcgacgccaacgtcgccaaagggaccttctaccactattttccgtccaaaaatgaaatgttgtccgctttacgtatacgtttcaccaatcactttatcgagaaaattcagctggctatcgatgaatgcgcgccggatgactggttggcgcgtctgagagcctggtgtgatgccggcgtggcgacctattttgaaggcatggaactgcacgatgcgttgtatcacgatcatcattatcatacccgaggcaatcaggatcgtgatgccgtgctggagcagatcctgacgattttaaacgatggcgcagcggcgggcgcctggcgtctggagaatccgcatctgaccgccatcttgatgtatcacggcatgcatggtgccgtggatgacgtcatggtcaaccccgacgccgaccgccaagggctggggcctgcgctggcgcaggaattcatgcgtttgctgggatgtcgctga

SEQ ID NO: 429873 - DNA, 1140 bp, Serratia marcescens
atgcacagacgacgttttcttcaggcggccgctttgctggcactttcttcgccttcacgctctctgcgcgcccaggctgatacacagatcgtgaccgatatcgtcgggcgtacggtgactttacgctatcctctgcggcgtattttcctggcggaaggcaacctgttttataccgtcgcggcgctcaacccacgcgcgccgatggaaaaactggtgggttggcgagacaatttccgcaccgccgacctggacagctaccggctgtatctgcgctattttcccgaactggccaagctgccggccttcgccggcgtgcagcaaatgcaattcgatctggaaaggttgatcgccttgcggcccgaagccatgttgctcaacgcgaatacgcgttctgtgctggaaacgagcggcctgatggctaagcttacggcggcgaacatccccgtggtgtttgtcgatatgagcatcggcctgatgaacaacagcgccagaagcatcgccatcatggggcagctgtttgataatccgcaaagtgcacatagcctgattcgcttccgccagcgtcatctcgatacgatccgcgacacgctgatgaaacgggctccgccgcgcccacgcataatgatggagcgcgccgccggattatacgaggattgctgcctgtcttggggcaatggcaactacggcgagatggtggatagcgcaggaggattcaatttggctcagacgcatattcacggcgtttacggcgcattgagtcaggaaacggtgatcgcttcccggcccgataaaatcgtcgtgaccggcagtaactggagtcattactcgccccacggtgactggatcaaccttgggccaggcgcagatttgacgctggcaaaaacgcggctggaaaaattgatgcgacgcccggcttatcgcaccctggccgcggcaaagaacggacaggcgtacgccatctggcacccgttttacgatcacccttttaatttcgtcgcgatcgaacgtctggccacttggttccatccgtcgctgtttgccggcgttgatcccgaagcgacttttgctgaactcttcgcccgatttcttcccattccgtatcagcccggttactgggtgtcgctcaaggcggcgccgtaa

SEQ ID NO: 429874 - DNA, 2142 bp, Serratia marcescens
ttgaataaattcaacggatttcgcctgcggaaggcttatctttgcccgttattgctgggcatgatgccctgcctgaccctggcggccgatgaagagtcgatctgggtggtcgcagagggttcctcctcagacaatgccccacagggttatgccgcacagcaagcgacggtggcgaccaaaacccggtcaccgttggtcgacgtgccgcaatttgtctcggtggtcaatcgccagcaaatggacgtgcagtcggccgacacggttagccaggcgttgcgctacagcgccggcgttgccgtggaacgtttcggcgccttttccagcggcgtggacttcgccaaaatgcgcggttttgaggccgactactacctggatggattgcgcgtcatcggcaataccggcatttggggaccgcaaattgaaacctggggagtgcaaagcgttgaagtcttgcatggcccttcatcctcgttatacggccaggggggcgccggcggcgttattaatatgatttcccgacgcccttccaccgccgagtcgaatcagcttaaatgggatgtcggcaatgaccgctcacacgccctcagcctcgattccaccggcgcgctgaccgatgacgaacagtgggtgtaccgcttcgatggcctggcggccacgcgcggttcgcagatcgaagacaccaggcaaaagcgcctctttctggcgcccgcaatcacctggcaacccaatgatcgcacgcgctggaccgtgttggctcactatcttcgcgaaccccaatcaggctattacaacacccttcccgcccaggttttggggctgttgcccaatccgcacggcaagatagataccgatagaaattacagcgatcccgcgcacgagcactcgagccgtacgcaatacgatatgacctcgctgcttgaattcgaattgaacgatcgctggcgcctaaagcaaaacctgcgctattcccacgtagactcgacggtgcggcgcgattttacgcgcgacatcacgccggacaagggacttttgacggcggtttatcaggacgcaccgagtcaggcggacagtatcgtgatggataatcaggccgagacgtcattcgttaccggcgccatcgtccatcaggggttggccgggatcgactttcaggccggtaaattggataaagactggtggggatcgcaaaccgtgacgtttgatccctggtccgaacagtaccgcccttcattcgaacctatcccggtttcacgcacgtcgacaacgcaacgcttccagcgcacgggcttatacggacaggacgaagccagctggcgcggatggcatttgttgttgggcgcccgtcatgactggtcacgcatgcgtaccagtgacaatctggcccatactcaaacgcaaaccaatgacgcagcctggagctatcgcgccgggttgagctacccgttcgacaatggcctggcgccgtgggccagcgtctctaccgccttcgatccgttgaccggcacaaacgctcaaggcacgccgttcaagccaacccattccactcagtatgagatggggatgaaactgcagcctcccggcagcgcaacgatgaccagcctggcggtctaccaactgacgcagcgcgatgtgaacaccatcgatccccttaatcccagttattacacccaaacgggtgaagtgcgttctcgcggcgtggagctggaatcacgggcggcggtgaccgataaccttaatctgatgctgtcctatgcctgggtcaacaacgtcgtgacggaggctaacgatagcacgcaggggaaacatccggtgggggttccggcgcagaccggctcgatgtggctggactatcgctttactaaagggccgctgcaggggctgcttatcggtggcggtacccgctacctgggggccagttggggagatggcgccaacaccttcaaagtgcccgccgtttggctcggcgatatgaccgtccgctatacgccgggtgcctgggatcctcgtctgtataatctggagctgggactgacggtcaacaacctgaccaacaaatcttacatcgccagttgcaccagtgcgccttactgcagcatcggcatcgaacgccgcatcatcggttcgataagctggtatttctga

SEQ ID NO: 429875 - DNA, 225 bp, Serratia marcescens
atgaagactctggatgatttgttggcgctgttggctgaggtgggggtacctgaagatgtgctgcaagaggcggatggcagctggcagttgcgtcaagatttagcactcagttcggcggaaacggtggcattgcaagccctgctgaaagcccgctgtgttaacgcgccatcgctgtggggagggcgagactattcattagaacagcttatttctgaaatgtcataa

SEQ ID NO: 429876 - DNA, 1605 bp, Serratia marcescens
atggttagtgttgaggattcgatcaaccaacgtttattgctggcccttcaacaacatggacagcgctcggcgctttttgaacacggggaggtttacacttacgactggctgaacggtgcggtggcttcagccgctttgaagctgtgtcaattgggcgtggtgaagggcgatcggatcgcctatcaattgcgcaacacccgtgaagcggttgtcatcatgctctcttcgttgatgctcggtgcgatcccagtgccgatattaccctcttatcgagaaaaagagctgaggcacattctgcatctgacggcgccaaaagtatttgccctgcagcgaggttcccgtcgctataacccacttgccgctttgcagacgctgttggccgaaggtctcaatatcgatgtgatattggtcgaagactacgatgacgccgggcacgacactcgttacctaaacctgcaacatttctgttcgcctttgacgcccgcgccgccacttcacgccgccaccatgacgccgtcggataccgccgtcatgttgctctcgagcggcaccaccggtttacctaaagcgattgcccgtaaaaatggcggctacagctatatgatcgagtgcggctgtgacgtgtttgctttagacagccattcggtctatttcgccgcgatgccggtttcgcatgggtttgtcatcaattgccccggtatactcggtacgctttctcgcggcggcgccgttgcgctcgccgacgccccgtcggcggaaacggcgttggacgtgatcgagcaatgcggcgtgacgcacaccacgctggtgcctgcgttgctgtctcaatggagcgaactgcagcggcaaacgccgcgcgacctgacgtctttgtggcatgttcaggtgggtggcgccagggtgacgcctgagctagcggcctccgcctcccgcaacctcggcattaccctgcagcagtgctatggcatgagcgaagggctgctgtgttttaactcgattgacgatgatgacactctgcgattcagctctcagggccggccgttgagcccgcatgatgaagtactgatcgtcgacgaaaacggccgtcctttgcccgtgggcaaatcaggcgaactgatcacccgcggcccttatacgctcaccgagtattaccaaaatccccaggctaatcgtagcgcgtttacggcggacggcttctaccgtaccggcgacctggcgcacgtcgatgccgcgggcaacattttcatcgacggccgcgtaaacgactcgatcaaccgcgggggagagaaattcagtcccaatgagatagaggagttggctgaacagcatcctgccgtggtgcgagccgcctgcgttggtatgccggacgatctctacggtgaggtgccttgtctgtttgtcaccagcacagataccactctgactctcagcgcattgcgccgcttctttgagaaagaagggctggcggcgttcaaggcgccggagcggctgattgtcatcgataccattccgatgaaagggatcggcaagatagatcgcgtgacgttgcgcgacatgctgcgccaggaacagacggtcaaaaatacggcggggttgaactcatga

SEQ ID NO: 429877 - DNA, 729 bp, Serratia marcescens
atgacgccattgcgcacgtctctcggttgcgtggtgaggctcagccgcccatgcagttcaccggtcagcaaacaattggtcgtatttccacatgccggcggcggcgttgcgttctaccagcactggcgtgatctgctgccggacgaggtggatctgttcatcgtgcagtaccccggccgagaagacgcgcaagacgcgccggcttgggaaacggcgcagcgagccattacgcgctgcgttgatgcgctgcattcttcgctgggcatcgcgccggtggtgattttcggtcatagcatgggcgcgctgtttgccctgcaggttgccgcggcgttacaagcgtcgcgttttaacatcgacgccgtgttgtcggcccagcgcgccccctctgaactgaaaatacttcaacaggaaagcctgcggcaagaggtgttgggcgacatcctgacattcagtgaaagcagcggcgcactgtcgctggatgagatcactcgcccgcttgtcacccgcttgatacagcaagatctacagctgttgggcgcgctcagcgcagaacctttgcccgacatgcagccacgcattttgggcggtgataacgatccgttggttagccgcgccgcgctgtcgctgtgggaaaaagaactccccggcagccgggtgcaattcctcgcgggcgatcacttttatttcgcgcaggacaccgctgcgtttctccgccagctgctccggtaa

SEQ ID NO: 429878 - DNA, 1029 bp, Serratia marcescens
atgaattttgagctgtttaacccacaggattgcgcaccggatacggagaaagccttcgctctgttcccccagttgaaaaaattctatgcgacgttaggcaatactccgctggttgaagtgccgtcgccaaagggaaaggcgtcgatttacgccaagtttgagtttgagaatccgtttggctcggtgaaagaccgcaccgcgttcggtctgttttgcgatgccatcaatcaacacgacttcgccgccggtgaattgaagttgctcgattcctcggggggcaatatggcgaaagccctggccaagcttggcaatatgtgcgggatagcggtgcaagtggtgatcccggattcgtctccgcaaccgcttatcgacacgttaaaagccgataaagccatcgttactctggtcgatcgcaatcagttcctgctcggcgtcattgcacgcagccagcagattgcgcatgaagatggcagttggacgctgctttctcagcatcttaacctggtcaacaccgccgtacatcagcatgcgacgggcgcagagattcgccggcagctggagggtgagcgcatcgacggttgggtatcggcggtagggaccggcgggaccttgtcgggggtggccgccgcgttgcgtcaggataacccacagctgatcgtgtggggcagcacgccgcgcgaactgccttacggtacgctgtctgcgccgaacggtgaacctaaatttgccggagccggcgggttgggcttcggtttccgtcagcctttcatcagtaagttgatgccgcaggaaccgcctttcaatccggtttcctatcgggaagcgctcagcgcgatgcacgagttccatcagttgaccggcgttaaaatcggcgcatcttccgccgccaactggaaaacggcctgtaagctggcagaaacgctgagtgcggatcaacgggttgtcacactctttgccgacgccggttccgatatcgatcgagaaaaagggcgcgagtggttcaaacaatctgaagccttgaccgtttaa

SEQ ID NO: 429879 - DNA, 558 bp, Serratia marcescens
atggaaattatacagggcaataataatgtattgtctgagctgatcgcgcttggcgattatgttcgccagttaataagttcaggtaaagaggccaacgatattgagcatattttggcgacgaaagacggctataacaatgccaccgtgctttccgttatcgaaatggcaaatattacctttaaagcaaaagcggataatgtccctaacgttggcgatgccaattcacatatcgatcggttggtggataagcaggggcatgatatcggcacgatgaagggccaggggtggaaaatcgcctcactgccggacgacagcgtggtttcctggtaccacgagacggccgagacgccgctggggcgaatcgaaaccgccggcatttggaattccagtgcgatttgggcggggcaatggcaatcgttgttcgccgccggcgttagcggggatgtcatggggaagatcggcgttcgtcagctctatcaggatattccgcgagaaaaatatctgacgctgatcgtcctgttgccgctggatcagattaaaagcttaattaaaaaataa

SEQ ID NO: 429880 - DNA, 1176 bp, Serratia marcescens
atgcacacgtcggtacactgggatgtcattattatcggcgctggccccatcgggctggccgccgcatggaattatgcgcgagagcatcgcgaccataaggttttggtcctggaacaacatgcgttatttacgcaactggccggcaccagcggggaggagcgccattggcgtttgcaatattcggagctggaaatattccgccttaccctggaggccgacaaattgtggcggcagttggaacaacaggcggacagaaaactgatccaccgcattggcagcctatggttcggcgatgcggatgtctggaccaatgaggggcaaatccgccaaaccatgctttcaatggatgaaatgaggttgccttatgaacgtctgacgatgcgtgaaatcgaacggcgctatggtttcaccggcttggacagcaactatgaaggtttcttgcagcaagacggcggcgtgatcgacgttaaaggcaccctggcgtcgctttactcgctggccagcgaagccggcgtggagttccagttccagcaatgcgtgaaggccgtggagcccgatgctcggggcgcaacggtgctgacgacgcaaaaccgttatcgcgcccgtaaagtcctggttgccagtgggccgggcagcaagaaactgctgcgccagttggatattgaacttgcgctttctacctatgagatggcctgcatcagcatgctgcgcagccagcgcctgggagccaacgatcccttctggtttgctttccaaccgccggtggagagcgacagcaacctgttttatggcttcccgcccaacccttggtccgtcaatgggtttgatcggctggggaccgatttcgaagtggatccgatcaccgaagccaatgcgcctggctatagggcaaacccgcagcacgtggagcgcgcgttggagtttgcccgccggcatatgccgttcctcgaaccggataaacagcattccgctgcaagctgtctggccgtgttgcccaccgatccggcgcgccaattctatctcgacagcgccaagggccgctgccacggcggcgaacatctggtggtctcggcaggaggatgggcgttcaaatttacgcctctgatggggcaaatttgcgccgatctgctggcggaacgagagccccgttgggacatcagcgcattgcgtttctga

SEQ ID NO: 429881 - DNA, 1038 bp, Serratia marcescens
atgtcagttaacaatgaattgctgaatacacataaccaataccagatagaaacggtcgtaatcgatgacgaaacgtcattcaccctggcttactcgtcgcagatcaagctgctaccggccaatggcggtatccgttggcgaaactatgcgtcccggcagcagcaggaagaggaggcgatcatgctggcgcagcgcatgtcgctgaagcacgggctgtacaataccggcttcagcggcggcaaaatcgtggtgaacagcaaacgttctccccaagagcaaccggcagtgcttgaagcgataggcgctctgctcaatcgctatggcggcaccatgtttacgggatgcgatatcaataccggcaatcgagagatggactatctgcggcagtttacgccgtggatcctgaatgccatggacagcccacaagtcgatacatcggtggcaaccggctacggcgtctggagttcgatgaaaaaagtgttgacgctgaggctcaatcatttgcctcgcgcgcgcattgccattcacggtatgggcaaggtcggcactgaagtggcgaaacaaagcctgctgttcggttgtgaggtgacggcctatgacatcaaccccgcagcgcaatttcctgcgggggtgcgccgcgtgagcgaagaggaactttgggcgcaacccagcgaggtgctgtgcatcgcgtcgatgtccaacgtattgaatgcacagaatattgaacagctgaatacccgctgggtggtgagcagcgccaactcaccgtttaatacgccacaggctgaacagcggctgttggcgcgcggtattcactatctgccggactacgtcagcaacgccggcgcagtgatctgcgacagcatcgaaatggcgtttaccgaccgttataaccaaatgaaccaggagcaggtcaacgcctatgttcactccgtgattggcgccaagacggaggagttgctgcagcgcgctcaactgctcaattgcgatattggacaattgttgcaaccgatcaaatccgccgccatggtggcgtaa

SEQ ID NO: 429882 - DNA, 1098 bp, Serratia marcescens
atgattattgtaaaagacgctttgcgttgcaaagtagaggccgaatcgcaagggcgtcgcaccgtgctttacaccgcaagtgggcagcccagctatatgcatgtgatacctcgttttacgctgcaagaggtcacatcagggttaggcgaggcggttcatccggcgtttatcgtcaacggtcagcgaaaagaggctttcttctacggctgttaccccggcacgctgatccatggcgaactggtcagccaacctgagacggccccggccagctggcatgacctggccgcatttcgacaggcggcggctcgcaatggacgcggctggcacattggcaccaacgccgaatgggccgcgttgatgttctggtgccgtcatcatggctggccggagttaggcaataccgagagtgggcgatcgcatcgcgatcgacgccagtatggcaagcgatgtgacggcggtgtcgtgggcgatgagcagggcgatccgacaacgtttaccgcatccggtccggctgcctggtatcatgacggtacgccgcacggtattggcgatctctgcggcaacctttgggaatggcaacacgggctgaaattggtcgcgggggaaatcctgcttttaccggacaatgacgccgcgatgccgatgaccgataatgaagacgaacgctggcgcgcggtcgagctggcaacaggcgagtggctacctcccggcagcccgggaaccgcaaaattcgatgcttcatcgccgagtcttaccggcaatgccggcacgccgcgcatttcggaccgtatccggcatttcaacggcgatccgcatgacaatgggtatccgtcaggtttgatggatgatgagttcgggcgtattggtgcggcaagtggagagtcggtgccggatatattgaaaatcctcggcgttgtaccgcatcaccggtgtgcggacggcgatcaggtttatctgcgcaactacggcgaacgcatgctgatgcgaggcggcgcctggtattccggtgcgggtgccgggctgagaacgctgtgcctgagccatggcgctgggcatgccagtgcgacggtgggcgcccggccggtatggtgtttgtaa

SEQ ID NO: 429883 - DNA, 381 bp, Serratia marcescens
ttgacgcattctgcaaagttgtttagccaaatccagacgcttgaggttgaactgcatcagccatcggtgcgccgcgatccgcagcgcgtcgcggcattgctgcatgaagactttgaagagattgctcgctcaggtctgcgttatgacaaacgccagaccgttgcggcgctggaaatggaaactgagcatccgcagattgttgccgaaggttttacgctggcgaaaatcagtgaaggcgccgtgttgctgacgtataagagttttcaacgcaacgcgcagggcaacgccattcgttgcacagaacggtcgtcgatttggatgctgacggaaaaggccggttggcagatgcggtttcatcagggcacaccgaccgaggattaa

SEQ ID NO: 429884 - DNA, 216 bp, Serratia marcescens
atgttcccattcagtatagccaacgccatgaaggccaccggaaacggtgaagacgaacgccagtacgcatttggcaggcagaagttgttcatttttatggcgcgttttggtgaaatctgcagtatcgcagtagccatgttttatcagatttcacgtagcgcgatcaaaaaggcggggggatttcgcctcaatatccccagagatgtatcgctataa

SEQ ID NO: 429885 - DNA, 663 bp, Serratia marcescens
atgacgaaatttatgatggaccaagacgctaaaacaatggactttcgtttaatcacacggttgtccctgcttatgggggcgctcttgacgcctgttggaggggccactgcggccatgcttacgctcgagaatcaggatccggcggcggtgtaccttattcaggatgcgaagctgattcaggagcgtgagggggtgaagatcgccgagcgctcataccgttatttcgaacttaagctcgccgacaatctccagtatgaaggttatatcacccgctgcgccgacgactatgccgataaattgaatgaacaagatcggcgtgaattaaaccgctgcactgagcaggtgatcgacgacctggatcggttgatggaaaagaccgccaacgtgacgttctacgatggcggcacgcaaaacgtttatcggggcgaagaacattcaacgccttattattactattcgttcgcccgcgtggccaattattatcaaaccgacgatgggcgccatcccctgtatggcctggtttatcgctgcaagcagccggcgagcgatgctcatcgggagcaagagcctgatacaactgaagcggcgccgcccccggctgaagtggaacgctttattgcattggctaaaaaccgctgcggcaatgtgctgaaaccgcgctga

SEQ ID NO: 429886 - DNA, 183 bp, Serratia marcescens
atggaggacggagagatgaaaaagataacgctggtgcttttgacgttgttgctgagcggctgtatcggcggcggcggcggcccgtcgaatgcgccgccggcgtcgccgaatgagccctacacctgcagcaactccggcgccaacagcgactgttcgcagtccgtggagccgtcgatgtactag

SEQ ID NO: 429887 - DNA, 894 bp, Serratia marcescens
atgcttactctgcgtcagctccgccaatttcttgtggttgcggaaacaatgaatgtccggaaagcggccgagcgtttgcatatggctcaacccccgctgacaaaagcgatccgtcaaatggaagaggttttgggcacccggctttttgagcgaaccaatcgaataacggcattgactcccgccggggcagtgttgcagaaggaagcggttacgacgctcatgcagatggaacggtcgatgttactgacacgacgcgctggccagggaatgacgggggctttgcgcatcggttttgtcgcttccgccgtcagacatctgcttcccgaaatggtcgcccgttttcacttttcctgtccgcaggttgttcttgaattgaaagaaatgacgacggcgcgacaggttgcgagccttttggaagacacgattgatattggcattgcggttttacctgttcctgaatacgccataccgaaactgtcttgccatccattttttagctgcccgctgattgccgttttgccgagtaaacatcctgccggaacaagcggcgttctttcgctttctgccctggccagggagccgtgggtattgtttcctgagcaagaagggccaggtctctatcgcgctatcattgaggcctgcgaaaaggcaggatttgctcctgaggttgttcagcgagccgtacagatggaaacgatagtcggccttgttgcttcgggattaggagtcagtctggtccctgaattcatgcaaaaaagcggctgggcaaacgtttctttttgtcggcttagtggagaacagatcccgtatcaggttgctctgattcacaaggcggaaaatatcaatccccacgtcgcggattttgtcaaaaacgcagttcctccacagccatag

SEQ ID NO: 429888 - DNA, 1155 bp, Serratia marcescens
atgcttcctgtatatattcgtggagcagaaataacaatgaacatactcagatcgttgtcactgacttatcgaaacctaaatacgttgctagccctccttatcatgtcagcgtcgtcaacgctggctgcatcaaaagaaaatgaaatccccacaccggtaaatcgaacagacagatacattttgcttgcgggcggagagcaactgcacgtcagggaagtcagcctgaaatctgagggcaaacctgtactgctgattcatggcgcacgggttcccggcctggcctcttttgatttgcccgtcaagggcggctctttggctgcagatctggcgttagccggttttcgggtatatatcctcgatctgcggggatatgggttatccagccggccggccgcgatggacagccctcctaaccagtcagcgccgttgatccgcactgcggacgccataaccgatatcgatcgcgccgtgcaggctattcaggcatggagtcgagcgccccgcattaatatcctgggatgggcgacgggagggcactgggcgggcgcttatgcaacccaatatccacagaatgtggaacggctggtgctctataacacgctttatggcggaaccgcccaccacccgctgctgggccagggatcgccgctggacgatcctcaaaatcccgggcacttcaacgccgccaaatttggcggctggagcctcaacacgcgagacagtctgtttgtcgcctgggataacagcattcccgtggcggataaaacacagtggcgtgatgaaacagttaaacgcgcttacggtgatgccgcactggcatcggacaatacctcgcagcgcagaacgccacacagcttccgcgcaccgaccggtgcaatggctgacagctttgaactggcgatgggcagaaaacagtggtccgcaacagccttaacaaccgttcccgtattggttgttcgctcggggcgggatttctggagccggcccgaggatgttgacgccatcatgaaagatgccccttcagccgaaaagctggtcattcctgaagcgacacattttgtccatctcgatagagataacgccggcagacaacgctttctccagggcgttgtcagatttctggcgcagcctcagcccaccaacgacggcacttga

SEQ ID NO: 429889 - DNA, 720 bp, Serratia marcescens
atgaaacttgtcgtcgctaatgactaccaggaaatgagtgagctggccgccagcctgttgttgagttacatgctgcgcccgcagcgcgtcaatctggctatcaccgccggctcgacgcctaaacggatgtatgagttgttggctccgcgcgtcaagggccacgcggaattcgccaacgcgcattactataatttcgatgaaattccttacgccggccgatcgggctatggcgtcaccatggagaatctgcaccgtatgttctttggcccggcggcgatccccgagcggcaactgcacgtcttgaattcggacaactacctgcagcacgatcggcgtatcgccgaagatggcgggctggatgcgatcgtgatgggcgtcggggcggacgggcatttctgcggcaatctgccgggcaccaccgccttcgaagaccgcacctgtcgggtgccggtttccgccaggccggatctggcggacattttgctcaaagaggtgggcggccgcactgaatggctgcccgatcattacgtcaccctggggcctgcaagcgtgatggccgccaaaaagctggtgctgctcgtcaacggttcgcacaaagcggacattttgcggcgcattgtcagcgggccggtggagagcggggtgcccgccagcattttgatgctgcatccggacctgttgattatcgccgatcgggaggccgcggcgctgctgccttaa

SEQ ID NO: 429890 - DNA, 1431 bp, Serratia marcescens
atgcctaatggaataaaaccgctgtgcctgatgactctgctgctgctgtcggcctgccacagcgcgccggtcagccagccccctcaagacgccacggcgacagcccctatcgatgccaccaaatcgttgttcccgctgggaaactattcgcagtctgtcgataaatggttgccgcctggtccgcagcagcggatgcctgtgatggatgccgccacgcagcaacgtcatttttccgccctcaaatctcactattttggcatggggccgaacgatgaatccccctggaatccgcattacatcgctgccgtcctgaaccgcgaagcggaaagccaccgtgatgccgcaatggataaataccttggccgtggaagtgtctcctggggggaaaacttcaggactcacaccgaccgctggaaacagcaagtcagagataacgcgtctacggacattagccaggtttatcattcttcggcccgaggcattgcggtcagggagacgctggtcaggatcctgccgacggacgatccggcttatgacgaccctcgcctggctggacaaggttatccctttgataatctgcaggattcgtctatccgccccggcactccggtatacgttattacgcaaagccgcgataaacgctggaaatacgtcatgtcgcctacggtgatcggttgggtgcatagcgaagacatcgcggcggcggatcagcggtttgtctcagaatggctggcgctggcggggaaaaatctgggggcattcattaaacagccggtttcggtgcaaacgggcggccagttttattttacggcgcgccacggcacgattctgccattttaccgtcaccgacagggcctttttgtggtcgccgtgccggtacgccgagaggatggccgcgcacagatgcgccgggtcgttgtcaagaagggggaatttgccgccatgccgtggaaaatgacgcccgaacatcttgccgtactgatgcggtcaatgagcggcaggccttatggctgggggaactataacttcaataatgactgctccgccgaactgcgcagtctgttgatgccttttggcctctttcttcccagaaattccgccgcgcagatacaggcggccacccgggtggttgatcttgctcaagcgaacaccagtgaacggctgcgctatctcaaagatcacggcaaacccttcaccacgctggtttacattccgggccatatcatgctgtatatcggtaatgcgctcattgacggccaggttgtgccgatgacgtaccagaatatctgggggctgcgcccggcagattcaaagcgccgcagcattatcggcggcgcagtctttttcccgctgctggcgacctatcctgaagatgcgagcctgatgtcgctggcgggcaaggcgcagtttaaactgggatttattgaatag

SEQ ID NO: 429891 - DNA, 261 bp, Serratia marcescens
atgatcactaccgcaaaacgccgggaattaattatcgacccgctgtgccgcgaaggcgcgtcgcgcgtggaaccgctcagccagctgctttcggtctccagcgtcaccatccacatcaatcgcgacgtcaaacacaccctcgccgacgccagcaaattcggccgcacaagtttttgcacgatcgcgacatcggccagatccaccgcctggtcaccgacagccgcattccggaacactgtctgcaggcgctgcaccctttag

SEQ ID NO: 429892 - DNA, 2613 bp, Serratia marcescens
atgaccaggcgattgaaagtattcatagggacggtggcgggctgcgcaatcctggtgctggcgttgtggcaaaccttgccgcgctggctgccgggggtgttatcgcattggttgccggcgggaagccgactggagttgcagggcaaattgcattggcgccagggcggcctgacgttggcgggggcgcgtttcaccgcgcaagattgtctgctggccagcgtcgggccgacgcggctggcttatcggcaaggccgctggcagctgtcgagcgataaggtcagcgtcgatagcgcctgtttgtcaaaactgccgggcggcgacgccaacagcgcgccgcttgcgctcgatcaactgcagcggcagctaccgccggtggatctcaccattcatgacctcacgctcattccctggcagcgttatgccgggaagctgcagctttcctcaggctctgacgggcaacgtctgcattatcgggggccgaatctcagcgccgaggcgcagctggatgaaaaacaacagctgacgttgcacagcctgaccgtcattccgcccaacagcgcgcaaccgctgcgcctcgccggcaagataaccattccgctggatctggccagcctgcccacgcagggcgcgctgcagggtgaaatgcagacggcctatctggaaaaaccggttttgctggatatgcgctggcaacagcagcagggcgtgttgacggtgagcgagaaaggcgacgatcggccgctggcggtgctgccgtgggaagtgaccccgcagcgggtcagcatcaagcagggcgagtggcgttggccctacagcggacagccgttgaacggcggcctcagcatcgcgctgcacgactggagcaagggactggatgaaacggagatcagcgcgcggctgaacgtgatcacggccggccacaacggcaagggcaatgcggtgctgacgcttgggccgggcaaggtggggctgaccgacagcgatctgcggttccaactgaccggccaggccaatctggccgacttctccgctaccgcgtcgatcccgggcgtgctcggcggcagcattctcaacccgacgctggttctgcagccgggttcgttgctgcgcctgtggggcaaggtgacgccggaaatgacgctggaagaggcgcgtttgccgctggcgggcgtgaaggtgaccgctgccggtattaccggccgcctgcaggcgattttgagcgccagcgacagttactggggccgcttcaagctgcatctggacggccaggcgcaggatttctggccggacaagggccactggcaatggcgctactggggcaatggccgcttgccgccgctgcaggccgcctgggacgtggccggcagcggcagctggcgcgacagcgagttggtgctcgataaactctccaccggcttcgataagttgaagtacggcctggtgacggtcgccgcgccgcgcttgagcctcaaccagccgctgcgctggcggcgtgatgaacaaagcccgcagttcaacggtgagctgcagctggcggcggataaggtcagcttcagcgatggcggctatctgccggcgccggtgctggcgctgcaggtgaacggccgttcgccggacagtttccagatgcagggcaagctgcaggcgcaacagatcggtccgatcgcgctgcgcggccgttgggacggcgaacgtctgcgcggcgaaggctggtggccgaaacagtcgctgaaggtcttccaaccgctgctggcgccggatctcaatctcacgctgcgcgacggcgagttttacgcgcagtcggcgttttccgccgcccgcgaacaagggttcgaggccggtggccactgggtggtgaaaaacggcggcatgtggctgaaggacggggagatgagcggcctggatttcatcctgtcgtaccggttcaagcagcatcactggcaattgggagctaaacagccggtatcgctgcgcatcaagtctttcaccaacctgttcgagatgcagaacatttccgccgatttgcagggcacctatccttatagcgaagggcagccgctgacgttgagcaacgtcggcgtggacatgctcaacgggcatatcagcctgtcggcgctgcggttgccgcagcatgacgccgcagtgctgaagctggacaaggtcgatctcagcgcgctgtttaccgccctgaaaccgaagcagttcgccatgtccggccgcgtcgacggcgagttgccgctgttcctgaaccatccgaagtggctggtgcaaaacggctggatcgccaacgccggcacgttgacgctgcgcctggacaaagacatggccgacgccatcggcagcaacaacctggcgaccggcgcggcgatcgactggctgcgctacatggaaatcaaccgttcgcatgcccgggtcgatctcgacaacctgggcgagctgacgctgagcgcgcgcatcgacggcatcaacccgcagaaaagcgccaagcgcgaggtgatcctgaactatcgccatcaggaaaacgtgtttcagctgtggcgcagtttgcgcttcggcgacaatttacaggagtggctggagcaggccctctcacaacctggggagcaacaatga

SEQ ID NO: 429893 - DNA, 795 bp, Serratia marcescens
gtgacggtggtcgacggggtgaatttcatccggcaataccaacaggcgcaaagcctgcaggaggccggccaaagcctgggcgaggacgatctgcgcagcgtggcggacctgttgattgaacaaattgaattctgcgacgtgatcctggtcagcaagaccgatctgttgacgccaacgcagcagggcgaagtgatggcgctgctggccagcctgaatcccgacgcccgcattgtgccgatcgcgccgggcaaactgccgctggaggcggtgctgaataccggcagcttcagctttgaaaaggcgcagcaggcgcccggctggctgaaagagctgcgcggcgaacacgtgccggagacggaaagctacggcatcagcagctttgtctatcaggcgcggcggccgtttgcgccggacaagttctaccgcgtgatcaacggcgactggggcggcggtaagctgctgcgttcgaaaggcttcttctggctggcgacgcggccgcggcaggccgggcagtggagccaggccggcggcatcgcccattacggcctggcgggcaccttttggcgcgcgatctcgcaagacaattggccgcaagatccgcaaacgcgggcgcatatacaggagaaatgggtggagccgttcggcgacatgcgccaggagctggtgtttatcggccagcacttgcaacaggcggcgatcgtgcgtctgctggacgactgcctgctgagcgacgacgaaatggccgccggcgtggactattggctggagatggcagacccgttccctgagtggtaa

SEQ ID NO: 429894 - DNA, 966 bp, Serratia marcescens
atgcccctgtcagaatttcgtccaccttcctgccgcgataaggtgggcgacaaagccgccgtctggttgccggcagcggaagtcctgctgatcgtcgcctggagctcgggctttgtcggcatccgtttcgccgccgattacgcgccggtgttgctggtggcgttctggcgctgtgtcgtggtcgctttactgctgatgccgtttagccttcgcgccatcaggcgctcctcgccgcagtcggtagccgctcatgccgggatcgggctgcttgccatgaccggatacctgaccggcgtcagtaaaggcatcgagtacggcgtgccgaccgggttggccgcgctcatcgccgatttgctccctctcggcaccgcactcttgaacatgctgtttctacgccggctgcccgatggccgcgtctggctcggcctggcattaggctctctcggggtgatattggcgacgggcggtgctatttcctggggaagtgcgccattgtggagctacctgttgccgctggcggggatgctgtcactggcactggcgacgctgtggcagcaacggctgccgcaggcgcaagcgcaagcggtgagcctgcccgccaggttggggatacaaagcgcgatttcagcgctggcttttgccccactggcaggcgcagaaagcccgctgctgccaaccatgacgacagggttggttatcggcgtgctttggaccgcgcttttggccaccctggccggttacggtttgtattggttctgccttaggcatacctctgcattgcgtgtgacgagcctgctgttcctcagccccttcgtcaccttctgctgggcatggttaatgttcgatgagcccctttcctggcccatgctgctgggcgcagcaacggcggggagcggcttgtggctgcttatccgccccccgatgaggggccggactgaacgcgctgaaatgaataatggcagataa

SEQ ID NO: 429895 - DNA, 123 bp, Serratia marcescens
atgtgtgagggatatatcagggtgaaaaagaaacagccggaaaacgggttctccggctgctatgattaccgcgatattattcacgcggtctgtttgcggaacagttcgcggaataccggatag

SEQ ID NO: 429896 - DNA, 297 bp, Serratia marcescens
atgaaagattataaaaacacgcatggcaccaggctgctgctgatattcaccctggcgttttacatcctgttgccgcctgtgctgaccgcctgcgtcttcacccgtttcaatcttaatcccttcgcgatcgtcaaattcttgcactttaatccgttcttcgccgatcggggcatacccggttatcagactttcctctacctgctgatgctttggttgggggggaatattttgctatggctgatggtatggggcgcggggcggctgtaccgccgttggcgatcgcggcgcggcgaatag

SEQ ID NO: 429897 - DNA, 483 bp, Serratia marcescens
atgaaaccggacgcactctccctgccgccgagcgccaaaaaactcaaagtgatctacggctggtatatttacgtgatctatatcctgctggttttcaacatttacatggcggtctacaacgtctgcgttcggcatccgatcgaagccccgctgctatcgctgtttcacagcctgtttctcgcgctgatgttgcaacaggtgctcaagaaaaacgtcgttttcgcctggatcttgttgggctattttattctgatgcgcctgtattacgccaatgtgctgcacattgagttcacgctggtgagccgtggcctggtgctgctgattctgacgctgctgctgaccggcaccgtggccgtcgggcagctggccacgccgccacagcggcatgactggctggctcgcctaggctggcggcaatggacgacgctcgcggcgctggcggcgatcctgaccccgctgatcaccaccgattacctcggctaa

SEQ ID NO: 429898 - DNA, 318 bp, Serratia marcescens
atgttcatcgctctctatcagttctcagtcaaaaccggacacgaacacgcttttcgccaggcctggcttgaattgacgcagggcatctatcagcaacgcggcagcctgggctcgcgcctgcatcgggaggtgaacggcaaatatatcggctatgcgcagtggccaagccgctcggcatgggaaaacgccggtgatattcagctggatgaacggtaccgagcggctcgggatcgtatgcgcgccactttattggcggatgaaacgctatttgaaatggacgtcacggacgattacctgcaaatcaggtcgttcgactga

SEQ ID NO: 429899 - DNA, 903 bp, Serratia marcescens
atgagtatcaaagtcagcgtcattattccgacctatggccgcagcgaactgctggcgcgcgccatcgacagcgtcctggcgcaaacccatcagccggtggagatcgtggtggtggacgataatccgccggaccatccgcagcgccaggccacccgcgaacggctggccggctatattgccgccgggcagatcgtctattgcccgcgcgcgcgcaacggcggcggggcgcgggcgcgcaacagcggcatcctgcgcgccaccggggaatacctcacttttctggacgacgacgattactaccacccggagaagatcgcccgtcagctggcctttatgcagcgcggcgattaccccgtcagcctgtgcgatatggatattctgcaggatggccaaatcaacgccgagcgctattaccgcgcccgctgcgacgggctggaggacttcatgctggccggcgtcgcttacacgccgatgatcatgctgcgccgcgaggcggcgatcgcggtgcgcgggttcttcaataccccgcgttatcaggatcatatcttcatttatcgcctgctggcggcgggcatgcgcatcggcacgttgcacgagcgcctggcggtgcataacgatcacgacggtgagcgtattacctccagcccgaaaggcatcatcggctatcacaacaaaatgcagttcgagcgccggttgatgccgcagatttcgccgcgggcgcgcaaggtgatgcggctgcgccacacctgcatcacgtcgcgcatcatcaccgacagccgaagccgtctcggcggcgtgctgcacggcatgaagggcatcatctatgtcaacagcggggtgatggccggcgtttacatgaagaacattctgcgcaacgtcttcttccgcggcgtccctttctga

SEQ ID NO: 429900 - DNA, 987 bp, Serratia marcescens
atgactatcacgctaagcctgatcgtcccggtgtataaggtggaagcctacatcgaagcgtgcctggactcggtgctgagtcaattgcccgactgggcggaagtgatcctcgtcgatgacggcagcccggacggctccatcgccgtcgcgcaagaggtgctgtgccgttatccggcattgaaaacgcaggtcagcatcctgcgccaggataaccaggggttgagcgccgcgcgcaacgccgggatcgcccatgccgaaggcgaatatctcggttttctggactccgacgacgtgctgctgccgggctatttcagcattttggggcgcctgctggcggataacccgcaggtggagatcgtggcgttcaacgcccagcgtttctcgcggctgaaaaacggcaagatagaaccggatggcctgatggcgatcgtgcccggcaacgccgcgccacaggagcgcgagccgcatatggcgctgctggcggacagttttaaccgcagcctgtggtacgcctgggcgcggatttatcaccgttcgctgttcaacgacgccgcgtttccggcggggcgcaacttcgaggatatccagctgatcccgcagctgtatctgaaagcgaaccgcatcgtggtgtgcgacacgccgttggtaggatatcgcgctaaccccaacggcatcacgcgcgcgccgaagcggcgggatttggacgatctcgattacgccatcgagcgcgctgacagcgggcgtcgccgcgagggggggaagggattccactcggtgctgttcgtcaccacgctgaaggcgcgcctgctggtcgggctggacttcttcggcctgcgtgacgcgctgcgggaaaccgccgagctgaaacggcgctatgcccggctgcgggcggaggagcggcaaatgctgagccgcaagaaccgcctgttctaccgcagtccgctggtctactacctgatggccagtctctacaaccgtttcgggtga

SEQ ID NO: 429901 - DNA, 1884 bp, Serratia marcescens
atgaccagcaaaatcttgaacgcagcctgcgtgctgatcggatgcgggctggcggctcaggccggggcggcgggctgcgagaccaatctgctgaccaaccccggctttgagcagggacagacgggctggtcgctgccgccggccaaggtggtctccggcggccgcagcggccgtgccagcctgtactacagcaatcctgacccggcggagtatcaccagatgctgcaaacgctgcaggtgaaagcgggccagacgatcgcgttcggcgtgtgggtgcgcggcgataacctgcgcggcaaaggcgatcagccgggcgccggggtgtacgtcgaaagctatgacgccaaggggcgccacctggccggcagctacccgcaaggcctgctgggcagcagcggttggcagctggtggagggcagcttcaccgtaccggcagaggccaccaccaccgtactggggctgtatatgcgcaagggcacgaccggcaacgcctggttcgacgatgcctacgtttgcagccagccgacggcgccggcgttgtatcagatgcgcgccggcgggcaatcggcctccagcctgattgaagtgcagcagcctcaggaagtgcaggtggaaagtacgctgctcgatagccaacgcaccgccgtgcggcaggagagccgccgctaccatgtcgccgagcgtcagcgcgtagagttctcgctgccggccaacctggccgccggcgagtaccgcctgcagcagcaggtgacggacgtggcgtcgaagcacagccggagcagcgaaatgccggtcagcatcggcgaggcgccgccgaaagtggcgctggacgagcagggctatacgctgcggcagggcaagcgcttctttccgctgggcatctacatgtacggcaacatggcgaccgatgagcatctggcgcgcatccgcgacgccggtttcaacaccgtgctgaattacaactacggcgcagggcgcgacccgtacgcctatttccgcaaaacgcagcagtacgggctgcaggtgattttctcgctgaaggatttctaccccggcctcgactctgcgccgaaaacgcgcctgagctacccgcagttgacggcgtcttatgtggagaagtttaaaactcagccgaacctgctcgcctggtacatcaacgatgagctggcgccgaagtacgcgccgcagatagagcagatgcatctgcaggtgaagcaacaagaccctgaccatctgacctttcaggcgctgaaccagaccggcgcgctcaacgcctatttcaacagttccgacgtgttggccagcgatccttatccggtcggacgcgatgccgacatgacgcgcacgctggaatactcgcgcctgacggtgcaggtggcgcgccaggcgaagggcgcctggctggtgatgcagatcatggatcacgccgcctatgagccgcactgcaagccgcgccagccgagcgaagcggagatccgcaaccaggcctggctggggctgatcggcggcgtcaaagggctgctgttctactcctataccgacctgttctacaagcgccgcagcggcgatttcaaccaacaggaattcgacggtatctggcaaggggttgcccgcgtggcgcaacagatcgacagcttcacgccgtacctgctctcgggcgaaagtgcgacgctgtccggcaacaacaccgccgtaccggcgcggctgtttatcgacggcgagcgcggcctggtgctgatcgccaacccgtactatcggccgatggccgcccgttttgacctgccgcccggctggcgctggcaggggcagccgcagatcgacgccaaattgcccgcggtgggcagcagcgcgctgtgggtgcaacgagacactagcaatcaataa

SEQ ID NO: 429902 - DNA, 744 bp, Serratia marcescens
atggaaaaagtgtccgtcattatgccggcttataacgccgccggttttatccgcgagtcgatccttggcgtattgaatcaaacttatcaggactatcacctgtatgtgattgacgacgcctccaccgacaacaccgctgaggtggtcaagccgttcattcacgatcggctgacctacatccgcaacaacgccaatcagggggtggccgaaacgcgcaatatcgccatcgaggcggcgcgcggcgactacatcgcgttttgcgacagcgacgatgtttggcacccgaataagctggcccgccaggtcggcatccttaaaacccagcgttacgacgtggtctgctcgcactattacaccttcgagaatgacctggcgcaggtgaaaaattaccgcggcgccggggagatcatcgcctaccgcgacatgttgaaaagcaactggatcggcaacctgaccggcatgtacaaccagcgccgggtcggcaaggtctaccagcgcaaggtcgggcacgaagactacgtgatgtggctgtctattctggagcgcgcgcgcaatcgcctggcgtactgcattccggagccgctggcgttttaccggctgtccgccaattcgctgtccggcaacaagatccgcgcggcggactggcagtggcagatctaccgtcgtcatctggggctctcttatcaaaaatcttgctacctgttcttctcctacctgtacagcgcggtgatgaaaagacaatga

SEQ ID NO: 429903 - DNA, 1056 bp, Serratia marcescens
atgcaaccgcggaaaatcgcaattgtaatcgaagacatcggcggcaaaggcggcaccgaacgggtggccagcagcctggccaatgcgctgaccacccgcttcggccaccaggtcgaactgatatccatctgcggggatcgggcgttctatccgctggagccggcggtgacgctgcgcttcatgcgcggcaagacgctgctctggccgtggcgcctggcgctgttcttacgccgcggccgctatgacgccatcatcaccgtctcgatggggaaactctcggtgatcatggtgccttacctgcggctgttgtgtcccggcagccgcttggtgctgagtgaacatgtcagtttccaccagtatccgtggccgatgaagtggctgaaggtgctgatctaccggctgggcgatcgcaccgtgctgctgacgcaaaaagatctggcgaatatcggccgctgggtgcccgcccgcaaatgtcgggtgattgagaacgtgtcgccgtttccgctgcgggcgccgcatccggaacagcaacagccggtggcgctggcggtcggccgactgtgccaccagaaaggcttcgaccggctgatcgccgcctggcggcaggtggcgcagcaggcgccggagtggcggctgcacatcgtcggcgatggcccggatcgggcggcgttgcaacggcagatcgccgattacgggctcgacgaacgggtgcagctgctgccggccaccgccgatatcgccgggcattaccggcaggcgagcctgttgctgatgacctctcgctacgaaggcctgccgatggtgctgatcgaagccatgagcttcggcctgccgctggtggctttcgactgtctgaccggcccggcggagctgatcgacgatcgcgaaaacggttatctggtgacggacggcgacgtcgacaccttcagtcagcgcgtcctggcgctgatcggcgacggcgaactgcgtcgccgcttctcccaccgtgcgttggaaaaggcgcagcggtttgtgcctgaacgtatttacccccagtggcaagagcttatcgtctga

SEQ ID NO: 429904 - DNA, 906 bp, Serratia marcescens
atggacttatcaattgttattcccgcttttaataattcaaaccatctcgccgccacgctggcgcgcatgacccattactgcgccggttttgattatgaaattatcgtggtcgattattcatcggaagccggtgagtcggaaaagatacacggactgttggcggcgaatcatcgcgccagactgcatgaaagccgggtgcgcggcaatatcgccgtcgcctgcaatatcggttttcgcctggcgcgttctgaggtggttttttttctggaaccggaagatatgtttggcaccaattatatcatccggcgcttgagacggcatgaggacacacggatcgatatcgtgttcggcaattacaccacggtcaacgacaagaatgtgcgcagctacgtgtttaattatcaagagggcgtggccggggaagatttcttatttatcgagatgggggatattcgcacctcgaccatcagcgtgcgtaagaaacaagaccggcggtttttatttccggagtttttggcccgttaccaggactggggatttttggtcaacgccaccaacctgggcgcccgggtggttcacgatcagggcggtggggtgttcatccgctgcggcgacgaggatctgaaccgctgccgattgaacatcgacgccagcgaacgctttatcgatacctatctgcaggccagcggccgttatatcagcggctttgcctgtaaacacctgctggcttcgctgtacagcgaagatctgcaggctttcaactactactcatcgcgcatggagcgccacaccctgagcggcaaattcaaggcgatcaagctgtatggcgactgtctggccaggctgggactgtttccattgggggggaggctgctgcgcacggcccgcgagggattacggaggtga

SEQ ID NO: 429905 - DNA, 849 bp, Serratia marcescens
atgttaaataatctggtgaaagggttataccgacgtatgcccgatgcaatatatcatcagttaaaatacgcaatgtttttccgcaaggtgccgcatctggcccatccggtggggtacagcgaaaaactgatgcgtaggaaagtttatccactggcgatatatacgcagctatctgataaatatcgggtgagagagtatatcgaacagctatggggtaaagagtatttgatcgatctttacgcgcacggcaacgaatttacggaagagatgtatcagcagctgcccgagtcgtttgtgattaaagccaaccatggcagcggatataacaagctggtatttgataaaagccaaaccggttataacgaactgcgggtgttgaccaacagttggctgcggcaaagtttttatcaggtttatcgcgagcggcattataaagatattccaccttgcatcatggtggaaagaatgctgatcgacgaagggcaaataccgaacgacatcaagatccactgttttaatcttgacggtgaggtgcgcttctttattcagatcgattatcagcgctttatcgatcatcgccgcgatttctttgatgcggactggaaccgcaccgagatccgcatgggcgtgccgaacagcgacgtgccgatgtcgcgccccagcgggctaaaggagatgctgcggctggcgcgccaggtggcggaacaattctcgtacgtacgcgtcgatttttatcaggtgcaggatcgcatttattttggcgagctgactttcaccccgggggccggattacaacggctgatgccagaaacgattgaacaagaatggggagggtattttcatacgtag

SEQ ID NO: 429906 - DNA, 1290 bp, Serratia marcescens
atgaaagcgatgctgatgaactctttgtggctaatgctggagcgggtatcgctgagtctgtcggggattttcgtttcggtgtacgtcgcgcgctatctcgggccggcgcaatacggtttgattaactacttgctgtcggtgatcgccatcgccgtgccgctggtgcagctgggggcggacgcggtgctgttcaaccgcgtcgccaaacggcgccggagcggcatgcggctgatgctggcttcgatgcgcatccgccgccagctgtttgcgctgatcgcgctgccgctgatggcctggacgctgttgacgcaggatcgcaccaaccaaatcatgatgctgctgatgttgatcagcgcgtatttctccgtgcaggacgtctacaaaatctattacgacgcgctgctgaagtcgaagttgaacacgttgatcaacaacgtcgcgctgttgctgtcgatcgtgatgcggctcggcctggtgtacgcgcaattgccgctggtgtggtttgcgctgccctatgtgctgagcagcctgctgccttatgcggtgcgctgggtgctgttccgtcgcgagcaggcgcagatgccggcgatcagcggcagacacaaacggcgctacggccgctacctgttcagcgtcggcttgccgctggcgatctccagcctgtcgatcgtcatttatacgcgcatcgatcagatcatgctgggcaactatttgggagaacacagcgtcgggctttacagcgccgccatcacgctgagccaggggtgggtattcgtgcccatcgcgctgatcatgtcgatgatgccaggcgtggcgaacgccggttcggagcaggaacaagaggcgcgcattcgccagctgtatctgatggtgctggtgctttcgatgccggtgatcgcggtgctgtcgctgtttccgcagcagatagtcgcgctgatgttcggcgaaagttaccggcaaacggcgaccattttggcgctgtgctcggtgacgtcgctgttctcggtgatgggaacggtgtcttaccgcgccatcgtgctgttcagcggctatcgattcatcgccatcaaaatgccgctggcggcgttggccaacgtggtgatgaatttcatcctgatcccgcgctacgggatcatgggcgcggcgatatcgacgttgatcacggagtttatttcattctttgtgctcaacagctttttcagaggaggaaaaattacgcgtttgcaggtgacttgctatcggtgttttccgcaattaatagggaaggtacgagaaatatatgttaaataa

SEQ ID NO: 429907 - DNA, 963 bp, Serratia marcescens
atggataagcgtaaagtagctattatcgggggttccggttttatcggaacacgcctggcgaaacgtctcagtaagcgcgatgatctgacattggtcatcgtcgataagcaacccagtgcacattttccatccctttatcagtatggcgatgtgactcaacctcagactttgcaagaaccgctggcgggctgtgacgccatcattaatctggcggcggagcatcaggacaatgtcgatcccatttcgctctattatcaggtcaatgtcgaaggcgcacgtcatgtctgcatgaccgcctctgcattgaatatccgccaaatcattttcacctcctcggtcgccgtttacgggttcgtcaagcaggaaaccggcgaagaagggcgttttgaacctttcaaccattacggcaagtccaagctcgaggcggaatatgtttatgaggcctggcgcaaggcagacgccgcaaataaattgaccatcatccgtccgacggtggtgttcggcgaaggcaaccgcggcaacgtgtataacctgttccgccagatcgccagcggccgtttcgtgatgattggcagcggcaataatatgaagtcgatggcttacgtcgagaatattgctgcacggttggagcatgcgttggatcagcagtccagttatcaggtcagcaactatgtcgataaaccggactttacgatgaatcagctggtcgacgttatttcctcttcattgggcagggaaaataagacgattcgcattccttacgccttgggaatatgcggcgcaaccgcattggatgtcgtgagtaaaataagtcgcaagaaatttccaatcagtcgcgtcagagtgcagaaattctgcgccagaacgcaatttaaaagcaatgtgcagaataatttcgtggcgccggtcgaacttgattcggcaatcgaaagaaccattaaacatgagttttctgatagataa

SEQ ID NO: 429908 - DNA, 783 bp, Serratia marcescens
atgttgctttctttactgtggcacgcgctgtttttcaccacgctgctgtcggcgggcctgatcgccttcgcgctcattacgtggctggaacgcgtggagggcgtcaacggtcgcccacagaggttgcgccttcaggggcccctgctgacggcactggggctggcgttggcgacgttgcctctgagcctggctgcagcgcctcgatgggggttagcgccggccgcggcgctcctgatcgccctggcctggctggactggcgccatcggtggctgcctgatcgactgactcagccgctgctgtggggcgggctactgtgcaatcttgacgctcgctgggcgccgctggaagacgccgtgctgggtgccgtcgccggttacggcgcgttatggctgctcaatgcgctctaccggctgacgcagcggcgcaacggcatcggccagggcgatttcaaactgctggcggcgctgggtgcctggctcggctggacgatgttgccactgctggtctttctggcggcggcgttcggattgggcatcgcgttggcgcgtggcctgcacaaccgccgagcctggcgaacgccgcaacctttcggtatcgggttagcggcggctggctggctatgcctgctgaccggtcccggctcacctggcccgcagtggaatttcatttatttcacagcatcaacctcacatgaaatcgaggcagaacgcggttctgcgcatttcgcaccgtttttacccagcctcgccgacggccatttttccgctgccggcaagggatga

SEQ ID NO: 429909 - DNA, 1269 bp, Serratia marcescens
atgcaaaacccggtcaggccactcgccgcccttcccgacagcgaacaggcgcattcttccgtgcaatggctgctgctgggcgccgtcgccatcacaggcgtttggttcgccccctatttatcgttggtgatttgcagcggcttgatcgccgcctttatgctgctgcgccagcaacccgatcgcgtgctgaatctcaccgccttcctgctgctgaccgtgatatccgcggtgccgctggcgacgaagaacctcgagccggtgatgaacgacaaggtgaactactaccttgagatgcagcagtacagcggctacggcctgatggactggttggcgcagttttccggcaccgactttgtctcgcacctgttgtttaaactgactgccacctggtttggcgtcggtaatggcgcattcgccgccttcttccttatcagcttttcgctgctggcgctgggcgtttaccgcctgtcgcgcacttactttgccgtgatcctgtttttgttctgctgccagtacaatttccaggggctgtacggcaacctgttgcggcaggggctggcgctctctttcctggtgctggccgtgtcggagcagcaccgcggccgcatgctgctctggatcgtgatggcgtccttcagccatttttccgctttcctgtttctgccctatctgctgctgcccgcgcgctggcgcaccgtgggcaccctgccggtgctggcgctgttcgccgcctgttacctcggcggcgcggtgctgatgcctaaactgattgccgtcgtcggcaacgactttctggcctcgcgcgccgaagcctacgtcagcggcgacttcggtaataacccggtgcgcaaaatccaaatcacgctgctgtacgtcggcgtggtggaggcgctgtatcaattcgcccgctacaagttccgcgcgccatcgcctcagtttgtacaagccgcctatgccgtgcgcctgatgttcctttataactgcgcggtgttcttcgccaccatcagctttgaagaggtggccaaccgttattcattcaacatgatgatcttcgtgctgatctttatggtgatggtatgcggcaatctgaaagacgcggtaagccgggtgctgctaacgttgctgtgcttctctctgggcatcgcgtcctatctgtatatcaaccaggtcggcgtgcagcagttttggtacggcgatctgcaggcgctggtgaccgacagcctgccgacaatcctcaataagctgaatctcgccggcacgccgtggtga

SEQ ID NO: 429910 - DNA, 870 bp, Serratia marcescens
atgagccaatatctctctgaacacgaaccgcaaagcgagccggccgtcggctatcgcaccggtcagcggctgaccacgctgacgctcggcgcagcgctggtggcgatcctgatcgtcaccgcactgctggccccgtggctggcgcctttcgatcccaatttgcagcatatcgagctgcggctgctgccgccttccgccacgcattggttgggcaccgacggtttcggccgcgacttgctctcccgcgtgatttacggcgcgcggccgacgctgattctggtgtcgctgattctggtgctgaccattcctatcggtctgctggtgggcatctgcgccggttatctcggcggctgggcagaacgcatcttgatgcgtctgaccgatattttcctgtcgttgccgagcctggtgatcgcgctggcgttcgtggcggtgatggggccggggctgatgaacggcgcgctggcgctggcactgaccagctggccggcctttgcccgccaggcgcgggccgaaacgctggcgctgcgccgcagcgattatctggcggcggcgcgcatgcagggcatcaacgagctgcggctgatggtcggccacattttacctttatgcctgcccagcgcggtggtgcgcgcggcgctgagcctgggcggcataatcctgtccgccgccggtctggggttcctcggcatgggcgtcgcgccgccgaccgccgaatggggctcgatggtggccgaaggcagtaaagtgattttcgatcaatggtgggtcgccgccgcaccgggcggggcgatcctgttcgccagcctggcctttaacctgctgggcgatggcctgcgcgataaaatggatcctcgtcatgggcactga

SEQ ID NO: 429911 - DNA, 1068 bp, Serratia marcescens
atggcacaagtaatcaacactaacagcctgtctctgatggcgcagaacaacctgaacaaatctcagtcttctctgggcactgcgattgagcgtctgtcttccggtctgcgtatcaacagcgcgaaagacgatgctgcgggtcaggcgatctccaaccgtttcaccgctaacatcaaaggcctgactcaggcttcccgtaacgccaacgacggtatctctctggcgcagaccactgaaggcgcactgaacgaagttaacgacaacctgcagaacatccgtcgtctgaccgtacaggcgcagaacggttctaactccaccagcgacctgaaatccatccaggacgaaatcactcagcgcatgtcggaaatcaaccgtatctccgagcagactgacttcaacggcgtgaaagtgctgagcagcgatcagaaactgactatccaggttggcgctaacgacggtgaaaccatcgatatcgacctgcagaagatcgattctggcaaactgggtctgactggtttcgatgtaaccgaaaaaggcaccaaaattggctctgcaattgccgataaagccatggttaaagatgacaccggtaaagatgttgctttcgacctggctgaatcttccaaaactggtggcgctttagagaaagcgactctggtttccggtaaagacaaagacggtaaagaaggttactacattcagactactgatgcagcgactggcgcaaaaacctacgctactgcgaaaatcgacgacaaaggcgttgtaaccaagggtgctgacgttactgacgttaaagatccactggcaaccctggacaaagcgctggcacaggttgacggcctgcgttcttctctgggtgcggtacagaaccgtttcgattctgttatcaacaacctgaacagcaccgtgaacaacctgtccgcttctcagtcccgtattcaggatgctgactacgcgaccgaagtgtccaacatgagccgtgccaacatcctgcaacaggctggcacctctgttctggcacaggctaaccagtctactcagaacgttctgtccctgctgcgttaa

SEQ ID NO: 429912 - DNA, 1401 bp, Serratia marcescens
atggcaacgatcagttcattaggtctcggctcaggactcgacctcaatggcctgctggacaagctgactaaagcggaacaacagcgcctgaccccttacaccaccaaacaatccagctataaagcccagttgaccggttacggcacgctgaagggcgcgttggaaaaattcgacaacctcagcaaagagatggcgaaagaggacttcttcaaggccaccaccgccaccgaacatgacgccttcaagatcaccaccaacgccaaggcggtgccgggcaactatgtggtggaagtgaagaacctggcgcaggcgcaaaccctgaccactcaggcgaaagtcagcgaccagggcgaaaaattaggtaaagaaggcatcaccaaccgctctctgaccatcaccgccggcaacccgccgaaagaaaccaaaatcccgctcagcgacgatcaaacctcgctggttgagatgcgcgacgccatcaacggcgccaaggccggcgtcaccgccagcatcatgcgcgtcggcgacaacgactaccagctggcgatcagctcttccaccaccggcgaaaacaacaagatctccctccaggtcgacaatgacgacaaactgggcgatatcctgaactacaacgccacccgcggcaccaccaccgccatgaagcagacggtcgcgccgcaggacgcggagctgatggtgaacggcacggccatcaaacgcagcaccaactcgatcagcgatgccctgcagggcgtcaccatcgatctgaaaaccaaaaccaaaaccgatgaaccgcaacacctggtgatcagcaccaacaccgccggcaccaccgacaagatcaaagagtgggtcgacagctataactcgctgctggacaccttcaactcgctgtccaagttcaccccggtgaaaaccggcgaagcgccaaacccaaccaacggcccgctgctgggcgacaacaccctgcgcggcattcagtcgtcgatcaaaagcgcgctgagcgccgcccaggacaacccggagttgaaaggcctgggcaacctcggcatttccaccaacaccaaaaccggcaagttggaaatcgacagcgccaagctgaagaaagcgatggatgagaagccggatcaggtcagcaacttcttcgtcggtaacggcaaagacaccggcatggccaccgagatccacaacgagatccagagctacatcaaatccggcggcatcatcgagaactcgaccaaaagcatcaacactaacctcgatcgcctgaacagccagatcaccacggtcacggccagcattcaaaacaccatcgatcgttataaacaacagttcgttcagctggataccatgatgtcgaaaatgaacggcaccagtaactatttggctcaacagttcaagtaa

SEQ ID NO: 429913 - DNA, 201 bp, Serratia marcescens
atgtgtaaatcgctgtgccttgctctggccatgatggcgttgtctggatgcgccggccagaatgatgagtatccatcggcgcaaaaaacggcgcctcatcaggatgccggcaaagagtggaaggcgtttgtcgcgccgctgtcggtgaagacacagtcgcccggcgagcgtgaaatgaaacgcgccgcccggcaatactga

SEQ ID NO: 429914 - DNA, 135 bp, Serratia marcescens
atgattaaagcgaaaagcaaccgcaaagcacgccggttattcggcatggcccactggaaaagcaacaaatttaaagttgccatcagcgaaacggccgccggtgaaaaatggaaagtggtgaagaaaaagaaatag

SEQ ID NO: 429915 - DNA, 645 bp, Serratia marcescens
atgagagacattccaatgcctgccagcgatgcagcgaccgcgggagagatcatctcccgcatcggccaactgacccgaatgctgcgcgacagcatgcgcgaactggggctcgatcaggcgattgcccaggcggcagaggcgatcccggatgcgcgcgaccgtcttgactatgtcgtaaccatgacggcgcaggcggcggaacgggcgttgaactgcgtggaggcggcgcaaccgcgccaggcggagctggagtccggcgccaacgcgttgaaaggacgctgggacgagtggttcgccaatcccatcgaactggacgacgcgcgttctctggtcaacgacacgcgtcagtatctggatcaggtgccgggccatacggccttcaccaacgctcagctgctggaaatcatgatggcgcaggacttccaggatctgaccggtcaggtgatcaagcgcatgatggacgtggtgcaggagatcgaaaagcagctgctgatggtgctgatggaaaacatgccggagcagccggtgaaggaaaaacggccgaacgacagcctgctgaacggtccgcagctcgaccagaacggcgtcggcgtgatcgccaaccaggcgcaggtcgacgatctgctcgacagcctcggtttctga

SEQ ID NO: 429916 - DNA, 501 bp, Serratia marcescens
atgggcgcgtttattgccttttcgacgcaggacagcctctggggacaaatcctgtttaccttcttaggcatcctggttggcggcgtattgatcgccgccatttgcaagaccgtcttacccgcgggcagaacggcggcattgtccgtccggttgctgatctttgtcgcactgatgctggcgatactgaagtacaaccagcaggtgatgtctgcggtgaacgcgcccgcggagctgatcgggttcctgattttgcccggttttttgatgggttacctgggtgcggcggcccccggcagactggcgctggcgatagaactgtgctgttttgccccgctcgccgcgctgctgattctgggtacccccggcgtcggcttttttgccccctatcatctggagagcgcaggccaatttaccgccaaggcgatcgccgcggcattgtccgtctccgtcgtactgctggctcgtaaaataagcgggaaggacaacgcaccgtcctcttga

SEQ ID NO: 429917 - DNA, 3636 bp, Serratia marcescens
atgctcagtacgttattctccatcatcaccagccgcctgctgtggggctttgtcggcatcaccgcgctggcgttcatcatctggacgatcggcccgctggtcgccatcggtgactatcgcccgctggagccggaactcaaccgccagatcgccatcggcgctatctacctgatttggttcctgtgccgcctgatcccgcgcctctacagcgcctggttcaacagccgcctgctgagcaacctgcgcgccgccgaagcggtgccggcggaagacggcaagcccgagatcaaaccagacgatccgctggcccagcgtttcgacgaagcggcgcagctgttgaaaaaggcgcgcttcgccccgggccagggcgacggcaaacatcgctggatgacccgcttcagccgccaatatctgtatcagctgccgtggtatgtgatcatcggcgcgcccggcgccggtaaaactaccgcgctggtcaactccggcctgcattttccgctggcggatcgcttcggcaagtccgcgctgcgcggcgtgggcggcacccgcaactgcgactggtggtttaccaacgacgccgtgctgctcgacaccgccggccgctacaccacccaggaaagccagcgcgaagaagacgccggcgaatggcaaagcttcgtcgcgctgctgaaaaaatatcgcacccgccagccgatcaacggcgtgatggtcaccatcagcgtcgccgatctgctgagcgacagcgcggaagcgcgcgccgcgcaggccagcgcgctgcgcaaacgcctgatagaactgcacgaacagctgggcattcacttcccggtctatgtgctggtgaccaaaaccgacctgctcaacggctttatggcctatttcggcagcttcgacaaagcgcagcgcgaccagatctggggattcaccttcccttacgagcgctcgcggcagccggacttcaacctgaacgccgccttcgaacaacaatacgccctgctgcaacaacggctggatgcggcgctgccggatacgctgctgatggagcacgacgcgcgccaacgcgccgaaagctacctgttcccgcaggaattcgccgcgctgcgcccgctgctcggccaatatctggaacaggtgttcgccacctccagttttgaaacccgctttaccccgcgcggcatctacttcaccagcggcactcaggaaggtctgccgtttgaccgggtgatgggcgaactgaaccgctacctgcagctgccgccggccaactcaggggcacaggccaacgcggcctgggacagcgtgggccaggaaacgccgatcccggcagccaaaggccagagcttcttcctgaaagagacgctggaatcggtggtcttccaggagtccgggctggcgggcagcaaccgctggtgggaataccgcaaccgcgccctgcactgggcggggtacatcgcgctggcggtgatcctggcggtgctggcgatgttgtggttcaccagctacggcaacaacaaggcctatctggcggaagtggccgccaaggtgcccggcgtcgagcgccaggggcaaagcctgacccagttgggcaacggcgatatgttctcgctgctgccgttcctcaacagcctgctgcatctgccggacagccagaacttttcgctggacgatccgccgttcacctatcgcatgggattgttccgcggcgatcaggtcggcgacgccggcaatgccctgtaccaaaaagcgttgaaagaactgctgctgccgcaggtggcgcaacagatcgccgccacgctgcgcaacgataaccacggcgacgcggacttcagctatgaagcgctgaaggcctaccagatgctgtatctgccgaagcagtacgacggcaaattcctgcgcgcctgggtgatgctcaacctgcagcgcaacctgccgcagggcagcacccaaaaacagctgcagcagatcgaatggcacctgagccaactgctggatacgcagatccaggcctcgccttacgccaaagacgagccgttggtggcacaggcgcaggccgcgctcaatcgggcgccgctgtcgcaacgcgtctacggccgccttaagcgtctgctgctgaaacagaccgacatcaagccggtcagcctggtcgatttggccggtccgcagaccgaactggcattcagccgcaaaagcggcaaaccggtgaccgacggcgtgccgggcctgttcacctcgcaggggtattggaaagcgttcaacgacaacatcgatccggtgaccgataccctgcgcaaggaagacgtctgggtgttgaacagccagacgccggagcagaaaagcgccgatctgaccaagaccatccgccaactgtacatgcaggactttatcagcgcctgggatgagctgctgggcgatatccaactggccaacatcggcaacctgacccagcgcatcagcagcgcgcgcctgctgtccggcaatccgtcgccgatgcgcaatctgctggttaacgtcagcaaaaacgtcaccctgcgcgacgagaaaagcgacgccgattcccgctcgctgctggccaaaaccgaagacaaactgaatcaaaacgccaaccgcacgctggaggcgctgttcaccaaccggccggccaacgccgacggcgacgtgtcggcccagccggaacagctggtgatggcgcacttcgcgccgctgcttgagctggcgcaaagccagggcgaaggcaataaggcgatcccttttgacagcgtgctgaaacaggtcgatgagctgtacagctacctgacggcggtgcaaggcgcggccaacagcggcatgtcggcgccgccgagcgacatcatcccgcgcctgcaggccgaatccggccgcttgccggtgccgttcaaacagatgctgctgtcgctggcgatcggcgccagcagcgacacccagcgcaaagagatggagaacgtgaaaaagcgcatcagcttcgaggtcggcagcttctgccgccaggcgatcgccgggcgttatccgttggtggcccgggcgcgccaggaagtgacgccggacgatttggcgcgcatgttcgcgccgaacagcgggctgatggacagcttcttccgcgacaacctgcagggcaaggtcgataccacccgcgccaactggcgtttcacgcccggcgtggacggcaagacgctgcccggcggcgaaggcatcctgcggtcgttccagcaggcgcagcgcatccgcgacgcctttttcgccaacggcacggcgacgccctcttaccgcgtgaccgtgcggccggtgcggatggataacgacatcctcaacctgacgctggatatcgacgggcagctgttcaaatacagccacggcccgcaggtgccgctggtggtcagctggccgggcacccgcaataccaaccaggtgcatctgcagctggcgctggccaacggcaccaccgccagtctggtgaccagcgggccgtgggcgctgaaccgcctggtggatatggcgcagtcttcgggcaccggcggcctcggccgtcaggcgacgttcaatctcgacggccaccgcgtcacgctggagttcacgcccaacagcattcgcaatccgttccaactgccggccttctcgtgcccgtag

SEQ ID NO: 429918 - DNA, 360 bp, Serratia marcescens
atgaagactacccacatcgcccttgctcttcttctcgtttctcctatgttgctggcggaagatataaaaatagaaaacttacctcaaagcgaaatttatgaaaattggctgattagccgctgcattgggaaatctactgactcagaaaaaaccaagcaagatgccttccgttccgcttccgcctatttagaattcagtaaactccccatggatgcattcgaacaaggcgaaaaactggctgaacagtacgcaaataaaaatagtcaaggatcagttaaaggaagttatcatactttagattgcctttcgctgcagagttccagtgaggctaaagccatcttcgaacgttactctaattaa

SEQ ID NO: 429919 - DNA, 513 bp, Serratia marcescens
atgcgctggttatgtattactctgcacaaaccatacggattttggagtgttgagatgaaaaaaatccttatctcctttttttgtctatatgccacttgtgctatagcgcagaaaaatcaagaagagtcgattgaaaattggccgccgcaagcggcatacagaagctatttgcaaaactacaaggatattgctctaacctactgcatttccgtcgcttataagacatcaccagaggctagcaaagatgcaattgcctcatcgaatggtatcgatgcttggtcatactatgcaattcgtgatgaagaatcccctatcatcaagctgacaaagcagtacttgcaaaagaattacaatgctaaggatgggaaaagccgcttagacttaatgaagtgcatggatatgtaccatagtgaagagcttgataaacttgcgaaagattatgtacagcgccctaatgataattgggtgaaagataatccggacagagtaaatgaaaatcctcctcggaaataa

SEQ ID NO: 429920 - DNA, 753 bp, Serratia marcescens
atgttcaaaaaaatcttattacctacattgtttgctgcttctttgctttgctccattgaatccacatcagcgatagacctgttacaatataacaaaaccaacacagtaagcgggctggtcaacgataaagcggtcactgacaatcttaaaagcatactgggtcaagactatgaaaagtacatcaacaactttgatgtgttcggtgaacctcattcaaccccaggtggtgggttatttgttgaagggtggctaaaagatctttatctggaaaatgcctctgctctggtcatcaatcccgatgggaaaatttatgccgcctgggttgtacctgattctgatatcataaattacaaatcatctgataaagattcccctattaataatgatattctgcattgggctgcacgcttcaaagacatgcatttttcctcagacagcaaaagaaataaggtgaggactgaggaagaatactttgacacacagtcattctctatcaagctcatgactgtttgcatcagtaaaggaaactgtaatgatgctacttattatggagagcgtaaaaaagatggtgctgctgtaactttgcagggaaaagtgacacgtgctgattgcaatacagccccatgcccaataatcagttatgagtttaaaaatgcatcgacgacctacatgctcagtaaaattgataacacactgacagttataaagaacggtaagatattaatgaatcaaaaaggaacttgggggaaatag

SEQ ID NO: 429921 - DNA, 435 bp, Serratia marcescens
atgattatgctgagcaattcaaggttgtatgctttttcaccaggtgaacccctaacgttaccgctgtttgccgatcgcgtggcctgcggctttccttccccggcgcaggactatgtcgaaggccggctggacatcggcaagctgctggtgcggcaccccaacgccacctatttcgtgcgcgccagcggcgaatcgatgatcgacggcaacattcgggacggcgatctgctgattgtcgacagcgccctgacgccggagcatggcaatatcgtgatcgctgcggtggacggtgaattcaccgtcaaaaagctgcagtgccaccccgacgtgcggctgttgccgatgaatcccgcctacgcgcccatcgtgttcgacgacgaagcgcagctggagattttcggcgtggtgacctttatcgtctacgcggcgctgtag

SEQ ID NO: 429922 - DNA, 558 bp, Serratia marcescens
atgaaggaggaggcgagcgtgaaaacaacacaaggcggctggggcgttatcggcctgttgctgttggcgctgggcgtgaacggcgcagcgcaagccgcggacaatctgcgcatgcgcggggcgctggtggcggaaccttgcgtcattcagccgggcgacgagagcatcgcgctggatttcggcacgctggtcgacaagtacctgtacctgaaccagcgcacgcaggggcaaccgttcgagttgcggctggcggagtgcgatctcagcctgggcaagacggtgtcgatcaccttcaaagggacggagaatgcgcagctgccggggcttttggctttggcggcgagcagccaggcgcgcgggatcgccatcggcatggagacgctgcaggggcagcctttaccgctcaacagcgcaggcggcaagtacccgttgcaggacggcggcacggtgattggggtgcaggcctatgtgcgcggcgaaccggaagcgctggcaaagcgaaccatcggtcgcggtgctttcagcgccattgcgacgttcagcctggactaccaatga

SEQ ID NO: 429923 - DNA, 942 bp, Serratia marcescens
atgaacgtttttctcaggatattcggttacggcgccctggtgtggctggcgacgctcacgacggcggtttatgccggcacctgtaccaccaacgcgaaaaccgcccgtatggggttgctgacgctggccgtggatccgcgcattgaagtcggcgagcagttggctgttcgaaccgagaacagcattaacggcacgacgttttcttttctttgttccggttcggtcgcctatcgctccatgtcgccgctgacgccgagcgcgctgcccggcgtatttgaaacgggcatcgagggcgtgggggtgacgatttcagacttatggcagagcaataagaacgtgcccgtcaacacggcgatttcgcccaacttgctgacgccgtggatcaatcgaaacgatgttcggctgacgtttattaaaaccggcccgatcaaaaccggcggcgatatgggcgggaaaattatcgccagatattatctggattcgacctccattttggatatcagtatttccggcatgaaggtcattcagaaaagttgcctggttgatttgaactataaaaatcaaacggtaaatctgggcagccctaaacgcagcgagtttaacggcgtcggcagcacggcggcgtcttccgaacgcaatttttccgtggttctgcaatgtcaggaggacaatattccggttcaggtcacgttcgaggcggccggaaattcgcctggcgtgggaatgattgatatcgccgacggcgccgatgcggcgaagggcgtcgccgtggaagtgttggatgagaaccgtaatccattaacgttttccagaccgatcaattaccacaccgcggctgaaaaagagatcaggatccccttgatggcgcgctataagcaaacgggagccattagccccggacaggccgacgcggtgatgacattcaccattacgcagaattaa

SEQ ID NO: 429924 - DNA, 2577 bp, Serratia marcescens
atgataactcaaaagcgtatattagcgaagcgggatgcttggctgaaacgcatagccttattcacggcaacaacggcggtatgcggcaacatggctaatcccgccttctctcgtgactattttaatccggcgttgctggaaaccgggcgctcaggtcagcagcacgtcgatctgtcgatttttgaaaatggccagcaggttcccggcacgtatcgggtcgatatttgggtgaacgacatgctgctggaaacgcgcgaggtgtcgttcgctctgcgggccggcagcgacgagaaggccgatctgcagccttgtctgacgcgggaagatctgaaacggcttggggtgaaagttgagctgtttcccggtttggccggtgccgatcgctgcgcgaatttggccgcgatcccgcaggcctcggcgcaatttcaatttaaccgccaacgcctgatgctgagtatcccccaggcggcgttggaaaataaggtgcgcggatacgttccgccggaacaatgggatgaaggcctgccggcgatgctgctgaactatggcttcaccggcagcaacagcaaggggcgcgatcgattcacccagagcgcaagcagttattaccttaacctgcggccgggcttcaacctgggcgcctggcgagtgcggaactacaccacctggagctacaacagcgccggcggcgggcgagcgtcggaggatcgttgggactccgtctatacctacgcccagcgcaatatcatccgcctgaaaagcttgctgacgctcggcgaaagcagcagcccgtccgatgtgtttgacagcgtatcgtttcgcggcgcgcagctggcttccgatgacgacatgttgccggaaagcctgcgcggttatgcgccggtggtgcgcggcatcgcgcgcagcaatgcgcaagtggtcattcgccaaaacggctatgtcatctaccagagttacgttgcgccgggcgcgtttgaaatttcggacatgtacccgaccggcggcagcggcgatttggaggtgactatcaaggaggcggacggcagcgaacagcacctgaccgttcccttcgccagcctgccggtgctgcaacgcgaagggcggctgaaatatgcgctgacctcggggcaataccgcacttacgatcacagcgtagataaaaagatcttctcgcaggccagcctgatttatggcttgcccgccggtttcaccctgtatggcggcggccaattcgccgggccgtatcaatcgctggcattgggtctgggcaagaacctgggcgagttcggcgccctgtcggccgacgtcacccaggcgtgggcaaagcaggagcatcaaccgaaaagcgatggtcagtcatggcgcgtgcggtacagcaaaaatatcgtcgagacggggacgaacttcgccatcgccggctaccgctattcgaccagcggctactatgggctgcaggaagtgctggacacctatcgcagcggcaaccgttacgccccgatagaccgccgcaaaaatcgcggcgaaatcacgctgaaccagaatttatgggaaggggcggggtcgctttcactcagcgcggtctccgaagactattggggctccgagcgcaatatgcagtcgctgagcgcgggttacaacaatagctggaatggcatcagctacggttttaactacagctacagccggaattcacaggctatttacggcgattcgaaccgcgggcgcatttacgatcgcgatcagatcttcgctttcaacatcagcgtgccattagagaaatggctgagcaacacctacgccacctacaacctcaacaccagcaaaaaaggcaataccagccatacggcgggcctcaacggcacggcgctggccggcggcaacctcagctggagcgtacaggaagggtatggcagccagggccagggcaacagcggcaacgccaacgccgactggcgcgcgacgtacggcgaactcacggcgggctatgcctacgatcgcagtcaacagcgcgtcaactacggggtgaagggcggggtgatcgcccatgaagacggtgtgaccttcggtcaaccgttcggcgaaaccgtcgccctggtacaggcggccggcgcgagcgatgtggcggtcggcaatcaggtcggggtgaaaaccgactggcgcggctacgcgatcgttccttacgccacgccttatcgcaacaattcgattcgcctcgatgtcgacagcttgccggatgatgtcgatctcgagttgacgaaccagtcggtcacgccgactcgcggcgcggtgagccgggcgaatttcaaagccaacgtcggcagacggattttgatgaaggtgacggactcgcagggggcacctctgccgctgggcgccagcctgcgtcttgccgagggggcgactcagccgttcctggtcggcggcgacggcgtggtttatctgaccggcatggcggaaaagggtctgctcatcgcgcagtggggcaggaatggcgagaaccaatgccgcatccgttaccagttgccggcggagccgccgtcagcgggtctccaaaccctaaacggcgtttgccaatag

SEQ ID NO: 429925 - DNA, 1509 bp, Serratia marcescens
atgctgaaacgcatcggatacatcgcgctgatttgcctggccttaatcggcgggcggcaggccatggcggcagaggaagatcgctgctttgcggacgaacatcccgccttgcacaccgttattccttgttataacaatcagttggccatattgcctctgtcatattcgttaaagggcgtggataacggccatgacgtgtcgatacgccattatcggttgatgtcgcaatcctggtcgccgcaagacgccatccggccgacgcaatggtggcacgatgtggatatttatatccccaacggggcgcttgcccgtaaagcgttggtgctgatgagcgatgactgcgcttgcgccgccgcaggggcgagcgggccaggcaagcaaaatgcggcgttttccgtcgctacgccggcggccttggcggcggaaagtcacaccatcgtgattgtcgtcaaccggctgccttatccgtacctggaatatcaaaatgaggggcggcgtcgtgcgggggaggacagccaggcccgaggctggcgattgttcctggacgatgcggatgagtacttgatgatgccgctggcgatccccatgacggcggccttgtcgcaaaccatgacgctggcgcagcgcgaattgagccgatgggggatagataaattcatcgtggcgggcgcggcgagcggcgcaaccgcggcgtggctggcgtcattgtcggatgagcgcatcgatgccgtcgtcgccatgttcccggatggggtcgcggcgcggcaggtcttgaagcatacctatcgtacgtatggcggccgttggccgttggcgtttcatccttattaccaactcggcatcgatcggcgcatagagacgccggcgttcgacaaactgatgcaaatagcggatcccaccgcttatccgccgccgacggcgggagagcggccagcggcggcgaaatatgtcatcatcgccagcggcgacgaacgttatccgccggacagcacgcgattctatttcagcgcctcaccgggagaggcttcgctgcgcgtgattgccgacggggatcgcgcggcaagccggccggccgccgaacgcgccatactggcgatgatcaagcgccgccagcgcgatatcgcgttgccgacgatcgaggtgcaaggcagcgccgcggatgctgcggtgcgcacgctgcgtttttccgaaccgccggccaccgtgcggcgttggagcgcgcacaaccgcacggcccgagattttcgttattcgtgcggcgtacgctttaccccggagccgttggccgcagcggaggccgatcgcggcgagtttcgtctggccgccccggcgcaaggctgggaggccacctttatcgaggcggtgttcaacgatgggtttatcgcgaccacgccggtctttatcacgcctgacgataactatccgtccgccgttcccgcgggcgatggcctggcgtgtgaaaccctacccggcagagggctgggggaagattatcgccatgacgattaa

SEQ ID NO: 429926 - DNA, 399 bp, Serratia marcescens
atggcgaataaaatcatcttgatcatggtcatcaatctgttcgtggcggtggcgttggcggtgtttaactttatctatatccaaaagaaggtggatatacgcgcccccaatgacgccacgccctttcaggtgaccgagaaagcgcagggcaggatcgtctccatgcagcagacctcggtatttctgaacaacaatcctgtggtggcgtttaccttggaaatcaacgccaggcgcaaacagtttacgatcgctgaccatcgggaggtggtgctgtatatcgccatgagccgttatgaggaaaacggcgtttacagcctattgctgggcgagaacgacagagacgtggcgttcgaaaaggacagctttggctatccgatacgctgtcatcaggtgctctag

SEQ ID NO: 429927 - DNA, 828 bp, Serratia marcescens
atgtggcttgctatcgacggcaaaataaaataccgggcgatcgtgagcgatcttgacggaaccttgctggatcctgccgggaatctgtctgatctgacggtggaaacgctcaatatcctgcatgcccgcgggctggaaatcgtcatcgcgacaggccgttgcgatgcggatgcgcgcgggattgtggatggcttggggttctcgccggcgatcgtctcctgcaatggcgcgatggtcaatatcgaggggcggccggtggcggataaacgctatttcctgcctcgcgacagccaaatgatgttgatggattacctcttcgcctgtccgctccacgtgacgttgttcacccaggaaggatggatgatggccgaagagaatccgcattttgccgactatatcaaaacctcgggcgtcgcttgccgctatgtcgagccggaggcgatgaaacggcaaccgatcctgaaagtgctgctgcagggtgaagcggcgctgatcgagcggttttacgacgaggtcagtcaggctttcggaaaaacgctgtccatctgtaagtcctctgcggaaacgatagacatcatggataagcatatttccaaggccagaagcgtggccgactatctgagcgccaaacagatagcgatgcgcgattgcctctctttcggcgatgcgatgaacgatttggacatgctgcgctgggccggaacgggggtggtgatgggcaatgccatgggcgaattgaagcgcgcgctgccgtttaacccgattgcgctgcccaacagccgcaatggcgtcgccgattatctctgccgtgagttcggcctgttctga

SEQ ID NO: 429928 - DNA, 5787 bp, Serratia marcescens
atggaagagattcctgtatcaccctattcaaaagtttttatcgatgaatatgaccgccatccagagggctgtaattacaacgtattggtgctgcagcgtattgagggcgcgctggatcccatcagattacaagctgcgctgaatgcgctggtgcaagatcatgtcctgctgaacagccatattcatgaacggaatggcgaactgtattggcgtcgcaatgacgcaatccatcctttgcagcattacacggaccgcacgctgctgacccaagtgattcgccagcccttcgacatttaccgcgggccgctttatcgttgggcgcttttcgccgaggggccggggcgctataccctggcgctggtgggccatcatctggtgatcgacggcgcgtcttccgacgagtttttctcattggtgagccagtactatggtcaacagcggctatcgacccgcctcgaggcggccgagattgccgccatcaaccggcagctgcagcgcgaggtggaacaactggccgccgatggagcgctggcgcactggcgggccgaagcggcaaatttgggcgtgatagacgtgccctttgagaaaagcggcgccgtgcgaaacgatgaggcggccgagctgcgtttccaggtgcccaaagcgcaatggaaagcgctgaagcagagcgcgggaatacggcgaatgaatgactttctggcgttgctggtgctgtggggcatcttgatggcgcgcagcggcaatcaggaaacggtctatatcagctatccggtgtcgataaaaaaggggcaaagatttgcgcttggcgggcatgtcaacaccagcgtgatgcccctcgcgctgcgtgacggcgaaggcttcgccgccgtttatcaacgcgcgctggcgtttattaccgccgcggcgccgcactcgcgccaacggtttaaccaactgcccacgcaacaggtggtgcaggcgctgggtatccgcgcgatgccgatttcctttgcccaaaccaacctgcgcgatgcggcattggcgctggccgattgcgccacttcgccgttgtttgaagccaaccacgatatggccagcgcgtcgctttccctggaatatgaggatcgggccgacagcgatgccttgcagttccggctgcgttttcgtcaggacatgtttgacgaagatgacatgcgcgactgcgcggaacatttcatgcgtttgatgcaagcggcgatgcgcgcgcctgacgcgcctttacgccacctcgccttttatcccgccgccgacatgccgccagatgacgacgcggtccctgcgttgccgagagaaaccctcagcgcccggtttgaggcgatcgcgctgcgttatccggataagattgcgctggagtttgaggggctgcatgtcagctaccgtgagctgaacggcatggcgaatagcctggcgcgcgaaattacgctccgctaccaagcgctgaccgggggcgcccctcaggcggacacgctgattgcgctgtacagcgagaaaagcctggaaatggtggtggcgctgctggcggtgctgaaaaccggtgcggcctatgtgccgctctcctgcaattatcctcaggcgcgcattcggcatattctcgaagaaacgcgtgcgccggtgctcatcgccggggaaagcctgcagtcggccgccgaggcgctggcggcgatgatgccgcacgccgtgtccgtcctcacgctgggcgatctgaaccgcctgccgcacgagcggcagaatctgccggccgtcaccggcgccgaccggctcggcgcggtgatctatacctcgggatcgacggggatcccgaaaggcgtgatgctcgagcaacacgcgatgtgcgggttggcgaccgcatccggcatcgctgtcacgcccgatgacgtgttgctcttcctctcgagcccggcgttcgacgcggcgacgttcgaggtgtggggcgcattgctcaacggcgccaaattggtcgtcgtgcgcgatacggaggatatcgccggcgatgtgccgcagttggaggccttgctgcgtcggcagcaggtatcgattctgtgggcgacgcgcagcctgttcgatcatctttacctcagtcaccccgacctgttcgccgggctgcgctgtctgctggtgggcggggaggcgctgaccgccacgctgatgcagcgcctggtgcggcaagccaaccgcccgcagcaggtcatcaatggctatggcccgacggaatgcaccacgttcaccacgatgtacgccatcgcggcggacgaaacccgcagcagcatcccgattgggcgagccataccggggcgcgaacttcatgtgctggatcgctggctgcagccgttgccgccagggctggccggcgagctgtatatcggcggagacgcgctggcgcgcggctatctcaaccagccgcagcagacgcaagagcgtttcattacgctgaacgggcgacgcttgtataaaagcggcgatcgggtgcgagagttgcgcgacggcaatctggagtatctcggcagaaacgattgccaggtaaaaatccgcggtttcagaattgaactcagcgaaatagaaaatacgatcaatgcgctggagggcgtcgagaaatgcgtcgtggtggatgtcgtccatcgcgatagcaagcgccttgccgcgtatgtgctgatggcgcggggcgagccgctggatcctgccgatttgcgcgcccggctggagcggatcctgccggattacatggtgccgtccagctatgttgcgctcgacgagataccgctgacggtgaacggcaagctggatcgcacggcgctgcccgctccgcaattcgcgcaaagcgagcgatatgccgcgccgcagaatgcgctggaggcgttgatttgcgccctgtgggcggagatcctcggcgttgaacgggttggggtggatgacgacttctttcgtctgggcggcgattcgatccaaagcatcgtgttcaccagcgaattgagcaagtcgggctatcacagcaactcgcgtgcggtgttcgaaacccggaatgcgcgggcactggccaagcgcatcttgcagcaacgggacgcgattgcgccgctcaatgaacagggcgagctgcagggcgaattcgaattgttgccgattcagcgctggtacaacgagcagccgccgcaacatcgcgccttcttcaaccagacttttttggtgcgggtgccgccgatgtccgccgagcgcgtggccgatctggtcaacgggctggcgtcgcgccatgacatgctgcgcgcgcggtttagcgccgacgatgccggcgcgctggtcgcgcagcgctatctgtcggtggccgacggcggcccttcatggggatactatgacctggcgctttgtcgccaaagccgcgccgaacttctgcatcaatggcaatcggggtttgatccggtagaagggccgctgtgccgcttcgtctacattttcgacagcagcgcgcccggctatgcgttgatgttctgcgcattccatcatctgatcatcgacgtggtgtcctggcgcatcatcgtcagagacatgcgacggttgcatcagggcgaatcgctgtcggcgaaaggcaccagctaccggcagtggggcgagacgttaaggcactacgcggcgagccggcatgaccaatgcgcttactggttggcgatgatcgccgggcaacccgattacgccacgctcagcgagggggcgcagagtccggcgttttgccgcttagagtgcgacgcggcgttgacgacgctgttgatggacacttgtcatcaggcctaccgtacctcgacccgcgatgtgttgctggcggcgctggcgccggtgctgcaggcctggcatggccgtgcggacagttacctcacgctcgaacaccatggccgcgatatcaatgacgataagatccagctcgacgacaccgtcggctggttcaccgccttactgcctttgcgcatcaccgcgcatcagagcccaaaacacacgctgcgcgccatcaaggacacattaagaaagatgccggatcacggcatcggctattcggcgctgaaatacggttcagcgtcggacgacgaagcgatagcctgtctgcggcgccaccgcttgccggccatttcattcaactatctcggcgtctttaacgaacagactgacgacgccctgtgggccttgatcgaccaaacggcggatctggaaaacggcgcgctgccggcgagcgacaatgtgctggatctggtgctctacgtgcacggcgaccggctgagcatcgtgatgtcgggcttattgccgcaggcgacgctggcccggctcggttcgcactatagggagagcgtgtcggcgcttgtcgaacactgttgccacgaggcgagccagggcgttcgcctcgccagcccgggggacttcccccatgccgacgtcagcctcgccgagttggaccactggcagcaacgtcatcgcatcgccgccgttttcgaggctacggttacgcagcgggaactgatgtatttcaaccggcttaaccgcgagtatcagatcgatcaggccgtttatgaggtggccggcccgctgcagccggaggtgttgaaccaggcctggtcgctggcgctgcagcgctttgaaatgctgcgcgccgggtttggcgatcaaacccgccgtgggcggcccaacgtcttcatctgcgagacgctgcaggcgccgatcgcgatcgaggattggaccgatgcgccgccgtcctcgctggaagaaaggatggaagcgctgttggcccgggaacgagaaacctcgtttgagctggatgcgccgccgttgatccgctggtgcctgatcaagttgaacgccgatgagcactatctggtgcagacctttaaccatatcttgttcgacggttggtccctcggcgttctgttcgaacactggttcaacgactacctcaccttgctggaagggggcgcgccggcgctggaaattaaccgatttgagccgttcgccgcttatgtgcgcgcgcacggcgacgatcccgaagcgcaggcgttctgggcggactatttgcgcggagcgccggtcaaccaacgtttgccgttgagcgcttcgccggatgccgcgccgcaggggcgacgtatgcggcaatatggcgcggaattcaccgcggaacaggtggcaagcctcaccgcgttttgccggcgccaggggatcacggtcaatcaactgacgcagctggcctggatgctggcgctggccgaagcgctggcctgtgacgatatcgcgatcggcacaaccatgagcgagcgcccggcggacattgagcaggtgcagacgctgtttggcctgtgtgtcgccagcccggtgctgcgcctgcaggcgattcgccgccggcccatttatgcgttgctggccgatatcgcggattcccagacgctgaggcagaagtacgccttttccgaactgaaccgctacgacgaacaatgggtgcccacttcgccgttcggcagcctgtttgtgtttgaaaacatgccgcaaccgcagaaggatccgcgcttgccgtttacgttccgggtgacggatatcgtcagcggcagcaaccaccagacggtgctgtgcttgttccccgaagcggaacggctcgccatttcactgttttatgattctcacgagatagctcaggagagcatcgttgcggtaggacgccgttttcaggccattgcgctcgcgatcgcccaccttccgcccgacagcgaaatccgcgccgaagacgggattatcctggcggaggaggcgtga

SEQ ID NO: 429929 - DNA, 576 bp, Serratia marcescens
atggagcgcgtcaatatcgctattgtggataaaaatcaattcttcaagctggggttgagtcttgccttgcaagaaggttttctcacgaatggcattaaggccaagatcacgggagaagaacgtgccaacatcatattcagggcgccggacaagcgggtgtccataaatttttgtcatacccagcttttgcagggcaacttttcttctattccgctctatttttcaatattggagcataaaaagacattccctaaaattcattgcaatttggaagccggaagtattacgcgcaaagacagcgtggcggcgatcgtggacaaggtcatgttctgctatcgcaagaaaaatagtttggtttcaagctattgcccgcgttgtcgtacccagttgacctttagcgaggggaaagtgtgccgtttaatccatctgggctattcacaaaaccaaacggcgatgttgctcggcatcagcccgaaaacggtgagtattcataaacgttcggctatgagaaaactgaacatcgataataatattgaattcttgcgctggttaaaaatgcacagcgactcttgttaa

SEQ ID NO: 429930 - DNA, 291 bp, Serratia marcescens
atgaaggtattgacgacgccggaaagacctttccggtatgatgagcttgcggataaaatcatccgggaggccaggagccgcttgggctgcgccgttctgcggtttttagactgcatgatcctgggttatggcccgccggtgatagtctttgatatctataataatcacggtaagttgcaaacgttcaaagtcattcttcctcttgggagcgacaagcagctaaaaaaagatcacctcgggttggtttcctgcctggaggctaaaaaattgatgaggataaaaaaaatataa

SEQ ID NO: 429931 - DNA, 366 bp, Serratia marcescens
atgactgcagccaataccaacatgggcgggatcggctttgccggctgcgacccgatgataccggcgccgggcccgaacacctcgcccaacaacaccggcataccgaacgtgcctaacattttcatttccggcggcaatgaacaaaacctcggcaccactcgtgtggccaccgccgattcgggcggagtgatcggcgctgcctcggggacgcattcggcccaggcgcagccggtgcagggatcgggtaagtatttctccggcggcatgccggtcacgcggctaggtgattccagcacgacgaacaacaacaacatggtctgcactcaggtcgcgccgagccagaccaaatgtttcgttaatgcatag

SEQ ID NO: 429932 - DNA, 726 bp, Serratia marcescens
atggattgttctaacaagttcagacgcaatattttagatgagataatcgctatcattgaaaaagccattgatacacaaagccatgtatcaataagggcgctatccattaagtcagggtattccatcgggcatttacagcggatgttctatttgtatgaagggatgaagatagggacctatatcagaaagcgcagactaagccgcgcgacgttattgctgaaatgtaccgatatgaagatctatgaaatcgcgttgctctccgggtttagttctcagcaatcatttagccgtgcgttttcaaatcaattcggttgcccgccgagaacattcagaaccctgcgcgattggccttttctcaattatcaaccgattattggcttcgataaagagcctttccccagcagcatcgtgtacttgaatttgcatgagtattacgagaataaaaggatcgtgcaactgctttcgccggtaatcagccgggggcagatgaaggtaaacgtaaagaatccaataacctgtagcctgtacaacgcatcggcaaagtacattgcgatcagacgcaatgaaaaaaagatgagcgaaaacgagttcatcctatcgctctatgagggggtgttggcttccctggatatcttcatcacgcaaagcgtaatatttaaaattcacgatcactgcccaggtgaaaaggaaaacgtcagcatgtggtatttcatcccgataaaatga

SEQ ID NO: 429933 - DNA, 888 bp, Serratia marcescens
atgtttataaccaaagtcattgaggagctgctcgcctgggtggaagaaagtgggttcaatgagaagctcaccgttgagatgctgtcagaaaaaagcggatattcacgcgggcatatccaaaaagcgtttaaagatgaaacagggatgactttcgggagctatgtgaggggcagaaaactcattcgcgccgcatttatgttgaaagcgacgaacctctctatttccgatatcgttaaagcgctgaactttcagtcatatcaatcctttgaacgggcgtttcgcaagcaattcagaacctcgccgatgcagtatcgcaaaagtaaatcgtgggacgtgtcctccgccatcccattgctgtttctcgacggcattcccgagcatcgctatgtgcacctgccaaaatttttcgacgattcaggggatggcgttgatgcagagatagatcacttccatcctgcggtttccgcgctgcgattggcggcaattgataacatgaaaaaaacggatagcggcgtgattaactttttcaattttggcgcgagcatcaagaaagagaattacgtcagcatctatttgaagaccctctatatttctgaagaagactgtcttggcagcgtgcttgcctctctggccgacgcccagggaaaaaaagacatgcaactttatgcagagttcagttatgacggcgcaagcgatgaggcgcaaaaattcacgcaaagtatctacaccaaatcattcccgataaataaagttggcatgatcgatcgctttctcattgaaattatcacccccaaaggcggcgatagaatagagatgaagacctatatccccattgtcttccctatcaagcacagagagaaagaggtagcgccagggccagcgcggtaa

SEQ ID NO: 429934 - DNA, 2340 bp, Serratia marcescens
atgattagaacatcgtttggtaagagagccgcaataatcacgttcttttgcttgctggttttttctggcgtcgcgttaaccgtggggggaatttggctgatcgccctcggcggatcgttctactatgccattaccgggataggctacatcgccgccgcagtgctggtcctcaagcgcagcaaatcggcttgttacttaaccggcctgctgtttttgatgacgatgctgtgggcgctttgggaatcggggcttaactactgggcattgttcccacgcctgctggtgcccgccggcctctctattatcgccgcgtttttacttccctcgtacctgcacggcgccaagagtcgaaagcaggcttacatcgccggttcggcattatccgtggcctttgtcgctttctttatcggcgccttctttccccatggcgaaattacccctgctggcgacgtgacgtttatcgagagcaaaagcgacaacgcgcctgccgattggagcgcctatggccgcacgacggaaggaacgcgctacgcgccgttcaatcaggtgaaccgttcaaccgtcaaagatctgaaactcgcctgggtgtatcgcaccggcgatttccggccgggcgtggaccaaaataccccgctcgcgattgatgatgtggtgtatagctgcacgcccaacggtcttatcaccgctatcgatgccgatacgggtaaagcgcgctggaaatttgactcgcattccacctcccccgtttggcaacgctgccgcgggcttggctactacaaaaatgaggatgttgcgccaggcgctctgtgcgagaaaacgatcgttcacaccacgatcgatgcccgcctcattgcgctggatgccaaaacgggccagaaatgccccgccttcggtcaaaacggtgaggtgaatctcggccagcatatgggggaagtcaaaccgggttattacttccaaacctcggcgccgaccatcgccagagggaagattatcgtcggcggctgggttatcgataacgtaatgaaaggcgagccttccggcgtcatcagggcgttcgacgccaaaaccggcgagttggactgggcgtgggacttaggcaatccgggcatcaccaaggcgccgccggccggaagcacctatacgcgcggcacgccgaatatgtggaccacctccgcctatgacgacaaattaggcttgttgtatgcgccgcttggcaatgcaacgcccgactattacggcatgaatcgcccggaaaattcggatgagtacaactctgccctggtcgccattgatattgaaacaggccgtgagcgctggaaattccaaaccacgcatcacgacatttgggattatgacctcgcgtcccaacccgcgctggtagacggttttgatgagcaacatcgcccggtgcccgcccttttgctcggcaccaaacgcgggcagattttctacctgaaccgggagaccggcaaaccgctggcgcaggttgaagagaaagccgtgccgacgcaaggcgccgcagaggaagagcgcctctcgccaacccagccgttctccgtcggcatgccgaccattggcgccgagcgcctgaccgaagaaaaaatgtggggcaccaccctgtttgaccagatggcctgccgcatcctgttcaaacagatgaattaccagggcgacatgaccccgatcggcacccgcccaacgctcgagcagcccggcaatttaggcggactcaactgggggagcatgtcgattgatcctgtaaaccatatggcttacatgaacgatgtgcgcatcccgaatgtgttttggttagtggcgcgcgacagctatgaacgcgtcgcgaagcagtacccgcaaaaagtgatcgatggccacgggccttctcccatgatcggcacgccatacggcatgatcacgttgatgtggatgtcgccgctcgaagtgccttgcaaccaacccccttacggcacgatcaccgccgtcgattacaaaaacaaaaagatcgcctggcagataccggccggcaccgccgaaaaaatggggccgctgggcatcagatcgcacctgccgatgccggttggcatgcccacctacgcgggcaccatgacgaccgccggcggcctggtcttcttcgccggcttccaggactattatctgcgcgcctataacagcagcaccggcaaagaagtctggaaatatgcgctgccggtcggcgcgagcgcgacgccgatgagctacgtttcgcctaaaaccggcaagcaatacatcgttattgtggtcggcggcgccgcgcattcgtcagaaaccggcgattacgtgatggcgtttgcgctgccttaa

SEQ ID NO: 429935 - DNA, 1641 bp, Serratia marcescens
atggaaacattcttcaccatattgatcttattgctcaccgtctcgttgtccggcgtcgtgacgcgcatattgcccttccaaatcccgcttccgctgatgcaaatcatcgttggcgccgtgttggcctggccgcagtttgggttgcatatcgacttcaatcccgagcttttcttgatgctgtttattcccccgctgctgttcgccgacggttggaaaacgccggcgcaagagttcatccattacggcagagaaatcctttgtctggccctggtgctggtgatcatcacggtcgtcggggtgggttatctgattcacttcctgctcccgtcaatccccctcgccgccgcatttgccctggccgccgttctgtcgccaacggacgccgtggcgctgtccggcatcgtcggtaaaggacgcatgcccaaacccgtgatgagcgtaattgaaggggaggcgcttatgaacgacgcctccgggttggtttccctcaacttctccatcgctgtcgcgctcggcgcgatggcgtttaccctggagagcgcctttctgacctttcttcaggtatcgattggcggggtgctgtgcggcatcattattgtctttctctataatcaaatggttaagttcatccataaatggatgtataacgattccgccacccagattattttctcgctgttactgcccttttcctgctatctgattgcggaaagaatcggcgtatccggcatcctggccgccgtcagcgccggcatgatgattggccaatccaaagtgaatcgcagcatgccgctggtgcgtttacgcaccaataatatttgggaaatgctcgagttcgtgtttaacggcatggtgtttattctgcttgggctgcagctgccgggcatcttgaacttcaccgtggcgcaaaccggtatcgatcattccatcagcctggagacactgctggcttacgtggtgatcatctattttagtttgatcgccgtgcgtttgatttggctgtggctgatgaaggtcggcagcgcgaccctgatgcgcaaagatccgctgttattttcgaaattcagcacgcgcgatctgttcgtcgccgcctttgccggggtgcgaggggcggtgaccctggcgggcgtgctgtcaattccgctgtttctattggatggctcgccattcccggggcggtatcagctggtgtttatcgcctcgggagtcatcttgctgtcgatcgtcgtcggcatcgtcacgctgcccttcctgttgcgcggcaatctgccgccggaagaagatcaggaagaggctttctccgtttcagaagccttggcgagcgcggcgaccaaggccgtcaacgaaaccaaggaaaagctgctcgtcgccccgccggacgacgccacgccggaactgattgaagaaacgacgcggcggatgctggacgtgctgcaacgtaaaattctgaccaaagaagacgttaagaatatcgtggcgctgaagcggctggaaaagcagctgtacttagcctcgttgcacgcggaaagagaagagctgtaccggctgcgccgcatgaagaaaatcagccatgagaaacagagaaagctgctgcatcgcattgatattactgaggtgctgatcgctgaagacagcgtttaa

SEQ ID NO: 429936 - DNA, 756 bp, Serratia marcescens
atggatttttgtaaccggatttccgtgtgtttattgacgtttaattcatcgcgcctgctgcgtgacgtgttgcaacctgtggcggcgttcgccgatgaaatcatcgtggtggattcgggcagtactgacggcaccttggccatttgcgacgacttcaatatcaagcctctttatcacccgtttgaaacccatggccggcaaatgaattacgccatatcccgcgcgcgatatgactgggttttgtgcctggacagcgatgagatcatggatgatgaagcggtcgacgcgatgcggcttttcaagcgcaccccaggccccgacaaaaataacgcctatcgcattcgtcgcgattggtttgtgttgggacaggcggtcagaacgctttatcccgtctcgtcaccagattaccccattcgcttttttcatcgccaggtggtgaagttcaatgatgcgccggtagatgatgcggcggaagggggcgcatccaccttgatactggccgggcacgttaaacacgacacttttttctcaatcgaggaagtgtttgccaagctgaacagctatacggcacgcgtggtgaaatacaaggcgataaggccatcgattctccgaggggtgattagcgccatcggcgcatttttcaagtggtacattttcagcggcgcctggaaagcgggccgggtcggggccgtgaccggcgtttacgcggtgtcctacagctttttgaagtatttcaaggcgtggtaccacagatag

SEQ ID NO: 429937 - DNA, 630 bp, Serratia marcescens
atgaccgagcgacgttattactacagcgacgatttacagggccaggcgcaggtattgagctgtgagccggccgaggcgggcgcttacgccgtggaactggacgccacgctgtttcacccgcagggcggcgggcagccggccgacgtgggagcgttgaacggcgtcaccgtgttgcgggtgcagcagcagggggatagggtgttgcactataccgcggcgccgctgccgatcgggccggtcaatatgcaggtcgacgaagcgcaacgccggctgcacgcccgctggcactccggcggccatctgatcggctggctgggggaaacccgcggttggcggccgatgaaagcgcatcattggccgggagaagggcgcatcacgttcacgccggggccggacgtacagacgctggaggcggcgtttttacacgcggagctggcgcgcctgatcgccgccgatttgccgcgtcgccaacaggcggtggacgggatgcgccagatcggtttcggcgatctgcctgcctacggttgcggcggcacgcatgtcgccacgttgggcgaggtgggcgcgatcgcgattaccggcgtaaagatgaagaaagggcagctgatcgtgcagtatgcgctggaataa

SEQ ID NO: 429938 - DNA, 789 bp, Serratia marcescens
atgactaacacatatcatcgcgtgggcaacggaccccaccccgttctcgtgcttcacggttggttcggtgacgcgcactcgttcgaagagattgaaccctggttgaatgtccacgcgttcaactatgtgttcatggattatcgtggctacgggggcatgcaggaaacgcgcggcgcatacacgatcgatgagattgcctccgatgcgctggcgcttattgacgctcttggctttcacgacttcagcctgataggtcattcgatgggggggatggtgattgagcgaattgcaacgcgcgcgcccgatcgagtgcgggcactcgttgccgttgcacccgttccttgcggcggcatttcgtacgatgctacgacgcgccgtctgcttgaagatgctgctgagcaactggacaatcgaaaagccatcatagaccgcagtactggcggacggttgcccttatcctgggtcgaatggaaagcagcgtattcggtatcgcattcctctcaggaagcattttctgcgtattttcatgcatgggccgataccgatttcagcgatgagattgtcggttcgcatccgataaaggtgcttgtgggtgagcacgatccaacattcaatgccgggttaatggccaaaacctatcttcaacgctatccccatgcaacggttgagattctggaaaacgccggccactatccgatgaacgagacaccgctcgcgcttgtcagggctatcgaatccttccttgccgaaacagccactgtcgggcatatcccctcgtccgctcggtga

SEQ ID NO: 429939 - DNA, 1032 bp, Serratia marcescens
atgtctgcaggtttatcaaacaaccgcgaagttaaacttatccgccatgtgcagggagaaattcaccccgaaaatttcgccatcatggaaacgaccattcctgcgcccggaccctatgaagccgtagtccgtaaccgttggttccgtgtatccatctcgacacggttgatggcgcaggaggatgcaaaggccgccgaaggcattccgttcccgcctctcaaccccggagacactctggcggacggcgcgatcggagaagtggtccagaccggatcgggctgcagccttcctttaggtagccttgtcatgcatccgttcgggtggcgggaatatgctgtgatccacgaacacgacggcaagctcatcgattgcctcgaacctgacccagcggcttatcttggccatggctggacggcctatgccgcgttgacccgaggcgttcaggtgaggaaaggtgacaccgtgttcgtttccagcggcgcgggggccattggctcgatggctggacagatcgcacggctcctcggcgcgacacgcgtgatcggtagcacgagcagatccagcaaggcccgctggatgcaagaggaactgggctatgatgccgtcgtcacccgagacggcggccccatgaacgagcaactggcgaaagccgcacctgaaggcattgatgtcatcgtagacatggtggggggtgaacagctcgcggcggcgattaagttggcaagggatggtgcccgtggcgttctgctcggtgcgctcaccgctgagctgaacgcagaaaaggcgtctttgcaggctccggttacattggacagctttcaaatcatcttcaaaggtatgacattacgcggcttcagcgcggatcattcgcccgatgcgtttggattctggttacgcgatctgaagacatggaagcgtgacggacgcattcatcttacgtccacgaccttcaagggaattgaaagctcgatatctgcattgcaggaagcctgtgccggtcgcctcaaaggcgtggtcctgatcgagctataa

SEQ ID NO: 429940 - DNA, 633 bp, Serratia marcescens
atggctactcgcattcctacagaacaccgcgcgatgcggaaacgccctaaacagcagcgttcccagaacacggtggagagtatcgtcgaggcaggtgctcgcgttttggcgcagagaggttgggcaaacttcacgactaacgaggtggcgcatactgccggcgtcagcattggatcgctgtatcagtatttcccaaataatctggcgattgccgaggctattcggaaacggcatctcgatgacatcctgaaagtgcttcctgatatcaagacgcaaggtgaaagggttccgctcgaggaacatattggccgattgattgatgccgttgtcacgcttcatgcggctaaccaagatctgcatcgtgttctgatcgatgaggttccgctcgcgccgagggaattctatgacgcttttgagcgtgagtatcatcgtcgctatgaagacctcatccgtgcggcggccccgtcagacgatactgaaacggaccacttagtcgcggcccgcattctcgcagatgcgttggagggcatcgttcattccgcctctcgccggaatgaactcatgtcgccagtgataaagagagaagcgacgaggatgataatgtcttatcttctggcacgagagagaacctga

SEQ ID NO: 429941 - DNA, 519 bp, Serratia marcescens
atgtcttctgaaatgattttcccactcaaagaaactgagcggcgcgcggtaagagttgtcctgattgataagacctgctcgatcctgcttctcagcacacgtgatgtcagtaatcctaacttcataaattcgtgggaattacctggcggtggcattttggagggggaatctcacgcggacgcagccatacgtgaagtgtttgaagaaacgggtttgatagttcctttccaaagcgtccgtgtacctcagtggttcagagatgttcattactcgtatcgcggtgaaaggcgcctgcaacacgaagctatatcccttgcctatataaatgatttcaaacctgatatccattatgcagaacgggaaccttttgaactggaagatcatctcgagtatcactggtggtccctggaggaactaaaatcgtcgtctgcgactttttatccaaggaacttacctaaacacattgagcaactgctccagggggaaagtattaatgatcccattgagatttgggattaa

SEQ ID NO: 429942 - DNA, 1395 bp, Serratia marcescens
gtgagtgaatctgtagcggcgtcgccgatccatgcgcgggatttggcggccagaatcgacgccttgcccgcgtcggccggcctgtggcgctttatcattctgctgtcgctgggcggctttttcgaactctacgatctgttccagaccggctatatcagcaccggccttatcgccgacggcattttccacaccggtgcgcagggcgttttcggcgtgtcggatcaggcggcctttgcctccgccacctttctcggcctgttcgtcggcgccagcctgctgagcccgtacgccgatcgcttcggccggcgcgccacctttatgttcgccctgatctggtatggcgccttctcgctgctgttggcgtttcaacagcaggcggaatgggtgatctttctgcgttttctggtgggcgtcgggctcggcatcgagttggtgaccatcgatacctacctgacggagtgggtgcccgcgcacttgcgcacccgggctttcgccttcgcgttcttcgtgcagtttctgtcggtgccggcggtggcgctgatgtcctggtggctggtgccgcagacgatttgggggctgagcggctggcgctatgtggtgatcgccggcgcgctggcttcgctggtgatttggctggtgcgcaaggggctgccggagtcgccgcgttggctggtgcaacagcggcgctatgcgcaggcccggcaggtaatgcgggacatggaacggcgctgcggcgtggcggccgcggacttcccgtcgcgcccggtggacgatgccgagggagcgccgctgcgcggccgctttcgcgacatctgggcgccgcaatatcgcgatcgcacgctgatgctggtagtgatgaatttctttcaggccatcggcttcttcggcttcggcaactggctgccggcgctgctgtcgggcaagggcgcgtcggtcacccacagcctgctgtacgctttctttatcacgctggcctacccgctgggctcgctgctgtgcagcttctacgccgacaagatggagaacaagtggcagatcgtgttgtcctgcctggtgacggtgatcttcggctcgctgttcgcactgcagaacaacccgctgtggctgatcctgtgcggtttcttcatcacctggtccaacgcctggctgacctacagctaccactcgtatcaatccgagatcttcccgacccatatccgcgcccgcgccgtcggtttctgctactccttcagccggctgtcgacggtgttcagcagcatcatcatcggcattatcttgcagtacggcggttcgctgggggtgatcgcgtttatcgtcgccagcatgctgatcgtgatgctggtgatcgggctattcggcccaaaaacgcgcggtatcgatctggaaaacatctga

SEQ ID NO: 429943 - DNA, 183 bp, Serratia marcescens
atgacctcgcctcaggaaacgccaaagggacactgcgcgggtcttcggcgcggcgcgtgggcggccggggaagagcggcaggaaaaattggtacgcttcaatagattagcacagcattttggcaaccgtgcgtcggtgagcgtgtcgatgggcggtgaaaaaaaccacacaattaaaatgtga

SEQ ID NO: 429944 - DNA, 2064 bp, Serratia marcescens
atgaaaggctatgcggaacttgagatcgtgtttcagcggaattcactcgatgaatttcaagccagttttcgccagcgctttgacgaaagcgaaaatattacccctttcatcccgttggcattaaacatccacgatccgacattttactcccgcaacccgcaaagaatgggccggttattatcggaatcactgtttatgcagcccgcactgcgtgatgcattcacgtccgcacgggcattttctgaccatcagcaaagcccgctaaaaatacgcctgcttatcgattcaaatgcatccatattacacagcctcccttgggaaacgctggttgatcccaccgatacggccacacatctcttacgcagcaatcagtgcgttttttcgcgctatctggcggcccgaacttaccgcctcccaatgttgcgccctaaacaaggcattaaggcactattagccatcgccaatcctcaggacctgtcggaaaccttcccgcccatcaacgttcctcatgagcaggagctcgctgaaaatgcgctgcgtcatgttccgttaaccacgctcacgcggcgcggaagcgcgacgctccaggcgattatcgaaggcatagaagagggagccgacattctctatctcatgtgtcacggcattgtcgggcagcaaggcgccgtgttgtggttggaggatgagaccgggaatgccgccagcgtcaccggcgaagatttcgccgcgcgtttgggcgcgctggagagaattcccagcttggtcgtcctatgctcctgccaaagcgccggtgccggcaatcccgcacgcgacgcgctggtcgctctgggccccctgttagccaaagagggcgtgccggcggtattggcgatgcagggcaagctttcgatgtctgcggcaacgcaatttatcccggagtttttcagacagctggcggagcatggcgaagtcgatcgcgctaccgccagtgcgcgggcaaaaatcatggactcaccggactggtggatcccggtcgtttttacccggttgaataatgcacgtatttggtatccacccggattcggtgtttccgacgaaaataaggatccctgggctctgatcgtcgacaatattaccagccaagacagcactcctatcctcggcccgagcatgaacgaagcgctgttcggctcgcggcgtgaactggcacgtgaatggggggaaatctaccactatccgttaggtgggcacgacgtggcgggtctgccgcagattgcacaatatcttgccgtgatgcggcaagacaaatacccccgtcaggaattttacaagtacgtctatgagcgaattcttgagaaatatcctgacgatgtgccggaccggctaaaaggtttagatcaaatggagatctacacatcactaggagaactggtttcagtggtggggcaaaaaatccgcgcccgtacccctcttgatccgctgcggatcttggccggctataaactcccggtttacatcaccaccgatcccagcgatctactggtcgatgccctcaaagaacagggcgcgacgccgacagtccgcctgctgaggtggaatatacacgctgaaatttgcgatgccaattatgtcagccgagcccccgccagcccggcggacgaaggcactgcgacccatccgatcgtgttcaagctcttcggggatttatccacgccaaaatcgctggtgttaaccgaagatcatttttttgactacctgaccaaagtctcttccgcccaagacgccattcccctttacgtccgtgccaggctgaacagcagcgcgctgctgtttgtcggcctgcaggctgaatcctgggagtttcgggtactgtttcgcagccttttactgttggaaggccatgacctgcgcaaaaatatcgaacatttctctgtacaaattgatccaaacagcattcttgatcccggcagcgcacgccgctatatcgaaaaatacctgcagacgaaggcccaatggcgtctgtactggggagacgttaccacctttatggcggaattaaatgcccgtacgcaggaggactcatga

SEQ ID NO: 429945 - DNA, 3723 bp, Serratia marcescens
atgaaggctccttacgtaggccccagcccttttagcgccgaacaaacactcttcggtcgcgacgcggacattaagcaactgcaatggcgcttaatctcggatcggataatcgtgctgtactccccttccggagcgggtaaaacctcgcttttgatggccaagaacggccttttatccacactgacaacgctgttccatgttttacccgtgcagcgcatcgcgcaggccgatgataccgatccggtcatctccctcttgcagcgcctggaccaagatagttttggctcgattcgtcccaatgatacgcttcttacctacttcaaccgtatcactctgcctgaatctgatccgccgaagcgtcttctgttggtgctcgatcaatttgaggaagtgttaaccggtaatgtcccctacgagcaacaaaaagtctttttccagcagttgaaagaactgctgtcaaacgacgaaaaaactatctggctcctcatcagcatgcgagaagaatacttctcctggcttgatgatttccgcgatgatattcccacccgccttaacaacacctaccgtttaaacctattgtcggtcgagcaagccgtcgccgccatcaaggggccggcagaagccatgggcgtcgcttttccagtgcaagacggaacagatgcggcgcagttgctggtcagcgaattgattaaagcgccggaaggcgcacgcccgagtaagaccgtggaaccggtacagctgcaggttatctgtacggatctgtggaacaccttaagccaaaccgagcggcaggtcggtgaggttcgcgtcgccgacgtggcgggatataacccggacaatgccttactggattactgcaccaagacgctcaatctggcggcgcaagatccccatcgattcagaacgttgggagattggatagaccggtatctgctgacgttaagtgggcgccgctcagccgtgattttcagcccgcaaagcacggacgggccatcacttaaagaaattcaaaagctcgaggagcaccatctcatccgtcgtcaaagccgtgaagacgacatgtggtatgaattggcgcacgatcgtttagccggccccgtacgccgcagcatagaagagtggcgtagcaataatctgaaagaatggcaaaaacaggcgcggatatggcatatggacggcgaaaaaccagattactttcgcgccctgccataccgtacccaacgaaaaatgaggccggcggaaagcgatgctcccgattcaaaagtcgaggcgcgattcctcgcggcgtatgcgtcgtatcgccgcaggaaacagcagcttttttgcgcttcgggtttagtcatcgccgttttggcgataattattggtttctttgttgacaaaagcgccgatgaacaacagaaaaccaagctcgcgttgaattatctcgccattcaaaccggtattctttccattctcaacgatcaccccaacccaagtttggaagccttagccaccgcggccggcgcgcagttacggttaccagccaactcaaacaatctgttgacgttcaattttcaaatgttgctcggcgactatctcggccgctatagacaacttgagcgcattgatactctcggcgatggcaaaaccacagtagtacgaatccgcgagaacgaatgcattagcgccaagatcggccgtgaccgtttctcgataaaaacctgcggtgcgaacagcgaattcatcccccccgaagaggtgcaacaggcgcatccctcgggaattaacaccttaacattcgtcacacctaaactattggcgactggagatggcgatgggacgatccgcatctggggtctggcgacaagaaaaaccgtggggggcccgctacatctgcccgatagtgacaacactaagcatgtaagcaacaaggtgcgtgccatcacggcagctggcgacaggctttatgccggatatcaagacggtacgctggccgtgtggaaaatatccggagccgaatttgaattattgtcacaacaattcgataagaaaaccaactccgtgatggccaccgccgtcgccccccaaaatgctctggataacgtcgccatcgccacaagcagggcagtcaaatggcagacgtttagccaaggtaaaccgcaacagtccatcccattggcggccatcgcgccagagaccgagtacagcaaaactttttacagtatcgacatcagccccgatggacgatttatcgcagccggcagcagggatggctacatttatatctgggagacttcacgcctttctccgaccaagaataacgtcgaaaaggatgtttcgccgcgagccgacgcccccttgccaaaatcgtcgttcttttactggccaacgattatcaacgctcatcagcaaaccgtcgcgcaactcaagtatctgcaaaatggcgacctcttgtcattaagctgggatgggagcctcaagctgtggctgttttcggccaataatgccgccgctcccaccaaccgcacccttttgcaatttccgcggcagttggtcagcgtcgcgaccgagcctgatgagcaaaccgcctatgtcaccagtgaagccggcgacatactcaaagtcaatttgcgcgttgacagacatcctttagggcaatttttgcttagtcctcaagctcctgcgctgtttgtcgacagtaaagcaaaccgtcagctattcaccgtacaggcgacagggctgacgcaatatcggttggatgccaataccggccaaccatcggtcattcggcagttgccggtatcgaacgtcgtcgctctcgcgtggtccccctcagccacgatgctctttgctgcgcaacagcaaggcgttgaggtgtttcgcaatgtgctcatttcaccttcccaaggcgagccgctggcgtgcctgctgcaaccgccaggccgccgcatcgccgccattcgcgtcaatgatgccggcaccctgctggcggttaccctcgtcggcaagaacgggcgagagctcgccaataaactgtatcgcctcaccgcgtcagccccccatggattcacctgcaaagaaattaaaactcagcgcaacgtctactttccattgccctggttcaaacccaacagcgacgaaatcatgaccataaatgacaagaatgaaatcgtctcatggcgattcaacgctcagtcacgtgaagaacttgagatagtcaaaacccgcgtcattcaggttgcgagcgaacgttctgaatccagcaatatgcgtgcgccgatcgaaacactggcgttcgattcttcaggccaaacgatgctgctgggcgacttctcgggcaagatatattccgcaacgataaacggggaggactggtcgttcacacagaagaaaaatgattctttttttatcccccatctattggccgtcgcgggtgatggcaacaccgtcgccatgggggacaacaaagggcagttgtccgtgttcgtcgcaggttcagccatgcacatcgcacaagacttccacacgacgccaatcaccgccctcgccctttctcaggatggagaatggctggtttcttcatcaagcgccggcacagccatttgggatttgcgcatgaaaagctggataaaacaggcttgtaaatgggcgaaccgcccgacattccagcctggagacatcgacaaatacttccactatgcgtccattaatgacccgtgtcccgacaatccatcgaaatga

SEQ ID NO: 429946 - DNA, 1323 bp, Serratia marcescens
atgccataccgcacgatcccgacaacggatacaaactatttcatgattgtcaccgataaaaacggcgcggaactagataacgatcccgatgcacctaacggcaaactgagcgagttgatgctgtcatccctggtggacaatggcattaccgacgtgttcattcgctgccacggctggcatcaggataaggccaaagccttcgctcaatttgacagttggatcggcgcttttgcctcgctggatgaagatcgcctgcatatgctgcaacaaatcccctcgtttaaagaaatgcacattggctttcactggcccagtctggcatggggggatgaaaaagaggcctcagacaccagtttctcccctgctaacactcagacattgagagaaaggatcgacttccatatcgaggcgctcggcggcacaccggaagttcgggcggcgctgtataaaatctttgatgaagtacgcacagactccgcgtcaatgacgttatccgacaccttgcgtgcggcctatttagagctcaatgccgcactggatttgggtgccaacggcgcaccgggtgaaggctccgccgatcgtctgcctttcgatcccgatcaaaccgtggctgaagccgtcaataatgtggccttcggtaatgatgtcggcgacaacccgttactggcgcctctgcggcaattaactttttggacgatgaagaaaagagccaaagacgtcggcgaaagagggctgcatcctctgctgcgcgctatgcagcaagcctcacccgccgtacgcatccatctgatgggacacagtttcggttgcatagtcgccagcgcggccattgcgggccctgctggcgctacgccgttgccattcccgataaactcttgcgtattggtccaaggcgccatgtctatctggtcctttacctcatcactccctacatcacatgaaacggccggattcttcaataacatcctgatggaaaagaaaatcagcggtcctttggtggctacgcgctcggacagcgacatggccgtcggcaaactttatccctgggctgcaggggtggcaggccaggtcgcctatatgtttcccccgctctatgccgcaattggcgcgttgggcatatgtggcataccgaccgttcacaatattaccctgttgccacgcgccggcgcctatgccttcgttccggctcacatttataacgtgaacagcagcaattttatttgccatggcgacggcatctccggctcgcacagcgatattgccggccccgaagtggctcatctgctctggcaagcggcgctcaaaacggcggacgcatcatga

SEQ ID NO: 429947 - DNA, 1434 bp, Serratia marcescens
atgattgacgaagaacaggtgccgctactggctttcggcattcacgccgatacggggctgccattggaaaccgggagcatgggccggcacgagcagcatcagtctgccgctgaatcactgctcggacaaaccgtcggcgcggcatttcccgacagagcgcatttggggctgcaattcgggttcgatgccgaccaactgtccgaaagtggctgggggctcctcttcgccgcgaatatggactcggcacctcatttggccgcgctggcccccctgattgaattgcgacggcggcaggccggcggcacactccgcatcttcgccggtccggacggttaccgacagggcgaaagcgccagcggctggcttaatcgtcatggctcctcattagacatgattaaccccgatctcggcatgccttattatcttgtcctgatcggttcgccagaggccattccgtttgaatttcaatatgcgctggatctcgtcgccggggttgggcgattggatttccccacactggaagaatttaccgcctatgcagacagcgttgtggcccatgaaacagatgccactcgcaaaacagctcggcgtattgaactgttcgctacccgccatgatttcgatcgcgccacccagttgttcatcaagcatgtcgccactccctttggcgctggcacaggttcactcgggccgttgggtgaaaagtatcgctttgcgttaaacagttcattaagcgagcaagcgaccaaagcctgcctgagtcacctgctcagtgccccacataacccgccttcgctgctgatcacgggcacgcacggcatggcctttcaggccgatgaccctcgactggcggaccatcaaggggcattggtgtgtcaggattggcccgcttatggcgatattacccatgaacactggtttgccgctcaagatattccagagcatgccaacgttcatggcatgatccatttgttttttgcctgctatggcgccggtacgccggcgttcgataactttcactctaaagcggatcgcgttcgcattgcgccacatgcgatgacggcccgcctgccgcaaaagctcatgacgcttccccagggaggcattctggcttctctgggacatattgatcgggtgtgggcatccagcttcgtttctgaaatcggtatggcgcagccccaacgatttcgtgacgtcatccatcgcttgcttgccggccaacgcgtcggtatggccaccgacgctttcaacgggcagtggggggtgctaagcaccaggctgttggaaaaactgaataacaaactgaatggacaaaccgtccccgccgctgacttgctggcattgcaaatcgcgcgcgatgatatccgtaattatgtcgtattgggcgatcccgcggttaggttgaagccagaacaggatgatgtgagcgggtaa

SEQ ID NO: 429948 - DNA, 2529 bp, Serratia marcescens
atgactacacgcacacatcaagaacaagtttgggagaccaacttgagaataaaaattaaaaatctgtttaagcgaggatataaaaaatttgatgagatattaccactgtgtgatggcgcccaacctaaagatgcatttcgcatatttaacgaattgaaagaaaccaactttggaacatctactaattcacttgactataaatctaaatttttcttcaaactccctgcggccaaccctaaatttttccaatggtggtatactcttgaatcacaggagttaatgactactaggattctggatattcataatgatcatgacattgcctgcataggcactcctactttagccgcaacaatttcttcatacaacaaagaagtaacattgcttgatattgatgaagatgttgtatctttatttaataaagtatttacaggtatatcaaatgccgaggtgcatgatgtaaatgtcggcaatattggcttacatggaaaaaaatatgactgcataacaatagaccctccttggtacccttctgaatttaaaaagtttatttctagagcaatacagttatcaaaagatggagcaacaatctattgctctatcccacaaaatcttacacgaccagggattagagaggagagagcggaactaatttcatctttgcaaaaatgtggtcatgatatattatacattgagcctagtgtgatgaaatacatagttccatattttgaagaagaagcattaaaaaatagtggtattgagacaaagaatcaaccatggagatcttctgatttattagtaataaaagtcaatgggactaaaacactaagctttgagtccgaagtgattaacaaggtcaggtctttctctagggttgggaataatcatgtttttcgggtgttcatagaagaaaacaatgtagaatctagttttccaattagaagagttgatgacttttccaaatctattagcaatagagacaatgttgaaaaagtaaacttatggacttcggaaaaacaaggatttcaagttaacgatatagtcttttttaacgaagtaatccaattatggagtgatggtaataatatagaagagacaataaagattattggtgagagaaataacgacaaagctaatgtaaactcaattaaacagataattgaacagctagaagaatatactggtttttgggcgatgaccccagaatctccagtgcgtcgcacatctgaagaaataaaaaagaaaaatgatgctttgtctagtgagtgggccgccaaagcctctgaaagagaacatggaagcagaagtgatggctttcgcatagaatttcaaagggatcgagatagaattatctggtcgaatgggtttagaaaactcgctgataaaactcaattattccctcttgaagaagatgaacatttaagacaacgactggcacatagcatagaggtaatgcagctagcatcgactattggtgctgctttcggtttagataagaacttaatagaagctggctcattagctcatgacatagggcatactccatttgggcatgctggcgaacacgcaatagatcaaatgtttcgaaaattaggttttaaaggtggctttaaccattatgagcacggtgtggatgttgttcgatttttggaaggttcatatcaatacagcgttattgaattgcataatgggctaaatttaacaccagaggtatgtgattgcattttaaaacatacgtattgccacaatggggatggacctagtcaagaaaatatatggaaacatacaaaacatcaaaaatacctgaaatgtggaggatacagtcaccttgaaggtcaggcagttagagctgctgataaaatatcttatttactatcagatatagaggatggaataaagttaggagctatacaacttcatgacctcttaggttctagactgtttcatcgagctccaatagactttagaatgagaagcggcgaaaatctatatggtaagtttatagagcaaaggggggctataataaaactcctgatggaagatatcattctggagtcaacaaaaaggatcagtaaattaaaatccagagccgatgtttttaatgcgggccattactgtgtatttcatagtgaacagattgataatgacatgggagaaatttggggtaaaattcaagtcaacaaacttcacctagatccgagagttttatctgctaatatgaaggcttcaaaaatggtaagcgagttattgttactttttacgttattccctgagcatataaatacacaattcagaatggagcatgagagattaaattcaactgaatacttgaagtattatagagaccaacataaaacaattgaaataccttatgaacttttaaaattcttgcctttggatatgatgataggtttccaccctggaaatactaaatatatagatgtatatcagttaattttggccaaggattatgttgcaagcctaacagataagaaactaaagagggtttacaaagagctattagattaa

SEQ ID NO: 429949 - DNA, 603 bp, Serratia marcescens
atgaacacgtcaccgtggaataaagaccgtatcataggccaaaaaagaccacttcagatatctcatatctgggggatccgaatccgacttgaactggaaggtaaaacgcgtgatttagctctgttcaatatggccttagacagtaagctacgaggctgtgatctggtgaacctcaaagtatctgatgttgcatatggtagctcggtttcaagcagagcaacggtgctgcaacagaaaaccggtagccctgtgcaatttgagataaccaaagggacaagagaagctgttgctgcattgataaagcttggcaatttgcacagtaaagacttcttgtttcggtctcggatcggaactaaccggcacatatcaacccgccaatacagccgaatttttcataggtgggtagaaaagcttggtctcgaagcttcgctttacagcacacattccatgagaagaacaaaaccttacctgatatacaagaaaaccaagaatctccgggtgatccaacttctgttgggccataagaaactggaaagcacagtccgttatctgggcatcgaagtcgatgatgcgttagagatctctgaatcgattgaagtctaa

SEQ ID NO: 429950 - DNA, 648 bp, Serratia marcescens
atggattacgatgagttgtatggaaaatatactgaaaaggctagtcagaatccacattacgctcattatcctacgataccgaatgcatggatttacatcgctattgatattcgtgacatgaatatgtgtaaaattgggcttaccactaaagaagatccattaaaaagaataaacgaaggtaaaacttataacccatttcttgaattatttgcaacgtatcaactctcagcctgtacttggggatgttcgcagcaagaactgaatgatatcgaaaactattttcatcacagagccacttttggaggggcgataaaacatgtaagaactcagcgggattcagagtggttttttaacgatcctgaggaggcagaacaccaaattgactggatgttggctaagaggggcttttcagtaagagggtggagtctttacgaaatctatatacgggaagaccgggatcaagaaaaattgaattatgtcaatgttgatgccttgaaagaaataaaaaccatatttaggcctgaaccgtacgaatataaaagtagagctttggctgcgggccttagagactatcagtttgcagattatttcaattttctgtttgattttcatcgaggagatgaaattagaaaaatatatttaaaatag

SEQ ID NO: 429951 - DNA, 603 bp, Serratia marcescens
atgaacacgtcaccgtggaacaaagaccgtatcatcggtcaaaaaagaccactccagatatctcatatctgggggatccgagtccgacttgaactggaaggtaaaacgcgtgatttagctctgttcaatatggccctggacagtaagctacgaggctgcgatctggtcaaactcaaagtatctgatattgcatatggtaactctgtttcaagcagagcaacggtgttgcaacagaaaactggtagtcccgtgcaatttgagataaccaaagggacaagagaagctgttgctgcactgataaagcttagcaatttgcatagtaaagactccttgtttcggtctcgggtcggaactaaccagcacatatcaacccggcagtacaaccgaatttttcatgggtgggtagaaaagcttggtctcgaagattcgctttacagcacacactccttgagaagaacgaaaccttacctaatctacaagaaaaccaagaatctccgggtgatccaacttctgttgggccataagaaactggaaagcacagtccgttatctgggcattgaagtggatgatgcgttagagatctctgaatcgattgaagtctaa

SEQ ID NO: 429952 - DNA, 840 bp, Serratia marcescens
atggctcagaatgatacttcattaatagttccccccccttcgtctcctcgtagagaggatgagttgtatctttctgatcctgacgcttacatttttaaagttaagacatggcaccaaagcaattttgactctgtcgcaaaagcacttgatgaagctagaaagcaattaagcaacgttattgctaaaacagaagatacaactctagagttaacatttactcggctttattcgatgctaatgggcatatggattgaatcaagaattcatgttttgctatatgaaaacggagcatttactgaaccagaaagagcgattgtttacaacaataatagtttggaaaataaatggaaagctgctttgactattgctgtaaagaaaagtgttcagttaccattacatatggacttgaccgaagataattgcgattttagtatttataatatttatattaagatatctgattggatcagtgaatatttctcaaaaaccattacttatcgaaacaaaattgcacatggccaatggatccatccatttacttccacacacgatgattggcaaagttcaacttattttaaaattagtcctgatataacggagggttttttaattcgttacgaaaatttactctctataaatgaaaggaaaaaattgcttagtgctatatgtactgcaattaataaccttgcagtacagcgtcgtcgtgactataaagctcaggagtttaatgagcactatagaatcatttctagtcacattcgaaatcttcgtgatttagactataggaattataaaaacaatgctcgcgcgagtttccttgcccagcaaaatagaaattaa

SEQ ID NO: 429953 - DNA, 1278 bp, Serratia marcescens
atgagcaatcgtcgtatcgtcattaccggcatgggtgccgtttcaccgctagggtgcggtgttgaagccatctggcaacgtttgttaaaaggagaaaccggcattcgcgcgttgcctgacgagatcgttgcagatttaccggtcaaggtcggaggacaggtcccggcgctggcacaagatgctgaagcgggcttcaatcccgacgcttctgtcgcccccaaggaccaaaagaaaatggatcgttttatcctgttcgccatggcggcggcggacgaagccattcgtcaggccggctggatagccgatacggacgaaaaacaagagcgcacagccaccgtcattgcctcgggtattggcggtttcccggcgattgcccaggcggtgcgcacaaccgacagccgcggcgccaagcggctgtcgccgttcaccatcccctcattcctggtcaatctggcggccggccacgtgtcaatcaaacaccacttcaaagggccgattggcgcgccggtcaccgcctgtgccgccggcgtgcaagccattggcgacgcagtgcgtatgatccgcaatgatgaagccgatatcgccgtgtgcggcggtaccgaagccgctatagataccgtcagcctgggcgggttcgccgccgcgcgcgccatgtccaccgctccggccgaattggcgcaacaggcctctcggcccttcgatagcgcccgggacggatttgtcatgggagaaggcgccggcatgctggtgattgaaacgctggaacacgcgctggcgcgcggcgccacaccgcttgcggaaatcgtcggctatggcaccagcgccgacgcctaccacatgacatccggcgctgaagacggcaatggcgcctatcgggcgatgaaaattgcgttgaagcaggcgaacgtcgcccccgaggaagttcaacatttaaacgcgcacgcaacctcgacacccgtaggcgatttgggcgaaatcaacgccatcaaacacctgtttggcacggccgggactgtcgccgtgacctcaacaaaatcagcgacggggcacctgctgggcgccgccggcgggctggaaaccatctttaccgccttggctctgcgcgatcagatagcccctgccacgctaaatctggataaccccgatccggcggcggcaggtttgcatctggtcgcgaaacaggctgaatcgatggacatgacctacgccttatcaaacggcttcggctttggcggcgtgaatgcgagtattttgttgaaacgctggcgggatgaataa

SEQ ID NO: 429954 - DNA, 261 bp, Serratia marcescens
atgaaagagaggcaaaacacgctcgcgttgagcatcgatggcaaaccctaccgggtgccggttggcatcagcgttgccgcggcgctcagtttgtgcggcggggatcattgccggttgtcgatttcacgccagccgcgcgcaccattttgcggcatgggcgtttgtcaggagtgccgggtaaccattaacggtctgcgccgcctggcgtgccagacgttgtgccaatccggcatgcggattgagaggagcgatgatgagtga

SEQ ID NO: 429955 - DNA, 156 bp, Serratia marcescens
atgaatgttccttcgcatgaaatgctcagtctgggatatatggtggcagtgctgtcagagaccggtcatacccgggtttacgtcacgccggatggcttcagctacgtcagtgacgcgtttgcggcagatatccaacgtggcatggtaaagttttaa

SEQ ID NO: 429956 - DNA, 453 bp, Serratia marcescens
atggagtctggtgctttaaagcatctgataagaacggcggcgggatgtgcgctgttcttcggcctggtcgccccgccgttggggggcgtgctcatgtttctgctaatggcgttcggcagcggtgagtgggtgggaataagtctgctcgatgccggcgatttgctgggcatggcggggtttatcggcattttttcttatgcgctcggttttttgccggcatgtttggcgggggctgtcgccggtatcgcccattcaggcattcgccaattgcggtggtttctgctgttgtgtgcggtggtgtccgccattgctcccgggttgctgaatgccgatcagcgtatttttggcgcgatcgcggtcttaccgggaatgttcgccgggtttttatggtggcgccggagattgcgtgatgccccgactgatgaggttttgcacgatagcccttcgccataa

SEQ ID NO: 429957 - DNA, 282 bp, Serratia marcescens
atgcagccgtataaagaggttgagtttgatcatgagctttgtctggcgatcggcagagccgtattggacgtggtagcgcaaggggaagaaaccagcgcgacgtcggtgatgagcgccattgagcgggcggtggaacaggggctgaacgacgacgacaccgccgttgccgacgacgcgctggatttgatggctcgtctcattcacggctgcggatttattaatctatcgggtgaagaggagacttcccatgcattggttgaatttcaagcgctacaagagtga

SEQ ID NO: 429958 - DNA, 123 bp, Serratia marcescens
atggcatcccaaacgcgctaccgttccacctatttctctaccccgtccagcatggcccatgaagcctattcattctggagtggcacgctgtttaacaagggcaagtcatgcatggtggcctag

SEQ ID NO: 429959 - DNA, 618 bp, Serratia marcescens
atgaaaaaaataatatctctggtcttatttagttcttctgttggcttttcacatgcaggaacgaacatttcagagcaactggcacagtgccagaaagttactggtgacagtgaacgccttcagtgctttgataaactcggaaagttaaaggctgaggacaaaacagaaagctcagaacctcagtcaacgggtaaatgggagacaagaagcgaaaaatcgccaatcgatgattcaagcaatgagttcgtctttttgtccgcggaaagtcagattcgaggacaatttggtggggcaattactcctttcttgttcatcacatgccgagagaaaaaaactgagctttttatcaattgggagacattcctggggattgatggtacgcgtgttcttactcgtattgatgcccaaaaagcagtcaatcgcacctggcagatctccactgacaataaggccaccttctacagcggacagacaatctctttcatcaaagaactgatgaaaagtaaaaaaatgtttgtgcaaataacaccttatggagaaaatcctgcacagactacttttgatttgtcaggtttgtcgacagctatcaagccgctacgtgaagcctgtaagtggtaa

SEQ ID NO: 429960 - DNA, 939 bp, Serratia marcescens
atgtgcgccctcaaggaagagaagggaagcgtgttcgcaaaaaaatttaagacgaaatctgaagcgcagcagttcgagcgttggattatcgcgacgcagaacaacaaagagtggcttgataagcctgctgatcatcgaccattaaccgacctgatcgacctgtggtggagccatcatggccagcacctgaaagacggagtgaagagggcgcagaaattgcgcgtcatggcggagaaaatggggcaacccaaagcgagccagatcacccgtactttcttcgccgactaccgggcgctgcgatttgctgaaggcaagaaggccaagacagtcaaccttgaccaggaaatgctgggtggcgtgttctccgttctcatcgaactggggcattatcacggcgagcacccgctcaaggccatgaagaaaatgaagctgccggctcaggaaatgggctttcttacccaggcagagattgccgcgctgcaaatgcggctcgacggcgatcacctgaaagctgtccgtctttgcctagcgacgggcgcccgctggggtgaagtggcgaagctgcgaaaggaagaggtgatcggtaacaagatcacctacctgaacaccaagaacaacaagaacaggacggtgccgatctcgcccgagctctgcaaagagatcaccagcggtgttaagtcggggccgctgttcaaggatcttaactatccctacgtccggctatgcgtgaaggaagttgctcccggcctgccggcgggacaagcggtgcatgtgctgcggcatacgttcgccagtcatttcatgatgaatggcggcaacattctggcactgcagcggattttaggacactcaagcatcttacaaacaatggtttatgcgcactttgcaccggattatctggaagatgcggttaggtttaatccgttatcattgagatga

SEQ ID NO: 429961 - DNA, 1932 bp, Serratia marcescens
atggaacctttatcaactttaattgccacttcagtattaggcgaggtttttaaaacgataggaaaaaaagctactgaggcgggaattagctcagcgagagtaaaaggcaataatatcttaagaggttttaaaaaaagtaaaataatcgaatcttatcttgaaaaagctgtacacaaagtatttattttcaggactataacaaaaggtaatgttgatgtttatttggatgagatatatcatccaataaaaataaagttgaatgacggaaataaaagaaacaaaaataaagcgataacggttggagataagtgttacatagatagaaaaggatgcacggccattgtggggttggcggggcagggaaaaaccacgatcatgcgaaaactgtttttagaggaattggtaaggcaggaaaggatacctttcttccttacgttgaggcagtttagttatacagaaaaagttgcatgtgaagatattttacttgagcatatgaatgcaagtggtatagattgtgaacttaatgatgtgattgaaatattggggactggaaaggtcgttttctattgggatggttttgatgaagtaagatcatccgaaagagaaaacgcattgagaatgattaattctatttttgataaatactcttgctcatctctggtaacaacaaggcctgatactgaaataacaaggcaggcgggtgtttctctatacaaggttgaggtgctaagtaggcaagatgtaatcttaatgatagaaaagatagtttctgatcaggttactagtagttcaattgtagagcttttaaataaaaggaagtttctatttgaaacaattaaaactcctattttaattgatatacttattgttacttcattatcattggatgatgagccgaattcaatacgtgactactacgatcatctatttacagcattgatgtataggcatgatttaagtaagaattataaacgagaaaagaaatcttctttaggtaataaggaactcgaggaactattcggcttcttcagctttttcagttttatggattcaaaaagtgattttacacttgagtctatgcatgggttgttttcaaaggcttgtgacgcaaagcaaatagatgcatctgaagagtctgtgtgttgtgacatcgtcgatggtaccaatttaataacacaagacggttataataattatgtgtacatacatcgttctattcaggagtatttctctgcgaaatgcgtttcattatttaatgatgaacaaaaaaacaaatttttcaaaacgtatgtaacttctgatataaacggagggaacgctaattttctgtcattagttaggtttgtagatcctatgggattttacaagcactttatgctaccttttttgtgcttgcacgggatattggttggtgatgacttagctcccctcacgaaaggtaacgttagtgaagtcattgatgagtggatggttggagcaactatagatgatagtcctaatcgtataggtagcattcaatcatttacgatgctaaagagtggtaagagtgagttctataactatattattcaattgaatgatgtatgtgagttattggggttgaaaaataatgattcaggcgatgggaaagtagctaggtatttgcatatgcactgtagaaatatcattgttgatttcttcgctaatggaggagagaataaggttaatttggtagattatgaagaaaattcaatacataaaaatatggcgtgggcagcgctagctgattataaacaccttatccctaactacgatgaaaaaatcgttgatgtctattacaattactatctttctaccttggcggaaattagagatcttatagataacgaatacacaaaaaaaataaagagcaaaatggtggtgtccaccatattgagagagatggggttctga

SEQ ID NO: 429962 - DNA, 507 bp, Serratia marcescens
atggtgcaccgccgagaggggcgagaagcctcgacagggttcgacaaaacgcctgcgttttggaccgccaacggcggcccgcagggtgagcgcagcgaatcaagccctctctcaccgccaaatttaaaaagaaagcctggattcgcgtccaggctttttttttgcacggtgcaccgccgagaggggcgagaagcctcgacagggttcgacaaaacgcctgcgttttggaccgccaacggcggcccgcagggtgagcgcagcgaatcaagccctctctcaccgccaaatttaaaaagaaagcctggattcgcgtccaggcttttttttgcatggtgcaccgccgagaggggtgagaagcctcgacagggttcgacaaaacgcctgcgttttggaccgccaacggcggcccgccgcgaacgcctcccgccttacgctgccgaggttcccctttttctcggttctcctcgaaccgtctctctgattttctcgccctttcatgacttctga

SEQ ID NO: 429963 - DNA, 207 bp, Serratia marcescens
atgcaaccatggcaaccaggcgcccgcctactctctgatttcgatatcaagatcggccggctatctgccagcgtcagaaaagcgacgctgagcgatgacgatatcgcccgggcgtgtcgtgtgaccgacgacgcaatcgcccaattactgaagctgaaactgaggaaagaccatgtccaacaaattgatccaggggagttgcaatag

SEQ ID NO: 429964 - DNA, 501 bp, Serratia marcescens
atgagcactaccgccattgcattagcagctgattacgccaagttgcacgaactggtcgaaacctccgacgatctgacgccggagatgatcgccgacacgcttgaaggcattgaaggggcgctcggcgacaagctggacgccgcttttatccacgttcgcaatatcgaggggcaggccgacacgctgacggcggaaatcaaacgcctgaccgaccgtaaaaagtcattcgagaaccgcgcaaagtcgatccgtaaatatgtgctggcatgcctgctggccagcggccagggctccattaaaaccatcgcaaatactttcacggcgcgcaaaggctccgccagcgtggtggtcgacaatgccgacctgctgccagatgaactggtgacggtgcaaacggtggtagcgccggacaagaaagccatcaaggaggcaatcgagaacggcgtggaagtcaaaggcgcgcatatcgaaatcggcgaaccatcgctgcaggtgcggtaa

SEQ ID NO: 429965 - DNA, 279 bp, Serratia marcescens
atgaatatcgaaacccacaacctgagcgccgagctggcgctgtggcaacgccatgatgaggccgggcaacgcgaccaatttgaagccgcagcgacgcacggctattccgacgaggcgatcgaggttttcacacacatcgatggcaccgccgccgacacccgcgaccgcctgctgatggccgtaatgatggcaacgccggacaccctgcagcagcgccagcgtgagctttacagctggtattgcgacaacgtgaaagccgtagcgcgcgagaagttttaa

SEQ ID NO: 429966 - DNA, 318 bp, Serratia marcescens
atgaaagcactacagatacccgtcacgctgtttatccacgcgaacgttagccagtacacgcaagagaaaatctctgtgttcaccatggacatgtctcagtacccggaatacgtgctgctggaaacccgcacaatccacatcgacgttaaccagcctgagccgatcgacatcatcgggaaacaggttgaagcgttgaagctggaaaaagcccgtctggccgacgccacttacaaacgcattgccgagatcgacgatcaggtgcagcagctgctttgcattgagcagtgccctgtcgacgccgacgaactcccgtactga

SEQ ID NO: 429967 - DNA, 195 bp, Serratia marcescens
atgtataaatctgaagctatcaagcacttcggcaacctaaccaaattggcccaagctgccggggttaaattgccgtctgccagcgcctggggggagttaatcccagagaaacgggctgcgcgtttagaacgacttaccgaaggcgctttgaaatacgatccggcgctttaccagcaatcaacgaaagcagcttaa

SEQ ID NO: 429968 - DNA, 453 bp, Serratia marcescens
gtggaaaacatcgaaaaactgaaaaacgagatcgtgagctgggcggcggagcaggggcaggaacacgttgccatcgagatcacgcgcgcatggttccagctcggcgccgacggtgaccgggttcggctgtatccgatcgaagatgaaaccggcgccgccgactggcgagcgatcaacaccaaccggcaggcgatatttcgccacatgcgcagcgagtcgaaagccgcgcgtgagaaggtgcgggaactggccggcgccatgctcgccgcgctgccggcggaacggcgcgcccggttggcaggcccaactcaacagtatttgctttcggtggccatccgagaatttgccgccgcgattatcgcaatcctgctcggcgcatgtgacacgccgcagcgcattgccggcgcgcttgtcgctctgcaggaaacccagcgcctgaccagcgccgcgtaa

SEQ ID NO: 429969 - DNA, 423 bp, Serratia marcescens
atgagcactatcaacgaaatgatccgcgataagcggtttgtgatggatgacggctgcgaccacgcgccggcgattctcgaccgcatcaaccaggcagcccgcgcccgttcccgcgcgccgtactgcccacctccgaaaccccagcgcgtcgcccggccggcagccgaatccggcccgatcgtcaaaatcggtgaccgtatcagctacggacgccgggtgatgaccggtatctacgagctgcagcgcctggggcgctctcctgaaagcatcgcgctgatgctccgcatgcctctcgatcgggtattgcacatcctgaagcctataacggccgtacgccgcgaaatacagaaaagcgtggcaagtgggttacccccacgtgaaaaagacgtcatgcgccgtctggcggccgaatcgagggcataa

SEQ ID NO: 429970 - DNA, 276 bp, Serratia marcescens
atggatgacaataactgcctgtggctgtccagaaattgcccctttgaactcatagttgccgtttcctttgtcatcaccagtaagatcgagtgtgaattcattgatatttccgaaaatggttgccccattcggattgtactttttaacagccaggcggagtttcatctgtccgaggccctgttcaatgcgcccctggtaaaaacagattgcgtcgcctccattgacgctgttatctgccacagatacaacgccaccgccaaaatcacttacacctga

SEQ ID NO: 429971 - DNA, 363 bp, Serratia marcescens
atgaaattggacatgtacgaagtgctgtcccgttggggtgtgtgggcgcgagaaagtagtggcattgattattcgccaatcgctgcaggtttcaaggggctattgcctcacccgtccaatggtaaactgtcctgctgcgatgatgatgggttggtgatcgatggatgtgtggcaaggctgaagcagtacaagccggacgagtacgacctggtgattgcgcaccatgtttacggaatttctttgcgcaaaattgctaagatgcgtaagtgttcggatggaaccattcgtaaggaaatgtataaggctgaaggattcatacagggtatgatttgcgtcttagaaacaaaaattgcgttatattaa

SEQ ID NO: 429972 - DNA, 1218 bp, Serratia marcescens
atgtctagaaattttgagcatttggtcctgttgtatagggacataaaatttgataattcagaattttctgaaggctcgctcattattgatagtcaacaaaaacttgacatactgcatgatattctttcagacgcaaatacttacgggcttaacgttgaatcaggagatgtagcattaggtcaacgtgttttattaaatgtgcgttcaccacgtgttaatgtcggaagaatatatcgcaatttttctcattttttggaaaacccaaaaaatagagttaaagaacccaagaactactatattttcagtttatcatattacaacaaagatattcatgactctaatgtcataaaacgatataaactgatactaaagttcatttcactacttaaagagagcgaagcttatcttgatgagataaattgtgagctggtttactttgataaagatatagtaaaaattccgttaaactaccaagagactgacattgattcgcttgatgagaactgtgtcagtgaacttttttccaaatttacggaggatacccatagagatcaaaaactaactattcttggcaatagtgtaaaatccatctgtggtgatttcactagggcgtcagcatttagcagcttattaaatggagttgggaagttaaaagaaagctttgacaaaggatataaagcttttgtatctgggttctcttatgaaaagatagttgaccagcttaggacagcaaaagttgaagagatgggtaaaatccataaaacattttctgatatacaaaaccatatactaggcattcctgtagctacagtaatcgtagctactcagttaaaagagaccgcttcctggaatggtcaagcaattatcaactcagcgataatggcgggaagtataatatttgcgcttcttgttttgttggtattatgcaaccaatttcaaactttaaatgctataaaagaagaaataaaatataaaaaagcacaaattgacaagaattatagtttattatccaaagatgttagcggaacttttaaaagtttattctgcaggctgcgcatacaaaaaacagcaatggttataatcggtctgattttgatatttggggtcatacttactttagcagcttacttatactttacaaaaccagccctagttgatttaattaaaatatggaaagagttttcatcctcgcccctcccccatacaactggaaattaa

SEQ ID NO: 429973 - DNA, 1047 bp, Serratia marcescens
atgactaaccagcaagaacaggaagaaattttaattcatcatttagtgattcatgtaatgaataaagagcagcacgcgcatgctgagctagagccatctccagatgaaaaagccgtccgtgatgcatcaagaagattaataaaagatatcactgctaagtattctgggcgagcaggaaaaggttatgggcgattcgaagatgaccgtgatagctaccccatgggaaacatcgctgatgactattacgtgagtaaacgccagaatttttatgacattagtcttagaatgctgaaccatttatctgacagagcaaatagcgagcaaatgtcgacaggtggttatgttttaattactcacattgaaagtgattctaaagaatatttactagttgctcttttaactgccactataggatcaactgtaagaaattttgatgtagaggacagtgagtatttagatatatctaaactccgtgtcgctggacgtatagatcttacatcatggacagagggtagagagagatatatcagttttctgaaaggtcaaaattcagtttctgcatactttaaaaagttccttgggtgtaatgacatcctaatagcgaaaaaagaaaccgagaaattaagggatgctttaagggagtttgtccatgagcaaaatttagaaggtgaagataaagaagaatttttaaatcaagctcatactcagctacaatctttgagcaaaacagggacaccatttgacatattgactttcgcaaacgaattatggccttcgaacccagagattttactagaaaagttatctaatgatgagcttcagctatcagatggctttgttccagatggaaaagtgatacgggatctggtaagctttaaaggaaaatcacggcactggaccttgaagtttgatcgagaagctttagttgatggttctgtgacatatgataaagaaaatgaccgtttgcttttatcacaaatcccagaaccgttgagaaatgagcttttagccgaaacagatgaggaagaaatagaggaagatgtctag

SEQ ID NO: 429974 - DNA, 222 bp, Serratia marcescens
atggacaaatacagctcccaactctcgtactgggttgcatcacttctggccgctgctggcgccatgacattgcaagattgggccgtactagtggggatcctcgttgccgtttttaccgcgggagtgaactggtactacaaacgcaaattggtcaataagctcactgctgtaggttatgacaaagagcgcgcgaaagcagcctataaagcgatgagcgagtga

SEQ ID NO: 429975 - DNA, 537 bp, Serratia marcescens
atgaaaactgaaatggacaagatgtggggtaaaaaggactcacccgagcaaatccatctgaaaacaattcacgctcaatgcaaatgggttgaattcgcagaatcgttcgaaggaacggacaacccaagcccagagctaaaatcagcatttcattcgatgtggattgaattaggtggattcattcgattatgtattaacgatgacaagaaacttcttcatgttctaaggacattgttgcctgcctatgtcggcgaaagtttaatcgtgtatcgaggcgaaaatctcgatcggtataatcaaggcgtcatagggttttgctggacacagaaaaaggataaggctttgcaatatgccaggggacttaatgcatgtggttcaggtggcgtactattgcaaggcttggcaccgccatcagcaattattgctactgcggacacccatccaaatagtatgcgtcttggggaatatgaaatcaccgtagatggttctgccatcaaagatttgcagaatctcggggaatttcccccctcacattaa

SEQ ID NO: 429976 - DNA, 1023 bp, Serratia marcescens
atgtcacaaccggaagaaagcggccttgagcgcgattactgtgccggtcagctttctctccgtgagatggcaaagatttacggcatcagtgaagcagccattagaaagcgggccaaaaagcatggttgggtacgcagtgagaaaactggtacgcaacccggtacgcaggtacgcaaaaaaggtacgcaaatagccaaggtgcgtactaaggaaaaaatgcagaactcaacacctgaaaaggtgatagaggaactgcatcgtgaggttgtagaaggagaggaagaattttccatagacccgcgtaagtacgggctcagcgatatgcagtggcgtttcgtcaatgaatatctcatcgacctaaacaggacggcggcatacaaacgtgccggaggcaaaggcgaaggcaacacggcctatgtcagtgccagccgcatgtatagaaacgctaaggtgaatagggcaatcagcgacgcgctggctgctcgcgaacgtcgcacccagatcacccaggatgaagtcttgaaactgtggtgggacatcgctaccgccgacgccaaccagatcaccgagtaccgccggttgtgctgtcgccattgctggggctttgggtttcagtaccagtggcgtgacgctgttgagtatgaagaggcgagcgagaaggccaagacagcgaagaaaccaccgccgcgagacaaaggtggctacggttttgactccacgctggatccaaaccctgattgcccacgttgcaatggtgccggtgagggccgcgcccacttccacgacacgcgtgatttaaaaggggctgcccgccgcctgttcgctggcatcaaggaaggtaaatttggtattgaggtgatcacccgcaatcaggacgacgcactgaaaatggttgcccagcatcttggaatgataaaaaccaagactgaattgagcggtcctgatggtggcccggttaaaaccgagagcgtcaatatgacgacggaagaggctgcggagttttatcggaaaatgatgggttga

SEQ ID NO: 429977 - DNA, 1620 bp, Serratia marcescens
atgccgataccattccccttcgacttcaaaaacccggactacacccaggtgttcgaatggcggatggaacgcctgcagcgtatcagggctaatcctgaatcgctcccaatcatgaaggccttttataaggaccacccggcccagttcatcattgattggggaatgacggttgacccgcgcaacgtcgagcgcggcttaccggcgcgcatcccatttctgctgttcccaaagcaggaggagtggatccagtggtttgtagagcactggcgggcatcaaaacccggcatcacggagaaaacccgcgacatgggcatgtcgtggctgacggtggggatggcttcgtcgctctgcctgtttaaccggggcgtcttcgccggcttcggctctcgcaaagaagaatacgtcgataaaatcggctcaccgaagtctctgttcgacaaggctcgcaactttatcggtttgctgccggtggagtttcgcggcggctggagtgccaaacagcacgcgccgcacatgcgcatcctgttcccggaaaccgaatcagcaatgaccggtgaggccggcgacggcatcgggcgtggtgaccgcaccagtttctacatcgtggacgaatcggcgttcctggagcggccttatctggttgatgcttcgctatctgccaccaccaactgccggcaggacatttcaacgccgaacggcatggccaactccttcgctgagcgccgtcatagcggcaagatcgacgtgtttactttccactggcgtgatgaccctcgcaaagaccaggcttggtacgacaagcaggtagaggaactcgacgcggtcaccgtggcacaagaaatcgacatcaactacagcgcatccgtcgagggcgtgctgatcccgtctgcatgggtgcaggcggcgatcgacgctcacatcgcgctcggcatcgagccaacgggcgtgcgtatgggggcgttggatgttgccgatgagggcaaggacaccaacgcctttacgtcccgtcacggcttcctcctggaggatatcgacgagtggtcggggaagggcgacgacatttttgggaccgttcagaaagcttttaacatttgcgatcagcaactgcttgatcacttcaggtttgactcagacggtctgggggccggggcgcgcggcgacgcacgggtaataaacgaaaaccgtgaagctgaggacataccgacaattgtcgctgtgccattccgcggtagcggcgcggtattcgatcccgaaggcgaggccgttcgtggcgataacggacggccagcccgccttaacaaggactttttcgccaatgccaaagcacaggggtggtggtcactgcgtacccggttccaaaaaacctaccgcgcagtgactgaagggatggagtttgatcctgacgaaattatttccatctctgggacgatgaaaaaaaaggacaagctggttattgaattatcccagcccacttacacggtgaatggtgtggggaaaatcgtggttgataaaaagcctgacggcaccaaatcaccgaacctcgcagactcggcaatgatcgcctacgccccaatggaaatgccaatgctcatttccgacgactttttggagagtatttga

SEQ ID NO: 429978 - DNA, 1545 bp, Serratia marcescens
atgtggccctttaagcgaaaaaaaacgagtggcgaggcgccgccagtgcaggaggcgccaaaatcgccagggattgcgatcagcgacgaaatgctcgccgaggtcggacacaaaaagcggcgtgagttcgataaatacgaaccgccggccggtgttatccctgacggtatccgcagtgcgattcttgcgatggatgcaacgccatacgattcactgaacggcagctaccccgattacgttttcggcggcttccctggctatccctatttggcgcaactcgcccagctgccggaatatcgccggatggtgagcgtgatcgccgaggaaatgacccgcaaatggatcaaggttaaagcggccagtgacggggatgaaagcaaggctgaccgcatcgcgctactcgttaaggcgatggagcgctacaaggtgcaggatgttttccgcctggctattgagcacgacggatttttcggccgcggccagatatacatcgacgtgcgttccccgcgcggtttgtccgcatggacggatccggaggagctgcaatcccggttgttcctgtccaacaaaaaaatcacacccagctcgctggtgggttttcgcgtgattgagccggtatggacctacccaggcatctacaacgccgataacccgctgagcgatgatttctacaagccggcggagtggttcgtgatgggtaagaccgtacacgccagccgcatgttggatctgatttccaggccggtgcctgacatgttgaagccggcctataacttcggcggcttgtcgctgacacaaatcgccgagccttacgtcaataactggctgcgtacccgcgatagcgtgggggatgtgcttcattccttttccctgagcggcatcagcacgaacatgacgaatgcgttaagcggaaagaacgatcccaactatgccaagcgcgcggagctgtataaccgcacgcgggacacgcgcggcttgttgattctggacaagcaacaggaggagttcttccagttcaacacaccactgagtgggctggatacgctgcaggcgcaggcacaagagcacatgttctttgtcagcgcgatcccgtcggtgaagttcgccggcctgagccccacggggttgaatgcctcgagcgagggtgagatcaaggtgttctacgacacgatagcggccagcgcgtccaggttactcaagcacccgataaagcgcgtgatggacattatccagttgtcggagtttggcgacatcgatccggacatcacctttgaattcgaatccctgcacgaaatgacgcgtgaacagcaggccgccatccgcaaaacagaagcggagacggaccagatttacgagagtatcggcgcggtgacgaataacgaggtgcgcgaaaaattggcctcggatccgaacagcccctacagcggtctggatttaagcggggagattgagattgacgacgacgaagacgacgaaaacttcaacctcgaggaaagcgcgtcggaaaaagaccctccgtcagatccgacccaacgcggggattga

SEQ ID NO: 429979 - DNA, 693 bp, Serratia marcescens
gtgcaggagctgcacaacagcacgctctattggctgcgcgccgaataccggcagaccgggctggcgcaggatgcctcaccggcgatcatgatgcgtgatgccatgcgcaaattgtcgcggcgctggcgaaaaaaattcgatgtgctggccgggaaactggctgagcgtttcgcttctgatgtgatgaagaatagcgatgcgtcgctttccactgcattgcagcaggccggtttcacggtgcccttcaaaatgacggcggaaatgaacaacgcgctgcaggtgaccatcaccgagaacgtcaatctgatccgctccattccgcagcaatacctcacgcaggtcgaaacgctggtaatgcagtcggtatctcgcgggcgtgatctcggcaccctgacaaaagagctgcaacagcgctatggcgtcacccggcgccgggcggcttttatcgcgctggatcagaacaacaaggcaacgtctgccatgcagtcggcgcgccagcgtgcgcttggcatccgccgggggcggtggcgccattcccacgcagggaaagagccgcgcatctcccatgtgaaagccgacggcaaagagttcgatctggacaaaggcatgtttatcgatggcgaatggatcatgccagggcaaaaaatacgttgcaggtgtggatgggaggcgattttaccgggactggagtaa

SEQ ID NO: 429980 - DNA, 1326 bp, Serratia marcescens
atgacgactgaacgactggcatttgaccggggttcggtgcggcaaattgataaggtcggacggctgcaggtcgaacgcagcaacatcagcaaggccaacgtgtgcggctattacgggcgtgaaatcccgaattccgaggcgctaggacttgagcccgaccggctgtacatgctgtaccgcgaccccgacgagctgcgcaaggcagcgaaaaccttcaataacatccccatcctttgccgacacaagcctgattacccaggcgcgcccgcgcgtgagcttcgggtggggacaacgcacgccaacagtgattttgatggcacctacctaacaaacggattgtcgatttgggacaactccgccatcgccggtatcgagaccgacgagcaacgagaactgtcatcgtcgtatgcgtacgtcgctgacatgaccccaggcgttaccccggatggcgtcaaatttgacggcgtgatgcgggatatcgtcggtaaccacgtggcgctggtcggtgacggccgggccggatccgatgtgctggtatttgattgcctcccgaaggagttacaaaacatgaaattaaatcgtaagggtgtcgccatgcgcgcagcgctgggcgcctatcttaaacctcgcctggcgcaagacgcctcgccgaaagacctcacgcaattggtgggccagcataaacgccccaacgcgatcgcgaatgcggtcaaatccgcgttttccggccgcctggcgcaggatatggaaatcgagccggccgagcttgccgaactgatggaggccgctgaagaggtggtcgagccggaagagaacgggtctgcgtttgatacggaaaacccactggaaagcatcctggcgctgttgtccgacaaagtgccggaggaagtgctggaaaaaatcaaagcggtactgatgccggctgcggatgacaccccggacgatccagcaaaagacccggtaaaaccgaatcccgatacggtcagcaaaccggcgatggatgcggcaatcaggctggctgctgacaacgccaccaaggcggcggcgaaaaacttccaggcggttcgcaccgctgaaagtgaggtgcgtcctctgattggtgacgtggtggcgatggactccgccgaggaggtttaccgcactgcgctcgaacaggccgggatcgatatcaccgacgtacacccaagcgcttaccgcagcatggtgaagtatgccgtagagcaaaaacaggccgtcaaggcgccaaaactggcgcatgactccgcggctgcatcgtcttttgctgccgatttccctaccgccagcaaacttaaaaaaggttattaa

SEQ ID NO: 429981 - DNA, 483 bp, Serratia marcescens
atgtcaggatttcagacgagcattaaccaatacccggctccgggtattgagggggcttttgccagtaacaacccgtacaccagctatgtggccggtgagggggcattggtcaccggcgccgacgggttaaccattgggcgatttgcctgggtggtgaagggcgtggcatcgaacaaaggcactggcgcgccgtcggggtttgttcctcgcgatggccaggcgtcaatcgttgaatggctgggcgcggcgtctaacgtgatccagccggggcgagagtgcacgctgcacaccggcggtgattactgggcggttaccacgacagcggccactgtcggccaaaaagtgtttgcgtcactgaccaccggcgagattgctaccggtgccgccggcgcgaccattgaaggctttgcggaaacggcattctcggtggccagcgccgcggcggccaaagaacgtatcaaaatcagcacctggagcaagtga

SEQ ID NO: 429982 - DNA, 1029 bp, Serratia marcescens
atgaataaatttaagcagcattacgctaccgccagccgcgattacggcatcatcctgccgggcgcgcaggcttacctgccgccggagtatgcgagcgatttcgcgctggcgatggatgcgcagcctaatctggtaacggtctcaaactccggcgtgccggcctatttcaccaactacgttgatccagaattaattcgtgtgctggtgacaccgatgaaagcggcccaaatcctgggcgaaaccaaaaagggcgactggacgacgctgaccactcaattcccgatcgtggaatcagccggtgacaccagctcttacggcgactacaacaacaacggcatggtaaccgcgaacgcaaactgggtgccgcgccagagctaccactaccagacgcacacccgctggggtgaacgcgaactggatatgtacggcgcagcgcgcatcggctgggcggcggagttgaatgtcgcgtctgccctggtgctgaacaagttccagaataaatcctacttctacggcatcgagggtttgcagaactacggcctgctgaacgatccatcgctgtcggcgccgattaccccggttgacgttggcggtaagttgaaatgggacgataaggacgccgaggcgatttataacgacatcgtcaagctgtacaagcagctcgtcagtcagaccaaagggcatgtcgagcgaaccgacaagatgaagctgaatatgtctccgttgtcggaagccaacctgacgaagaccaaccaatacaaggtcaacgttgcagacctgctgcagaaaaacttcccgggtatggccatcgaaacggcggtggagtattccagcgacgcgggtgaagtggttcagctgattgccgagcgtctgggggagaacgacaccggttactgtgcgttcaccgagaaaatgcgcgcgcacgccgtggtgacggagtcttcagcctggcaccagaaaaaatccgccggtacctggggggcgatcattcgccaaccgctggcttacgtacaaatgttgggggtttaa

SEQ ID NO: 429983 - DNA, 345 bp, Serratia marcescens
atggcagagcaagtaacagttggctgcaaattgccgaacggtttggtgttggaagtcgacggccatcagcaggcggtcgcgggttaccgcggtgaagatgtgcgcattatcggcggctatggcctcacaccggtcgataaggaactgtgggatgcctggttgaagatccacaaagatcagccgtatgtaaaaaaaggtgtgatctttgcgcaggagaatggcaacagcgcccgtgcgcaggccaaagagcaggaaaagttgaagtcaggccttgacccattgccgcaaaacaacccggcaccgggcatcaagcgtgatgatgaagcgatgaataaaaaggagtaa

SEQ ID NO: 429984 - DNA, 471 bp, Serratia marcescens
atgggcgccgtggttttcaacatcaaggcatttcgggcgctttacccggcgtttgcgacgggatgcggatcggcgccaagtgatgacctgctcgaggcgctgttcaatcaggcctcgaccctctacctcgataataccgatgaaagcaaagtgcaggatctgaaagagcgcgagcagttatttttcctgcttgttgctcatctctgtgcgttgcgcggatttggttcaggacagtcgggcggtcagggaagcggccttgttggccgcattaccagtgcctcagagggatcggtttctgtatcggtggacagcgccggcagtaacgatcagtcgtggtggtatctgcagactccctatggcgcggattattggcaagcgactgcgccctacaggacgatggtttatcacccgggctcatcgccatcgcgctatccagatcactactatcggccggtcaggcgggggcgctaa

SEQ ID NO: 429985 - DNA, 480 bp, Serratia marcescens
atgggtgccagtgttcgcggcggtgccgcgtttaaagcgcgcctggcgcaaattgccgacggcctgtcttcgagcaagagcctcaaggtgggttttttggccgatgcgacttatgaagacgggaccccggttgcgctggtggccgccgcgaacgagttcggaaaaatggtgatgaccaaggccggggagtcctattttcagctgccgcggccttttttccgcaacatgatctcagccaatagtgcgcagtggcccggtgagttttcgcagcttatccgttcatcaaattatgacgcgcggttagcgcttggattgatgggggagcggataaaaagccagctgcaggactctatccgggagctcaactctccgccgttggcggaatcgaccattaagcgcaaagggttcgataagccgctggtcgacactggccacatgcagaacagcgtcgactatgccgttgatggaggtgatgagtga

SEQ ID NO: 429986 - DNA, 366 bp, Serratia marcescens
gtgaatttgcacggtattgtttcgcgcgccatcggcgcagttaatcccttcgttgaggcgcagatttatcgatcgctcggtgccgaaaaacgtgaggattattcccgggcgccggcctatgacgcgcccattccgatgatggtacaaaaacaggctgttacccagggcgatatccgccacctggacaacctgaatattcagggggtgttcacgtccatctatacgaacgggaactggtgcggtgtgagccgaccgaagcaggtcggcggtgacaaattcgtcatcgcgggcgaaacgtggcttgtggtggcggtgccggagaactggccggattggacgagggttgttgcatgtctgcaaacgtaa

SEQ ID NO: 429987 - DNA, 552 bp, Serratia marcescens
atgtctgcaaacgtaacgctctcgatcactgaaagcgatctctataaagcccttggcgattttctccaggggctttttgttgatgtgcagatcgagcgcactcagcaaaacggggtgccgatgccacagggcgaatttatcgcgatgacttcgctgaattccgccggtttgtctacggcggtggtgaagtattcgccgccactggaggccggactgggtacgcaacacattacgcgcaccacgcgctgggaatgtcagcttgatttctttggcgacagcgcggagcgaaattccctgatgttcgccacgctgatccgctcggagtttggcacctccgcttttcgctgctccgggggcgtcttaacgccgctctactgtagcgatccccgtcagaccacgatgattaacggcgagtggcaatacgagccgcgctggacgctggaattcatcgcgcaaatcaaaccggtggtcagtgcgcctctggcgttcttcgacaacgtgaccatcaaaacgaccacaacggagtccatcgatggcaattccaatcagtaa

SEQ ID NO: 429988 - DNA, 1485 bp, Serratia marcescens
atggcaattccaatcagtaaagacgtaaaaatcaaaccgggcgtgctatccgccgtgggtaatgcggtcgacctcaacggcctgcttttaaccgacagcccttacgtaccgatcggcgacgtcccgtcgttttcgtcaccctcgagcgtggccgattatttcggtggtgactctgacgaatacgttatggcatccatgtattttcagggctacaacaacgcgacaaaatctccgggggcgttgctgttcgcccgattcaaccgcgcgccggcggccgcatggttgcgcagcggatcgttcaaaggggtgacggtcgaggagctgaaaaaaatctccggtacgctcacgatcagcatcagcgggaagaatgccagtgcggaagtcaatttcagcgcggtaaccagttttgcggaggcggccgccgcgttgcaaacctcattgacggccgccgtggcgacggtggtatatgacaccacgcacaatgccttcatcatcactgctgccggcgccaagccggaagcgacgactatcgcgtatgcgaccggcaccgcagtggcacccatgaagatgaccagcgatctcggcgccaagacctcccagggggcgccggcggcagtggttcccgcgctgttcacggcaatcatcgccaagtcgcagcagtgggcctcattttcgaccgttttcgagtgcaaggatgatgaacacctggcgttgtccgcatgggccagcgcgcaggaggagcgctttttctatgtggcctggaccaccaacgaaaaagcccgagttacgggcaatcaggagcacatcgcgtacaagatcatcaccgtgaacaattacgggagtgtcgtaccggtgttctgcactgacgtgaaaaaacctgcatccgtattgggatatgccgctgcgctggactttacccgcacagaagggcgcgtgccgttcaaattccgcgaatacaacgggctggcggccgatgtgaccagcggggatgagtacgacgtgctgatcgccaatggctataacttctacggcaagtacgccgccaataacatcgtcgaggattattgggcagatggctcgatcaccggcgatttcaaatggctggacagcttcgccgggcaaatttggctgaacgccaacctgcagggcgcggtgctggcgctgttcaaatccaacaagacgatcccctacaacaacgccgggcgcgcgctggttgcaacctcgatgaccgatgtgatcgagcagtttaaagcatggggcggcattcgtgccggggtgacactgtccgcggcgcaaaaactggagatcagcaacgcagtaggggaagacgtgtcggcgacaattttcgcgacggggtactacctctatgtcggtgaaatgctgccggcccttcgaccaggtcgcaccagccctaactgcgcgttgtggtacagcgacggcggcagcatccagaaattgaatattgcatcgacggaggttcaataa

SEQ ID NO: 429989 - DNA, 438 bp, Serratia marcescens
atgtccaacaccatcacttctgccgacgccatcattacgctgtcggtaatgaacctgtacccgtcaggcgtgcagctgcagggcttcgctgcggataatatctacgggaccgacacgctgagcctggcggaaacggtgcgcggcgccgacggcaagttatcggccggcttcatttacggcaacatcaaccagacgatctacattatgccggattctgaaagccgggacgtgttcgatacctgggcgaccacatcgcgcgccagcgtggcggtgttccgctgcaatgcaacggttatcttgccggcgctcaagcgcaaatataaatgcgtgaacggcgtgctgaagcagtggaaggcgctaccggatgccggccgcattctgcaggccagccaggcgatcatcgaatgggaatctattactccggaggcgtttaactga

SEQ ID NO: 429990 - DNA, 405 bp, Serratia marcescens
atggcacgtaaagagacgtttatcactatcgacgccgccgggcgcgatcagggcaaggttttcaacatcaaggaaatgtcggcgtcacaggccgaatggtgggctttgcgtgcgctcatggcgatggggcgcggcggcgtcgagatccccgaaaatttacgcagcatggggatcgcggcgatggctgttgagggcttaaaggcgatttcgaagatccccccggatgaggccaagccgctgcttgatgagttgatgacctgtgttcaggccgtgccgaatccagcggataaaaccgtggtccgccccttgattgaagccgatatcgatgaagtggccacacgccttaacctgcgcgcggaggtgttcaaactgcacgtggattttttcgctaccgccggccgctag

SEQ ID NO: 429991 - DNA, 1935 bp, Serratia marcescens
gtggcaatggtacttgacgaactcgtcctcgccctgggtattgacgacaaaaacttcagtgctggcgagcaggcggtagtggcggggcttgaccgcctgacagcggtaatggagaacgttgcgcaggcgttcgacaccggtgagaagaaaagcagcgaggcgctggataaaaccgggaaaaaatccgacaaaaccgccaaagacatggaagccagcggcaaaaaggcggcgtcgttcttttccagtattcgcgcccaggtgctggcgctggccggcgtcacgttgtcgctgggcggcctcaaaagctttgttaccgggttcaccagtaacctgaaccagttggcgacggcggccgatgcctttggcatgtctgccaaatcgctggatggttggaccaaggcgggcgaggcgttcggtgtcagtgccaacgagatcgtgggcgcgttctctcgcatcaacgatgcaaaggcacgcttaaaatctggccttgggctggatcctcaacttcaaagcctgctactggccgctaaccaggcgggcgccaatatcgatctgggccgggatgggactgaagatattgtccgcaaattggcagccgcgtttccaaacctgaataaggatcagcagcaggcctatggcagtgagctggggtatggctacgccgcgcagcaatggttcggctctggccatgcgttgcgcgatgttgaccgatttacagctcgctcaggggttgacgatcagtccatcgcagcggcgcggaagtttcgccagcagtgggcagagatcagccaggcctttgagaaaacgggatacatcctctttaacgcgctgctgccttacatcaaacagttcaacgcgtggctgaatgatctggcgaactggatggcacagcacccagatgaaatcaaagccgcggtgcagggcgtgttcgatgttctgtcgaacattgttggtgtcgccggtgaagccgccaatgcggtaggaggctggcagaacgccattctgctgctggttagcgcatcggtgggtggcaagctgctttccctgtttaaagggctcagcggggcgctgatggggcctgctggccttattgcagctctggtggcgcttgaggagtttgtcattaaacccctcgaggaaaaataccctgcgctgaaaaataacctcgttgcggatgccctgaacaatctgccattcagtgacaaggtagaggggtggggaaaatccgctcacgattgggttaaggatacattcgggatcaatcttccgcgtggtgatggttacgggcaagaccaggctccgacgcagtttgctcaatctgtacgccggccacagccaacaaaggccggtgaggaaatgctggcgtggctgcagccgaaactcagcaagctggaggaaacgttcgggctccctgccgggctgctgcgcagcatggtgatcacggagtcaggcggcgatactcaggccgtatcgaaagcgggcgccaaagggccgtttcagttcatgccaggcacggcgaaggacttcgggctggtcggcgatgacgtttttgatccagagaaatcagcccatgccgcagcgcgctacatgtcgcagctgctgaaaatgttcgatggtgatctgggtaaggcgctggcggcgtataactggggccagggtaatgttgagcgcaaagggctcggcgcggtcccgcaggaaacgcgggaatacgtgccgaaggtgttgtcgaatttgcctcagccgggcgcaggcatggcggcgcaggcgcgccagccggtcggcggttcgcaatccacgatcaccgaaacaacccatatcggcactctgcaggtgaattcgccagcagacagcacgaaagggatcatcgacgacgcaaggcaaaaaattaatcgctccagccttgtggacgcgtatgcatcgggagtgtcgacatga

SEQ ID NO: 429992 - DNA, 807 bp, Serratia marcescens
atgaggttttccctgaatcaggccactgtactgaatgctgtgcggggcggtggcctgctgtctgtcgttaacagcgtgctggcaccgggatacggaatttattatgcctccggcgccagtgttggcacgaagcccttttcgccaacgtcatttgtcgttatcgaagtggggggcgaagcgtcgatcactactgcaccgatcgagcgaggtggttacacgtcgttcaacaaggtgcagcggccggcagaattacacattacgtttaccgtggagggctggacagggttttcaggcgggcttccgaacctgaccaatctcacgctgacatcccgctcggacgtgctggccaccctggagacgatgcgaacaacggcggaggtttatgacatcgaaacccccgacaaaacctattcgtcttatgacctgaccaaatacgattatcggatccgaagcgacggcggcccgacgttgcttacggtaacggcggtttttcaggacgtgcaggacgtggccgaggtgaccgtcagcagcgagacatcgcaggccgacactaccaataatcaaatcacccagggagcgagcgccaaaacggagctcgttacctcttcaacgagtggttccaccctttctgatgtgaagaaagcgatctccggcgtgcagcgctcggcgtcggaattggttgggaacattgccgacaaggtttcgtcagcggtcgaggatgtgaccaaacctctcggagaggtcaccgtcagcgcgacgcaaaagttggatgcggcgattaagcaattggcggggagtttaacctga

SEQ ID NO: 429993 - DNA, 303 bp, Serratia marcescens
atgctggaaattgtactcaagcccctaaaatctcaacggtttaccgtctccctgaataatcaggcctgtgaaattcgtttggcacagcgtaccacggggctatatatcgatcttaccgttaacggcactccctgcctgcagggggtgttgtgcctgaacggcaacaagatcgtgcgttacggctatctgccattcgccggcgaattatttttcgctgacctggcgggaaacgcagatcctgaatggtccggcctgggtgagcgtttcaaactttactaccttgcgccggaggaaatgccgtga

SEQ ID NO: 429994 - DNA, 846 bp, Serratia marcescens
gtgagctatcaacaacgggatatcagggtggagtttaccctggcagaggggcgaacgtttgacgatcggggtaacgtgcttaccgtcaagaatgcgcgctgctatataagcctggcggcgtatggcgggattgccggcacgcaaattaccctttatctgtgggggctcgtggcccagcagatggcggcgctgagctacaaagggatttggattgatggggtcaagcctaatcggatccgcgtatgggctgctgaccgcctgattttcgaagggtttatcagcgatgcatatgcggattacaaccaggcgccggatgtgccgctgattattacggcgaacatgatgttttatctgcgggcgaaaaaggtgtcgccatttagcgcgaaaggccccgtctcgatcgatgacattttgatgccaatggcatcatcagtggggctgaaatatgagaatcagggcgttaaacgcacgctgcccgatccgtatttccagggagatatcacgcagcagatgatcgaggcggcacgggctgttgatgccgagatcgatatcaacgtggagaaggtgacgatctggccaaagggagtatcccgaaaagagccggcattgctcgtttctcccgaccacggattaatcggatatcccatttttaccaatgttgggctgagcatttcgtgtctgttctgtcctgatatttttattggtcgcaaattgtcgttggtgacctcgctcccgaacgccagcggccgctatgcagtgctcggtgcaatgcacacgttaacctcatggattgagggcggccaatgttcaacatcctgcgaattgttgcggcaacccgggggctga

SEQ ID NO: 429995 - DNA, 687 bp, Serratia marcescens
atggaaaattttcatgtaaacggctccgatctgaatggtgatatcaacgcgcaggacttcgttatgcgccagtttctggggcgtcatgcgtttatctcgttgggtagggtgatcaatgccaatggggagcacgtggacattcgccctatggtgatggccgtcgctggtgacggctcacctatcccgcatgaggtaatttacaacgtgccggtatggcgtctacagggtggccaaagtgcggtgattatgccaccgaaagccggtgatattgggttcatagcgatttgcgatcgggatatcagcggggttaaagccacgcgccagcccgcgatgccgggatcaaggcgcacgcacagcctgtcagatgcgatctatctgggtggtgtgctgaatggcgatccagtgcaatttgtcgagtttgccgatcagcagatcaatgtaacttcaccctggaaaatcacgctaaatgcacccgacattgaagccaatggcgcgaaacgttttaccgtcaacgcgccagagatcgcactgaacggcgcgaccgaggtgagccagaagtttacagccaaaggcaaagcggaattgtccggcggcgccacgattagtggcatcgagtttggtgaccacgtgcatggtggcgtgcaatcaggcagcgcgcagacgaataaaccgcaacagggggcatga

SEQ ID NO: 429996 - DNA, 357 bp, Serratia marcescens
atgcaaactcgctcacttcttctcgatacgaatacctgggatctgatgctggacgacaaaggcaacctggcggtcacggacaacccttatgcggtggcacaggatgtggcgtgcgcctgcagcacgttccttggcgagtgttggtatgacaacacgctcgggattccttattacccgcggatcctcggccattggcccggcacgcagctgattaacaccaaaatgcagcaggaggcgatgaaactgccgacggtctccagcgcgctgtgttcggcagtctcagatggcgatcgccgcattggtggcgtaatgacgatcaccgataccaatttcaacgattacacggtgctgttatga

SEQ ID NO: 429997 - DNA, 1248 bp, Serratia marcescens
atgacggatgaaaacaccaattacacaactgcggtaccggcggttacgttttcaaaaacggggctgctggtaccggatgaggtggacatactaaacggccggctaaccgatttctccaccgcgctggggagctcgatggggaccagcctgacaagcccacagggacagctggcgatgagcgattcggccatcatcgccgataagaacgatcagttgctggcgatcgcgaaccaggtgaacgcggactacagcaacggcaggtttcaggatgcgattggccgggtttatttcctcgaccgcatcggtgccaccggcacgacagtaaccgggacgtgctcagggctggtggatacgctgatccctgctggaagcctggcacaggatgaagcagggtatctctacgccagcctgtccgacgccacgatcggcgccgccggtagcgttgatgtggttttccagaacctcacgacaggcccgatcggttgccccattggtgcgctcagcaaggtctacaaagcgatcccaggctggtcaggtgtgaccaaccgcgccgccggggtgccgggcaacaatgaggagagtagagccgactttgagcaccgccgacgcaattccgttgccaacaatgcccggaatacattgaacgcgatccgcggcgagatcctcgcaaaagttcccaacgtagtggatgtatacgttacgcataacccgaccccggtagacagacaagtcggctcatccaaatatacattgaagaaaaactcgttctacgttggcgtatatggcggaaaggctgaggatatcgcggatgctatctggcgcaaggcgccgcccggtgtcgacatgaacggtgattcctcatacacgattgcagataccgacggctatgagccgccctacccggagtatgtgatcacctggcaagggttgaagccggtgagcgtgtcagtgagggttatcctgagaaaaagcgaatatttaccatcggacattaccgatcaggtaaagggtaaagtgatcgcggcattcaatggcgctgatgggggcaatcgtgcgcgtgcagcggctgcgctggccgccgggcgattctatgcgggcatttacagcattgacccttcaaacatcgatattctcagcctggcactgagcagggatgataacgccttttcctcatccctccagtttggaatcgacgaaattccgacgctggatccgaacaatatcagcgtagagctgcaggaggtctaa

SEQ ID NO: 429998 - DNA, 588 bp, Serratia marcescens
ttgcagaatgtggccgccactgtgctcgcacagtacgccgccagcccccgccttaacgccctgatcggcagcttcaacgaagccgtttcccccgacaagttcgtcgatgatttttacgatctgatctggaacatcgaaaccgcagagacctatggcctcgatgtgtggggaaaaattgtggacgtaagccggcggctaacggtcgacgacgactttaattatttggggttcagtgaggcgcggctggatacgccaacgcggacagatccccgcccatttgaccaggcgccgttctatagcggtgagagcacaacgcagaccattgaacttgcggacccgatctatcgccgtctgatcatgatgaaagccatgagcaatatcaccgattgctcaataccgaatatcaatcggatgttgcgttacatgttcggcgatcgggggcgcgcctatatccagaacgatggcggaatgaagatgagctatgtgttcgagtttgaactgtcgaccgcagagctggctatcgtccagtcctccggcgcgctgccggcgccgccaggtattaacgtttcaataattcagaaggcataa

SEQ ID NO: 429999 - DNA, 1512 bp, Serratia marcescens
atgaaactgacagataaaccgcgtcagattgcagtgccgttcgccagcggtacagctgacaaaaacacgatccccaataatgccacgcaggaaaccaaggaaaagggcaaagctgcctatgactctggctttccgccactcacaatgacagcgatcgcggccggcggtatcccgccgcacgggaaggattttaacggactgctgaacgacatcactgcggcaattcgtttttctcaagccggcggtcagtatacctttgattccgcttttgctcaggctatcggcggatatgcaaaaggcgcgacggtattaagcgctgacggctcgaaaatctggtggaataccgttgattcaaacaccacggatccggacggcgccagtgcagcgggctggaaaaatctgttggcggatcccaatgggctgtttcttcaaaagtcacaaaacttggcggatttacaaaataaagcggagggccggaaaaaccttgagctcggtactgctgcgacaaaaaacgtcggcactggcagtggtaatgttatggaaatgggcacggcgggtttgggtgtcgggccaatagccaaaagcgacgcttacagtaacatcgcgcagttttaccgcgtaaatgcctcggcagctaataagcccccagcggtgtccgggaacgtatcagctggcgttgtatgcttgcctatggatgccgcaccgtcctcaggctacgttgctgttgttggcggtaatatggctgcgtatgttggtgtttctcaagcagaggctggtgggattacctgggcgagaatttataccgataagtttaaacctactgctgctgatattaatgctgttgctaagactggcgacactatgacgggacaattgttttcccccgctatttccacaacgccaggagcaattccgtggggagctgggccattttccgaacagttgaacaatcaggcgccattctttcagcctaattggcaatggcctgtaacatcaggcggtgtttatgtgccaatagttaaaggggtgtcaactcgacaagggcaaggctatccaactgcagtgagttttggatatttgctcagtggtacgccaagctttgcacaagcctgcatccatgcaaagggcgataatacagatgtaaattggcgatttgacgcaaatggcgggaacttttattgtccaggcggagtttatgcaaataatgctatttttcatgtcgacggtaatattaccggtaatatctggggtgggtatcttagtaactggctgaatcaaaatatatcaaatgcgcaaaataacgctcaaaactgggcttatcaaaatcttgtccaaaacgtcaggctcactggacgaattaaccagcctgatactggggggcaagttagagctcctgacggttgcgtgtttactggtatgtctggggccaactataacccatctatttgggcttcttattcatatgtccaagttttaattaatggttcttggcgaaatatagggacttcttaa

SEQ ID NO: 430000 - DNA, 1443 bp, Serratia marcescens
atgttttgtaaaatcgacaaaaaagcactgctcctttactcagggattgctcttctttttatttatccattaatccaagctggggttttttatagggatgatctagatagagccataactggtcagtatggatggagaggattaggtcggcctgttgcagatattctcatgaaagttttatccgccagtggccactataaccttgatctatacccctatactatgattgcttcctgcttgtttatcggtggggcatcgcttttacttagcgatcatttatcgaggttagaagttccttcacacaaattagtttcggctcttctaatttttaatccattcatgctgcaaaatatcgcttacagatatgactctttaggcatgtccattgcttttttcctagcggttatggcttatacctatacagccagtaatcctaccagacaaactttagtaaaacttttcgctggcgtactatctttaaccatataccaaccatgcgcaaatgtatttattggtttacttgctgtagacgtaatgatcgcagcagtaaaaaatgactgtaaagccactgacattataagaagaatacttaaaaaaacagctttattcgtctctttttacatggtttacatgttattctttgctgcaaaaagtaattcacgcgcagagatcatatcagctaatactgaagggctagagcatttagcctctacgcttagttcattaaaaaacatggtgctatcatatttctatggcccggtttatatttattttttgattccagttgttgctggcttgattttcatgttgtttgcaaatcgccataagaaaaaatcaatattatcattcagcctttatttggttatttccctaattatatttttagtttcactgatggggccaaccatatttcttaaagatgctccggtattccccaggactttagtttccttctcagcgtgtcttgttttaatttcgattcccattgtttattttttaccaaaaatgaaatatttatcactaattcctgttattacagcaattgcattcagcgcacaattaggcagtgccattaaatcacagcgcgagtatgaagattttatttttaacatgatcagtcgtgacttgctcactcataatgaaattaccaccatcggaacagttggccaggtcaatataaatgaaagggctaaattgttagtggacaacaaaccattaataggctatttccttagccctgcatctgagtttttagcctcttttcaactaattaacaaagggttcccgcagactctgcatggttatggagatgaacaaaacaataaaaatgtgctttctcgtatgattagcagtgggattaaaccaatctcaactaataaggaatattctctgttcatttcaggtaatacagccattgtatcattgggaacggataataattga

SEQ ID NO: 430001 - DNA, 912 bp, Serratia marcescens
atgaaaatttcacttgtagttcccgtattcaacgaggaagaagcaattcctctattctaccaatctgtgcgtcagtttaaaccttttcagcatatagatgtagagatcgttttcgtcaacgatggtagctcagatagaacggaagaaatactgtcttccttatctaatgatgatcaaaatgttaaatcgataaatttttccaggaatttcgggaaagaacctgcattatttgctggtttggaagccgctaccggcgatgctattatcccaattgacgttgaccttcaagatccaattgatgttatcccactattattgaataagtggcaagatggtgcagacgtggtgttggctaaacgtatggataggcaatgcgatggccgaatgaagagaaaaacagcagaatggttttatcgagtacacaataaaataagtaaaccggccatagaagagaatgtaggtgattttaggctgatgaccagggaagtggtagaaagcattaaattacttccagagagaaacctatttatgaaaggtatccttagctgggttggcggaaatgttgaaattgttgaatactctagagccgagcgagttgcaggaaccagcaaatttaatggctggaagctttggaatttggcaatagagggaattacaagtttttccaccttccctcttcgtgtttgggcttacattggatttttcgttgctgcaatttccttcatgtatggcgcatggatgatcatagataaggttatttggggcaacccggtagctggctacccttcaattattgtttccattcttttccttggcggtgtacagcttataggaatcggagtgcttggggaatatattggtagaatatacattgaaaccaaacgtcgcccacgctatataataaagaagtga

SEQ ID NO: 430002 - DNA, 423 bp, Serratia marcescens
atgactttcttttatccaacaccaaacccaaccaagctcaaaatcccgcttttcgccgacaaggtgccggcggggtttcccagtcctgcagcagattacgtcagttcgcgcatcgatctgaacgagtactgcatcagccatcccaatgcgacctattttctctatgcgacaggtgattccatgcttgaggccgggatcactgagggctctatgcttgttgttgaccgcagcatcagcccagcccatggagatattgttattgccagcatagccggcgagttcaccgtgaagcgtctctgtttgcatcctcgcgcgcaattggaacccatgaacccgaagtatgagccgatcctgcttcatgatggcggtgacgatctggaggtgatgggcgttgttgtgtcttcgataacgaggctcaagtga

SEQ ID NO: 430003 - DNA, 1269 bp, Serratia marcescens
atgtacgcgcttgctgatgtgaacagcttctacgcgagctgcgaaacgttgtggcgcccagatctgcgagggcgtcctgtcgtcgttctgtcgaataatgacggatgcgtcgtagccaggagcaaggaagcgaaggcgttagggttaaagatgggagaaccctatttcaaaattaagcgggaatttgagcgcgcagggggcatcgcgttcagcagcaactatgagctatacgccgacatgtctcagcgtgtgatggctgttttagaagagatggcgccacgcgtagaagtgtattcaattgacgaaagttttcttgatctgactggagttcgtaactgcattgatctggatactttcggccgccaggtgagggccaaggtactgcgcaacactgggctaactgtaggcgttggcattgcccaaaccaagacgttagccaagctggcaaacttcgcggcgaagaagtgggacaagaccggcggagttgtggatctatccaatgaagggcgccagcgcaaattgatgggcctcgtgccggtcgatgaggtctggggtatcggccgccggatatcgaaaaagctcaacatgatggggattgaaacggcactacaactggccgatgcaagcactacgatgatccgcaagcatttcagcgttgtgatagagcgaaccgtccgcgagctacgtggtcagccttgtcttgaactggaggagtttgcgccgacaaaacaacaaatcatctgcagccgcagcttcggtgaccggatcaccgagtatgaccagatgcatcaggctatttgcatgtacgcgacgcgtgcagcggagaagttgagggaggagcatcagtattgccggcatgtcagcgcatggctcaaaaccagcccatttgccatcaatgaggaatactatggcaacaccgcaagcataaaactgagcacgccaacgcaggatactcgggacattatcgccgcggctatgcgttgtctggatgcgatttggcaacccggtcatcggtatcaaaaaggcggggtgatgctgcaggatttttacagtcagggcgtggctcagttggggttgttcgatgagtacaaaccacggcataacagcgaacaactgatgggggtgcttgatcggattaataactcggggaaggcaaaactgtggttcgcaggacaaggggcgcatcaggtgtggtcaatgaagcgtgagctactgtcgccggcatacacgacacggctgagtgatctgccgcgtgcgcgagtatattag

SEQ ID NO: 430004 - DNA, 378 bp, Serratia marcescens
atgatgttgcccggctatctcgaggcgtggcgtgagggggccttaccctctgactgggagcaggtggctaatcctgaagtgatcgccgccctgttggcggagtgggaggcgctcagcgagttggcctctcggttcgactccgccactgaaacacgcgccgacgccaccgcgttttggcatgcgcgcgccgagctgatggcgcagcgcaatcgtgatctgatggtccaactggcgacgccaatccgtttgcccagcgcacgggtggccttttttggctatgtgaaaacggccgtgatggacgccaggcaggttaaggcggcgattcgcgatgccggttttatcgttgcgggcagcgctcccaataagaacacggtttaa

SEQ ID NO: 430005 - DNA, 957 bp, Serratia marcescens
atggataatccactgttactaaaggaacgtttaaatacctactcgcaaacgatggctcgtcaacaaggacgtatgcttttagaactctcagagcgcgttaatagggactttttaaaagatcggacagtcggtaatgccttcagacatgagatgcactgctttgtgaatgataaattgcaaaaatgccaacaagtaggtgaagcggcgaatgttgcaatgagagaaatgaagcaagaatatcaatcgctttctgagcaagagcgcttattgcgaactgacgccgtgacaccttatgccgtaatgagaaagaaagtcagtcatgacgccgtagtgacctacgtgttagccggcgttggcttcctctcgggaatagcacaaattttactcggcgtgggcttggattggactggcgtcggagccattccaggaacgttacttttaatcaatggcatcaataatgtctacgaaaacggttatacgctgttatttggcaagaatactattggtccaggccgaatgatgtaccgttctgcggcttcaacgctaggctattcccattcagcagcagacatggcgttaggtggcgtagacttactgttatcaggctatggtttactaaaactgtcgctgaaaccagaagcctggcgattatttcgctacatcaatacagactatattcgcggttggagaaacatgggaagaaccagcttgatgcttgaaggtggcgcagatgtctcacccttaattccatttaaaaaggcagccaggaacagtgatggaaccaactttatattatattctttctactctcgctgccgcggcctgtctggccgtgaaatacggcttcagaccgcctctgggttccaagggttatgtcgttctggttacgatatgttttttaatcctttgctggcaatttaccctttttgccaacggcaacgcgatgtttattgctga

SEQ ID NO: 430006 - DNA, 336 bp, Serratia marcescens
atgaaaaggctagtgttggtcggcgtggccctgtgttgcgcctgctttgcgcaggcgcgggtggatttggaataccacgcggcgccgccgaaggacaataaagtccccgaggagtaccagaaaaaacgcagcgcgctgcgccacaaggtgtggaatgtcgacagcctgacgcaggccaatgagcaggcgattgcacgcgaacagcagcgcgaggccgcagaagccgccaagcggcagcagcgacacctggagcaacagcagaaaaagcagcgctgcctgcggatacactcgaaagatccccaccgcgaggcgaggtgttacatgtacaacttctag

SEQ ID NO: 430007 - DNA, 561 bp, Serratia marcescens
atgagagagtttgggtttttattgctggcagtaggtgtcgtttggctgctgatagcttttaacatggacacctatgtttttactggctatggtgaacgtgtcaataacattggtttgatcgcatctaaacagaatcacttgctgatatcatcagttatttctatttgcgccattttgatgatcatctttgggaaatcgtcgtctaaggcaaccaatgtatatgtaaaatgcccgttctgtgctgaagaaataaatcctgaagcaataaaatgcaagcattgcggtagtgatgtatcggttcagttgaaagtacagaaagaaaacaagttctcattttatggatttgatcataacttattgctatcagaagatgatagcccatcactaaatgacagtgaagtgatggaattggccaataaaatcaagtcaatatcaaagtcaaatcgtgattcttatatttttggcgagcatcaatcaaatatcacatacattaaatacaaactccctaaagctgttcaagacgagtttgtaaaaaggttaaaatactggcttgctaaataa

SEQ ID NO: 430008 - DNA, 168 bp, Serratia marcescens
atgccggaatattccagcttactcaccacaagtaagctggaaattaccaatatgggtttattcaggagttcatcacatgtgttctgtcgttgcaaataccaccaagtctggacgccgaagtatcgatttcaaatactttgcgacaaggtggggaaagagctctattga

SEQ ID NO: 430009 - DNA, 234 bp, Serratia marcescens
atgaaaagcaaacgcccctttgccgcgctgctggcggcaacagcattgatgtccctggtgggctgcgcttccaatcaggcgatcaaaacgacggacggcaaaaccattgttaccgacggcaagccccagatcgataaagataccggattggtctcctatcgaaatgctgaaacgggcaaaacggaacagatcaatcgagaccagattgcaaacatgagtgagttgaataactaa

SEQ ID NO: 430010 - DNA, 438 bp, Serratia marcescens
atgaaaatcacgcattcaggctttaaaaccggcgccgccacattattggcggcgatgctcgcgctggcattaacggggtgtgccaagagcaccgcccccagccaaaccgatccggtgaataaagaggttgacgatcttttcgccaaccttggcaacccaaaggcgccgggaaaagagaaagaacactatatcgcccagttgcaggccgcgattcaaagccatttgaaagatgccgaagcctactcaggcaagcgttgcagattgagcatcaagctggcgccggacggtatgctgatcagcattcgggctgaacaaggggaaccggaactttgccaggccgcgatcaaagcaatcgccaatgcgcgtctgcctaagccgccaacgaccgcggtttacgaagcggtcaaaagcagcacgttggaatttcgtccacagtga

SEQ ID NO: 430011 - DNA, 1074 bp, Serratia marcescens
atgtttcccttccgcgtattctctttgttattgccgcaacgtcggtgcgctgcccggctggccggcatcgcactgttcatcggcggccttgtgcaggcgcacgcgacgcaacgcatcgacttttcgccggatcccgccggcgcttacccagagggcgtcgtctggaatgcgcgcgccggcgcgtttttggtgtcttccctgcgcggcgggcaacttggcctggtttatcccgatggccgctatcggcgtttttccaccggcaagggactgattaccacctccggcatgctggtggacaccgagcgcaaccgggtgctggtgtgcaatgaagacgtaggggtgtccctccactcttcgcccggcacgcgcaatcgcgtggcgcaggtgttggaatttcgtctcgataccggtgcgctgcagcaggtgtacgatctgtcttcgttaagccgtgggccgacgctcgccaacgatctggcgctcgatgcgcagggcaatatctacgtcaccgacagcttccagccgcagatttacaagatcgaccgggcaacgcgccaggtgtcgatcctggtgcgctcatcgcttctgctgcccgccgacgcgcctgcggctgcgcagggcacgcaaccttatctcaacggcatcgtgtatcacccggatggctacctgatcgcggcggactacacccgcgggctgctgtggaaggtgacgctggataacacgcctgcgataagtgaaatcaggctgccgcatcggctgaaagggccggacgggctgcggctcaaaaacgccaacgaattggtgatcgtacagtcttatccggggagaacagggggcatgtccggtgacgtgtcgctgctctcctcgacggacggctgggccagcgcgcatatcgtcgccgtcgccgcgccgccggggttggatgggccgactggcgccgcgctgcgcgatggcgaggtgtgggtggtcaactcgcgttaccccaaactttttgccgacgtcgctcaggcggaaagcgtcaagcgcttcagcatcgtcaaggtggcgttcgcaccgcccgcagcggatggccgctga

SEQ ID NO: 430012 - DNA, 1308 bp, Serratia marcescens
atgaataatgcctttcccaccctgatcctcggcgccggcccggcggcgatccaactggcggcggacatcaaggccgcgggcaatgcgcgcatcggcctgtacaaccgtcccagcgaaaaagggcgccgcctgaagcaacatctggcgcacacgcccagcctgtggctgacgggcgccggtaaggcgcagcgcacccaagacgatgcgcaggtgacaattgaccgctattgcgatgatctggcgctcgtcggcggcgactggcgcagactgatccttgccgtccccgccgatcaataccatgacgtgctgcgacaggtgccatgggcggcgttgccccaactgcgctcactgatcctgctctctccctccatcggctccggcttgatggcgcaaagcctgctgcaggaggccgggcaatcccacgtcgaggtcatcagcctgtcgagctactacgccgacaccaaataccagaacgccgaacagccttaccgcgcctacaccaaggcgttcaagcagcgaatttatctggccggcgcaggcacaaggtcagactgcgccgaactcgactggctttgctcgctgctggcgcgtcacggcattgacgcccaacgctgcaacagccagctcgccgccgagcgcttcagcatcaccaattatgttcatcctccgctggcgctggccgaaaccacgctgcaggcgatattccagccgcaggcgccgatccagtacctgtataaaacccaccccgagggccccatctgtcccgaggcgatcgccgacatgctggcgctctcgcaggattaccagcagttgctcaaccggctcggcatcgaggccattaacctgctgcgctttttgaatgacgacaactacccggttccgccccgtatggtgagccgccgctggattgaccaattcccgcagctcgcgccgacggagcaatgctatgcgctgtttacgcgttataccgcgctgctggtcgacccctattccgagccggacgcgcagggccgctactatgatttttccgccgtcagggtcgcccgcgtcttccaggatgcccaggggcgctggcgcctgccgcgcgtgccgcaagaggacgtgcgcaaactgcgcgtcctggtcttgctggcgcagcggcttgacgtcgagatgcccgccgcccagcgtctgttggcccgctttcagcaggcgctgcagcacttcgtcacccggatcggcgccgagcattgccatcgctcgttgctggacgatacctgcgacgagcaggcggacatcatttaccgacaatggcggaggcaagcatga

SEQ ID NO: 430013 - DNA, 729 bp, Serratia marcescens
atgcttgtgtctgacccccgttatcacttgttagccgtctgcagcgctcagcatctgcgcgctgtagctgaaaggatctgtgctcgcgataaactagaaccgctagcgtttgatgctgttctttggcggagctgttggacatcaccactgccaagcatatcgccagagtcgtcaagtgagtttttgcaatcggtggggcatgtttatcctcgcgccacttatgagctaaggtcttggctcataagtggcagacgtaagttggatctgcaagctgccgacaagctgatttatcttgctcgcgtgatcgagaaggcgtggaaagttgaagagcaaccttccgtttggcgcaagcaccccagtaacaggctcaatggttatgcgtacaatatcgtacagatccttatacataccagcgtatctgaggattatccaaaggagaataatatctctcaccggcatgatttgcttacgcattcaccgagtaactcaaggctcacggcttggatggaaaaatatcaacatagctcaaaagacccctttgttttcgcacggcttgatgtgacacgtatcagtaatatgagggagttgtttctgtggcaaatttcgcttgaaacccgtagcggattatatacttcggcaaccttcgaggcggcagtggggaaaataatcaggtcatacgatcgtccggtgcccggtcggcgcattcaagcgtttataggttatatctaa

SEQ ID NO: 430014 - DNA, 297 bp, Serratia marcescens
atgatgatgaccgaaccggcgtccacctgcagcggcggatccgccaacagcttgcccagcgcctggccgacgcgcacgccgctcagcgtcagcgagtcgagggtgccgaagttggccaacaccagcacgccgagcgtggtgccgagccccgggcaacagcgcgaggcggtgccgatgccccctttcaagccgaaactgctcatgccgcgcccggcgccgacgctgccgcgcgcaaagcgggtggaatggttatccagcgcgctgaagacgtgttcctcacgcaccgccatcgcctga

SEQ ID NO: 430015 - DNA, 1563 bp, Serratia marcescens
atggacagaattttaatcggttttctcactgccgtttctttattcaccgccggagtttccgccgccaatcccactcaggatacgccccgcgccgaacatgccccgcccccgatgaccggtcaaaccgttgctactcaaggcgcgatcacggtcgaccaggtaaaaatcaattatcaggcgcaaaccggggtgctggaattgagtaaagaggatccggaagatcccgtgaccggcatgttctatgttgcgtatttcaaaaagaatgagaataagaacgaaagcaggccgattacctttatctacaacggcgggccgggctccgcctcgctgtggctgcatatgggggcgctggggcctaaacgggttatcgctactcagccagagaaaacacagctggcgccttaccaactcaccgataaccaatacagtctgctcaacgtcagcgatctggtgtttatcgatgcccccggaacgggttacagccgcttttccagcagtgccgccagccagccggagagagcgcagcaaaaagcacagagtgccagcaacgtctatggcgtcaacggtgatgctcaggctttttctcaatttatcgttcagtttttaacgcattaccaacgctggaactcacctaaatatttattgggtgaaagctacggcactacccgctcggtggtattggccgagacgctaaaaaatcagaatatcgatcttaacggtattatcctgatgtcgcagtttctgaactacgacaataacgtcgacgatcccaatcaaaaccctggcgtcgatcaaccttactatctggcgctcccaacctacgcagccagcgcatggtaccaccagcggctgccgggcaaacaccagagcctgaaaaccctgttagaccaggccgagcagtttgcgctggggacttatgccccagccttgctgcaaggtgccaatctgcctgaaaaagatcgccaaacgctcgccgagcagctttaccaatttaccggcattccggccgattattggctcaatgccaatttgcgcctgagtggaccggtcttcgccaagcaactgttgcgcagccaagacgagaccattggcagaatcgatacccgctatcgtgggccgtcgctggataatatcgctgaaacgtccaactacgatcccaacgtcagtgcaattacttccgcctacgtcgcgcaattccacgattatcttggcaaaacgctgcattttagcgccgaccaaaactatcgcgcattttccaatgaggtctatgactggaacatgtccagcaacagccgggacagatcatttaacgtgttgccgaacctgtcgcgagtgatgaaaatgactccgacaatgagagtgatggtgattggcggggtttacgacctggccaccccttacttcgtcgccaaatatgagatgagccatctgcccgtgtcgcccaaattacgcgacaatatccgtttctattggtatgacaccgggcatatgccgtacgtggatgaactatcgcttaaaaagatgcacgcggatttaactgcatttatcagcgaaaagccctga

SEQ ID NO: 430016 - DNA, 636 bp, Serratia marcescens
atggatgcgaaagccgtagctcaaggaattcttgagggaatagagtctttaccaaggggcattgcctatagtgctcgtaggacatggcagggagcagggctcggcggtcgagagcttaagcgccgcaatgaaatcgaaacggaacggttcatcaaggtcgttcgtgccggctatggtatcgaagccccgctacgtgagctgatagcggtgattatccgtgactgctatcagcggatggatctgcaaacacaaaccgtgctaagccaaaaattaaaccatgtagagggttatcttacaggacgtatggggacgcagttcattctggttcagcaaatcacacaccatattttgaaaaaggttatcggcagcacacttttcaaatgggtattcaaaggtgtcaccattgctgggctaaacatcattcttttacaaggaattattgaacaggccgccgtttcttcgcgtcgtttgcgggaacaatatccctcaacgtaccataagctcacgccacgaaatttggacatgatctactttctggcggaggagtatcttgaaccctttgttgcctataccagcaaatcgaaaatgttctgtgaaggtgtgaatcatgagctatctaaagtcttggggaagtaa

SEQ ID NO: 430017 - DNA, 1035 bp, Serratia marcescens
atgcctgtacggaagctgcccgacgggcgttggatagcagatttctataccgttgatcgcagtaacggtaatgagggtaagcgggttcgtaaaaagttcgccactaagggcgaagctcttgcgtttgaaaattacacactcgaacaaattgagtcagcgccttggctcggggaaggaaaagaaaaacgtcggctgaccgaattggtcgagctatggtttagccgccatggcattaccttgaatgatggtgaaaagcgtagaagctcgatgctctgggctgccgagtgtatgggcttccctctagccacagaatttaatgcacaactatttacagcctatcgagctaaacgcttgggcggccattttgctcgaacaaaacgaatagcaaaagtttcacctcgcaccttaaaccttgaactggcgtattttctcgcagtgtttaacgaacttagaagattaggtgaatgggtacagccaaacccacttgaaaacgtccgccagtttcgtgtagacgaaagcgagatggcctatcttacagatgagcagatcggtttgcttttgcatgaatgtcgccatagttcagctaaggatctggaaatggttgccaagctctgtttggtgacaggagcaagatggagtgaggctgagaacttgaaaagctctcaggtttcgggaaacaaaatcacctttgttaaaaccaaaggaaagaaaaatcgaacgataccgattgaccctttacttgctgacgaactacctaaacgaaacggcgctttgtttaccccatgctattatgctttccgttctgcaattgaacgggctggcattgtattgccagatggtcaaatgacccacgttttgcggcatacctttgcgagccatttcatgatgaacggtggaaatattctcgttttgcaaagaattctcggtcataccgacatcaaaatgacaatgcgatacgcccattttgcccccgaccattttgaagatgccgtaagacttaacccccttacaaaatgtcgcaaaagtgtcgcatga

SEQ ID NO: 430018 - DNA, 576 bp, Serratia marcescens
atgataaacatagacttcactaaaggtggctccgcagtgttagacagagtcctcgaagcctacggattcaaaatgagagtacaactagctgaccacctcggcatcgcgtcaagcagcatggcaatgcgctataaaagagatatatttccagcagatatagtcattcgctgcatgttagaaacaggggtgacgctcgagtggattacaaccggcaagggaaaaaaattcgagaatggtgattcaagtgcgttacatctaactagacaaagactagtcaatgggcagctacaagactttggctccattctctttgatgcaggaatgttcttggattcccacaaccaaccaacagcaccaatttgcatagttgatgaccgaactcagtacatcattgataagcatttcagtgaagtaaatgacggtttatggctggttgaaatagaaggtaaggcaggcatccgtacgcttacacgcataccggttaagaaggtgcgcattagcggtcatggcgccgcttttgattgcgatattgatgatataaccgtgcttgggcgcgttgttctgacggtggaatag

SEQ ID NO: 430019 - DNA, 222 bp, Serratia marcescens
atgcgacctaacattacaattgtcatccctgaaccctacctcccgttagaggagtattgccgccgtactggaaccaacaaagaaacagctaagaacttgattgaatatggaaaattacctatcaagccaaagggcaagcagaagaaagggctcatagaagtgaacatggcagccttgacagtgcaggccctgagtgaatgtagcgtctctcttcaggcttaa

SEQ ID NO: 430020 - DNA, 315 bp, Serratia marcescens
atgctacatgatttaaaaattaaaccctcttattttaacttcgttcgtgctggagttaaaaaagcagagtttcgcttgaatgatagagacttcaaagagggggatttattaaagcttcgtgagtggctcgaagatgctaacggatataccggtgaattcatcattgcaaaaatcactcatattacagatgtcagcgagtggaaaactggctatgtagttttaagcatccaaatactgcaagattctttgtgcgtgaattgtaatgagcgctactgtggcaactgcacctacgcacacggcgcgaaagtgcaatga

SEQ ID NO: 430021 - DNA, 1461 bp, Serratia marcescens
atgcaccaacatattacggataaatcttttcaagctttttttacagacgcccatgatattagaaatacaatgattagtttgttgggggatgtgtctaatcaaaatatcattgaaccttgcttcggtgagggggcatttataaagaacctaatcggcaagcctaaaaatattgatgctattgacattgacgaacatcattttttaaatgacttgaatgtacagggttgtaattattttcacgccgatttcatcgattattttgttcgaccaaataatcgtaaaattgcactccctaatactgaatatgattcaactatttgcaacccgccttatggtttaaagttatcacaagagtatagaaaactgataaaaaaagcattccctgatgtgtatgctaaagaatcttatgccttattcttctattttaccttgcagaaattaaaaaaaggagggcgatatgttttcattatccctgataccttccttacgagtacgaatttgagatatatgagacatttcatacttaaatcagctaagccaagccatatcattcagtttaaaagtaagcgatttggttctgttaacttcggttacagtaatatgtgcattattgctggtaatgtggccactcttagtgctgatagcgaagttaaatggatcgatgcagttgactcaaatcaatctctattacaattgctagaaacggataatacacttgtttgtggtgattattttattaataacgtggataaagcttggattaatccaaaattattcgaatcaattaagatatctcgcgaaactgtaactctgggtgagattgctgagtgcaaaacaggaatttatacaggtgataaccaaaggttttgtggatatgactctgaaaaccctcctaaaagaatcaatggtcaccctgttgattggagtctagtaaatctaactccaaatgagcttgagaaggaacatggcatagattcagatatagcttatgtgccttttgttcgaggagggcatagaaatgtcttcgaagctacaaatagctgtattcgatgggatcatgaagctgtaacgtattattataaagataagaaagctcggcttcaaaacaaagatttttattttaaaaagggacttgcaatacctatggttacctcaggaaggttaacagcttcagaaatggataactgcatttttgaccaaggtgttgttggtgttttcgctaaaaagacaagctatcatgattttttattgatttacctaaatcacccatttgcaacagaacaaaagtccctggtatcaccaggggctaataactccgcgaattatttgaagcgaattaacgttcctaagttgaccgaagctgagctgttagaagcaagcaaaataatcgagttagcgaaaatgcaagggtgggaaaaaacagaagacaaaagaaatgattttatttcctcgatcttttaa

SEQ ID NO: 430022 - DNA, 867 bp, Serratia marcescens
atgaattacgctcagttgaaacaagatattttttcctatttccactcaaatttaacggttattgccagaaatatacaagctaaaaacatcccacatggtgggaagtcaacacttataaatcaagcggttgaaagtgtaaaaaatgatttagaatgtacattagccattcaacactcacatttagatcgctcaaaactatgtatgcttctccaatattgctattcagttatgagctttgaatatcggaatgccgtttggccatatgaatatatggcattttcacgaaggaatggagaattgtgggagcgtttttgcaaagctgcatgggatcattcttcactgccaaatctatatcgtattgcagcaccaagtttccatgaggttagaaatagctttagagatcgcataataaattacacccaaggaaatcaatatcaacaccatatcgtaaatgacgtagatagtgtttttgaacttgtaggtgagattaatatgattgaagatgaaatgttcaatctaaatggacgaaatcatattatagactttaaaagtggctttggttccaacgaaaaaggaaatacacttcgtttgattgctgtcggacgggcctacaaacattgggaccctaatgtcaatttactatttcttgttagacaaaacgaaaataataactatttagagactattcgcaggagtaacctttgggaagttcattgtggggatgctgcttaccgaaaaatagatgaactgacaaatgcagggatatgcgaaattagacgagaagccattgattttaggaatgacctatcacctaacttttggagctacttagttaataacaatctagctcattatttagattggtaa

SEQ ID NO: 430023 - DNA, 336 bp, Serratia marcescens
atggtacaggcgcaacgcaaacctacttctgtaggcgatgtattgttatatgaataccttgagcctaccggtcttaaaatcaatgacttagctgaaatgctaaatgtgcatagaaatactgtaagtgctcttgtgaataataaccgcaaactgactgttgatatggcctttaggcttgctaaagcttttgacacaactgaacagttttggttgaacctgcaactaaatttagacttgtgggagattcagaatgatgcgcgaattcaagaagagcttaaccgtgtaattactatggaaaactttttagaaaagcgcgagcacccagttgcagcctaa

SEQ ID NO: 430024 - DNA, 525 bp, Serratia marcescens
atgcaacacattaagaatttgaagagatacacgccggaagaattattcctcggtgagaacgtgatttatcttcaggatgataacggtattgactggtacgccgcgcaaaaaatgttttcgccggacaccgtaaaactggcttatgacgaaagcggcattatctgcgcgattaacagtgatgtgtcgatgctgtggccgattggcttatcggttattgagctgaacccgacgaaactgccaaagtgctgtctggctaatggtgagtgggtgtttgacggtaagaaggtgagccagcgcatctattccgctgaagaaatgatggcgagggctgaagccagaaaaaatgaattgctggcgagcgcgggtaaggctgttgcgccgctgcaggatgcggtcgatttagggatggcgatggaggaggaaatcgtgcagctcaagctctggaaaacttaccgggtgcagctgagccgcatcaatccgcagaatgcgccggatatcgattggccggttgcgcccagcgtctaa

SEQ ID NO: 430025 - DNA, 615 bp, Serratia marcescens
atgaaaacccccaacgcacagcgcaaaatcaacatcattaaaaatattgaatatctaatgcgtacccgcggtgaaaccaaggcttccttttccaaccgcagcggcctgacgcgcactaccctatacaaaattcttgatggaagagtgaacaacgttcagcaatccaccgttaatcggatttccgattttttcggtgtctcctgtgaagagatcgaagactacgatctggaaaaactggagctgctcaacgaaacgttgtccaccgaaggcaacaagaacccttccgccattccggtgatcccgcagtcgcgctatctggccgtctcgcagcgcaagatcgggcaactggtcaccgagtttcctttgacttatttcttcggcgatgagtcgaacatgttggcaatgaaaatagagaccgaaattaaagggtcattcattccgggcgaagtcattatcattaaacgtccgccggtactgatttgcgattcacctttgctgtatcactcgggaaaaagcggcttctttgtggttgacgacaaagacagcgaaagcatggacaaacgccttcaggagacggtgcaattcctgggttatatcgttggagaaaggttataa

SEQ ID NO: 430026 - DNA, 915 bp, Serratia marcescens
atgttattgtctcaccggcattttatctgcacgcttctggcgctcgccatcggcttttggttgccgactgccgtgcaggccaggcccgatctggaacgcaggatcggcgtgaccgtcgccgatagcgactctgcggattaccgcttcagcgatctgcgcttcacctccgccgatggtcaacggcgttaccgcgtccgtatcgcccagccgcgtcgggcgcctgcgcctgacggctatccgacgatttatttcctcgacggcaatgcggtgctgatggagctgaacgccagcttactggccagattggcgacggcgaagcggccaccggtgctggtgatgatcggctatgacaacgatctgcgcatcgatgccgccggccgcgcctacgactatacgctgcctctgccgacgggcatgaagaaaccgccgcaggcgggcgggggcgcggaggccttcctgcaattgattgaaacgcggatcaaaccggcgatcgccgccaaactggcggtcgatcagcagcggcaaacgctgtggggccattcctacggcgggctcttcgttctgcatacgttattcgcccatcccgccgccttccagcattatatcgccgtggaaccctcgctgtggtggggcaacggcatgatcctgcaagaggcgcagcagtgggcggaacggcatccgacgccggcggcaaggctgcagttgtgggtgggtctggcggagcgcgagcgcgcggccccgcccggcgtgaagagccctgcactgccggcgaacgcggcgcaaatgctggcggaacgcctggcaaagctcgacggtcttaccgtcggctatcgggaatggcccgacttgggacacggcgccatgctgggtgccgccatcgagccggcactgagcagcgtggcatatgaagactaa

SEQ ID NO: 430027 - DNA, 1203 bp, Serratia marcescens
atgaaaaacgcaacgttccccagcatcgccaagttttcctttctgtctttattattgccggcctggatcacccaggccgctcccccgcaaccgcagccgggcagcaccgcgcaaatcgttttgattggcacctggacaggggaaagagacggcgatcgggttcagccgcccgtttatcccagccaggggatgtatcggttggcgctcaacgaagacggcagcctgctgccattgaatcgcataaaaatggacagcccttcctggatagttctgagcaaaaatcgccaatttgcctataccaccaatgaaactcagcaaggccaaatcagcacgctcaggctcggcaaaggcggcgacccgcaacgcatcagcggcatcgactcgcagggacaagagccgacgcatgccgccatcagtccagacgggcgctacttattggccgccaattactccaacgcccccgggcatgccagcgtcatcgtggcccccattctccagaacggtgaactcggcgaggtgctgcagcgctttcccttcaccaagggctcagaggccgttgccgagcggcaagccagcgcccatattcactccgtcaacttcacccccgatgggcgcatgatgtacgccgccgatttaggtggcgacatcattcatgccttcttctacgacgcggcaaataaggccgcgccgttcaggctcgcgccggattacgatttgtcgtttccgccgggcaccggcccgcgacatatgatcttttccgcaaatggcagattcgcctacgtgatcagcgaaatgtcagcgaatatttttgcctaccagattaataacgatcggttggagaacatccagacattagcgctgacggaaagcacccgcgcggatgcaaagggcggcggcgggctggcgttttcccctgacggaaaatacctctatgcgagcaatcgccaaaaaaccaacgaaatcgtgggttataaaattaacccggagaatggcaaactcacgctgattggccgcacgctttccggcggaatcgaaccgcgcgctttcgccttcgataaaagcggaaagtttctgctagtcgccaatgtgtttagtaataacgttaccgtattacaacgcgatctggataccggcgaattatatggcaacggcgtaagcgtccagataggtacgccaactgacgttaaatttatccacgagtaa

SEQ ID NO: 430028 - DNA, 1419 bp, Serratia marcescens
atgagaaaacctgcaaggatagcctggctggcgctgctcctcgcggcgggcggcggctcggcgttcgccgccgacgaaggaccgtatttcagcgccgagctgattgaaaaaggcgagcggctcgcggtggcggcggactgccaggcctgccacacccaaacgggaggcggcgagcgatttgccggcggttacagcatcgccacgccggtaggcgtgatttacaccaccaacatcacccccgacaaggaaaccggcattggccgctacagcgaagcgcaattcgcccgcgccgtgcgtgaaggcattcgcgcggacggcaccccgctgtacccggcaatgccttatacgtcatacgtcaaattgaacgacgaggacattcacgcgctgtacgcctactttatgaacggcgtcgcccccgtcgttcagcacaacaggcgaaccgaactgcccttcccctttaacctgcgctttatcatgccggcctggaacagtttgtttctggaagaggggcatttcagcgccgacagccgcgaagatgcgcaatggaaccgcggcgcctacctggtcaacggccctggacactgcgatacctgccatacgccgcgcaacgtgttactggctgaatacagcgggcaaccgctttccggcgccatggtcggcagttggtatgcgcccaatattacttccgacccgatcagcggcattggcggatggagccaggctgagctaatccagtatttgaaaaccgggcgcgcggcaggaaaaaaccaggcggcggggggcatggcggaagcgatagaaaacagcctgcaatatttgtcggacgacgatctggccgcgattgccgcttacctgaaaaacagtccgccgatcagagatcgacgcgatacgcggccggcagacagctttggcaagccgttcaacgttgaacccgagctgcgcggcgcgcatccgccgaccgccaacgagacggtgattgacggcgccgccttgtttagcggcaactgcgccagctgccaccaacccgacggcagcggcagtcaaaaccaggcctatccatcgctgttcaacaacacggcgacgggctcgcgcaatccctccaatctgatctcggccattttgttcggcgtcgagcgccgcgtcggggatcaacatatcctgatgccgaatttcggcccgcaatcctatgtcaatcccttgaacgaccaacagattgcggcgatcggcaactatgtcttgcaacattacggcaaccccgcggcgcacgtcaccgccgaagacgttgcgatcctcagacgagggggcccggcgcccttgctggccgagatgcagccctatatggcaccggggttgggcggcggcgcgctggcgctactggcggccatcgcgtggcgggtgcgcaaacgccgcggcgcgtga

SEQ ID NO: 430029 - DNA, 1656 bp, Serratia marcescens
atgaaaaaaccggtattcacggctgatggcgatgcctcggccgatattgtcatcgtcggctcggggatcgtcggcggcatgatggcggaccagttggccggccaaggctattccgtgctggtattggaggcgggcctgcgtatcgatcgcgcgcaggccgtcgaaaactggcgcaatatgccgtttgataaccgtgcgggctccgattttcaaggcttgtacccgcaatcagcctacgccaccgcgccgctctattttccgccaaacgattatgtcgcgttaagtggcccaagcgcggacagctttaagcagggctatttacgcaccgtgggcggcacgacctggcactgggcggcctcctgctggcgccatctgccaaacgatttcaaaatgaaaacgctgtacggggttggccgcgactggcccatcgcctatgacgatctcgagccctactactgccgcgcggaggaggcgattggcgtcgccggcccaaacgatccggccaaacaatcgccttcagcgcgcagcaagccttatcccatggatatggtgccctgggcccacggagatacgcgcttcgccgaagtggtcaacccgcacggttaccgctccgtaccgatcccccaagggcgcagcacgcgaccatggcaggggcggcccacctgctgcggcaacaataactgccaacctatctgcccgattggcgccatgtataacggcatccatcacatcgaacgcgccgaaatgaaaggagcgctcgtgctggcggaagcggtggcgtacaaaatcgataccgatgggcaaaatcaggttaccgccgtgcattggctggacaaccaaaagcggtcgcacaaagccagcgccagcgcgttcgtcctggcatgcaatggcatcgaaaccccgcgcctgctgttgatggccgccaatgcgcaaaacccgaatgggatcgccaacagctccgatcaggttggccgcaatatgatggatcactccggctttcactgcaccttcctggcgaaagagccgctgtggcctggacgcggcccggcgcagagcagctgtttggtcggcccgcgcgatggggatttccgcaagcattactcagccaacaagatgatcctcaataacatcaaccgcgttttgccggctacgcgccaggccctggcgcagggcctggtggggaaagcgctggatgacgagatccgccgccgcgcggcgcacggcgtcgatttgtccatcagtctggaaccgctgcccgatcccaataaccgtctgacgttgagcgcaacgcgcaaagacgcccacggtttgccttgccccgacatttactatgacgtgggggactatgtgcgaaaaggggctgaagcggcgcaccggcagctcaagcatattggccaattgtttgatgccgatgaattcaacatcaccaccagcctgaatgccaataatcacattatgggcggcaccatcatgggcaacgatgagaaaaattccgtggtgaacggcgattgtcgtgcgcacgatcatccgaacctgtggctacccggcggtggcgccatcccttcagccagcgtggtgaacagcacgctgacgatggcggccctgggccttaaagcggcggacgacattgcccgcaaactggcggtgaaatcatga

SEQ ID NO: 430030 - DNA, 573 bp, Serratia marcescens
atggaatatggtttatcagacaatggcgaacagccggatcaacatggcaagggcgtcagccgcagaaatgtcttgctcggcctggcgtcaacgcttgtcgccaccgcattggccggcgccccattcctcacgctggcggaacagcataccgccgcgcaaaaccccctgctttttgcccgtttcttcgcgctctccctgcaattgacagaacgtcaggatattgaccctggcctttcggctcgtattttcactgcgttgagcctcgcaaacccgcaattctcatcacaggttgagcgattaagcgcacgcgtgaaggccggacaaagcgcccggcaacttcagcaaatcgccggccaactggggctctcggcattggtctcggccatcgtcaccgcctggtataccggtaccgtgggccagggggcaaacgccagtctcatcgcttataaagatgccctgatgtatcgcccggttaaagacgccttgattgtgcccacctattgcggcaacggcccgctttggtggaccgtcgccccacctgaggttaacgccttactgccctctgagagctga

SEQ ID NO: 430031 - DNA, 936 bp, Serratia marcescens
atggtcattgtcgatgagaattacccccgtgacctgcgaggctacgccggagatccgccgcatgcgcgctggccgggcaacgcgcggattgccgtgcagttcgtgctcaattacgaggagggtgcggagaatcatgtgctgcatggcgatgcgggatcggaacagtttctctccgatattatcggcgccgccagctatccggcgcgccatatgtcgatggattcgctgtacgaatacggcagccgggcgggcttttggcggatccaccgcgagttcagccggcgtggcctgccgttgacggtcttcggcgtggcgatggcgctggcgcgccagccggagattgtcgcggcgatcaaagcggcgaaatacgatgtggtcagccatggttggcgctggatccattatcaacatatggatatcgctgaggagcgtgagcatatgcaaaaagcggtgcaagtgctggccgacctgttcggcaaagcgcctaccggctggtataccgggcgcgatagccccaacactcggcaactggtcgtggagcagggcggttttgattatgacagcgattattacggcgatgatttgccgttctggagcgaagtggcgtgcggcgacggcagccgtcggccgcacctgatcgttccttacacgctggacgccaacgacatgcgtttcgccaccgctcaggggtttaataccgccgagcaattttacacctatctgaaagacagcttcgacgtgctgtacgctgagggcgaggaggcgccgaagatgatgtcggtggggatgcactgtcgtctgctgggcaggccggggcgttttcgcgcgctgcagcgttttctcgattatatccagcaacacgaacgggtgtgggtctgtacgcggcagcagatagcggaccactggcgcgagacccatccgtacccgggaacatga

SEQ ID NO: 430032 - DNA, 744 bp, Serratia marcescens
atgtcttctgtttgcatacaggttatcaaccccaacaccagtcaggcgatgaccgacaccatcgccgctgccgcgcgcaccgccgccgcgccgggcaccgagatcctggcggtgtgtccgcgcgacggggtgccgtccattgaagggcactttgacgaagccatcgcggcgatcggcgtgctggaacaggtgagggcggggcgacggcagggcgttgacggtcatgtgatcgcctgtttcggcgatccgggattgctggccgcgcgcgagctggcgcaggggccggtgatcggcattgcggaagcggcgatgcatatggcgtcgatggtggcgacccgtttttcgatcgtcaccacgttaccgcgcacgctgattatcgcccgccacctgctgcatcagtacggttttcatcagcattgcgcggcgctgcacgccattgacttgccggtgctggcgctggaggacggcagcgggctggcgcaggagaaagtgcgcgagcgctgcatccgtgctctgaaagaggatggctgcggggcgattgtgctcggctgcggcggaatggcgacgctggcgcaggaactgacccgcgagctgcgggcgccggtgattgatggcgtcagcgcggcggtaaaaatggtggagtcgctggtggcgttggggttatcgaccagcaaacaaggggacttggcctatcccgaaaccaaagcgttaagcggtcaatttcagtcgttaaatctattttaa

SEQ ID NO: 430033 - DNA, 717 bp, Serratia marcescens
atgaatactgaacattgtctccaggccgcgccagcgctgcaggacaaagatgaaaccatttatcaggcgttgatgacggcgattgtcgagcatcagctgccaccgggcagcaaattgccggaggaggcgttgtccgacgtgtttgccgtgagccgcaccggcatccgtaaggtgctgcaacgactcgccgctgtgcaaatggttagcctgaagcccaaacgtggtgcatatgtcgccagcccgacggtggaagaggcgcaggctatcttccgcacgcgcgcgctgctggaggtcgccaaccttcccgatattatcgcccgctgtcgggcgccccatctggcggcactggagcgcattattcagctggaacagcaggtgcatgaggcttacgacggcccggcggcgattcgctattccgccgattttcatattcagctgcaggcgatctcgggcaattcggttatcaccgacatggtgacgcgtctttgccagcgttcttccctggtcatcgccacctggggcgcgccgtggcggcaggggggccgttgcgacgatcatcagcagttggtcggtttgttgcgggataaagcgctgcagcctctgagcgacgccctgatgcgccattttgatcatattgtcgccagcctgcgctttgagcgcgatggcgtcagcctgcccgatttttcccggctgttcgccggttacaaggagccgtga

SEQ ID NO: 430034 - DNA, 1497 bp, Serratia marcescens
atgccacattcaacacacatgcatcaggtttcggccaaagacgcgaccgccggctacagcccgcgactatgtaatgaagatctcgcgccgacgcgcgaccaaaactggagctggtacaacattttttcattctggatgtcggacgtgcacagcatggggggctatgtggtcgcggcgagctttttcacgctcgggttggccagttggcaggtgctgctctgcctgctgatcggcatttgcatcgtacagctgtgcgccaacctggtggcgaagccaagccaaatggccggcgtgccctatgcagtcatctgccgccaggcgtttggcgtctttggcgccaatatcccggcggtgatccgcgggcttatcgctttcgcctggtatgggatccagacctaccttgcggccaacgccctgatgctggtgctgctcaagttctggccgtcgctgtccacgctcaccggaagcggcttcctcggcctgtcgctcctgggctggctatgcttcgccaccatgtggctgctgcaggcgatggtcttttggcacggcatgaacgccattaagcgcttcatcgatatcgccgggccggcagtctatgtggtgatgctggcgctggcgggctggattgtatacaagaccggttttgacgggatttcctttaccctggccagcaaatcgctgaccgccggggagcagacctggcaaatgatcaccgccaccgcgctggtggtctcctacttctccgggccgctgctcaacttcggcgatttctcccgctacggcaaaaacatgggcgagatccgccgcggcaaccgctggggcctgccgttcaacttcctgctgttctccatcgtcaccgtagtgattgtttccggtacacaatcgctgtttggccacatgatcaccgacccgattgaaaccgtcagccgcattggaaacgatctggcggtcgccattggcctgctgacgatgatcaccgccaccattggcatcaatatcgtggccaatttcgtctcgccggcctttgacttttcgaactgttcgccgcagaaaatcagcttccgcaccggcgggatgattgccgccgttgggtcgattctgctgacgccgtggaatttgtttaactcgccggagcttatccactacaccctcgacgtgctgggcgcctttattggcccgctgttcggcatcctgatcgccgatttttatctgatcaaacgcggccaggtatccgtggacgatctgtttgatgacaccccgaaaggcaaatactggtaccgcaacggttttaacccgaaagccattgccgcgctgctgccgtcggtggccattggcctgatcatcagctttattccggccctgcaccaagtggccaacttcagctggtttatcggcgtcttcctcggcgcgaccgcctaccgctggctggcccgcgatgagcgcaccgccgtggccggtccggcgttccgggcgaaggtgatggcgcaaaaagagtaa

SEQ ID NO: 430035 - DNA, 1248 bp, Serratia marcescens
atgctattcaactcagcagtttcctcgtcgatacaaacgccccttcagcaacggttgtttgcatttaccgcctttttgctgggagcctccctcccgacctccaatcccctgatgaatatctcactggggctggttgtcgtctgtctgctctggctgcgcgatatccggccgtgggctgcactggtttgtcatcccctggtttggttgccggccctgatatttgcgctgctggcgttgtcattgctgacgcatgctcacgcctacggccccaaaatggtcggcaaataccaaaaattgctgtatgtcctgccgctggcgctgttctttctggccgactcgcggctgatgacgcaatttgtccgcggctttttgtgggccaatgccgcgatattggccatcagcttcatgagcgggcttggccatgtcacattgggcgggctgaaccccgacaaccctacggtgtttaagctgcaaatcacccaaaacgtgtttatggcgctggcggcgctggtctggttgtcgcgtgcttttgcctgtagcggaaaacggcgctgggggtatgcgggactggtgttgttggcgacggttaatgttctgctgatggtgcaggggcgtaccgggtatgtggcattggccgttggcatgggtatctggttattgcttaccctccggcgcaagcagcaagtggccgtgctcgcctgcggcatactggctgtcgtgatgctggtcatgacccccaatcgcgccatggagcgcctgacgctgggcgtccagcaaattcaggggtgcgttttcgccccggcccaaacggcttatgcggcctgcgacaactccatggggcaacgcaccgccttcgcccgcgaagccctgcgactgataaagcaatccccgctgctgggcaacggcgccggcagcttttggtacggcaatccatccaccggctatggcgtgcataatccgcacaatgaatacctgttggaaacggtgcagagcggtttgctgggattgatggtgttcctcacctggatgtggagttgctaccgcgtcgcctggcgcttgccgccggcgcgccgaaatctgttcgttgcggtgctcagcagctacatggcctgccatctgttcaattcattcctgctggactcgtccgaagggcacctgtttgtcattatcgccgccttgctggccgggctttccctcaccactccgccgtctcttcatgcagacttgcctcaaccccagatgcgatag

SEQ ID NO: 430036 - DNA, 363 bp, Serratia marcescens
gtgacattgaaaaacatcgccacggcgttcatggcatgcctgctgttatccggctgtcagcacgccgccaaatcggcccctgacgccgccatccagcgcgaccagctgtcatcgctggtcggcgccggccagtttctgagagaacgctgcaaccgcgccgatatcccggccaacgatccactcgcggcggcggcgttgcaggcggcggagagaaaaggctgggcgccggcgcttaatcgcacccagttgcttgatgcaggcaaaaacgtcgccgcgcagctggaggccgacgccacgccgttgcaagagaagtgcagcggactcaaccgaacgctggcgccgtttttagcccagctccgttaa

SEQ ID NO: 430037 - DNA, 816 bp, Serratia marcescens
atgctatccgcaataaacgcagtggccgatgaacactggctgctatttagcgctgtgttgagcctgtgcatcggcagttttatcaatgtggtcgtttatcggctgcctgtcatgcttgagcgcgaaatggaaatggcgcaggccgaacgatttaatctctttttgccgcgttcattctgcccgtgttgcacaatgaaaatatcggcgctcgataatattcctttattaagttggctgctgttgcgcggtcgctgtcgttattgtcgcacgcctatttccatccgttatccgctggtggagttattgctgatgctaatgggaataacgctggcctggcgcgtcggcatcggtgtggattggtttttcatgttggcgtttgctgcattgctgctggccttggcggcgatcgacagcgagcgtcagctgttgccggattgcctgacgctgtcgctgctgtgggccgggctgttgtggcattgcctggcgcacccggcatttttgccgacggcggtcatcggcgcgctggcggggtatttgacgctgtggctgctgtattggggatttcgtctcgcgaccggccgcgaggggctgggatacggcgattttaaactgctggcggcgctcggcgcctggggcggctatgccgttttgccgtcgattctgctgtttgccgccaccggcagcctgctgtggctgctgctgcgggtgtggcgcggcggcgatggggcgcagcccctgcctttcggcccggggttggcggcggcgggcgccggcgcggtagcctgccagtggcttgcgctaccgctggcgggttaa

SEQ ID NO: 430038 - DNA, 465 bp, Serratia marcescens
atgaacatcggttggcgcgataaggcgctgcagcgggcagtgctgttaagcctgttgatgctgatggcctgcggctactgcctgtatcaattttcacaggcgcaaaaaaacgcacaacggctggcggcgctgcgggaacaggcgcgcgtcatccaacaattgcaggcgcgtttgccgcagagcgccgccgcgcgcgagcaactgccggagcgactgcgacagagtgcgctggcatatcgcatcgccatcgccgaactgacggaaagtgaagcggatgtgcgggtcacgctgccgcccgtgccgtttgaacgcctgttgccgtggctggccgccctgcaacgcgagcacgggatccgcgtgctctcactcgccgcagaacgtgcggggcaggcgccgggtgtggtgcaaataagccaactgcgggtaacggcgcaaccggcgatgtcacccacgcgacgacaatag

SEQ ID NO: 430039 - DNA, 1134 bp, Serratia marcescens
atggcgaacactatcctgcttatcgcgctggacgatgatgcgatggccgatgtgcgctggggccgcgtcggcgagacgcgctgccgctttgccgcccgcctcgatctggccgaaggcggtagtgagttggcggccatggcgcagggcagccgggtcgtggtgctggtgcctgcccgtcatgtggtgctgagacaaacgacattccagggcaaggcccggcaggcgacgccgctggcgctggcgtactcccatgagaccgggttgttgaccgatgtcgagcagatgcattgggcggtgctgggcaaggtgcagcgcgatttcactatcgccggcgttgcgctggcgcagatgcaagggtgggttgatagcctcaacgcctgcggcattcgcgtcgatgccctgctgcccgacgtgctggcgttgccgttgccgaaccaatgcagcgcactgcgctggcgcggacactggctgctccgaacggggggcatgcagggcatgcagttgcccgatgcctggggggacagcgtcccgtggccgacgccggattggtgtctgcacagtggcggagaggtgccggcgggctgggaaacggcgcgtatcgatgaggatccgctgtggcgattggcggaagaggcctggaacagcacatccacgctgttgcaggggcatttcaaaccgggcgtgcgctggccgcgccgtctgcccgataagaccgcctgcgcgatgctgctgctcagcggttcgctgctggtggggggcttgcatcaccaattgaaggccagacagagcgaaagccagataacggcgctgactcagcgcctgctgccgagtggcgagaccgcgccggcgttcgccgaacgggcggcgcaagcgtgggcacggcgtatgcaagacaccctgaatgcgccgcagctgttcaggctgttgccctacgcggccgaggcgcttgctgtctgggaacctccgcagttgcaggcgttggctttcgacgccgccgacgatcgtttggtggtgacggtaaacagaaacgacgcgccgctgccggcgccggtcaacgacggtggcgtcagcatgacgttcagcgagggaagcgcgcctaaccaggcgatcctgacggtgagaggtgagcgatga

SEQ ID NO: 430040 - DNA, 903 bp, Serratia marcescens
atgaataaacaacgcggtatggcgctgttgatggtgttgctgatgatgtcgctgatggcgatcgtggcggtcaatatcaacgataactggcagcgttcgctggcgcgcacccagtctcagcaggatcggttgcgggcgaaatggttgctgctgggcggcgagagctacgcccggcagcggctgcagcaggcgggagagcagcggaaggcgtggggggcatcaggggtgaccttcagcatgcgcaccgaagagggggaagtggcgatacgtctgcgccgcgttgacgcctgtttcaacctcaacgccctgatccgcgccgccggcccggcggatgtcggcgatagcgaggggggaacccccaataaggagaggcgaatattcatgctgctattgaacaatcaggggatcgccgctgcccaggcgggcgcgattgccgatgcgatcgtcgccagagcctatggcgaagggtatctgatgggggatgtcagcgagctgcgggagctggccggcatcgaccgcgagctttatctgcgtcttgcgccgctgctttgtgcggcgccggatgccgagctgcgcctcaatccggacgccgtgaacgacgctcagctgccgctgctgcgggcgatgttgatgaacgcgctgagcgatgagcggctgcgggcgctgctggcggcccgtccgccgcagggctggcagacgctggcgtttttgtcgcaggagaaagcgctgcaggcgctgggcgaggatggccttggcgagcgacttattttcgacgataaccgctggattgcgcagctgcagcttaggctgaacgacggacgctatcggctggtcagcgcgttgcagccgggcccgtcaggcgtcacggtcagcggacgtcggttcgacagaggggaagggtaa

SEQ ID NO: 430041 - DNA, 615 bp, Serratia marcescens
gtgaagcgcgctttgcaacggggttttacgctggtggaaatgctgttggccattgccctgttcgccatgctgtcgctcaccgcattgacggtcttcagaggcgtgctgaaaaacgacgaaatcacccagcgcaaatcgacgcagttgacccagctgcaacgggcgctggcgatcgtcgagcgcgatttgacgcaggcgcaggcgcgcgcgccgaccggcgataaacgctggccggcggcgccggagtttgcggtgctgcagacggcgggagaggaaggcggcgattttcagctgctgctgatccgaaacggctggccgaatccccaggcccgattgccgcgcgccacgcaggagcgggtggcgtatcgctaccggcaggggcggctcgaacgcctcagttacccgaatttgagcagcccgcaggcggcggcgcgcagcgtgctgctgctgtctgaggtgacgcggttccaactgcgtttttaccggcagggcgaatggttgacggcctggcgcgccggcgggctgctgccgcaggcggtggagatcgtcatcgacacccccgcgctgggggaagtccggcgcatcgtcacgttgcctgccgcgaggccattatga

SEQ ID NO: 430042 - DNA, 423 bp, Serratia marcescens
atgataaccgtgaataacgaacccgttgagccgcaccttgaaagtgggcgtgagcaagtgcgccatggcgtctttccccaggaagatgacatcgagaaaattaacgacgcacactggtttggccgctatcaggcggcgaaaagcggcgaaaaggcgcgcgggtataaggtcggcgagtgggcgatcggcgccgagctgctggctaacgcgccggaggccgcggcgctcggcaagataaccggtctgctgttcagtgataacgccgaaaaaagcctggttatcgtggaacatggcggtaagcaaaccgggtatggcgttggcgatcggctggtcggcagcaatgccgttatcgtgcggatattaaaaaacaaaatactgctcgatgaaaacggttattacgccgcgctgacgtttaaagagtag

SEQ ID NO: 430043 - DNA, 780 bp, Serratia marcescens
atgcgtggatgtttgatttcaagaacgaaggactttaactttaatggtcaacgttatagggtttttattgctcatgacaagcaagcgcatggcgatttaaaagcgctttactttctcgatgccaatactcaattctccaagctgaccgaacgccatcagagtagaaacaacgacaatattctttatgtgggcatcggctatcaggatggggtggatatactaaaagcaagaacccgcgactatacggttccctctgatgataaagagtttattgacggtggcggagcgccggcattttatcagtttatcaccgcatgcgttaagccctgggttgagtcacgctactcaatcaatacagacaaacaaacgctggcaggtcattcacatggcgggcattttgtactttatacgctgttgaaccatcctgacgcgtttcaaaattatctagcggccagtccatcgatctggtgggggaatggggcgttgcttcctgatggcaagttaacaatcgctgaaagcgttaataaaataaccctgatgattggcgagtatgaagaaaaggttcatccgcaaagtaatgaaactgaaagagggcgggtgaccagaattaatgcaacacccaaattgcgagtcaggcatctggcaaaaaaactgatcgaagatgagcaacgctgtgattttattttctgctcagggcgtcgtcaccaaggggtcatcaaggattatgcactgatggcgaatgcgattgcggcgcataatactcaaagtgatgggctttag

SEQ ID NO: 430044 - DNA, 960 bp, Serratia marcescens
atgttggaatggaaaacacatcgcggctgtctgggcattttatttatcgccgcattccttggatacgggcgacgcgttgcggcattggagtgccatcttgatacggaaggagggatcaccgaagaaaccgagaatatcggcatagttaccgtccctgtcgatctgccgatcggtagccgattgtggacctcgaaggccatgtcgcgtggcgtggtgtgctgggcaggtaataacgtaaagggagagtgggtgcatttgtatggtaacccggtgggtgatgtagtacggccaggcattggcatggggttgatttacaacggcgcggatttggggatcgtacaaccgggtgataaggtgcagaccgacatgtaccgtaaaaagaaaaaacctgagaaagggatagttaattttcagatctatctggaaaaaaccggagacatcgctccaggtggtgatgatgccgtcgcggtattccaactggacggtaaggggggcatcaactccacgccgggaaaaaactaccgttatatcctgcaaggattgggggccattcagatctccacctgctcggtaagtattgacgcgccacgcgagctggatttcggtaccgtatcttcaacggggagagccggcgtgattgccacaaaaactctgacggtgacagcggttaaaagcgatgcctgcagtgccaatgatcaactggccgttgatctggtgttctcttcacccatggggggattggtggaaaacaattcggcaatggatatggacaatggtagctattttagcctcagcaatgcgggagacagggtcatattcgatacgccggtactgttttggcaaaatatacaaagcggcgatagccatcaggtgagttatcaggcagagttgaccgcgccagggccgttgcaaatgggtaatgccagtaaaagcatcgtggtttacgtgaattacagttaa

SEQ ID NO: 430045 - DNA, 555 bp, Serratia marcescens
atgagaatatcatcgtcgtacaccattgtgctaagagggaacgaagcgaaaaaacgtctcgagtgggcgtttgtttgccagcgcggtatacaagtcaattacttttttattcttggcttaaatacgctcatagaacaggagctgcatatcgaaaataaaatggcaggtggtgtcaaatatagcgctgcctgcagagtgcccatggggaaatatccgtctgacgcttctggctgggtgaaggtaacattgccgcggcagcgttcgctgatggaaatccagggagcgttaagcaaagcactttcatcatggctgtggcagggtgttctatcgagtaaggaaaaaagtgaatccaccgtttttttaacgctgcaggaaagaagagtgactcactatctgcgcgagggtttttctcaaacgcatacgagttttattatggggttaagtgtcaagacgataaatgcacataaacaatcattgatgcgtaagctagggctaaaaaataaccgagagttccagtattggctgctgggtggcagtgaagggttctgggggtag

SEQ ID NO: 430046 - DNA, 900 bp, Serratia marcescens
ttgcaatatgccagccacaccggttcgaatcacgcgtgttataccatgctgcgcgacacgctggcgacgatcgcgcaaaaaccgctggcggggtggggttacggcagttttgaatacggttatcagcccgttcgcatcaaccaaatccctgcatcggtgccaacagatatcgcacgacatccacatgttgggctgctgctgcggtggttggcaggtggcatcttcgcgttgctggggatgctggttttggttagagccggcgtgacgttggttgcgcaggcccgctggcgcgacagccgggccttcgcctgcggaaaaagatccgccggcgaggcgcaggctttgtgtctggcgctgttgcctatcgtgctgcatacccagaacgattatccgttccacctctcgccgttgcactggctggcgttgttgttgctggtggcgatgctcgaccgaatggtcagccgccgcttgggcccgacgatttccgtcaggcgttggcgctatccgatgctggggctggcattggccgcgttttttgtggcggcagcagggttttacggcggtcaggtgttgaacctggcggaacgtgaggggctgcggcatatgcggcaggcagaggcgttaccggtatggggcgactggctgtatgcggaaagaggggccttttatcatcagcaggccaccttgctggaattcaactggacgggtgatgagcagttgctggaaagctatgcgcagtgggcgcagggggctctcgctcaacatgtcgacaaaaacgtttatgccaacctggtgagcattttgcgccggcagcagcagtttgtatgggcagatgaactccgacgcgaggcggaacagctttttccctatgaccggcgttttgctcgctatggcttttga

SEQ ID NO: 430047 - DNA, 168 bp, Serratia marcescens
atgttgttgtctgcggttttggtgtggctgcaatcactggcgggctggctggcgggtgggttggtcgcgtcgctgttcggcatctgttttttttgccgccttcagcacgccgttgtgcgtgcgctggcgctggttagcgttggatctctggcggctgtgctgcgctga

SEQ ID NO: 430048 - DNA, 555 bp, Serratia marcescens
atggtattcgatcgcattttattttcatttgtttttttactttttattcccagcgcggtttatatccccgattcaaatagctggtgggtggcgccgtcatttgatctgctttttgcgttgggtggtgcactgttactggcggcaaactggcgttcggcgccgctgcggcgagtcgtggtcacgccaaccgtccggggattggcaggagcctgcgtcctgttggcgttaccggtgctgtttacccggcccgaatggcaaagtgccgccatttggcggctggcggcgttgtgcgcttgggttgcgttttacttcacctggctgcagctacgtatgaccgcccggcaacggcatcgggcgctctatctggtcttgttcgtggcgctgatgcaggccgtgctggtgccgttgggggttgtttgcatcgaacattgccggtgcgtggtggcagcccggtgttcgtcgcgccttcggcatttttcagcaaccgaacgtaatggcaagctttctcgcttacggccgagcgctggcgtcgctgcctgctggcagcatgcctga

SEQ ID NO: 430049 - DNA, 717 bp, Serratia marcescens
atggccaccataacgcgactaatagcgtatgcgatgataactatccctggactatgcgccggatccattctgtttgacccctcgatacccttcataaaggggaccgcacactgggcaaacgagggtctgacacatgaccaacagcctgggggctgccggataaccgcacatgatacaaatggatgggcttacttcagggaatacgatataggcggtccgtgcaacccggctgaacctgggggcagcattaactggttgcgcggattgatcgcaggcggcgttgtgctcggaaacaaaatgtctgaaattcccgccggatcccggtacgtcgttttatacgtgccagtcgggagagacgcatggactagcgtctcctttgacgtctacatcggcaaacgcactcggtgctccgtcgtaagcccgggcaaactcgatcatggtacgatccctgaacacgaagctgacggccactcaacgagtataaaagctgaactaacatgcgatggaccggccgacgttgtggtgaccggcgaaccgcggaaaatcaagatgaccaacggacagacatccaatatccttgtgaacggccaggagaaggcgacgatcaaagctgatgacggcacaacgacgtttgatatctcgagtaccttgtctggtccggtctcacaaccaggcgcggcaaccggggttggagtgctactgtatgacgtccagtaa

SEQ ID NO: 430050 - DNA, 990 bp, Serratia marcescens
atgaatgacagcatcgccgcctggcaggcggcctggcactggctatgccagcggcggtggcatgtgccgccgaacgccgatatctggcatctgcgcttccattgggcgcagcagggtgaggcgctttttcagcgggtgctgagcgggcgttatcgtctggcgccgatgcaggtgtttcaccgccagggccgcagctgggcacagtggagcgcacaggatgcgctggtgctgaaatgggcggcgctgttggccgagccgctgttgccaaaaccggcgcgctgcgcacatttgaaagggcacggaggggcgcgtgcgtcgttaagcgaggtaaggcacgctttgcgcagcggtgaatatgcctttgtttatcgcaccgatatcaaaggctattaccggcatatacgcaaacggcaggtaatgaatcagctgcaatggcatgtggcggatccggtgctgcgcgggttgattaggcagtatgtctattacagcgttgaagagggcggtgagttttataccccgcccgcggggatttgccgcggctgcgcgctaagcccgcttatcggcggcagcctgctgcgccatatcgatagtttttataccgggcaggagggcgtgtggtatgcgcgctatatggatgattttttattgcttacccacacgcgccggcaactgcggcagtgcattaagcggctgcatgaattttttgacctgggcggatttgaaacccatccggataaaacccaactggggcgaattgagcgcggctttgactggctgggcgtgtggtttagcgcccagggcgccaccatagcatgggaaaaccatcgggcacagcgcgcgcggctttatgagcaggcgcgccggcgggggctgccaatggcggaaaccgaacggcgggtgcgggcgtatgaggctcggtggacaatatgggcagagagtatgctgagccattcaatggatggtgatgggcgaaatctgccagataattag

SEQ ID NO: 430051 - DNA, 534 bp, Serratia marcescens
atgaaacgggggactctgatggcgaatggcggtgcagccgcgttgctgttgctcagtgcgctgagcggcgcggcggacaatatgcggtttcacggtgcgttagtggcggagccgtgcgtgatcccgccgggggaagagacggtagtgctcgattttgacaccgtgatcgacaaatacctatatctgaatacccgcacgttgggcaagcgctttgatatccacctggccgactgtgacctgagcctcggcaaaacggtgagtgtaaccttcagcggtacggaaagtgcggcgttgccggggctgctggcgttaagcggccccagccaggccagcggcatcgccatcggcatggagaccaccgacggcgcgctgttaccgctcaatcaggccggcaaggcgcaggcgctgaacaacggcagcacgatactgacggcgcaagcctatgtgcagggcgagccggaggcgttaaaaaaccagacgatagcgcgtggcccgttcagcgcggtggcgacctttagcctggaatatgaatga

SEQ ID NO: 430052 - DNA, 504 bp, Serratia marcescens
atgaagggggcgcagggaatgaaaaacggcagccgtatttttctgttggcctgcggactggcctggggaggaggggcagcggcggcggacaatatgcgcttttccggcaccctgatcgagccgccggcgtgcagcatcaacgatggcggcacggtagacgtggattttggcgaccgggtgggggtgaaaaaagtggacggcaataactatttgcaaccggtgaactaccaaatcacctgcgacccaggccctggcggctggaatatgacgctggaggtggtgggcagagccgcagattttgatccggcggcggtaaataccaatgccgataacctggctatccggctgctgcaaaacggcgcgcccttgcggttgaataccccgctggccatcaagctgaacgccccgccactgctggaggcggtgccggtcaagcggccgggcagcgagctgagcgaaggggcgtttgaggctaccgcgacgctgcgggcggtgtatcaatga

SEQ ID NO: 430053 - DNA, 501 bp, Serratia marcescens
atgaatactacctttatacgccgtgttaccggcggcggcctggccgcgctgatgttgctgagtggggggcaggcgctggcggaaaatacagacatcaaagtgacggtgaccatcgtcgcaccgccgccgtgcgtgattaacggcgacagcctgatcgaggtcgatttcggcaacgaggtgatgaccacccgcatcgacggcagttataagaagcaagcgataaattacaccgtcgagtgcaaagacgcgccatctaacgccatgaaactgcaaatccagggcaatggcgccggtttcgacggcgacgtgctgcagaccaataagggcaacctggggatcgcgctactgcgcagcggcagttcgcagccgattaacgagtggattaacttcacctatcccaatttgccgcgcctggaggcggtgccggttaaaaaagctggcgccaccctgacgggcggggcgttttccgccggggcaaccatgaaggtggaatatcaatga

SEQ ID NO: 430054 - DNA, 654 bp, Serratia marcescens
atgggaaggagaatcaggcggttttacggcggcagccatcgccatgaatggctgtacgcgctggttatcacgggtctgctgctgatggtgccggtgtgtctgtgcatgatgctgtggctggtttcgggcgcgcacgcggcggacaactggcaggtggaaggggcgcacggcgtgctgcgggtgcgtggcgaactgacggagggcgcctgccggctggagatggattccgccgatcagagcattgcgcttggcagcacgccgagcgcggccctgacgcgggccggcgatcgcggtgtgccggtggccctgcagctgcggctgcgggattgcctgcgcagcccggcgcgtaaccgtgatgaacgcagcggcaatctgctgtggagtgcgcagcaaccggcggtggcggtacgctttatcgcgccggcggatgccgacagcccgcagctggtgaaagtgtatggcgctaccggcgtcgggctgcgcattaccgacgcgctcggcggcgatattcgattgggcagccgcggggtggcgctgccgctggcggtggggcagagcgcactcaattatcgggtggtgccggagcgcacggccgcgccattggtgccgggcgcttacgcggcgcaggtgaacttccagctcagctatgactaa

SEQ ID NO: 430055 - DNA, 750 bp, Serratia marcescens
atgagaaccaacaccactgtaaccatgatggccggcgccctcgccggattgctgggggcgcagcaagcatgcgccgccattgcgctggaccgtacccgggttattttcaacggaaacgacaaatcggtgagcctgagcgtcagcaaccagaataaacaattgccgtacctggcgcagggctggattgaagacgccgaaggcaaaaagatcagcagcccgctcacggtattgccgccggtgcagcggctggagccgggcgccaagagccaggtcaaggtgcaggggctgccggcggccaacggtctgccgcaggatcgcgaatcgctgttctatttcaacctgcgcgagatcccgccgaagagcgacaaacccaacaccttgcagctggcgctgcaaacccgcatcaagctgttttaccggccgaaggcgatcgaggtggtgaaccccgagagcgtcgcgccgtggcaggaaaagctgacgctgaccaaacagggcgacagctacagggtggacaatccgacgccgtattacgtgacgttggttgacgccagcagcaagaaggacggtgccagcgctgcgggcttcgaaccgctgatggtaccgccgaagggcagtgcgccactgaaggtggcggcctctgcgctgggtagcgcaccggtgctgacttacatcaacgactacggcggccggccacagctgacctttacctgtggcggttctgcctgccgggtcacggcggccggcaaataa

SEQ ID NO: 430056 - DNA, 2532 bp, Serratia marcescens
atgtctaccactgcgtcattgggctgtataaggaaaatacgaccgcaacttttgggggggttgatttctctgattttggctggccatagcggtaaaagcatggcggcggatattgaattcaacaccgatgtgctggacgtgacggatcgcgccaatattgacctggggcagttctcgcgtggcaactttattatgcccggcgattatttgtttgccgtgcatatcaacaaacaaaccttaaccgatcaatcgatagcgttttatccgccggataacgatgcgcaaggtagtgaggcctgcattacgccgcagctggttgaacagctggggttaaaagaatcggcgttgaaaaagctccgctggtggcatcaggagcagtgtctggatcctggcagcctggagggcatggaggtacgtggcgatctgggtgcggcggcgctgtacgtgaatattccgcaggcgtatctggagtacaccgccgacaactgggatccgccttcgcgctgggacgacggcattccggggttgttattcgattacaacctgaatgcacagagccaataccggcagaaacgcggcaccagaagttacaacctcagcggcaatggcacgctgggcggcaatttaggggtctggcggctgcgtgccgactggcaaacccgtttggatcatcagagcggctcgggcgagccgacgcgcacccgctgggactggagccgttactacgcctatcgcgcactgccgaagctgggcgccaggctgacgatgggcgaggactatttaaactccgacatcttcgacagcttccgcttcaccggcgccagcctggtgaccgacgacagcatgctgccgcccaatctgcgcggctatgcgccggaagtgaccggcgtggcgcgcagcaatgcgcgggtgatcatccgccagcaggggcgagtgctgtatgagacgcaggtggcggcggggccgttccgcattcaggacatcaatgacgcggtcagcgggcagctggacgtccgggtggaggaacaggatggcagcgtgcaggaattcagcatggataccgccaacattccgtacctgacgcgccccggctcggtgcgctacaagctggcaacggggcgacctgcggactggcagcaccacgttaacggcccgctgttcggcaccggcgagttctcctggggggtgagcaacggctggtcgctgtacggcggcggcgtggccggcggcgactataacgcgctagcgctgggggtggggcgtgacctgatgatgttcggtgcgctgtcgtttgacgccacccagtcccgcgcgcgcctgccgcaggagagcggtacgctcagcggtggctcttatcgcctgagctactccaagcgcttcgacgaatacgacagccaggtgaccttcgccggctatcgcttctcggaacgtaactatatgtcgatgggggaatatctggatgcgcgcacctacggcacgcgcagcaatcgcagcaaggagatgtacaccatcaccttcaaccagcagtttcgcgatctggggttgagcgcatacctgaattacaaccaccagacgtactgggatcggccggcgaacgatcgctacaacctgacgctgtcgcgctatttcgatctgggcagcttcagaaacctgagtttgtcgctcagcgcgtttcgtaacaaatacaacggcaacaacgacgacggcatgtacctgtcgctgtcgttgccgtggggcagcaacggcttgctgagctacagcggcagctatagccgcagcgacaacacgcatcaggtgggctattacgatcggctcaatgagcgcgacacctaccagctgagcgccggcagcgcgcgcagcggcgccaccgccagcggctattacagccaccgtggcgatctgaaccagctgaatgccagcgccagttaccaggccgggcaatacagctcgctgggcctgtcgctgcagggcggagcgaccgccaccctgaaaggggcggcgctgcaccgcaacaacgtgaccggcggcacccgcatgctgctggacaccgacggcgtaccggggatcccgatccgcggctacggcacgccgaccctgagcaatgccttcggcaaggcggtggtggtggacgtcagcagctactaccgcaatcagtacagcatcgatctgaatgcgctgccggagaacgccgacgtgagccaatccgtgtcgcaggccacgctgaccgaaggggccatcggctatcgccacttcgaggtgatcgccggcgagaaggcgatggcggtaattcggctggcgggtggctccgctccgccgttcggtgccacggtgcacaacggcaaaggccaggaggtgggcatcgtcaacgacaacggcgaagtgtacctcagcggcatcaacgccggcgaaacgatgagcgtgagctggagcggtgcggagcagtgcgatattgccttgccgcagtcgctgtcacctaacctgatgagcaatttgttactgccctgcggcccgcgggccggcggcaaatcctga

SEQ ID NO: 430057 - DNA, 540 bp, Serratia marcescens
atgcctgaaaataaaaaaatagggcgcatcgcgctatttatttcatgtctattttgctctccatggggatgggccgctaatcaggggcacggtgaggtgaccgttaatggccgcatcattgcctcagcctgtgcgattgatacgcaaagccgtgatcagaccatcaccatgaaaacattgccggttggccagattattcgcgacggtcagggcgagttgcaaaaatttactattaagcttgtgaattgcgtgttggaaaaaaccaaccccaatcaggatgactggcgttattttgaggttaccttcgatggtaaagcggatggcgaacggttcggtatcgacggcggcgccaaaggaattgcattgcaaatcagcgacgcgctgggaaatatcgctatgccgggtgtacctttggtgaagagagatatccagccgggcgtcatggcgctgaattatggcctgcgcgtggtcggtaattatcaggatttgagagcgggtgattatttttcaaccgtgaaatttaaaatggattattactga

SEQ ID NO: 430058 - DNA, 531 bp, Serratia marcescens
atgaaattgaataaaatcatgctgaccgtggtaatggctctgggtaccatctctatggcgaacgcggcaaatcagggtagcggtagcgttacttttaaaggttctattgttgctgcgccatgctcgatcgagccggaaagtctggaccagaccgttgcactgggtgatatcgcatccgcacaactggcaaacggtggtaaatccacaccgcaagatttccttattaagctggtcggttgtgaagtagaggagaatgtaacaaaaaccatgaccaccacctttacgggtgctgaatcagcagctgctccagggttgctggcgatgaaaggttctgcgcgtggcgccagcattgctattaatgacgtagatggcaaactgctgaaattgggtaccgcaagcaaagcgcaagaaattactaatggccaaaccacgctgcgtttcagcgctcatctgcaaggtgacggtgcttccgccgctattactccgggcgagttctcttccgtagctgactttaccctggcctatcagtaa

SEQ ID NO: 430059 - DNA, 819 bp, Serratia marcescens
atgaaatacataattaataaaactctcgttttcaataccgatgagcaaacacttgctctttatgaaaacgctctgattgtcaccaggctaagcaaaccggcaggacggctgctgttggagttcatacagcacgggcagcagatcgtttcccgcgaggaattattgacgagagtgtggacacaccatggctttagcgcttccagcgccggtcttaacaactatattagcgagttgcgcaaggcctttgttttattgggctgccatcaggaacttatcgttaccctgcctaaaaaagggtttcgttttgaagcggatattcagctcgatacattcatagcggaggaaccccaggatttcccccgtgaggacgaagaaaaaaatcccctaccggttgcagaagtgccagatgaagtggacttccctaaaaaaagcgccataaatgcggccagaaaaagtctatgccggaagaggattaccgtttcatcagtctgtatcatactgattatttccggactttatttctatctgggcaacaacaacaagcgttacccttaccaaaagatagcaaccgtggataattgcgacatttacgccgtaggtaaaaccaatgatttgtcaattgtaaaaaatatcactaattccatattgaaacgcgaggaaataaactgcacccatgataaaaatgatgttttttatatggaaaatagacttgataaaaaaaacctcgtctccgacctaatctccatttgcaaaaaagatgaaaacgatcggtacgatacttgcttaaacataaaaaaacagaggcgaaccacaaaatga

SEQ ID NO: 430060 - DNA, 468 bp, Serratia marcescens
atgaaaaaaatactaataccgctaaacgccttactattcttgttgtttttctcttacgaaatgcatgcagaggagccctttaaatgcagttcacacttcaagtctcttgtcgaaaaagataatgactacatgttttttgatggtcagttatacttattcttaaaaagtgaacaggagggtttcttctcgctttctgggaatgtaaaaactaaagataaaaattatattctttctcgcatcagttatttcacctttgccccacaggaaatcaacagtgtcaaacagacaaaaatcgtgaacgtggtcaaacgccttatcgataccacgccggaaaatatctggcagcccgaccttatgccggaaaggccaggggtcgatttccatattgaaatctggccactcaaggataatctgttgttagtgagatcactcaacaccaactaccttatctgtgctaaaagcgagtag

SEQ ID NO: 430061 - DNA, 228 bp, Serratia marcescens
atgccatttgttaatgtgcaaacggtgaaaggcatgctggatgaacggcaaaaaagcgagttgctgtcctgcattaccgaactgctggtagagatagaagggcgaggcgatccggcgttcaggcagtcggtttgggtccgaatcgatgaacatgcgcccgaacaatggagcctgggcggcgtacagccgacggcggcgatgattgccgcgaagttcccgccgcgttaa

SEQ ID NO: 430062 - DNA, 468 bp, Serratia marcescens
atgtcaaaatctcccgatctccctaccgtttctcttgccctgtgcgggctggcgcaggccgcggatctgcttggcgatcgctggacgttactgatcctgcgcgagtcattctacggcgtccgccgttttgaagagctgcgcgagaatatcggcgcttcacgccaggcgttgagcaaccgtctgaatgccatggtagaacaagaactgttggccaaacgcgcttaccgggagccgggcgagcgcgaacgacatgaatatgtcttgacggacaaggggcgcagcctggggcctatcctggttgcgctgatggcatggggccaccggcatattctgcatgacagcccccacgttcaactggtggataaacgcagcgggctgccggtgcagctggcatttatcgatgcgcaggcgcacgtagtgcctgaagacgcgctgcaaatgtcggccgttgagctccccccggcctga

SEQ ID NO: 430063 - DNA, 1041 bp, Serratia marcescens
atgtcttctttgttaaagcacaagaatctcgggttggcggctgggctgctggtcacgctgggcgcgttttctcagagcagctatgcgctgtcttgtaagcagaacggcagcattcgccaggatatcgtgctggataaagccatcaaggtgtcgaccgccaacaccgcgccgggcgcgttgctgtggcgttcgcagacttttacttctaccttccaatgtacggatgactggaacaacccgaaaggggagaacgcctacctgtactgggatccgcagtcccggatgagtcagatccataattcgatcgaagtgggtgtcacttatcaggggattgatgtcaaaccgactaaaggcgcacgtcaggacgtcggtcccggcacggaatgtcgccgttcgggcagccgttgtttgtctccggccagatcgctgacggtaaccgtgtcttacgccatctacattaaagcaaccggcaaggcgccgccggccggcggcaagatcaacgacaacaactcgtactcggtatttcaggttgatggcgtcggcggcttgaacggcacgccgaacagtaactttaacgcctacatttccgggctgggcaacattcagtttatttcctgcaacccaaaaattactgtggtggccaacaacggttcgacggtgaatttcggtactatcccgcgtcagaatgcggtggtgggtaaaatcgagaaacaggtaccgttctcggtggccgccaatatgtccgatccgacgaccggacaggactgccagggggagacgctgcaggccagcttcagcaccacctatccactgcaggataacagcgtgatcctgccgaccagcgacagcggtttcgggattttgatctcgcaggcggcgacgccgaatacgccgatcatgatgaacagtccggtcgatctgggcctggtcaacggcaccatcgttgaaaagaactttatggccagcctgaaatggttgagcaccaacccgaaagtggggccgttcagcgcatcggcgaatattgacgtcaccttcaaataa

SEQ ID NO: 430064 - DNA, 654 bp, Serratia marcescens
atgtcaagaataaacttggaaaatggcggcagcaccgcacaatcggtcagtgaccgtttgctgacgctattgaagacccgcggcccgcagcaagcctcagacgcaggaaaagtgctcggcaccaccggtgaagcggcccgccagcagttcgtcaagctggcgaaagaggggctggtcgaagcgatcgcggaaacgcgcggcgtgggccgcccggtgcagctgtggcatttgactgccgccggtaacgcacgctttccggacacccatgcggatctgacggtgcagctgctgcgcaccgtgcgtgacaagctgggtgaacaggcgatcgacctgctgatcgagacccgtgagcaggaaaaccgcatcaactacaagcaggcgatgatcggcgccaccgatctgcgcgaacgcgtggcgcgtctcaccgagatccgctgccgcgaagggtatatggccgaatggcgtcaggaggaagacggcgcctatctgctggtggaaaaccactgcccgatctgcgccgccgccaccgtctgccaaggcttctgccgcgctgagctgagcatcttcaccgaagtgctgcaggcgcaggttgagcgcgccgaacacattctggccggctctcgccgctgcgcttaccggatttctctcttgtaa

SEQ ID NO: 430065 - DNA, 924 bp, Serratia marcescens
atgcttagccaacaaagccgtagcgtcctgccgttgatcggggcgttgttcacgttatatatcgtttggggttccacctatttcgtcattcgtctgggcgtcgaacagtggccgccgctgatgatggccgggattcgctttctgctagccggcatcgtactgttcagtttcctggcctggcgcggccacgcgctgccgacgccgaagcaatggctggccgccggcgccatcggcattctactgctggcggtgggcaacggcctggtgacggtggcggaacaccaacacgtgccgtccggcatcgcggcggtgatggtggcgacggtgccgctgttcaccctctgcttcagcctgctgtggggcatgcgcaacaccaagctggaatgggccggcatcgcgctcgggttggtgggcatcgtgctgcttaataccggcaacaacctggtgggcaatccgaccggcgcgctgctgattttgctggcgtcggccagctgggccttcggatcggtgttgggatcgcgcatctcgctgccggccgggccgatggccggcgcggcggagatgctgctcgccggcgtggtgttattggcagccagccagctgagcggcgagcgcctcgttcagatgccgagcaccggcggctttctggcgctgggctatctgatcgtcttcggttcgatgctggcgatcagcgcctatatgttcttgttgaagaacgtgcgcccggcggtcgccaccagctacgcctacgtcaacccggtggtggcggtgctgctcggcatcggttttgccggcgaatcgctggcgccgcgcgagtggctggcgctggtgatcatcgtggcggcggtggtgctggtgacgctgggaaaatacctgttcgcccgcccggccaacgtacaggccatcgactgcgaacggcggtga

SEQ ID NO: 430066 - DNA, 1332 bp, Serratia marcescens
gtgaacggccgctggcggagagcacaacagctgtgcgttatcgcgttggggatcttctcctgctcggtcttcgccagccagaatgaccaacaggtcatcgcacggggaaaatatctggctaccgccgcagattgcgcggcttgtcaccgcggcagcaatcaacaggacgccccctatgtcggcggttatgccatcgcgtcgccgatgggcgacatcatcgccagcaatatcacgcccgccaaaggaaccggcattggcgactacagtgaacaagagtttcgccgcgcgttaacgcagggcattcggcgggacggccaacccttgtatcccgccatgccttataccgcttatcgggggctgagtgatgacgatctgcacgcgctgtatcgctattttatggccggtgtcgcaccggtcgatcgtgcggtgcctgagacccaactgacgttccctttttcctggcgttatgcgatccacggctggaactggctgtttctgaaaaagacgcccgtcgatgcagacgagaggaaggcgcgtggccgctatctggtggatgtgttggggcattgctcggcgtgtcacagcccacgtaacgggatgatggcggaacgcggcgatcgctatctggcaggaggagaagccggcggttggatcgcaccgaatatcacctcggatcccgtgagcggcatcggcggctggagccagaaagaattggtgcagtatctgcgtaccggccgcaatgacaaagctcaggctgccggcggcatggcggaggcggtggagcatagcctgcgtttcctgagtgacgacgacctcggcgccatcgccgattggcttaaacaaacgccgccgatcgtcaccgtacaaggaacgaaagcggcctatcaatatcaggggggcggtaaaggccgtgccgccggacaggcgctgtatgccgtttcctgcgccagctgccatcgtctgggcggcgagggggcttatgacggccatttcccttctttgacgcacaacaccaccgtaggcagcgaacgggccaataacctgatcatggtgatgctgtatggcgtgcagcgtcagggggagacgctgcagacctggatgccggggttcgccgatagtctggatgaccggcaactggctgaattgggcaattacgtattgcagcaattcggcaatccggcggtcaggataacgccggagcaagtggctctgcagcgggcgggcggtgaaaaaccgctgttgattacgtcattgccttatgtgttctggggcggcgtattgctggtattgatcgtcattggggcgtgggtgaaacgtcgggtgaagcactga

SEQ ID NO: 430067 - DNA, 603 bp, Serratia marcescens
gtgaacacggtcatcaatatcgccttcctggatatcgaccgcttttttgtcgccggggcgtatcgggcgttgagcgactattttagtgaacgtggcatcgaggcgcgctgcagcgagccgatgaatgccgaccttgtgttccaggcgatcgccaaaggcgacatggcgcgtttttgccatcctccccatgctcctcacgccctttatctcgccgtttacgatctcagagaagcccgcattcgcgccatttcggggtgcctgagggaagcgggcagggtgtaccgcaatgaaggcgtcgcaaagctgttgcacacggtagcgcgggtgataaaaggccgaaccggcggcgcctgcggtttttcttgttgcgcctggtgccagccgttgccattgacgccgcaggaaaaacaagtgatgcgttacctgagttgggaaatgacgccgaccgccattgcccgtcggcttcgggtcagcatcaagacggtgagcacgcataaacgggcggtgatgagaaagatgcattttcagcgcgatgcggagctttaccgctggttgcgtctggggggattcggtcagggaaatggcgatagccacgtcgtctga

SEQ ID NO: 430068 - DNA, 1287 bp, Serratia marcescens
atgtctattccatgtttaaagttcatggtgatggtctatgtcagcgtattgattttgttgggtggctatatttatcactatgatatgaactatttctcgctgacgtttccatattctcttgtgattggggttgtgctgtttgctttattgggcgtcggcggcgcgctcctttttttgcgaaaagcgtgggggatgacccccgcgtgttttttctttgcgctgggcgcggtgatattgctgctgccccttttttattctcgtgccgagtggggcgtgcttaccgtggggcgaatggcctgcctgtttggcagttggattatttactttatcctattgcaatatcgggtcatgcaacacgtgcgtattgcgtttatctatacgctggtattagccgcagccgtgggaggcatttggcttttttcctccccggccgaggcggcggcaggctatgccggcagcggggggcgttggccggatgccgcgagcagtttattggcgagcggattattggcgggatggggtctgacggtgttgcctcggttccgcatgttgcgccgagataacgagcgatggcgtattttactcttgctgccgctcttgatcggtttatccgccgcgctgggctggggggcatcgcagaccgtttgtctcagcgtgctattgggtgccgcgctgttgaccgtgatgtttgtgcgcagatacccgctgcattgcgtgctcgcgctgctgatgacggcattgggattctgcctggcgatattggcggatgaattgaacgccggcgttcgtttgtcgaatgccgcgccgtgctgcgatacgctgcttgactcgctggcgctggtggtagagcggccctggttgggatggggctatggccgattcgagcatggctttgagcatttacaggcccatgcgctgcccgcggtggcgcgggcaggcgcagcgcggcaaccctataatgagctcctgctgtggtggatagaaggcggcgtcgttgcgttggcgggcatgctgtgcctgctggcgggcgtggcggcgctggtgcgccaaacatggcgacgggagcgcatcgccgcccgcttgcacagcccggccgccggggaagaggccgcgttggcgacgagcggcattcccttgctgctgtgcgcgcagttttcctacccgttcgggctgtcgctcatccaatgggcggttttgacgctgctgctcgttacgttggatgggcgcagcaggctcaatgccggccggttttgccggtttgttttcgcgcggagggaaacggcgtga

SEQ ID NO: 430069 - DNA, 804 bp, Serratia marcescens
atggaatacgtcattaatcagatgattattttctcacctgccgaacgcgcattgttcatcatcaatgaacgggaatcttttatgccgttatctaaccctgccacccgcttgttgttagagttggttacccatcataaagagatgctcacccgcaggcatttgatgcagcgggtctgggaagataatggttttgtgggttcaaacaataatctgaatggttgcatcagtgagataagaaaagcgtttgaatcgctggcgctggatccgcaaatcattattaccatccccaaactggggttcattcttgaagcggaaattacctcatgcgaaaacatgcgctcaccggaaaaccaaaaagcggttattcccaccctgttgacccgggccggcgcactgttaaaacggcgtgggaatatctgccaggcaaataaagcgccccttgccgcagcattgatgatgattgcgtgctttagcctcgtctgcgctttattgtggttcaaccggccggttcacgcgttcaaaaacgcccaggtcgattttttttatcgccatgagcagtgcaacgtttttacgttggaaaccgccgcgctgaacgaccggcgtgaaacgcaagcgcaaattgccgctgcattgaaagctgaagcgaccgactgcggcacaacgcccgccgatctgttctacaccaaaatcgccaaccccaatcttccttttcaggtcaccttcatcgccatctgcaatctggcgcaacccggtcaatatggccggtgccgcacgatcaaaaacaccgacggtatgacgccatga

SEQ ID NO: 430070 - DNA, 516 bp, Serratia marcescens
atgaacaaaaaaacacgctttatcgtcggcttgttattgctgatggcacccctggcaagccaggtcgcccagctgtcgcaccatcctaaaaccttactgcgttgcgaagcggagatcaccgcgcgcaaccgctatggcccagccatggagcccgccgcggttttaaaagcaaagatgtattttttcctctaccacaacggcactggctttatcaggctcaatggctttatcgagcgacaagaaaagacctatgtgctgaaccgcgaacttcactatgtgtatgacacccccggcgatgaggcggctgaagaggatggcggcggcgatgggtacacgctacgattcgccgccgaccgtaaacatgccggagatacggttcccgcccccctttgggcgacctttttgcagtcggaagatccccgaatctcctaccatgtcgccgtcgaacacgtactcggcaacctgtatgtggtcagtacgcttcaaagcccgacctttgtctgccggcgttattag

SEQ ID NO: 430071 - DNA, 852 bp, Serratia marcescens
atgagaaaattcgtaaaatacctctataaggtttcgcctgactttatttattatcagctgtcgcattattttgctcacggaagctttgtcaactttttgaatcctaaaagtttttccgaaaggatttaccacagaatgcgctacccgcgcgaagagttcagcctgttggcggacaaggtggcggtgagggattatatatccagtcgcgtttcggaaaaatacctaacgccggtcatcatgataacggagaacttcactgagcaagactatttgtcgttgcctcaatcttttgttatcaaaacaaataatgcctcgcagcaagttaagattgtcagagataaagcgcgagtgagttatgatgaggttgcaagcactctcaagaaatggtcaaaaataacgtattggaagcgctttcgtgagaagcactatgcgaagatcccactgcaaattgtggttgaaaacctgttggacatcgaacgcgacggtgaattgatcgactataaagtgcatgtttttaacggcagccagccttatctgttcgtggagttgctgcggggcggcccggagccgacgtcgctggagtttttggaccgccatgcgcatcactgcttttttacccagaaagatattccccagatcaacacgttgcacgcgaagcctgacttttgggatgagatgattgaggtcgcccaagccgttgccgccgatctggactactgccgggtcgatttctacctgacgcaagacaggctctatatcggcgagctgacgctcacccccggtgcaggcaatgaagtgtaccaaccgcgcgccacgaacctgctgctgggcgagctgatggccaaaacctga

SEQ ID NO: 430072 - DNA, 1290 bp, Serratia marcescens
gtgaaactaaagatcatagacttcagcataataagaaacgcttcctggatgatagcggaaaagacggtatcaatcctcggcgttatattcatcaccgcctacatggccaaatatattgggccggaaagcttcggaaagattacctttgccacggcgattttcgccattacccaaacgttggcgctgctggggtcggacaccatcctcttcaaacgcattagccgtaatccgcgctccggcgcagcgctgatgttctccaccaaccggctgaggcaagcctgtttcctggccttttctgcgatcatcttgctttataccgggctgcgggaagacttcacgaccttttacttttgcgccgccacattcctggcctcgtttttttcactcaaagacgtcttcgccatttaccatgacgcccggctggaatcgcgtttcaataccctggccaacgtggccggcttagccagcgcattattggctcgctggctgatcgtgttttttgatctgcacctgtactttctggccatccctatcgtgatggtgtacctcatcccctatctgatccgtcatcacctttatcatcgccgccatccgggcttttcggcccccggccgtattcggcgcaaatatgtgcgctatctgctcgccagcggcctgccgttggcggtatccaatgtttccatcgccatctatacccggctggcgcagctgtttttgatgtggttcgtttccgccgcggtgctgggcatttactcggtcgccattaccctggcgaccgcctggatgttcgttaccgatgccgtcatcacctcgttcttcgcgaaaatattcgcctatcggcgcgaagacgcgatgcgcgccgcggccaaactgaatgggttggtgctggccatcgccttagccatcgtcgccgggatcgtttggctgggcaaaccggtcatcgcactgttgtacggcgagcaatacctggcggcctatgccgccatgggggtgttggccgtcgccaccctgctctccgccctggggaccgtggcctataaatacatcgtgctgttttccggttacagcttcctttcccgcaaaatgttgttggtgtttatcattaacattcctctgtcatacggcctgattcggcaatacggcatgatgggcgccgcttacagcaccttgctgaccgaactgctgtcattgaccgtactcaactatctctttcagcggggtgccgtactgaaaatgcatctgcgctcactgaacccggcgctttacctaagacgcccgtcgggaaagtaa

SEQ ID NO: 430073 - DNA, 1542 bp, Serratia marcescens
atgtcactccgctcacggcgctgggttatctcgctgtttatcctgttggcctggggcagcggctggctgatgctgtggacgctcggcttctatctgacccacaacggcaatcaggcggcgctgtttctgccccacggtgtctatctcgcgctgctgatcttgctggcgcgccgctattggctcgccctgataataccgccggtgctgctgctgttctggctgcacggcgaacgcctgctgagcggctatggcctgctggccgcgccgttcatcaccctgctcccggccgcgctcgcgcagcgattctggcgccgttttccgctctactggcaacggctgacgctgctgctggccgcagtgaccgccgcctcgctgctcaataccgccctgctgtcgcctttcgcgcagagcccggcgatgctgctcggcctggcgtcgtttaccggcggtgttttgttgaccccgttcgtctacctgatctttgaatttctgcgccagcagcaccgctaccatctgctggggctggacaccgccaacccgccgctgcgcgcgtccttaatcatctggtgcagcctgtttttcgttatcggcatcggtacgcagatggtgctgtcgccggaaatcgagcgcctgctgctgatcgtggtgtttttgccgaacgtggtgatggcgtggaagttcggttggcagggcggcgtgctgtccggcctgctcggcagcatgatgatcaccctcgcgcggcaggtcggcgtggggttcggcaatctggtcgagctggaaatctttctggcgacccaggcgctgctcggcatcggtctgggcattgccatcagccgtcagcagcacctggcgcaaaacctgcaccactatcgccgacgcctggaagaagagttggcggcgcggcgggcattgaccgaaaaactgatccacaccgaagaagacacgcgaaagaacctggcgcgcgagctgcacgatgaaatcggccagaacatcaccgccattcaaattcagtcgcagctggtcaagcgggcgcgcgatccggcgcaaacccaggccgccgcgaaccagataggcgatctcgcccggcgcattcatcactccacgcgccagctgctgcgccaacttcgcccgcccgcgctggacgagctggcgttcaaagacgcgcttcaccacctgctgagcgaattcgcctttagcgaacggggcatccgttgccgtttcgactaccgcctgaccgacacgcccgccggcgagacggtgcgcttcaccctctaccggctgctgcaagagctgctcaacaacgtgtgcaaacacgccgaggccagcgaagtcgccatcgttttgtatcagcaaggcgccatgttgcacctcgaggtacgggacaacggcgtcggcatccatgcgggcaacgcgccgggcttcggcattcagggaatgcgcgaacgggtcagcgcgctcggcggcgaactgacgctggaaacgcagcgcggcacccgggtaattgttaacctgcccacaaatttgcaacaaaccgccgactaa

SEQ ID NO: 430074 - DNA, 1635 bp, Serratia marcescens
atgacagacaacaacgcggcatttattcaatacgcggatttgcgcaacaaaaactggagcctgcaggaacgtcttaatattgaaggcatttacgtcagttcgcgcgacgaactggtcggcgcacaagactttatcatcaaaacgttaaaacgccctgcgattgtcagattcgccgcgccttttgccctttggacggcgcctaaaaccgatatcaatgtcggattcgtctatatcgacggcaacggcgtcaacgtcactaccgagatccccaacggcacggaaagcgaccataactatttcctgcgctgctataccagcaacggcgcgctggataacaacgttcctattcgcccggcgcctatcatgaaagatttcaccgtaaagggcatcggcgccaggattaacaacagcaaagatgaaacgacgatcgaatacacctatatcgacggcgtccgtttcgattcgcctgaaggcccgctgggcaacttttccgtcaataacgtctatatttccggcttctactacggcctgtactacggtaccaatgcctatatcgcccaccactacgcctgtgaagtcattcgctgttttgagtgcctgcatatgccttcaacgaacagcggcgcccaaaacttcggcgaaggcatcaacttcttcggtggcaccctcggcaattcccaggggctggccgttcgcaacgctaaccccaacggcgccttccgcctgttcggcacttcgatcgactatgccggctcgattgccgacgttgaggccggtagcattgaattgcatggctgccatatggaattcaacaacggtaatagtccgctcacggaaattcccttccgttgcagcgccaatcaaaatgcatcgctgttgattcacggcggcgaaatcatcgtcgccggcggccgactggcgcaagcgtcgctgttttacgccgaggccggcagtagcgggattatcgtcgacagcgtgaagttctatggcgtacgaaccgccagcggccgctatttcagcggtaccggcgactttgtcatcgtcaatagccgactggatggcggtgggggtggcgccgggatccagacgctggtcggcgccgtgaataacaagttaaaagacggtgagttcgccttttccgctaagccgtttggctgggaagtgacaggcggcacgatcagcgagccctttacctcagacgcagtgactatcagtatcgaagccggcgcgggcgtcaacggcagcaatgccctgaaagtgaccaagttgggcaacgccaataccaacgccggagtgagagtgatcgtgcccgccgcgcaatatgagcagctgggcgcctgttttaccctgaaaacggtcaacggcggtaccggcaatctgttcgcgacgctgcaatatgcctgtatccaggaccatgcggacaacggcgtctcgctcgtcgccaaagccgcgccggcagcctgggacgccgccttgaaagccgatgcttacgccgagtacaccgaatatcgtttcaacgccaatcgacgaaaagtcccggtctgggcgacccatgtcatcctgacgttcaacctgtttgccctggcgaaaaatggcgtgctttatctcgataacgcctgtattaccgctatgtaa

SEQ ID NO: 430075 - DNA, 243 bp, Serratia marcescens
atgcttaatcatacctctctgactcgtcaatcccaccgtttcgatattgttctcgactcgccttccatgccctctgacggcattgatttattagtcgaagaactgcctgaaacgctgcactttgccagcgattgcgcctcaaccggcagcagcgtcagcaccgcctctacagcgggctgcggctgcattgcaacggcgagctgcatcggcacaatgggcagcgttaccagtagcggcagctaa

SEQ ID NO: 430076 - DNA, 1011 bp, Serratia marcescens
atgagcacgtacactgacgccactttagatttcgacagcagtcataagccaaccctggatatatcctgggatcgcaaacggccgctattagaggtcgagtcactgaataagttttatggtgacacgcaagttcttcatgacatctcgctgcaaatcaagccgggagaaatcattggattggtcggacctaacggtgccggcaaaacgacgctcatggaaaccttgtacggaggacagccctttgaagccggcttggtgcgtttatttggcgaagacgttcgacaagggcttaatcacgtcatcaagcaacagttaggcgtcgttccgcaatcctttagtttgccttcgctgctgcgcgttgaagagatcatttcgctctatcaggtactttatacggatgcgttgtcggttaagcagttattggacattgtggcgctaaaagcgcagcgtaaaatgcgtttctcgcggctttcaggggggcaaaaaagacgtttggtgttggcgctggcattggccggcaaacccaagcttcttttgctggatgaacccaccagcgatcttgacccgcaaagccgacgctatatttggcggcacattattgcgaattctcgtcaatctggcacgggcgtattgatcgccactcaccaaatggatgaggcggagaatttatgcgaccgggtgatgatcatcaaccacggccggttgctggagaatgccagcccacaacagcttattgagcgttattgtcctgggcatcatatccgattctcagtgccgttgacgtcggttgacgagttcctcgcgctcttccctgaggcgacgcaggaaagcgatgaacatgatcaaaccttccgccgcctacatattcccacccaagaattggcacaggtgttaccgcaagtgattgcgttatcacaacgattgggttgtgaacccgaacaaatgcaggtaagcaaaaacaccctcgaggatgtgttcattcatctgacaggcgaagcattaagggattaa

SEQ ID NO: 430077 - DNA, 1056 bp, Serratia marcescens
atgagccatagctggcagatttatcggcgcttcttcggcgccaacaccaaagaatatttacgcgatccgctatcaaccttattttctcttgtattgccgttatttttcatctttacctttggcataacggcaaaaattattaatggcaatcatcaaccgttctccatgcaggtgagcgttgtcggagacacgccggaaacagaggctctctggcttaaattgaacaattatcctggcctggccgtccagcgccagcttcgaagcgatccggaagcgctggtgcgcgcgaatgaagtgaacgcggcggtgagttgggatgcagtacaacaacgccctgcgatcaccacgacggaatccatgagctccatcgctcaactggtttccgccgcactcaatcagcaaccggccgacgcccagcagccgatacgcttcattacgctgaaaactgagcgtttcaactattttagttttatcttcccgtccttgctgacgctggccctgttgcaagtcgccttatttggcacggcgacgccgctgatcgccgcgcgagaaaaaggcacttaccgctattacggcgtcattccgttgccgcgctggattctgctcgcatcacaggtcagcgtccgcctggtgatatcactggttcagatcgccctgttaatgctcattagcagtctggtctttggctttacccttgagcatcccctgctgtttatcgtgctgctcgtcgccggcgcactgttgctggtgagctttgggtatgcgctggccggcttattccgcacgaataccgtcgcgacaatcgccctgaccttactcaacttttggtgcatgtgtttcgggcaattgttcctcgatctgagcgcattcccgccactcaaatggttaattttgacgacgccggtcggttttgtcgccgatgcactgcgatacgccatgaatggcagcgaaggcgtattccccttcttcattaactgtatcggcatggcgatatggggtgtgatcacgctgtttgtcggcgttaagtggttccttttccagccaaaacaatcttaa

SEQ ID NO: 430078 - DNA, 909 bp, Serratia marcescens
atgaaaaacagatcggcatcttggcatttttacaagctgtatatcggtagccatcatgatggaatggactttctgatcacccagggattgacccaagcactggcgtacgctcctgattctccttggttcttcttacgttatatcgatgaaaaaggattacatttacgcgttcgttttctgctgcaggaaaaggacagccagcgcctggaaactgccatttacgctgcgctgcatgatgcgctgaatagcctgccgttgcgcccggccaacctgtggacgccattggtcagcttccgcggcaacacgccgtttcccacgcatgaactcccggtccattgcgaacgcgcggaatatgagccggaaacggacgtctacgggggcgaaacgggcattggcatcgccgaagcgctgtttcaccaatccagtgacattgcccgtgccatattgctggccgaggcaggcggcggcatgacgcgcaaagagtttgcgttgcctctgatgctggccatgttggaaacgttcattcctgttgcccggcgttccgccttccttgaaagcttctcgactttctggctggcgggctctgcggatatcggaatgatcaaaaacagctttaccgatcgcgcatgggaactgattgatgaaaactcggttcttctgtcgccgcagatacggcaagacgcgcaaagcgccgaactggtggatcgctggcagtctgcgctagaccagacccggcgtaactatgaacgccattgcgaacgatacagtgacggcctcgcgaaaaatctggcattccaattcatgcacctaatgaacaatcgccttggcttaagcacgctggatgaagcctggctggccgtgttgctaagcaaaagcctggaaagcggagttattcatgcatcatcataa

SEQ ID NO: 430079 - DNA, 1347 bp, Serratia marcescens
atgcatcatcataactttgccgtttccgcgtccatgcgccagaaatatccgttcatgtcgctgctctcgccgctgacgggcgttgtcggcagcgtctacccgttggaaccgcaggagatgcatatcccccgcttttcgtcggttctggccagcctgggcaatctgtcaatgccatatccccatatcattgacaataaaggcaacgacctgcaaaaaatcgcgcttgccggctgcggcgccgatgaacacgtcgatatggcgatcgtccgcgctgtcgccgaagcggcagagcgatacgccacctgcgtctaccatcctcgcgatgtttcggtcgccagcttccgcgaactcggggctgacggtttggcggccgacagcctgccccgttgcagcgaggaggagctcgccgatccgctctgcccggtcaaacccattgatgacgcccagccgttgcgctgggtggaaggttactcgttgacggactcccgcccgcgcaagatcccgttgatcatgtcgcatctgtatgtgcggccctgggaaagcgagcgtttctggttgccgatatcgacaggcgtcgcggcgcacaccgacctcaccaccgccacggtaaccgcgatcaatgaagtcatcgaacgcgatgcgattgcccttacctggctattgcaaatgcctttagcgcgcatccgcttcgatgaaccggtaccggatagattacaagacaagttttcacgcctggcggccagtgggctggaacagctgttcttcgatgccactaccgacatcggctgcccgacaatctacggattgcagctgcgcgacgggcatccgacctcggcccagttcgtcaactgctctacggggttcgatccctggggcagctgcggcaagattatccgagaaagcgccatggggcgttcggtactcgaacatcaactgccggtgccggacgatatacgcgattttatcgctctcgaacatggcgccatcttcatggggcgagccgaacagcgctccgcattcgattttctcaccgccagcgagcggcagatgccgattagccgcctgcaggccgggcaaccgcaaacgccggcagcacagctgaaaaaattggtggcgcgttttcgtcaactcaagatggacgtcgtgatagcggacatgacgacggatgaactgcgcgatgccggtttacatgtggtgcgcgctgtcatccccgcccttttgcccatgacggcatgctatcgcgcccgctatctcgggcatccgcgcctacgggaacagcagcaacggttgagtgaacaattaggcaaagccgccacgataaatccgtggccgcaaccttttgcctga

SEQ ID NO: 430080 - DNA, 618 bp, Serratia marcescens
atgattatcgtcagtgacaccgcgttcggcaatgacgtggccgattatatgcactgccaggaagggatctctcaactgacattggcaaccgcactgaactattcctgggccgacagcaaggcttcgttcgtcgggatcgcgctatccggcggcgcgccgcttaagcttgaacagctcaccacgcagctgtttcgcgccgggatccctcacgcttgcaccgtgttgaacgaccatatgctgttttgcggccccctagtcatcccaggccgaaccgcctgttatgcctgtgcggcgaagcgcctgctcagcctcgccgaaacgccgcgtacggcaatgatggatttgaacctgcagcgatatcatgaacagcagccgcagaacgcattgcgcggatatacgccggcgctggtgctgatggctggattacggttaaagcagtatgcgcagctccccgaagaccaattcggcaaactgaccgccgtgagctttggcagcaatcgcaccgcgagcagttccgtggtggcgttacacggctgcagctgccgtgaaaaccggcatatttcgcaggctcagggcacggccttgttggccgaacacctggaaggagccttacgctaa

SEQ ID NO: 430081 - DNA, 2403 bp, Serratia marcescens
atgaaagccactcatatgtcgaccgtcttgtcgggcgcacagtttagccaccataacgatctttacgctttgctgcccaagcgccccaaattaattccggaactgattttcattcctgaaagcgatacccgcgtagccgtgtatggcgcctatcagccgcgcatcctgacctgcgttcaggggataaacacgctggcggtcttcctcgagcgcctcgatggcgtcaacgtgctggaaagcgtgctgaccgacgacgcgaccatgagccgcgagaatgccctgggcatgctgtccttactgtttcgctatggcttccttgaagaaggtgaaggcctggatgacggcgccccaagccatttggcaagctattgcggccgctttgtcgacaatacccgcctgcacgccaaccgcactgcggcgctgcagtccgcccgccgccgcaggctcgccctggtttgcccggaagatgtgtcatcgctgctgcaacacgcgttggcgcctatggccgccagcattgacgttctgaccgagcgcccaacgtccagcgccctcccctgggatgatgcactgatcatttttgacggcagcgagtccgacgttttccgccaggcatgcgccgatgggttgcaccaggccggcgtgcgttatctgagctgcattattggcgcggatcgcacgctggtgggcccttataccctcccgaacatcagcgccagttatcaatgcgcacgcacgcaatgtgagcagccatcgcccgccaacgatcggcaagaggtggcgttccgcgccgtctatgccgcccatgagctggggcaaattctgctcgggctgtcctctgaaagctacctcaacaaggtcgtttcccatagccatcggggcgagggggagtacaccttagcctataaggtcgcccgcattcccggtaccgcgctaagcggtttaggccatgccgcctatctgccgccgggggaagaggcatttactgcctggcagcaccatatcggcacacgcttgccgccgcagggcttgttgccaccgcgttcgcatcagatgcacttcacgctggataacctcaaccgccacgcctcaaggccggtcaggctgcatgggcagcagcatatcaacctgcccgacagcgcattggcggagcgctgtccgccgccctggcgaatgtcggcaatgccgtcacaaccgttgacactggccaatctgggctggttgctgcgccacgccacgggttatcaaaaaggtgaagacggcacattacgccgcatcgcgcccagcggtgggcaactgctctcgtgcgatatgtttgtggtcgtccgccggccgctgccggagatatcttgcggggcctggttctatctcggtgaaaagcaccagctcgtcaggattgacggcattgactgccagcaattggaacacttgctccagcatcccgaagagccgatttcactcattatcagcggcaacctgaaccgcgtgcgcggcaaatataacgacttcagctataacatcgttaaccttgacgccggagtggttaatcaatattgcgcgctttccgcgcgcgcggcgggctggacgctgagagaagatcatggcgtcgacctgcaatggttggcgtcattgctcttcttcacgcaacaggataacccccatatcctctgccaggtcttgcatgtgcaagcgcccccgtcacagggtgagccgtgccctgctccactttatgaaacggcgagcagcctggtcgccgttagccaccgcccacggccggccgccgcgccagcgtcgcccacgcccgctgctctttcatcactggcgactgtgcaccgcgatgagccgctctccgcgttgctggagcgccgcagggcgacgtatgactatgccgatagcccgttcccggaaacctggctgaataccctgatcgccgtcgcgcatgccggtcttgaacaaagccgcctgcgcgggatgccggcgttgccaatggaaccctggatattgctgccggaagccagcggcgaacttgccgcgggcatttatcagtgcagtcaggcagatcgccgttactggcggaaacgggatagcgggtttggccgcgcacatttggctgattgcatcaatcaattagcgttccataaagccggcgcgttgctgatgtgggttgccgatcttgaaaagaccctgcatgaccatggcgcggcgggataccgcatgcagctgcaaaacgccgcggcaagcgcgatgcagtgctggttggcggcgctggactgcggcttgaccggaacgctggcgggaggcgtgatcgaagaagggctcattcgccacgcgggcgccgacggctatcgcgaggcgccgctgttctgtctagtgctggcgtcccctccgccggcagagggtgtttaa

SEQ ID NO: 430082 - DNA, 1032 bp, Serratia marcescens
atgccgcctgcatcccccctgttgcgtttaaacgaggatgtgaaactgatctctccgcaggcgaatgtggcgctgttgctgcaagaaaacagtaatgcgccgttaaagctgagtgggttttctgcccggcttgcccaacagttgcaagggggcagctccatggcggccctcctggcggagctggcagaacaccacccgaacgcaacgcccgaacagtgccaacaggcgctgtccgcgtttctgctgcggttgaaacaggcgaatatgatcgttgatggcgcgcaaaagccgcctgcggcggcgaaagtggccgggcgatatcagctgcctaaccccgatcgcgccgcacataaaatcgccaccgtgctgcgggttgtcccgcgcgggttaggttacggcctgctgagcctcgcgattgccgctgccttgtggcgtttcatcgcgtgtttgccagggctaaacgcctggctgctgcagggcgaatgggccagcgtccagctgatggtgatgcttgtcggcataccgttatggctgtttttgcatgaaatggcgcatgccgtcgtttgccgtctttacggctgcccggttctgggggcaggtctgcaatttcgcggctggtggctgccctccgtgtttgtcaacaccagcgccatcgcgctattcccactgcgcggcatgaaggcctgggtggcgatggcagggccattgatggatctcttgtgtctgggagcgctcgcggcgctgagtgaaagcgccgtcgccaccgcgatacggccgttactgctgttgatactgttcggcctgcttttcaatctcaccccttttcggctttcggatgccacgcgggcatttcgcgcttttgcccaacccggcgccaataagaaaacccgcgagtggtctgcccgaggccgccgcctattccgcagttattgtctgctttacagcctctgcatggcggcggcgatgggttggttaagcttcgtgagttggcagaaggtgaataactggttggcatctggagtattatcatga

SEQ ID NO: 430083 - DNA, 2538 bp, Serratia marcescens
atgacgttacccgcgcagcctttgttgctcgtcgccccttttatcatgctgcgcaccgcaggcctgccggcgcactatgtcagccaacttccggatgatttatccgcgattatccggcaacaccacttgcaggagccggcctggcggcaactcgggcaggcgcttatcgccaggctgcatgcgaatatcgcattaccctcggcggacagcgttcgccaggatatgattcgctgtcgccgccatatcttcaacgatcgctatttcaacctgtctgccgaagtgcgcgcctggttggcgcattacgactcagccgctctggagcaactgaccgaatggttggcgatagcgaatgagcgccggcagttggcggcaacctttaaccaacgctggcagcgtgtcaacgaacagacgcaggccttgttgctcaaagccgccaacgaaccggctctgcgccgggcgctctgccttgcctccccgcagttgctttgcgatctggaacaaaattggcagagttggccggccaaacggcgccggcgcgtagagcgctccttgtttgcctacatgattcgagcggcgggcaaagtcagcccattcagcaccttttcctcttttagcctggtcccgtttgaaagctcggccggcgaagccactctgcaaaccggtgaaggcaaggtgacctcgaccgtacacctcaaccgctccatcgcattagccttgcgcgacgcgctgtatacgcagctctggttggcgaaacatgatctgccgctgtgccgtaacccctccttgcaacgcatttccgccagccagatgcgcggccatttctatcgctatgagaaacgccacggtttgttatggaacgaagagcagcaatttgtcctgggcctggaggcggcggaaatcgacgccgttctgagcgccagccaccagcaaagctggagcgcgtggcgaacgcatttcgaactggctgggatggccccgtccgaagcggaaagactgctgagaaagctggtgcgcaaggacgtcttgcgcccgacattacagtggggaacgcatcatcctgcccctctggccgatgttttggcgctgatgccggcggagctctccagcgacgctctgcgcaacctgcccgaactgcccgaacgctttggtgcggcagaaaacgcggagcgcgttgcgctgcttgagcaggctcaacagacgattcaacagagctgggagcggctgacccgccatcagatgcccgaaattcgcaatattttatatgaagacgcctggcgggaagggatcaggatgacattgcctgacgctttcattcccaatgtacttgcccgcgtagcgaaagcggtggccaaacgcgccacgttgtcgcaggagtacctctggctgctgcagaactttatcgacaaatacggcgcaggtggccactgcaccgatgtctcattgtttttgcagcagagctggcagggatttattcaattcacccaacaacgtatctcgcagtccgccgccacaacggcccgctggcggcagcacaatatcaatcccgccgccctgaagctgccggtaacgctcttcctgcaattggatgcccgtcatgtggggcagctagcgcatccccggggcaaagtggtcatcaacaatgcgtattcgcgtatcggctggcagttggcgcgcaccacgttgaccaacgacagccaggccgacgacagacgccatcagctgcaaaactggctgcgccagttcgccgcgccggcgctgccattaaccttcagcgtcagcggcgagtccagcaatctccaggctcaggcccgcctggcggctcatcatctgtgcctggatgagccgcctcaggttgccggcgacctgacgctcgaccggctccaactgcatcatgatacgcagagcggcctgctgaagctgacggacaaccagggacaagcgttccaattatgttacctcggcgcggcgacgccgatggtggcctggggaaccaaatacctgcttaccgtactggccgaaccggtgcagattggccgccccgcctacaagcgattgatggccaatgagctggatcatgacttccgccatgccccgcgcatggaggaggaagactgtgtcctgatccgtgaaacctggtgggtccgctcttcccgcattttccatgagctgtccgggcatcaggcggcggagcatccggcgcgcctgttggcattgttactgaagaacggcattccgacagacagctatgtgaacgggcaattcaacgatcatcttagctggcagtcatttaacaacgacaagattcgcaagccgatgtggtgcaggctgggcaattcacattgccttgaccaattgctgctactggcgcgaaaagttgactggttagtcttccgagaggctctcccgtcaccggaaaacagttggatggaagtgaagaatgaaacctatctcactgaaattcacactgagatggtcatccctggcgattacctcgacgcctctcttatgtcccctctgaaggagaaatcccatgcataa

SEQ ID NO: 430084 - DNA, 216 bp, Serratia marcescens
atgcataaagtatcaggcttgctgcttattatcggcctcgtcatgttcgctgtcgccctggccctcaatatctacagtagctacacggcgagcaacgccaacggtgcgtcattgttctccaccaactggtgggcgcgctggttcccactttacgcttcgggagccgctctgctcttcattggtgtgatcttgcgtctgacagtaggggatcgttaa

SEQ ID NO: 430085 - DNA, 684 bp, Serratia marcescens
gtgcaacgcggggacaaggtaaaaaaaggcgagcgattggcatcactcgacgggcgttcgctaagagcgcagcttgcgtcgctccaggccagccagcaaatcgcggcgggcaaactcgcgcagacagagtcccgcctgccgcgcgcgcgcaatcagctgcagcgattgaaccgtttgttgccgctcaactatgtgagccaggatgatgtcgacagcgccaaagcggagttggattcgttcgaggcgcagcgccgccaatatcaggcagaattacaacaagtgggctggcagataaaagccagtgaaatcgacctgttgcgtacgattatccgcgcgcccttcgacggccaggtggtgtcgttagacgcctccccgggggaaacggtctcgcccatttccgccggcggcggtttcacccgcacggggatcgccaccattgtcggtttggataattttgatgccgaagtttggctgcccgaaagccagctggcgaaagtcgcgccccaacaacgagtgacaatcaagccggatggcctccccgatcgacagatctcaggcaccgtcagccttatctcttcggtggtggatgagcaacgcgcggcggttttagtcattatcaagctcgctcagcaacagccctggctgaaacataatatgtcaattcaggtagatttttatgaataa

SEQ ID NO: 430086 - DNA, 711 bp, Serratia marcescens
atgaataaaacggcaaccgcgccgagcgatccggtcgtgcaactgcaacaggccggcaaagactataaaaaagggcgcgagcacatcacggtattgcacgatcttgattttagcctgcacggcggcgagatggtcagcatcatggggccatccggctcagggaaatcgacgctgctcaatctaatctccggcgttaatgtctgcgatcggggcgaggtatttttgcaagggcattcgctgcatcggctgcgacctgaagaacgcacctcgctgcgagcccgccatattggcttcgtctttcagttttataacctgttgcccgtgctcagcgccgaggagaatgtcgccctccccctgcacctttggcatatggacgccaaacagcgccggcaacgcgtcgacgccgcgctggagctggttcagatggaacaccggcgccgccacttgccggatgaactctccggaggagagcgccaacgcgtggccattgcgcgtgcgatagccactaatccggatctgctgctgtgcgatgagcctaccggcgatctcagccaggaggcgggggaggaaattatggatattatgacgctactgagccgggagcagggcaaggctatcatcgtcgtgacgcatgatattcaggtcgccgcgcgggcacagcgccaattccaactcagggacggcaagctgatccgtagggatatgccatga

SEQ ID NO: 430087 - DNA, 1158 bp, Serratia marcescens
atgagagccgtgttttacctctggttgtggcgctccgccactgagcagtcgagaagatttatcatgatcttgctgtttatcgccagcggcgtcatgttgctgctgctcatgctgacctttgatcgcgccttcagcttaaaggcaagcgatccgcccggcgcagacaaccggctactggtgctgaatgcactcagttcccaaatgctgctgccgcagttttatcatcagaaaatgagtcaactgccggcgttggatcggctgagctggggagtttgggtcggtgcttactatcgccaccccggatggttcgtgcccgctatcgcggtagaagaccaacactacttcgccatgatcccctctttaaaaatagcgccgggcttactggagcgttggcagaatgaccggcaaggcgtgctggtcgacagccgttttgcggcgcaatatcgcttaaaagcgggcgatcggctgccgctttcatccgcgatttggaagctcgcgcctaaccccattctcgatctttacattactggcatcgttgaagaaacccaaaccgacacccctcccgcggtctggatgcattatgactacctcgacagcgtgagacaaaatggcaagcggctggtgagtttttttatggcgacccctaaacccggcatgtctgccgagaacctctcccggcagattgatgccctgtttggcgcggagcggttgcgcggcaccacgcagacagcccccgtacgcatgcatataaaattgtttatgagtaaattgttcgatttccatcgcgtgattttttgggtcaatctggcgctgtgcctgttattggcgctgctgctcagcaccaacttctatgtcatgacgcataaagccttgagcgactaccgcacccttaattatctgggttttcgcaaatcacagttgattaaagcggttgccgtgcaactcggcgccatcaccttggcgggtgccatcgtgggcatagtgttgtcggttatttttattctgctgttgccgacgctgttccccgccgtattaaacgccgttgagccgcatttccaggattatgccatcggcctcctgctggtctttattttatccctggtctgcgcattgccctccctcttgcaaatcgctcgcctgcaggaggagagaaaatga

SEQ ID NO: 430088 - DNA, 1170 bp, Serratia marcescens
atgaacccgcgttcatcctcgaaaatccaccagctcgggatattgctgggcattggattacgcaacctgtggcggcggccgctttatttcaccgcgattctatccagcttcatttttctcgcggtcattgtgacatcgttattttcactgcgcgcagggctgatcggcgcgctggagtcgagtgcggaacccggcctgtattttgcgcaaagcaaagactcctcttccgaactgaccagcacgataacgcgaacgcaggcggcgcaactttcgcgcttgcccggccttgttgcggcttcgccggagtgggttgtcctggtgcggctccgcccagacaacgtggagaaagagtatctggtgcgcggcgtaacgccggcggcattcacgctgatgaacgcgaacaacgggcaaccgctggtcaccctcacccgcggcagagcatttcagccggggcaaaatgagctcgtcgtcggcgcgtcattggcgcggcattatccggcgttccacgtgggcgagaccatacgcctgcacgaccgcgattggaaaatcgtcggtgaatttaccaccggcggttcgccgcggcagtccgagttcatggccgatctggaacatatccgcaccagctggggcgcgggactcgattacaacctggtggcattgaccagcaatgtcacctctgtcgagcaactgcaacaagccatccaggggacgctcaatgaccgagtcgccattagcgacagccgaacctactatgccggcagcagcgaagggttgggccaggtgctgctgtggttcggcctgttattttcattgctggcgggggtgtcggtgactgcgggcatcatcgcgctgtgtgaatcgctcattgccaaccaacaagaccagctggcaataacgctgctgctgggattcggcagggttattgatgtgtcttatctctgccaaaccctcttgctgggcctggcaggctcttccattggcgccttgttgagcatgttgctgttcaacggcatcacgttcaccacgtttggccacgcgcatgagctggtgttccccatgatggtcagcggaaaaatgcagatgatcagtatcgcttatggcgtattcatcagctttatcgcctcactgtttgtgctgccggccattcgcgcagcgacaaagggaaaataa

SEQ ID NO: 430089 - DNA, 4002 bp, Serratia marcescens
atgaatgattcatcccttaataatacccccctggcggacacccagcagggcgtatggtacgcatcgcaagcgagccactcttccaaactctatgcgacggcgcaagccctgcgcctgcacggtgaaattaatcggacattattgctcaacgccatcgaactggctctgcaggatattgaggtgctcaaccaccgtttcctcgatatcgatggcactccgtctttcggcatccgccagcctgctggccgcgtgaccgtctgcgatctcagccatcacgcagacccggaggcgctcgcctggcgcgcgatggaacagataacgcaacgggaacagggaccggagaatttacatcttcatgaacatcagctgtatgttttgaatgaacgcgaagcgatatggttttcccgaatacaccatatcgctttcgacgcctacgcctattccctgctccaccgccgtgcgggggagcattaccgagcgctgttgcaaggaacgccgcctctccccagccgctttgtcaaactgaccacgctctgccaggacgacgtcctctacaggcagagcgcgcaatatgcggacgatcaccgctactggatgcagcgctgcgcgcagttgcctgcgccgacctttctgggtgcgccagcgcaagccatggccgagcacacgttggaagtcgagaccgttatcgataccgagctggcgctagccctgggcagcttctaccaaagcagcgggatcgcgttatccgacatcttgctcagcgcgttcgccagctatttctcccgctgtcagtcgggcgagcggcaactgttgttcggcctgccctgcatggggcggcttgatacttatggcgcccaggcggcggtcacacgcagcaatatcctgccgcttctgctggatttgccgcaacacgcgcactttcgcgacgtttgcgccaccgtcgcccgcagccggcgcgagctgctcgcgcaccagcgctaccgcggagaatggatcggccgagccatcggcagggtaggcgatactctgcccctttacggcatcgaactgaacatcttgcctccgcctgcgacgctcgattttgcggagctaagcgccacggtcaaacatatcgccaccggccccgtacgcgatcttaacctccacctggaactgggtacggacctgcaaccgcgccgcctgcgtcttatcgccaatgccgcgcgccatcatcacgcagagctgcaattgcatgtgcggcggctgttgcattggatcatgcagttggttgcggcgccgacccttccgctgcaacaactgacgctgccagcaccggcggaactggcgttaatcgcgcaatggaacgacaccgcccagccgttacccgccaacacgatcctcggcctgttcctcaaacaggctcaagccactccgcatcagctagccgtgctcgacgaaaacgaacggctgagctattcggcgctggaactgcgctcacggcggtgcgcgcatgcccttgaacgccatctgcaaggcgctcgcggccaggtgatcgccgtcacacttgaacgcagcgtagccttagaagtggttctgctggccattatgcgtgccggcgccacgctattgccgctgtcgcccgaactgccgacgcggcgacagcaaaagatgctcgagcaggccaatgcggcattgctgatagccgatcgcgccgatgacgacaggttgccggacagcgttccccggctcgatctcgccgcgctgtactcactagccgcccatcagggcgacgcggcattgccgctcgtcacgcggcaaagcggcgcagatccggcttatattctgttcacctccggttccagcggcgccccaaaaggggtgatcgtgagccatcttgccttggccaatcgcctgcaatggatgcaggccgaatatcctctcggaacgcaggatcgcgtgctgcagaaaacgccggccacctttgatgtgtcgatttgggagtttttctggccgctgatcgggggcgcaaccttggtgatggcgcggcccggcggccataccgatccggcgtacctgctgaattgcatcgtgcagcatcgcatcacaacgctgcactttgttccatcgatgctggcgctgtttctcgacgccgtcgaacgcaggcccgaaccgctgccgctgctcagggtattcgccagcggggaagccttgtcgccggagctggcccaacggcagcggacattgctgacggcgcctttgcataatctttacggcccgacggaggccgccattgatgtcacttaccacgcgctgagctgcagcgacgagaagcgcagcgtgcctatcggccgccccatttggaatacgcgcatccacgtgctggatcccttcggcaacaccacccccattggcatcgaaggggaattgcacattgagggcatttgtctcgctgacggctatgcgggccaacccgagctgacggcagaacggtttttcgccacggcggacggcaagcgcctttaccgcacgggagacctggcgcgctggcgcccgaatggcgaaatagactatttggggcggctggatcaccagataaaaatacacgggcagcgtattgagctggaggaaattgacgcggttctcaatcgacatccgcaggtgctccagtcctgcgccaacatgcatgacgggcgcattgtcgcctatgtcgtggccagcggcgccgaggccgatgaaaaagccttactagcgctctgccgggaatatctccctgcctacatgctgccgcagtgcctggtgtttctctccgaactgccgctcagccgcaatggcaaactggatagaaaagcgctgcccgctccgcaaagcccgcaatcacagggcggtggcattccctcctccctgacggagcaacggctgtgcgaatattttgccgatgcgctgcgcctgcctgccgtggcgcctgaagccaacttcttcgaactgggaggcaactcgctgagcgccgttgatgtcgccgcccgcattaacgccggcctgggttggcaaatcaccatcgccagtatctttgctcatccttcagcccgggcgctggccgaacaaggccagcactcagcgccggatatgctcgatgccacactgctgctgcgccctggcgccggcgcttcgcaaaacgcgctgccgacgctgttttgcatccatccggccggtggcatcgcctggtgttacagcggcctggcgcgttttctcaaaacgccgtgtgaaatcgtcggcttgcaagctcaaggcctgacgccgggcagcaatatcacccgaacgatggatgaaatggccgcagaatatgccaggcgcatacgcgcccatcagcccgaggggccttactggatcatcgggtggtcggttggcggcatgatcgcccacaatgtcgccatccacctagagcaacaagatcagcaggtcgaattgctggcgatgatggatgcctatcccagcgatctgtggcgacgcttcgcttttgaaacgctcaatggcgaagaggaggagagcctggcgctggccgccctgttgttcattgcgggcatcgccttgcccttcgatcaagaattgccttcgctggtcgtgccgaaaggcgagatcctgcaacgcgcggaaacaatcgccctgttgcgaaaacacggcagcgccctggccagtctggatgacggcacgctcgaccgcttgattgacgtggtgattaatagccgccgcctggtcggccagtcggaacacggccacttctacggtaatttgctgttcttcacggcagcagcgccgcgcgcagaagactggttggatttggaggcctggcgcccctatgtacatggacgaatacaaaatatcgacatcgactgcgatcaccccgcgatggccagggcggaagcattgcgcgatatcgccgggcatctggacgccgcttttgctcgtttcgcgcagcgcacgtccgtatcagaactgaactacaccatagagtacatcacccaatga

SEQ ID NO: 430090 - DNA, 1566 bp, Serratia marcescens
atgagcgattcttttttacttaaggacctggcggaaaatttagtgcctttcacggcacaccgggttacgtcctctctcatttggtccgccgaagaaaaggcagacggcgaagcgctgcacgccgcgtgcagctatctggtcactcccgatacgccaggcgccgtcaaagttttccacgcggaacgttacggcggaggcggtattcaacgtaacggcggcggcgcccgctgcggttttgatggccgttaccaggtgaaaggaatcggtgctaatccgctggtcgggcaaggttcggattggtatcactccaatggcgaactgcgcgccgaacaggcgatctatgaagccctatggagcgaaatgctggcgcagacgttgccttatggcgccgcgcgcacccacgcgattttgctcaccgacagctatacccttggggatttcacccgcacaaagggccgctctcgccgcgcccttctggttcgcgagcccctggtccgcccggcacattttgaacgaacgccctacttccggcccaaagcggaatatgcagggcagctcatgcatgacgttcaacgggttaaatccgtgcttcgccgcctgccggactatttgccggtccccaccgcgggcttcagcgaacaggccgctcgcgatccgcggcgccgctgccttgaggggatgtatgagctcaccaaacgtctggctcggcaaatggcgttttgccgcacccgcttcctgatgttgaccacctcatcctccaacatcaccatggacggtagggtattggattttaacgggctaacctgtttattccccagcgatcatcgttacgatttcgaataccagctcaagtttgcacaattgatgagagaaccggcaatcattcagaacagcctatccgagctgtgcttctaccttgggaagtacctgtttgatcggcctttcattgccatcgcccagcaacaggtaaaaacctatttctggcatttttttcagcaggcctgttgccgtggctatttgacgctactgggcattcccatcgacctgctctcaccggcggagacgccaaaacccttagagaggctggcaaacaatttcctgcagctgcttatccaccgttgccgaaagctctatgtctcagcggaaatggcgggagacgaatcgccgctggaacgtttggtcgtgaccttgattcgctgcagccaagggcaccccgtccccacgcatgacgatttctcacgggatgcgcgttttatgggcaccctgcgcgctttctcgcaggtcaatcattggttggtcgaaacctgccgcgcccagagaatcgatgccaccgttattcagaaaggcatggcgcaacaggctcgcctcaggctgcggccccgcccccagtgcgggaaaatacagatgctcaacgaaatcacggctctggtggaggccaatggtgatgacgaccaacgcttgcggcaactgttaaccgacatgcggataaaggcggtggccttcgccaaagaaacctttggcgggcagccgcttgtcatcccctccaggagaaatgaaccagcatga

SEQ ID NO: 430091 - DNA, 435 bp, Serratia marcescens
atgacgctctatattcgagaaaccgccggcggccaagatcaatggtcagactatgagcagcttggttttgccgtgagctgcatgttacatcaccgaaattacagccttcatccgataaaaagcgttcaagagcgcttgatatttgccatacagcacgggcagatcaagtttcttttcgacaccaatgaccaaccgctggcctatgttctctgggcctgtctgacggaggacaccgaaacgcaattgcaacgcgatccggggttcccacttcacccttccgaatggaatgagggagacaggatatggctgctcgatttttgttgcaggcccggtttcgcacctcaggcaatcaagcgcttcaacaagctcaaaccctggggagagggccaggtgcgctggcagaacagaaagagaaaggtaatgacgctggcctga

SEQ ID NO: 430092 - DNA, 339 bp, Serratia marcescens
atggacggatttgtactcatggcgatcaaacgaatcgcggtagaaacggcatttttctgtgaaggcccctatgacagcgataacggatttgagcgtctgatggcctgtaaaacccgcagcgacttgaacaatagcgcgtttggcgatgtcttcctgcattcgtttcttcgcggcaaaagcgtggaagaaataaaaagcgttgtcctaaattcggcaattcaattgattgttgcgattaaaaaagtatcggcggaaatcgccgaacaaattttattgcagactccattgccaccagaggccataagtgtcgccaggccagctaatacctgcaccgtctga

SEQ ID NO: 430093 - DNA, 3327 bp, Serratia marcescens
atggatatcagcgcgccgaacacgttcggcacacacaaaggcgtcgtggtgacgcattccctgttcgtggcgctggcgacgtttttgctcgccttgttgagcctgtcgctgtccagcgaagcccgccacttcacgccgctgtggttcccgaccgccgccgcaatcgcggtgctgtaccgccacgccccgcgtcactgggggctgccgctgctggccagcggcctcggcatcgtgctcgccagcttcttgctgttcggcgtcagcgtcactcccgtcaagctggccgccatcaacctgctggaagcggcgatttgcgccctgctgttgcgccgcatgctacacccgtacgatccgttgaatgatctcgccagttggctgcgttttgtggtctgtgcggtgatttttaccccgctgttcagcgcgctgctggccgccggcctggtacccgcgccagagcagcctttttggcagccgttcggtacctggttcatttccgaagcgataggggtactgtcgctggcaccgatcggcctcgcttacaaccgtcgtaccctgacggcgctgaacccgtttccattattgctgacactgatggttacgctggctttcagctttatggcgctgacctatctgccttttccgttcacgttcgtgattttgccgctgctgtgggcagccatcgcactgccgcgttttgaggcgttcaccgtttgcttctgcaccctcttgctgatcaccgtgatgatttcgctgggactgctgcattttcaggctaccggcaaacaccttggcgatctcggtctgtacttgccgatgctgctgattttaatcccggcgcacgcaatggcggtggtgatgcacgccttccgagtggaaaaacagcatatcgtcgaaagtgaaagccgctttcgcagcgcgctggagtattccgccatcggcatggcgctggtgtcgccgcagggcaaatggctgcaggtcaatcaggcgctgtgcacgctgctcggctatacgccggaggcgctgcataagctgacctttcaagaaattacgcatcccgacgatctcaacgccgatctcagccagttgcacgacctgctcgatggccatatcagcagctataccctggagaaacgctacattcgcagcgacggccagaccgtttgggcgctgctggcggtttcgctggtgcgcgacgccgaaggggtgccgctgtacttcatctcgcaggtggaggacatcagcgatttgaagcgcagccaggcggaaaacaaccggctggtggagcgcataacgctggccaatcaggtgggcggcgtcggcatctgggaatgggtgataagccaggaaaacttcacctgggatcagcgcatgttcgaactctacgatctcaattccgaccaaacgccgacgttggcgctgtggcgtacgctgttggtgccggaagatcgcgaccgcaccgatcgcgagctggccgagattctggctcagccacgaccattcgtcatggaatttcgcatcaccacgcgcggcggcaagttacgccatattcgcggccagggcaatgtgatcctcgacgaccagggccagccgctgcgcatgatcggcaccaatatcgacatgaccgagctcaagatcctcgccgaagcgctgcacgaggagaaagagcgcttgcacattaccctcgacgccatcggcgaaggggtgatctccaccgacggtcaccagcgcattacctttatgaatccggtggccgagcagatgtgcggctggccgctcgatctggcgatcggtatgcccgtcgccggcgtggtgcgcctgaccaacggtaaagacggcccggaaatcgaaaacctcacgcaatacccacggcagtggccggcggattacgcgctggtgctgcacagccgcgacgggcgctatttcgacgtgcagcagtcggtctcaccgctgaaaaccctcgacggcgaaaccatgggcgcggtgatggtgctgcaggatgtgaccgcctcgcgcgaattgatgaaaaagctcagctacagcgcctcacacgacgcgctgaccggcctgccgaaccgtacccgcttcgagaagcagttgaaagcggcgatcgtcgccagcggcgaaccgtcgtcgtcgcattcgctggtgttcctcgatctggatcggttcaaggcggtgaacgacaccgccggccacgcggcgggtgatgccttgctgcgggacatctcccagctgatgcggcaccagctgcgcaacagcgactgcctggcccggctgggtggcgacgaattcggcctaatcctgttcgactgccggcttgaacaggccaaatcgctgatgcaacaggtggtcaaccaaatcagccaacacccgttctactgggaaggaaagatttaccgcgtcggcgccagcgccggcatcacgcgcatcggcggcgacgccaaaagcagcgagctgctggcgcaggccgacatcgcctgctacaccgccaaacaccacgggcgcggccaggtgtatctgtatgaaacgcgacaaaaacagctgctggaacggcagcatgaattgctgagcccacaggaggtacaggcgatcgtcagcgaggggcagctgcggctgctgacccgcgccatcgcgccgccggcgacgccgctgtcggccgcgtttcaccgggtaacactgcaggtgatggcgccggacgaccgcccgctgtcgcacgaggcgttcatcgccgccgcgcagctgtacggcctgatgccggacatcgaccgctggacggcggcgcaactgctggtgaaatatgccgacgacatcaaacgcaaagggctgtcgctcgcgctgccgctggccatcgacagcctgctgagcgccgacttccagcgctacctgactgaaacggtgcgcgcttcctcgctgccgccgcaggcgctgctgttcagcgtcgatgaggccgcaatactggagcacgccgcgcagtgtcgggcatttctccgcgaactgcagcagcagggctgccggctgatcgtcaacggcttcgggcataacatcaatgcgttcgatgagctcagcgaccagaggatcgacatcattcgcatcgatgagcgctttatcaccaacgtgcactgcaaccagatggacgagctgatggtctcgatgctcaacggcgcggcgcatcgcattaaagcgcagaccttcgccggaccggctcaccagccggtgacgctgcaggcgctgcgcgacattggcgtcgatctggcggacggcgaccaggtggcgctggagcagccgctggcggtgttgctcagcgacggctatttcggcatccgttaa

SEQ ID NO: 430094 - DNA, 840 bp, Serratia marcescens
atgaagtccaaagtgatcctggtgaccggcgcctcgtccggtattggcgaagccaccgccgtcacgttaaagcagcgcgggcataccgtttatgcggccgcccgccgggttgaacgcatgcaggctctggctgccgccggcattcacgttttgccgttggacgtcaccgacgatgcttccatggcgcaggcggtaaagaccatcatcgccgaaacggggcgtatcgatgtgttggtcaataacgccggttacggctcctatggcgctattgaagacgtttctgcggatgaggctcgcgctcaatttgatgtgaatgtgttcggtgcggttcggctgacgcagctgattttgccgcacatgcgagcgcagcgctccggcaccgtcatcaatattacgtcgatgggcgggaaaatacatacgccgctgggcggatggtatcacggcaccaaattcgccttggaggccatcagcgactgtttgcgcatggaggtgcaacctttcggcatcgacgtcgtggtgatcgaacccggcggcatccagagtgaatgggcggatatcgccgcggaaaaactgatcggcgtttcaggccagagcgagtacgccgctctggctcacgctgtcgcccacgccatggtcagcgacgccagcaagaaacggcaatcgccgccgagcgtgattgccgatacgatcgccaaagccgtcgccgcccatcgtccgaaaacgcgctatgccgtggggtttggcgcgaaaccgctgatttttctgcggcgcttgttgtccgatcgcgccttcgatgggctgatgcgccgggcattgggggtaccgcgccaggggcaataa

SEQ ID NO: 430095 - DNA, 1011 bp, Serratia marcescens
atgacgcgcaactcgacctttctcatgaatatcggctggagaaccctgctgaaagatctggggctccagccgacggatgttttacgccgggctgcattgcctgaagatctgttgtcacgcaccgctgaagggatcactacggaagaatatttccgcttctggcgcgcgatggaggaaggaacgggcgacccgttgtttccgttgaaaatcgttgcgctgatgtcaacggaatcgtttgaccctccgatattcgccgccctgtgcagcgccaatctggcgcaagctgtccagcggttagcgaaatacaagcaacttacggcgccgatgagcctggagctcgccatcggccctgaaggcgaaatgacgatttcaccccgctggttgttggcggaggaggcggtaccggcgtctttactggtggctgagctggcattttatgttcggctggcgcagcttgccacgcgcgaaccggtaaaagcgcgccgtatcaccttgcctgaactgccgcctgcagccctttcacgccccttggcagccttcttcggctgcgcggtaacgcctggggcagggccgggcattactttctcctccgcagatgccttgcgtccctttttgacagtgaatgagggcatgtggcgcgttttcgaacccgagctgcgtcgtcgcctcagtgaactggacgccacggcaaccaccggagagcgcgtttgtgcggtgctgctggagttgattcccagcaataccgccggcatcgacgcggtggcggcaagattgggcatgagccgccggacgctgcagcggcgtctggaagatgagggcgagagttttcgttcgctgagcaacggcacccgggaaaaattggcgcgccactatcttaagcattcgacccttaccagcggagagattgcctttttgctcggttttgaagagccgaactctttcttccgcgcctttcacgaatggacagggcaaacgccggaagcggctcgccaggcgatgcggctgaattag

SEQ ID NO: 430096 - DNA, 1353 bp, Serratia marcescens
atgtttattggattcgattacgggacagccaactgttccgttgcagtgatgcgcgaccacggccccgagctgttgacgctggaaaacaacgcgccctatctgccttcgatgctgtgcgcgccgacccgcgaagcggtgagcgaatgcctgcaccgccattggcagatcccgaccggcagcgaagaaaaccagcagctgctgcgccgcgccatcagttacaaccgcgaagaagacattccggtcaacggcgacagcgtgctgttcggcctgcaggcgctggcgcactatatggaagatccggaagaggtgtatttcgtgcgctcgccgaagtccttcctcggcgccaacggcctgaaaccacagcagatcgcgctgttcgaagacctggtgtgcgccatgatgttccacatcaaacgccaggcagaaaatgtgctgcaaaccggcatcgatcaggcagtgatcggccggccgatcaacttccagggcatcggcggcgacgaagccaaccggcaggcgcagggcattctgcaacgcgccgccgaacgcgccggtttcaaggacattgaattccagttcgagccggtggcggcggggctggacttcgaagcgacgctgagcgaagagcaaaccgtgctggtggtggacatcggcggcggcaccaccgactgctcggtgctgctgatggggccgcagtggcgcaaccgcgccgatcgccagcagagcctgctgggccacagcggctgccgggtcggcggtaacgatctggacatcatgctggccttcaagcagctgatgccgctgttcggcctgggcggcgaaaccgcgaaaggcatcgccctgccggcgctgccttactggaacgcggtggcgaccaacgatgtgccggcgcaaaacgatttctacagcgccgccaacggccgcgtgctgcgcgatctgatcctcgacgcggcggagccggaaaaggtcaagcgcctgctgaaagtgtaccagcagcgcctgagctaccgattggtgcgggcggccgaagagagtaagatcgccctgtccggccaaacggccatcagcgcgccgctcaatttcgtgcaggccgatctggcggagaacatcagccaggatcagctcgccgacgccatctcgcagccgttgatgcgcattcaggagcaggtcagcgccgcgctggccagcagccagaccgcgccgcaggtgatctacctgaccggcggcagcgcgcgttcgccgctgctgcgcgccgcgctgcaacagcagctgccgggcattccgatcgtcggcggcaacgacttcggctcggtcaccgccgggctggcgcgctgggcgcaaacgctgttccgttga

SEQ ID NO: 430097 - DNA, 567 bp, Serratia marcescens
atgtcgaccatccttaccctcgacagcgccaggctacggctgcgcccctggcgcgacgacgacctgccggccttcgccgcgctcaacgccgatccgcaggtcatgcgctatttcccggcgacgatgacggccgaggaaagccgcgcgcaggccgaacgcatccgcgccttcctgcaacagcacggctgggggctgtgggcggtggaagtgaaaagcggcgcgccttttatcggttttgtcgggctggcgcggccgggcgacgatctgccttgctccccctgcgtggagatcggctggcggctggcggcggcccactggggcaacggctacgccgctgaggcggcgcgcgccgcactggcgtgcgccttcgacacgctgcatttgccggaagtagtggccttcaccgccgaagataaccagccgtcgcgccgggtgatgacgcgcatcggtatgcgcttcgacggcgaaaccttcctgcacccgcgtctgccggcgggccatccgctgcaaaagcacgtcttataccggctgaatcgacaaacgtggcgcgaacgccacggcgattaa

SEQ ID NO: 430098 - DNA, 3120 bp, Serratia marcescens
atgcaggtgatgccaccgacccgcggcggcggcccttcccgcctgtttatcctgcgcccggtcgccaccaccctgctgatggtggcgatactgctggcggggatcatcggctatcgtgcgctgccggtttccgcgttgccggaagtggactacccgaccatccaggtggtgacgctgtatcccggcgccagcccggacgtggtcacctccgccattaccgcgccgctggaacgccagttcggccagatgtccggcctgaagcaaatggcgtcgcaaagctccggcggcgcctcggtggtgacgctgcaattccagctggcgctgccgctcgacgtcgcggagcaggaagtgcaggcggcgatcaacgccgccaccaacctattgccgaacgatctgccctacccgccgatttacagcaaggttaacccggccgatccgccgatcctgacgctggccgtcacctccaccgccatgccgatgacgcaggtggaagacatggtggagacgcgcgtagcgcagaaaatctctcaggtgaccggcgtcggcctggtgaccctggccggcggccaacgcccggcggtgcgtgtaaaactgaacgccgcggcggtcgccgcctatggcctgaacagcgaaaccatccgcaccgccatcagcaacgccaacgtcaactcggcaaaaggcagcctggacggcccgacccgctcggtcaccctgtccgccaacgaccaaatgaaatccgccgacgactatcgccagctgatcgtcgcctatcagaacggcgcggcgatccgcctgcaggatatcgccaccatcgaacaaggggcggaaaatacccgactggcggcctgggccaaccagcaacaggcgatcgtgctgaacattcagcgccagcccggcgtcaacgtcatcaccaccgccgacagcatccgcgaaatgctgccgacgctgattaaaagcctgcccaagtcggtcgacgtcaaggtgttgaccgatcgcaccaccaccatccgcgcctcggtcagcgacgtgcagttcgagctgctgctggcgatcgcgctggtggtaatggtgatctacgtgttcctgcgcaacgtgccggcgaccattatccccagcgtggcggtgccgctgtcgctggtcggcaccttcgccgccatgtatttcctcggcttctctatcaataacctgacgctgatggcattaaccatcgccaccggtttcgtggtggatgacgccatcgtggtgatcgagaacatctcgcgctacatcgagaaaggggaaaagccgctcgacgccgcgctgaaaggggccggcgagatcggcttcaccatcatctccctgaccttctcgctggtggcggtgctgatcccgctgctgttcatgggcgacatcgtcggccgcctgttccgcgagttcgccgtgacgctggcggtggcgattttgatctccgccgtggtatcgctgacgctgacgccgatgatgtgcgcccgcatgctcagccacgaatcgctgcgcaagcagaaccgcttctccgccgcctccgagcgctttttcgagcgcgtgatcgcgcgatacggccagtggctgaaaacggtgcttaaccacccctggctgacgctcggcgtggccgtgggcaccctggcgctgacggtgttgctgtacctgctgatcccgaaaggcttcttcccggtgcaggacaacggcatcattcagggcacgctggaggcgccgcagagcgtttcgttcagcaacatggccgagcgccagcagcaggtcgcggcgcagatcctcaaagatccggcggtggaaagcctgacctcgttcgtcggcgtcgacggcagcaacgccacgctcaacagcggccggctgcagatcaacctgaagccgctgagcgaacgcagcgaccgcattccggcgatcatcagccggttgcagcagcaaacggcgcagttccccggcgtgaagctgtacctgcagccggtgcaggatctgaccatcgatacccaggtcagccgcacccagtaccagttcaccctgcaggcgatgtcgctggacgatctcagcctgtgggtgccgcagctgatggatgagctgaaacaaaccccgcagctggcggacgtcaccagcgattggcaggatcaggggctggtcgcctacgtcaacgtcgatcgcgattcggcctcgcgcctcggcgtcaccatgagcgacgtggacaatgcgttgtacaacgccttcggccaacgcctgatctccaccatctacacccaggccaatcaataccgggtggtgttggagcacgacgtcagcgcgacgccggggctggcggcgctcaatgagatccgtctgagcggcaaggacggcgccgtggtgccgttgagcgccatcgccaaaatcgaagaacggttcggcccgctgtcggtcaaccacctcgaccaattcccgtcggccaccgtctcgttcaacgtcgccgccggctactcgctcggcgaagcggtagacgcggtcacccaggcggaaaaaaatctcgccatgccgaaagacatcaccacccaattccagggcgcgacgctggccttccaggcggcgctcggcagcacgctgtggctgattttggcggcggtggtggcgatgtatatcgtgctgggcgtgctgtatgaaagcttcattcatccggtgaccatcctctccaccctgccgaccgccggggtcggcgcgctgctggcgttgatgctggccggcagcgaactggacgtgatcgccatcatcggcatcatcctgctgatcggcatcgtgaagaagaacgccatcatgatgatcgacttcgcgctggcggcggaacgcgaacagggtttatcgccgcgcgacgccatctatcaggcctgcctgctgcgtttccggccgatcctgatgaccacgctggcggccttgctcggcgcgctgccgctgatgctcagcaccggcgtcggcgcggagctgcggcatccgctgggcgtctgtatggtcggcggcctgatcatgagccagatcctgacgctgttcaccacgccggtgatctacctgctgtttgacaaactggcgcgcaacacgcatcgccagccggatacgcaggagctgccgtga

SEQ ID NO: 430099 - DNA, 183 bp, Serratia marcescens
atggaaaaaatcgaacggtcagtaggaaatgataaaagcgagggcagcgataaaggttgggagcctctgttgagaatgatcgctaacacagccctaccacacgacttcctgctgtcggatgagcgacaacagggtgtggctgaccgcgcgccttggtggaacgcggtcgattctctcccctaa

SEQ ID NO: 430100 - DNA, 1782 bp, Serratia marcescens
atgaggtttttccagaatttacaaaatgatggcatctcaccacgcgcgcagatccgcctgctggacaacaccttcatgcgattggtgttcagctttaccgccgtacctttcgtcggcatccctttcgccatctggatttatttgctgggggatgaacttggcccaaccattgcctggatcatggtttacctgctatgcgccgtggcgatcagaatatggcatcggcgctacctgcgcgaggccaaagaaaatgatgaagacaccgtgctgcgccgctggctgccgcgcattaataaggtggcctttattcacgggctggggatctcctcactctatttaattaccccgcagacccataactttgactttttcctgctgctcaatatcagcatcgccgcgatcgtcgccgccaacgcaacgcatcttacgcccgtcatcagcacctttacgcgttttttcttcgcctcctgggggctgctgaacctcggtatcatttggcggctggaagacgtgatgttcatcgtgctgatgctgaacttgctgtacggcttcgccatttatcgccacgcgttaacctcacatgcgttctttattcagcaagcgctgctcgaagagcaaagttcgcgcctggcggagcagttccgccaggccaaagaagaggcggaacaggcgctgttggacaagaaccagttcctgaccaccgccagccatgatctgcgccaaccggtgcacgccatgggttttctgatcgaagccatcatccacaaaaaccgggacgacagcctgacgccgcagctgctggatctgcagcagagcgtgcgctcagtgcatctgatgttcaattcgctgcttgatctcagcaagatcgaatccggcaacgtgcgcaccgccgccacccatgtggatatcggcgcactgctcgactcagtgatcaccctgttccgcgaagaggccaacagccgctcgcttgcgctgcgcacctggcggcccaggcggcgcatcagcgtgatgggcgatccgctgctggtgcggcaatcgctgatcaatctgatccaaaatgccctgcgctacacgcaacggggcggcgtactgatcgccatccgcccgcgcggcgccgagtgcctggtggaagtgtgggataccggcgtaggcatcgccgacgaagagaaaagcaaaatcttctccccttactaccgccccgagctggcgtggaagatagacagcgccgggcacgggctggggttggcagtggtagcgcgctgcgccaagctgatgaaggtgaagtacggcatgcactccgtcgagggcaaaggctcgcgcttctggatgcgctttgcgcaatacctcggcgaagacaaagcgccggagagcgcggcgacgtacgacaacaccgccacgcccacccgctacgcgccgctgcggggatcctgcctggtggtggacgacgatcctttggtgacctccgcctgggaaagcctgatgagcacctggggcatcaccgtgcgctgcgcggcctccgccgaggaagccttcgccatcgtcgacgacggctttacgccgttcgccgtgctgtgcgatcaacgcctgcgctccggcgagagcggtttcgacatcctcaaagcgttgttcgaacgcctgccggacgtgagtggcgccatggtcagcggcgagttcaattcgcaagttctgcaagaggccgagcaggaaggctatctggtgctgcgcaagccgctggaaccggccaggctgcatgcgctgttgacgcagtggggggcaagttaa

SEQ ID NO: 430101 - DNA, 1224 bp, Serratia marcescens
ttgttaattgcagggttgccggcctgggtcatcgcgggcatttcactttcattcgtttctgtgctgatcattttcgtgacctatggcggttatacccggcgtatcagcgtgggcggagaggtcacgacgctgccaaggtcggtcaacatatttgctactcagcagggattcattgcacaacgctttgtcaatgtgggcgatcaggtaaaaaaagggcagcatctttatcagatagacgtcagcagggtgacggattccggcaccgtcagcgcaagcacgcggcaggcgatagaaaatcaactggcgcaggtcgatagcatcatcgccaaattggaggcgaacaagaaaacgaccctggtcaatctgcaagcgcagattgaccaatataaactggcgcacagccagtccaaacagatggtcgaaaattcacgcaacggcgttaacttcatgcgcgaaaccatgaaaaattacgatgagtatcgcagtaaggggctcattaatcgggatcagctgaataaccaggtttacctctactatcagcagcagagtacgttccacagtctctataaccaaagcattcaagagtctttgcagataactaacctgaatagcgatctcgcgacaagagcgtccgatttcgataatcaaatctcacaatatcaatttcagcgcaatgatctcctgcggcagctggccgaagcggacgccagcggctcgttgattgtcaatgcgccggcggacgggcgcgttgaatcgctcagcgtgacgcctgggcaaatggtcaatacgggagacagcctggcgcaattaatccccagtaatcatgccatctattatttggttttatggttgcccaacagcagcgtgccttacgtgagccgaggcgatcacatcaacgttcgctatgacgccttcccgtatgaaaaatttggtcagtttcccggcgtgatcgaaagcatcgcttatgttcccgcatcgattcaggaaatgtccacttacagcagttcgccaactcgacaatcggctgaactggttgagtcgtactacaaagtgctggtggctatcgataacacgcagttcggctatcagggaaagaagctgaacctttcaagcggcatgaaggcgcaagccacgcttttcctggagaaaagacccatctaccaatggatgttcgcgccattttatgacatgaaaaacagtgtgtcggggccacttcgtgaataa

SEQ ID NO: 430102 - DNA, 795 bp, Serratia marcescens
atggattcgtcgttacttgataaatttaaagaactaatactggactggaaaacatcattaataatacttctagcaaccccattttttattaagttcttaccaaaagatacacaaagcgaatgggttgggctttcaatcgttattgcttattttctctttttcatttcagcagctagttttttagttagaattatcagctttttaatagacaaacatcaagttaataagattaaaaaagaacatgataataaagtcgctaagttagatgcagaaaaaatagaaacatcaaagttaataatgaatgagctgagttatactcaaaaagaaatcatcagaaagctgttacctgggccagcgacattcgacacggattactttgcgtccccatcgttaaaaagtgacttgatgtttttacaaaatcacagattcctcgttttaattacaagtcttgggtatgataagcatatatacagattagatgatattctaattaatcttatcaaagatgattttgataaagaaattaacgcgactttcgcatacgcattaacatttgaagatacattggattttgttttaaacaatcttgaccctaaaaaaacaaaaattgcattacctgacaataaattagattcaatacgtaaattatcttgtgtcttcagttcctataaaaacccccgttcaaatataatggatctgagatttaaaaatgggtacaagaaaaagtttgagcaacactttaatagagagttcaatgaatcaaccactttcgaaattttcaaagttgaaagttaa

SEQ ID NO: 430103 - DNA, 948 bp, Serratia marcescens
atgattattacagactttcttatgatgaaccaatctacagatgcgatagtcagagctatcgagtcacttcgacctactgctgattatgtgaaagattatattttccctgtaactttggcgttcggttcagccttacttggtggcttatctgctgtatatatcaataaaaaacaggatcagcaaaaagttaccagagacaaccttgttacgtccatagagttggttgctcttgctcaggactgccttagttccctagtttccattaaggccaactaccttaacatcgacagtgatgaccctttaacgagggcgaggaatttcccgacgataatttcaacgtttgaagaagtaaaatttagcaccggaagtctatattttattcgccccatacctacagaaaacaaaaaaatcctcgaatctatcatatggataacaaaacatcgtatattgcggatgaaggttaaaatcccacccgcagagaagttaagaagaacgtggagaaacagcgtcagaattggtgctatgttcggaaactataaccaagtaatggggctattagcctacagaaatagagttaatgaggaagtcaaagaaatagtttccagccataaagatggaataaaacctgacgatgctcaaggaattcttggagataaactttgtggtggttatgttgacatcacgcaatcctgtgtttccttaattgatcatttaataattgagttccatcactttcttttagaattcccttctatagctaccagtaacataaagttaagcagggtaagggaatggggaggtgtaccaagctatgagaacaaacaggaagcatatttgaactgcttaaaacctataatcaaaccagactattcaaagttttttccatacacaggaatgtcaaaagaacaagcagagaaacattacacatttggatcatggttcgactaa

SEQ ID NO: 430104 - DNA, 675 bp, Serratia marcescens
atggtaaaggatactaaacctggtagcgcattaatcagcgctataaaatctgaatctgtagtcgatcttgggaaagagtatgccgagctaggcatagatgccttacttgagtctaatgctcttgaatctataccctttgtaaatactgtagttggtctgtacaaagctgcaggtcatgttcgtgaccagatcttcacagataaatttgttcgattcttgaccccactatcagacatgcctgaagaagagcgtatcgaaatggccgaacggttgaatgaagatgataaatttgccgggaaagctggagctagacttattgaaattatcgaccgtatggaaagcgagaataagccagagttggcggctaatttcatcaaggcttttgccaggaaagaggtcgattttgatactctgaggcatttgctgtttgctcttgaaaggattccggcctttgacatctgtgagttggcactgttttcgtctaataatggagtggggacgagaacaaatggcgatcctcttatggttggtttcgtgggtgccgggttagggattaataatggtgcaacggatggtggctacatagtaccgacgcaactttgcagaagctttgttgaggctggacggttgaaagtaaaaaatgtaaagaacgatctcgaaacaatgtttgattag

SEQ ID NO: 430105 - DNA, 999 bp, Serratia marcescens
atgaataaggataaaaaaaaaccaaagcagcaacgccagtatcggctaaaaaagtctatctcttcccaaaaaacaacgaaaagcaaaaagaaaaagattgcaaagtcagcagctgaaaagaataaagctgaaggcatgacatttctgaaaagtagtgcggaggggcatgcaggagaattcttatttgcctattggatctcacggtattttaaatggccctgtcgcttgcttgatatagatatgggtctcgatgcacaggttgaaatttataaaaatgaattgtctacaggtatgttcattggggttcaggtgaaaaccacttctcgtaaaatggaagataaattagggattcagataccgtataaaaatataaaatattggggggattgtgacttccctatagttatcactttaatatgtctaaatgaagataatgatggagaagagcctgaaatatattggaagcacttagataaaaaacaaatttccaaattaagcagtaaagcatctaagaacctttctggatgcacctctgttacctttagcaagaatgatgattatcttgctgaatacgcggacaaaccgaaatgggtcgatatgtggatgactgaagaggataaaaagatcattgagatagcgaggagtgtcaacgataaattgtcggtgttaggaaagactatggaagaacatgatgatgactattcaggtagttcctatctgtgtagtccagatctttacattccagacttgaataatttactaaatgattatgagaaaataaacaattatatcttatttaaaagtcgattaattgatcttaatcctgatgttgcaaactgcattagtaactacaataagtacatacaaaaagcgcttgattattttgaacacctggtttgctctagcataggagcatatcctattacggaggatttcaatacgtgggatactataaaccctattctaaatcgaataattaaagagaactatctttactaa

SEQ ID NO: 430106 - DNA, 1662 bp, Serratia marcescens
atgtcttcaataaccaaaactccacctgccgcatcgccgcgtggcgcgatgctgaacctgatcagacggctgcatttttatatcggcctgctggtcgctccttttattctggtcgccgcactgtccggcacgctgtatgtgctgaccccgcagcttgaagaggcgctgtatcgcgatgcgcttttcaccgaaccgcacgggcaggcgagatcgctggccgaccaaatcgccgccgcccgccgtgaagcgggtgacgaggcgcgcatttacgccgtgcgcccggcgcccggtgcaacggacaccactcgcgtgcagttcgtcggcgccgatctgggcgcttccgagtcgcgcgcgctgtttgtcgacccttacaccctggcgatcaagggcgatatgacggtgtacggcacctccggcgtgctgccgctgcgcacctggctggataagttgcacagcagcctgctgctcggcgatctgggccgcaactacagcgagctggcggcctcctggctgtgggtggccgcgctgggcggcgtggcgctgtggctggcgacgcggccgaagcgcaagctgaaaagggtgaaagggggcttcgccgctaaccgccattggcatatcacgctgggcgtggcgctgctggccgggctgctgttcttctcggctaccgggctgacctggtcgcagtgggccggcggcaacatcgacgcgttgcgggccaacctgggctggctgacgccgcaggtcaacgccagcctgcaggccgatgcgccgcagacgccggccgatccgcacgccgagcaccgcgggatgatgcctggcatgaagatgggccctgccgcgcaaagcaatgcgctgaacggcgattgggatcgggctctgcacgccgcgcgcgccgccggaatagacgccgctaaggtcgagctgcgccagccgaaaggcgagggcaaagcctggacggtgaccgaagtagatcgcagctggccgacgcaggtggacgcggttgccatcgcgccgcaaagcttcgccgtcgtcgaccaggtgcggttcgacaccttcccgctcatcgccaagctgacccgctggggcatcgacgcccacatgggcattctgttcggcttgccgaatcagctgctgctggcggcgttcggcctcgggctgtgcttaacgatcgtgctgggttaccgcatgtggtggagtcgccgcccggcggcggggacgcagcatccggtgcagaccctggttgccgcctggctggcgctttccctgcctgcccgcgccgtcacgctgctggtagcagcggcgctgggttattgcctgccggtaatgggcgtgagcctcgcggcgttgctgctggtggacgtagggcgctggcgcggccagcggcaagggcttcgggacgaaacgccggaagcggccgcccgccgcgccgaggtgcgcaagttccgcgcggcggtggcgacagtggcggtggcggtctgctgcgtgatgggccgggcgatcctcggcggcaccgtcgaacaattccagctgccgatcggtgactggagcgcccagatggtgatcatgcagagcctgatggtgctgctgtatacgctggtgttcaccctgctgctttccattccgctgtggtatttcttcctgggggagaaagaggggcggtga

SEQ ID NO: 430107 - DNA, 234 bp, Serratia marcescens
atgccggtctttcaggccggtatcgtgcattcaatacccttgttctttctgactgcggatcgccagaacaaacgccgtatcgatatcaggaatgtatttgtagagcgccaaataaccgcgagcttgctgcccaataatcaattcacgcagccctgcgccaagggaccgtccgatcaatggattatgttccaataccgcaattgcctggatgatttcctgaatgcgccgccctga

SEQ ID NO: 430108 - DNA, 1095 bp, Serratia marcescens
gtgatcacgcaaacccccgtccctattggcgcgctcattgcgccagactatgccctgtttttacagcaagcggacatcacggaggctttccgccaccgtctgctctcattgacgttaaccgataatcgcggttttaccgcggatcgattggatcttgagctcgacgatgcggatgggcaaatcgccatgcccaaacgcggccaaacgctcaccgtgaagctcggctggaaaggacaagccttgatcgacaaaggcaagtttatcgttgatgaaatcgaacatcgtggcgcaccggataaactcgtcattcgggcccgcagcgtcgactttcgaaactcgatgaacgtggcgcgagatcattcctatcacgatcgcacccttggtgacatcgtcaacgaagtggccaaccgtaaccggatggggcatacgctggcggcaggactggcagagatcaaaatcacgcacatcgatcagtctcaggaaacggatgtcgcctttcttacccggctggcgaccatgaatggtgccgtcgccgccattaaaaatgaacgcctgctgtttctggtcccaggttccggtctaagcatctcgggcaaacctctgccgtcactgactttggaacgcagcgatggcgaccagcactacttcaatgtggccgatcggaacgcttacaccggcgttattgccaaatggcaagatactcagcatgccaggcaacagcagatgacagtacaacgtgaggaagggaataccacagatgaaaatgcggcttcaagctatctggcaggtgaaagcaataacgtttttaccctgccgacgctctacgcgaacaaagaaagcgcaatgcgtgcggcaaaagcgaggtgggcaaacattcaacaagggaatgtgcaattttccataaacctcgccgtcggccggcctgatctcagtccagaaacgccgatccacctgagtggattcaaagaggttatcgacagacaaccttggatcattagtcaagtcgttcacacgcttaatgatcgaggtttctccaccagcctcgcattagatgtactgactcaacgcatggagtttgcaatcacggaggggtga

SEQ ID NO: 430109 - DNA, 471 bp, Serratia marcescens
atgctgaccctcggcatgtttgtttttatgttgaaaaccgtgccttatcaaagcatgcaacgcagcgccaattaccgctggccgaccctgccgcgcatcggccagcgccctgccgcgcagtttctgggagtagacaatgagaaaataacgctgacgggagtcttggtaccggaagtaaccggagggacattatcattgatggcgcttcagctcatggctgcccaaggcagagcctggccgctgatcgagggcaatggaactattcatgggatgtatgtcattgaaagcatagtcgacacgaaaacccagcttttctcgaacggcagcgcgcgacagatagagtttacgatcaatctgatgcgcgttgatgaatcgctgatcgccatgttcggcgatctgcgccaacaagcctctgaccttgccgataaagcaggtcaggctgcggcgcggctcggggagatgctgccgtga

SEQ ID NO: 430110 - DNA, 2094 bp, Serratia marcescens
atgagtaacagcagacaggagctggagtcacaaaacgagattgtcatcgggcttcaagcgatagccaagcagagcaaagaactgatgaggcagttgcgcaggcccaccggggataaaaacctgtacaacagtctgggacaggatatccaacgagcagagaaaaaagtcaaacatctgcgccggcaggaaaatgacatcgacgctttccaaaagacgaaccagtcgctggctgagaccaataagttgctggcagcgtcgcgcaaaaaatccgccgcgctggcaatgctgacgaaagatcgcgagccaagccagcgttcccgatttatgaacaaagagattgctcaggtcgcggagacgataaatgccctggaaaagaaacgtgatctcctcgccgcaatcgataaaagccagcgccatcatcttacccagcaagggattaatctacaatcgctcggcaatgagcgcaaaaatctgcgtgacggcagaattaatgccggcgccgctatcgttaccctaaaagaacaacggcaatcgatagcgcaggagcgctatcgatccgcacaggcaggcaatcaagcgcgcctagacaagctggaaaaattacgcaacaccagcagcgcaggcttttctgtcgccaaaagtgccgccatagggggagctaacctgctggcgccgggaatcgaatttgaaaaacagctttctcaactgcgggcacagctgaatctgggcaagtccgatccgcagctcacggctctcgagcagcaggctcgcggtatgagccaatccggttataccccggatcaagccctacaagcgcaaacagcgctggcaaaacaagggttgaatgccaaggaaattttaacggcttcgccagccgcactgacactctccgctgcgacgggcagcagcgtcaacgaaatcgtcgcaacgatgacggaaatgcagcgcagcttcaatctgggccccgatcaattcgatcgtattgccgatgtattggcgctggccagcaatcaatatggcatggatgttcgggccgttggtgcagccatgaaaagtaaagccacaacaggtgccgatatattcagtgcggcgcaacagattgcgcctttgggcagagaaaaactccaggccaaccaggttgccggctcagcgcagcacttggtcaccgtcaaaggcgacaatatagagggtgatatccaaaagctttttgcctcatgggatagcctgagaatcaacttgtttaccggccaaaacgcagccctgcgggaactgacccaaacggcgacagagtggctggtaaaactgaatacctggataaccaataatccggcgttagccggcaccttgctgcaggtcgccggtgggctcacgttattgctcggcggcctcagcggcgtcagcctggtcgccacccaggtactctcagggttctctattatcagcggcgcgatcctaaaggccgggcaagccatgatgtggctggggcgtatagcgatggccaacccgctgctggccattgtcggcctggttgcgcttgccgctttcaccctgattgaaaactgggacaaggtcggccccttctttagccacctttgggagcagatatcggcagggtgtgaggcgctgaagaattacatttcagacaccattgatggctggataaaacaactgacttcattgaccgaatatcttcccgactggatgcaatttggcgataagagcggcacctctggcaatgccgaaaacggcagcgcctggtttgccggcaagttcgatcgcgggggagacattcctgccggacaattcggcattgtaggtgaaaacggtcctgagttggtcagcggccccgttcaagtgaccggccgccgccatacggccgccatgtcggcggctttactgtcgctcagcgcgcctgtaatgccggcctcaccggtagcaggttcgccggtaacccaaatccaggttccgtcggtcactatcaacatcactgccggcgccggtcagaatgaacaagacatcggccgcgaagtcgcgcggcaatttgaattgcttgctcatcgccaagcggcaaacgcccgcagtcggatgagttaa

SEQ ID NO: 430111 - DNA, 288 bp, Serratia marcescens
atggaactgaatgcatcccaggaaaacaccgtcgtcctgaatactccgattaaacgtggcgatagcgaaatcactcgcgtgcaagtgaccaagccgaatgccggcagcctgcgcggcatcggtctggccgcgctggccaacgccgatgtcgatgcgttgatcactattctgcctcgggtcacctacccgaacctgaccaaggaagagtgtgcccgtttggaactgcctgacctgattgcgctggccggccaggtgatcggttttttgtcgccgacatcggccgagtaa

SEQ ID NO: 430112 - DNA, 510 bp, Serratia marcescens
atggcactgccaaaaaaactgaaatacctgaacctgtttaacgacggcttcaactatatgggcgtggtttcctcaatgacgctgccgaaactgacacgcaagctggaaaaattccgcggcggcggcatgagcggcgcagcctcggtggacttcggcctggacgacgatgcgctggtggtggaatggaccatgggcggcattgacgaactggtgctcaagcaatggggccgcgtcgatgcggtaccgctgcgctttaccggctctttccaacgcgacgataccggcgacgtctctgcgctcgaagtggtgatgcgcggccgtcataaagagatcgacagcggcgacttcaagcagggtgaagataccgaaaccaaagtttccaccgactgcacttacttcaagttgagcatcgacggcaaagagctgatcgagatcgataccgtcaacatgatcgaaaaagtcgacggcgtagatctgctggcagcgcaccgccgcgccatcggcctgtaa

SEQ ID NO: 430113 - DNA, 1170 bp, Serratia marcescens
atgggtgactatcaccacggcgtgcgtgtcctcgaaatcaacgaaggcacccgcgtaatttccaccgtctcgacggccattgtcggcatggtttgtaccgcagaagatgccgatgcaaccctgtttcctctcaacaccccggtgctgattaccgacgtcctggccgccagcggcaaagcaggtaaaaaagggacgctggcgcgttcgctgctggcgatcgccgagcagactaagccggtaaccgtcgtggtacgcgtggcggaagggaaagacgaggccgaaaccacgtccaatatcatcggtggcgccgatgaaaacggtaagtacaccggcatgaaagcgctgctggccgctcaggccgagctgggcgtgaaaccgcgcattctgggcgtaccgggccatgataatcaggaagtggcgaccgcgttggccggcatctgccagcagctgcgcgctttcggctatatcagcgcttacggctgtaaaaccgtgtccgacgccatcaaatatcgcgccaacttcagccagcgcgaactgatgctgatttggccggacttcatcaactggaataccaccaccaacagcagcgacatcgccttcgccaccgctcgtgcactggggctgcgtgccaagatcgaccaggagaccggttggcataaaaccttatccaacgtcggcgtcaacggtgtgagcggtatctcggccagcgtattttgggatctgcaaaccgcaggcaccgacgccgatctgctgaatgaaggttgcgtcaccaccctgatccgcaaagatggcttcaagttctggggatctcgcacctgctccgacgagccgctgttccagtttgaaaactatacccgcaccgcgcaggtattggccgacaccttggccgaagctcatctgtgggcggttgaccgtccgcttaccccgacgctgatccgcgacatgatcgacggcatcaaggccaagttccgcgaactgaaatccgccggtctgatcatcgacggtgactgctggtatgacgaaagcgccaacgacaaagagaccctgaaggctggcaagctgtttatcgattacgactacaccccggtaccgcctctggaggatctgactctgcgtcagcgcattaccgatcgctacctggcgaacttcgccgcatccgtgaacagctaa

SEQ ID NO: 430114 - DNA, 558 bp, Serratia marcescens
atgatgaataacatgaaaaactttaccctcgccgcgccggaaacggtagaacagaaacagctggccgcctcgcacggtgttttgtttttaaaatccgatgccggggaagactggtatgaatgtcaaaaaagcttccgtcctgagacggtaaaactgatgtatgacaaggacgggatcattcgttcaatcaccgcgaaaccgaatgccgaaggccattatgacgtttccggatttttcccagaaaatatgagtgtggcggaggtcgaaaacttgccggaaggcgctgatatcaacggccgctggatttttgatggagaaaacatcataccaagatcgtattcaactcaggagctacggcaacaggccgccaataaaaaacaagagttgattaagcaaagttcgctgcagatagaaacgcttaacgacgctactgacctgggaatggcgagcgaagaggaactgcggctgctgacccgctggaaaacctaccgcgtattgcttaatcgggtcgatcccgaagcggccccggatatcgactggccgcaaccaccgcaataa

SEQ ID NO: 430115 - DNA, 1878 bp, Serratia marcescens
atgacagcaaaataccgcgccctgctcaccgaacagggcaaagcgctgctggctaacgctgcagcaaccggccaaaagctggaaattacgcatatggcggtcggcgacggcggcggttcgccaacgcagcccgatgaaagccagaccaagctggtgaacgaaaaacggcgcgccgagctgaattcactgcagatagataccggcaacagcaaccaagtgatcgctgaacaagtgatcccggaggacgttggcggttggtggatccgcgagctggggctgtatgacaaaaacggcgtgctggtggcgatcgccaatacgcccgacacctacaagccgcagttgaccgaaggtgccggccgcacccaggtcgtgcgcatggtgcttctggtaaaaggcgacgccaatgcggcgatcgtcgcagacaagaccgccttactggtctcgcgcgatacgctgagtgcagccattgccgaacatgcccgctcgcgcaatcatcctgacgccaccttgctggcaaagggtttcactcaattgagcaacgacagcaatagcggtagcgaaacgctggccgctaccccgaaagccgtcaaagcggttaacgatgcctcgctgaaaatcgcggcgaacctgaaagacctgccaaacaagtccgtcgcgcgcggcaacctggagctgggtactgccgccacacgcaacgtcggcgcgcaaaaaaccaacctgatggaggtgggcgcgttcggtttgggggggggcccgatacatcgcgaagacgctctgagcaaccgtggcgaaatctatcgggttacgggtgcatcgaaaaatgcgccgggcggcggtgtttatggcgtcttgaacctgccgtgtgacggcggcccttccagcggctatctggcgatccagcctaatggatcatcttacatcggcacgtccacgacccctgacaaaccgctgaactggtaccgaatttacactaccggctttaaaccgacggccacagacgtcgacgcctacagcaaggcggaagccgacgggaagttcgtcaaacagagcggcgataccattaccggcgctttaacggtcaatggagcgattgagagtaaatccggcctcactacaccctctttagccgtaaatggcagcgtaaccatcgccggagcgttgaccacaaaagccggtgtcgagctgttcggtaccaccccctatctggattttcattacggcaatagcaacggtgacttcgatgtcagactcatcaatgacaacaaaggcaccttagcctttcacggcaatgaatattacgtcaatggcaagctgagcgcgacgggtgatgcctggataggcggaaaggccaatatcaacggtatggccgctttttatagttctgattttattactaaacaaggaaatcttactcatcccgacggcaatcgccaaacaaacggtatgcgtctacaggggcaaggtaatctgctcgtcgatctttaccactatgagaaggtcgggagccaccatgagttcggtatccatgttgccaacggcggggccgatggctggttcagcttccgtaataacggtgaactccgcgcgaacggcaccttatttgctgcaggtgccgcttatcaaacagacggcaatattaacggcggcatttggggaggctatttaagcaactatctcaatcacaactttgtgcgggatgttcgcctgggtaatgtggaaagtatcgctacctggcgaggccccggctattcggatagcgcgggttatgtcctgaccggcgcagcaaacaacaacgtggatgaatacatcgacgtaattttccgtcgtccgctgcaaaaacacattggtggcaattgggttaccgtctggagcgtataa

SEQ ID NO: 430116 - DNA, 3294 bp, Serratia marcescens
atgagtaaccgtctgctgccggtcggctcttccccgctggaggtcgcggctgcggccgcctgtgccgaactggccgccatgccggtgccgctgcgcgatctgtgggatccagccacctgtccggtcaatctgctgccgtacctggcctgggccttctcggtcgatcattgggatgaaacctggacggaagatgccaaacgcagcgtcgtagccgccgctttcttcatccaccgtcacaagggcaccatcggcgctattcgccgcgtggtggaaccgttgggttacctgatcaaactgcgcgagtggtgggaaaccaacggtgagcccggcacctttacgctggatatcggcgtgttggagaacggtatcaccgaagagatgtatctggaaatggagcggatgatcgccgatgccaagccggtcagccgccatctgacaggcctggcgctgaacctcgaagccgctggcgcaatcgacgtcgccggcggtcaatatgatggagagcttactaccgtgtaccccgactatgccagtctcgccctgcaaatgctggagggacattaccaattcttgcaacgcaataccggcaccacgctggactcgactcagcaacacttcgtgttcaacgacgaacatgttttggccgattcccgtcatgaacgcgagctgtcgcgcatggcggggctgccgaacgacgccaccaccgaaggacaggctctgcagatccttggctatgcccatgcgtatctggcgaccggagaacaaaaatatttggatcaggccatcgcctgttttgacgcctatgtgacctacttttacgacggtgcgccgatccctgacagccctcaacgctggatcgccaactggatcgtcaacgccaaagagccagtgcccgccaattggccggtcgatacgagggatccgacgcatagcggtttcaaaggtattccgctaacgttcaacaagggccgtacgcagatccctcacggcgcgccctactggggtgaatatctcgatatcgctactttcgccttcgacggcgcgctggcctgggatgccgtcaacgcccaggtgcgcgcggtcaatgccgccggtgaaatcgactggaataacgccggtacacgctatgacgtggactggatcatcaattggcagggttaccagatcggcgccgacggcgagatcctggccaaagggctgcccgctgaacaaatcggtacggtgcaattaaaagacgccacgctcggcggcaatcacaagctgaatttcgccaatcgccaaccggtcgaacacggcggcgtgttaatcgaacgcaatcaggtacagcataaccgtccgctgcatgtgccggtcccgcacaacgccatgggcaacgcggccgatgccgagctgtggtttgccgacgcctgctatctgctacacagcatcaccggcgagcagcgctatttcaacgcctggaaaagcgttgaattcaccgcgatggaatataccgatattgatgcgcaggataagttctttcgccagagccgcagcgccaatacgccgtttaccgacggcatctcctacgattggtcatacccttccggtgcgccggtaagctacggccgcagcgccgaaggcatgatcaccattcgcaaagagatagcatcgcaacaatcgctggaacaacaggcaatctggttccgcattaatcgccagtcaaaaatccgcacctgctttggcggcgtcgacgatcagaatcagccgatctcctgcaaaatacagctgtctatagcaccggaaaaaaacgcggcgagcaccacggaatggggcatcggtctgccgcagtcgctccaacctcaggtaaaaacttacgacatcgcgctcagcagcctggcggcgctgacgaaagaagacggcagcgactatctgctggccgatctgcgcgcagtgaccgactacggcggttgcgcgatcgccagccaatttgaggaacaggtttacgacagccgcagcgcgacagtgatccaagcccgtttccccaatgacgacgccggcatggtgatcggcgcctggttgaccgcagaggaaagtttccccgttacgcagttggtctatcgcgcggacgccgacttcaacctgcggctcgaagatgatgacaaatggcgctggtattggatgctgcccgccaccggcggcaaatggcaaatcgcaaatttcgccccgcaagcggctacgctgagcggctatcagccggaccatcaggatgtcgagcccaaaccggctgcacctcgcttcagccgcgtcaagcaagtaaccattctgcaagacggaaatgtaccggacgccacgttcagctactacgtactgaacgacattccaccgacgctcaacgccgatgacggctacacgatccgctatcgcatcacgttccaggcggcacacccctacaccgcgctgttgggagactgcaccctcctgaatcaccgccgcgacggcctgttctgtacgccgggcgtcatgccgttctccaacatttatcaggcggacagccaacagttcgatggttggcacggcatgccttatccgggctaccagtacccgttcattttcgtgcacgccgccgccgatcccgacggggtgatgctcaacaacatggtcgagtttctgtggcagtcgcagcagtggtatcagcagcaattcggcgtgctgggccccagcgcatcggcctatatctggaaccgttgggacaatctgagttacggtccggcggatacctggaccatgtatcactggggtgacggcacggcctggtccggctatcagccacgcgccttcttcggtgccgcgcgcgcctggctcgagttacagcaggcgagcaaaacgccaccgctcaagctggtggaatatgtcgaaaactggctgcgctggctgattgattttaccaatgacgccggcggtgtcacgccgaccgatttcccgatggccggcctgccgcagcccgatgcacaggattttaccggccacatgtgcggcctgtggctggctggcgcggtgctggcaagaatggccggcagtgaaattgagggcctcgaacactttatcgaacaatgcgttacggaattacaaagacattacctctccaccggtgacgtgatggacggcggctggtcgcccgcgccgcgtctcggcaccgataacggcatgttcttcggcttttggtcaggcgagatcctgcgcggattgagtctgtatgtgatgtataaaaacggccttacctacccggccggcaaacagaagagaaccacaccatga

SEQ ID NO: 430117 - DNA, 909 bp, Serratia marcescens
atggcaaccattgacctgagtttattacccgccccgacggtggtggatcctctcgattacgaatcgctgctggccgatcgcaaggccacgctgatttccctttacccggaagagcagcgcgaagccatcgcccgcacattggcgctggaatcggagccgatcgtcaaactgttgcaagaaaatgcttaccgcgaactgctgttacgccagcgcgtgaatgaagccgcaaaggccgtgatgctgggttatgccagcggcagcgacctcgaccaactgggcgcaaacttccaggtgcgacgcctggtggtgcaacagccggatgacagcgtcatcccgcccttgccggcggtcatggaatcggatagcgatttccgcgtgcgcatccagcaggcattcgaaggcttaagcgtggctggatccagtggctcttacgagtatcacggtcgttccgccgatggccgggtcgccgacgtttccgcaataagtccgagtccggccaacgtgctgatttccgtactgtcacgcgaaggagacggtaccgccagcgccgaactggtggcgatcgtcgataaagcgttgaacgatgaagatgtgcgcccggtggccgatcgcgtcaccgtccgctctgccaacatcatcagctacaacatcgatgccgtactgtacctctaccctggccctgaagcagaaccggtgcgtcgcgctgccgaagccaaactgaaaaattacatcagcgcccagcaccgtttaggccgtgacattcgcttgtcggcaatctacgccgcactgcatgccgaaggggtgcaacgcgttgaattgaagaccccgcaggccgacatcgtattggacaaaacccaggcgtcacattgcgcttcttatcgtctgacggtgggaggctccgatgagtaa

SEQ ID NO: 430118 - DNA, 351 bp, Serratia marcescens
atgaacaacgcgaaatttcttggcatgaatcgcggcaacggccgcgcaatcgccgatctcgagcacattcgccagtcggtgagcgacatcctgattacgcctatcggctcacgcgtcatgcgccgcagctacggttcgttgctgtccgagttgctggatcagccgcaaaacgacgttctgcgattgcaaatgatggcggcctgctacagcgcactgctgcagtgggaaccacgcattcggttgacgggcatcagttgcaacaccacctttgacggaaaaatggtggtcgacattaccggcaaccgcacagatacgccggatgccttttctctttctatttcagtgagctga

SEQ ID NO: 430119 - DNA, 636 bp, Serratia marcescens
atgaacacagacaacttcgatattcagcgcctggtgcgcaacctgatacggatcgggaccgtcagcgagctcgacctggaacgcgggcgctgccgcgtcgccaccggcggcaatcttaccgactggctcaactggctgaccggacgggccggcgacgcacgcagctggtgggcgcccagcattggtgaacaggtcttggtgctgtcacttggcggggaacttgaaaccgctttcgtgttgcccggcgtattttccgatgctcaccccgcaccgtcggcctcagcacaggcggcgcatatcgcttttcctgacggtgcagtgctcgaatacgagccggctaccggggcgcttaaggccgtcggcataaaaagcgccaccattgaagccgccgagcggatcactctgacggcgccaaacatcacctgtatcgccagcggaaaaattacgctggacgctcccgaagtggagtgtacccagcaactcactaccggcaccatcgccatccatcagggcggctcgatgaccggcgatctcaatcacaccggtggcagcatcagctctaacggcattgtggtgcatacccacacccacggtggagtgcaaaacggcggaggccaaacggacaaaccagcatga

SEQ ID NO: 430120 - DNA, 465 bp, Serratia marcescens
atgttaaaacccgaacagctccgtgccgcactgttcaatgccattcccgtattgcagcaaaaccccgaacgattgcgccttggcattgctaacggccgcgtgatctcaacgctcgccccctcgctgtccttcgaatatcgctatcagctcaatctggcgctggatgggccgtcagctgacgacgaccgggtcatggtcgccgtactggcctggctgcgcagccaccaaccagaccttcttgccaatccggacaagcgtaaaaatgatttttcgtttcagagggatatagacacgccgaaccagttgatattgcagctgcaactcaccgaacgcatccgggtggaactgcgcgatggcgcattgcatatcaccccgctggctgaacctcccgaaccggagaacatcgttcgcttcacccaggtttatctacacggagagttactcagcgaatttggtcagccgtag

SEQ ID NO: 430121 - DNA, 513 bp, Serratia marcescens
atgagctcactcgctaaacgctgcagcgtggcggctattttaaccctcgctgccctgctgcctcagttcaatacgctgaaaacctctgagcaaggtttgcgcctgatcgccgatttcgaaggctgccggctttcaccctaccaatgcagtgccggcgtctggaccaacggcatcggccacaccgccggcgtgaagccgggcgccgtcatcaacgaacgccaggcggccgcccatttgatcgacgatgtacgcgccgtagagcgcggcctcgcgcgctgtatggatgtcaagatgccgcagccggtttacgacgccgtcagcgctttcgctttcaacgtcggcgtcaacgccgcctgcaattcaacgctggccacctttgtcaaacgtcgtcagtggcaggcggcttgcgatcaactgcctcgttggatttatgtcaacggcgtcaaaaacaaaggactggagcgccgccgcacggccgaacgtgcgctatgtctgagcggcatctcacgctga

SEQ ID NO: 430122 - DNA, 219 bp, Serratia marcescens
atggagaaactcacttcaacccttgcctatttcgtcgcggcttgcctggcctggttagggagccactctgcacaggacattgccatcctggtcggcgccgcagtcggcgtcggtacctttgcagtgaattggtactaccggcgtaaaagctaccagttgctgaaatcgctaaaaaaaaacggcctgaaacgcggagtctacgatgagctcactcgctaa

SEQ ID NO: 430123 - DNA, 207 bp, Serratia marcescens
atgatgaaaatttatgcacaacaaggtgacaccattgatgcgatttgctggcgctactacggcagcacgcaacgccaggtggaacaagtctatctggctaaccgtggcctcgccgatctggggcccctgctgccgcacggtcaaccggtggaattgccggacctgcctgcggcggcccaacgagaaaccgtcaaattgtgggattaa

SEQ ID NO: 430124 - DNA, 195 bp, Serratia marcescens
gtggaaattatggataaacaacaagtaacactgtcccgcatccaattcatcgccgatgtttcacaggctgcgcaatgcagtgcctccgagtttctgatcgccatgtcgctgatctccgatttggccagtcaggtgctgccgaacaatgattatcaagaaatattttatcccgctgacgaacaccccccctgctaa

SEQ ID NO: 430125 - DNA, 2097 bp, Serratia marcescens
atgtcgctcgccgttaaaaataggccggcggagcatctgccggtcaacgtctctgccatacaacacgcagcgtacggtgattacgcctatccatggaatgccccacgacgtgcgataggacgcgaagcggcgctgaatcgcgaccaactgcgccaatggcaagcgatactgcagtgcattcatgacctgccttattatttgcgcacgccgttccttgagcgccaccgccaactgctcagccagaagggagcctacgccgcctggcattatctggtgcgagttttccatcggcggatatggccacgcattcagcaggtaaataataatttcggtttggatcaacgcaaatcactgcactttggcagcgaagcggacagctatagcgcactgcccgcgctgggcgataaagcgctggagcagttggcgcggcgtatcgggggccaactttctgcgctctaccagagtgaatgtgacgccttgctggcgaagcacggcaataatgcagagatcctgctacacgcggatatacagcgccgcctctatcgccaaatcgccacgatggcccgcgccttcaatatccagcccatgcactggcgctgttatcgtaaaggcaagttggacagcgagcgggcaattgcggcgctgtcgcgcctgaccgacgatcgctggtggctgcggcgtctcaaaatgcaacgcatgcagtggcgcgaggcgctgcaaatcgcgataggcaacgtccgcaacaacacgtcaccttatgccagcagacaggcccttcacgatgtcaaggctcggcgtcaatcgaacctcgattatcttcaccgttgcgagctggaaaacgtcgccacgggcgagcgcgccgatcttatggataaagtgctcggcagcatcgccaatcccgccattcgtcgtatggagttgatgaataccctcgccggtatagaaacctacgccactcgcaacggccactgcgggttgtttatcacgttgacgacgccggcacgctttcaccctatccagcatgtcggcacacgaggcaaaatgcgcttcaatacacgctggcaaggacaagccctaacaccgaaggatggccagcgttatctggttgcccagtgggggaaaatgcgaaccgccttcaaggatcgccgtctgcaggtctacggtatgcgagtggttgagcctcatcatgacggcacgccgcactggcatctgatgatgttcactccacaaatgcaacgtcaggcagtgcttgacatcatgcagcgttatgcgctgcaacaggatgcagcagaacctggcgcccaacaacatcgtttccagagcaaacacctcaaccggggtggcgcaaccgcctatctggccaaatatgtcgcaaaaaacctcgatggatatgcattggaggaagagctcgatcgcgaaaccggcgccccgctgagcgataccgcccgcgcggtcagcgcctgggccgccacctggcgcatcccccagtttcatcccttcggcctgcccggtctcggggtctaccgcgaatgtcgacgtattcgcggccaaaacctgacgccgcagtttgacgccggcaccgaagccgtgcgcgccgctgccgacgccggcgactttgccggttacatacaggcgcaaggcggcgccaatgtgccacgcagccaccagtgggtgcgtgtcgcgcgcgaagcctcagaaacccggaacgcttatgacgagcccgtcacaaaagttgtcggcatttatgcaccgcatttgggaattgagcgggtataccgaacgcgcaccgtgcaatggcggatcgtcgctaaaacactcgccgccgcgacgccttggagttctggcaataactgtggaacgcgcgctctttacttgccgccggcacccgcgccgtcggctcgtttgacgccgccacagcggcagcattgtctgaatattgcccgcaaacttcgaggtattggcatagaaccgcaacgctggcagttggaggttctcgcacgcggcggcaaaattcattttgacggcctccttgtacaatttccgctaatcaatgattggccgtatttttactgcacaaatgataagtccaaccattga

SEQ ID NO: 430126 - DNA, 306 bp, Serratia marcescens
atgctactggccagcgaggagcaacgggctatcggcctgcggcgtattgctgaaatccgccgcacactgtttgcccggcaacccaaccatgccgaagagatttacgacacggcgccgctgcacctgcgccatacgttttgcttccacgccgggctgactgaacgctatgtgtggttaaagtttcacgaaatgggttatgccgaacggcggaaaatcgtcgcggcactcaatgaactcatctcgctcagtcaatcgttgccgcgctatatcagcgaaacagactgtctgttaaccccaaaaaaataa

SEQ ID NO: 430127 - DNA, 867 bp, Serratia marcescens
atgcgtgaagatgcaacaaacaacaacacctccgtgggagcggtaattgagagagttctttcatcttatggcgttggcacgcagaaggaattgagtgaaatccttgggatagcgccgaataacatcagtagttggcaacagcggggtagtgttcccggatatgtcattatcaactgcgcgttaactacgggagcagacctggcctggctgatgactggtgaacttgcaaattcaaaagtaaatcgcaagcctgcgtcatctgcgcaaggtaaagcgctttacgatcgcgttttggcttccggcgggaaaggggtattgcgccgcattttggatgcttacggtttcaatctgcaaaaagaattgggcgacctgctgggtatctcttcaggcacgatgagcacctgggtccgccgcaactacttccccggcgatatcgtggtgacctgtgctctggatacaggcgtctcgctgctgtggctggcgacgggccagggggagatgtggggtgatgccgcatcggcggttccggtatccggagttcgcacgataccgaaatatcgcctgctcgccgggcagttgaaagagggggggcagtggtcggcagactgttctttgattcctgacggcgtggctcagccggcttatgttgatggcgggcgcgtatcctggctggtggatctggccgttacgcatatcgccaatggccgctggctggtggacatcgacggtaacctggacgtatacgatatagcgcgtttaccgggtaaccaggtgcgggtcagcggcggcaacgtcgactttcaatgttctccggatgcattgaaagcgcttggcatggtctggttaacgttgacgccgcaggcataa

SEQ ID NO: 430128 - DNA, 375 bp, Serratia marcescens
atgataaagggtatcagcaatacggccgagacagcgcgcgggctggcgggaacgatgaaagcgcgcgccgatcttaactcaatggccttcagtgagatgctgggggcagccgacggcaaggcgcggcaaaacaaggcaaatccgctgtcgcgcatcaccgcgcatacggtgcaaaacatgacggcgctgttcgcctccgcgccgaaagcggcggccgcgcaaaccgcgaaggccggctcgctctccttcgagcagcgggcgacgctggaggaaagcgccgaactgctgcaggcacggacaaactatctgcggatggcgctgcaattgcacaatccgggcaaggcgttcagcgcgccgacgttgctcaaactgtga

SEQ ID NO: 430129 - DNA, 213 bp, Serratia marcescens
atgcgcggccgaaacccgattgccgggttgtggtcgctttgcgttatccccgccggccgcgggaataacgcaataacccattggattaattatcttttgacgtcaccgggaaaggcatcaatgcctcccccttacgcccgccgcttcctgaacatcccgcgcagcgccacgctgttgcgcaagaaggccacgccgaagcccagcagggtgtag

SEQ ID NO: 430130 - DNA, 789 bp, Serratia marcescens
atgacgggtaagttaagcgttcaaacggttctgtttgaatatcatggacaaaaatataaggtcttcctggcatgcgataaacggcatgttgggtgcaacgaattaaatccgttgtattttttagatgccaacagacactttgagaccctaattaaggcgggttatcacggtgatgatgtatcccctgtgctttatattggaatcggttatcaggagggggtcgatattaaggcggctcgcacatttgactatacggtgagcgatggcagcgagcgctttaaagacgggggcggagcggagcaattttatcgatttattcaggatgtcgtcaaaccgtgggtcgaatgtcgttttaaggtcaataagcaaatgcaaacgctggcggggcattcgtttggcgggcatttcaccttatacgtggcgtttcatcatcaaacggcttttcagcgctatgttgccgccagtcccgcgctctggtgggcgaatggcgcggtgctgcccgaaggcgacgttaagcttgccgcaagcattgattggttatcgctgctcttaggcagccgcgaggagcgggcggagccggacagtaccgatcttgagaaagagatcttccagcgcataggggataacccaaggttgaatgtcaggaatctggcgtcgcagttagtgaaagacggcgagcgctgcagcttcgagtttcttcccgggcgcaaacatccggcggtggcaaaagattatgcacgcatagcgaatttcgttgcgagccaaaaaccactgccaacagggctgtga

SEQ ID NO: 430131 - DNA, 543 bp, Serratia marcescens
atggattttaaagtgacgagagggttgctgcttttggctggattatttttctctatcacggcggtggcaaagcctattcaaaccgatgagaccgcctcattgattaaccagcgattgtcttacatgaaagacgttgccgggtataaggcaaacaaccatctggccattgaggatttgcctcaggaggccaacgtattggccaactcagtccgcgaggcggaagcattgggattggatggcaagtcggtggctccttttatacaggcgcaaatggatgcggccaaagcgattcagtatcgctaccgggcagactggctgtcggcgccggaaaacggctggcagcctgaatcgctggacagtgtgagagcgaaaatcagccggctgaatacccaaattttgaccagcgtcagcaataaattgaagaaaggcgagcgctttaatgacaggtttgtttttatgaaatccctggaacaaacccacctgaaagttggcgataaagaacgcctgtggcagtcattaaagcgaattgcgttgaaagggtaa

SEQ ID NO: 430132 - DNA, 603 bp, Serratia marcescens
atgctagccttctggcacgaatactcaggtctcatcaccgcatttttggcggctcttttaggtggttggttcacgatgaaaggagtgacagttcaggtgaaacaacaggcaaaacagcaggcaagggcggccagagagaaacgtataacaacgctattgggtatcagagaggaaatagactcactgattaaattgtatctagccaggatggcagaagaaatagaaaaatacgaccggaactcaccgttcgataacatttttccaattacccaaaactacttcacgttctatgaagcgaactcggcatccctagctgaagttcatagagaaacactctcaaaaattgtggcgttttatacaaatgcaagaagcctgattgattcctatcgcggtaataatgcacttatcgaaaggctcgactccacactggttgccagtgacattactggcaatagagagcatctcgcacacctgaaaagatacacaatcctagctacagagtacggccgcgggttaatggtgattcatgaagaagttatgctgagctataaacaggttatagaagccatcaatggtgaaatcgcacaactacaatgcagttag

SEQ ID NO: 430133 - DNA, 1041 bp, Serratia marcescens
atgctcacctattgtattgtctctgctacatcaatcattgtgctgtgtattatactatataaaattaagcctaaatatatttattattcttttttatactataagaaaaaaataacccaagataagaatttatctagccgttgcattcagtatgtagccaccatttttttatttacagttctgtatttttttatagattacgttccattcccagattttattggcaagattatgccgttattgcctgattatattagtgccttgttagtgtctctaaaagggaaaggcgcttcaataacactcatactggcattaatagaacttgtaattttaatatttttgttttttattttcatgaaaacccccacatctccaaaaaacaagatagttaatgagttgagtttagataaaatcataaattataagaatgtaaatatattctcattctttggttctatagaagacataagtaatattcaagtaattgtgacatctgagaatagtgatttagaattagcgagtttttcaagcacatcaatatctggcagggtaagaaatatggcgtcatctaaggatgatgttggaaatgttatatctgacccactgtatgaaaatatttatatttttaaaagtaagcataataagtataacgattttaatctagggacatgcattccttcgcaaccttttaaattacagaatcatggggtgaagtgtgttattcacgcggtcgcaatcaaaaaaaataatgacaatacaataagttgcgatagttccgctataaggaaaataatttcctattcaatagggaaatgcatcaataactctttcgaaagtatttttattcctatttttggtatagggagtgctcagcaagaccctacctatttaattaatgatcagttagaatcaataaagtcagtattagattgcgagttaatgaatgccccatctactttaagtatgaatatttatttaggtgtttatcgcgaattagattgtttattcttaaaaaaatcagcaataaaaacgtttaggtag

SEQ ID NO: 430134 - DNA, 906 bp, Serratia marcescens
atggctagttttattttctataacattcaagttcttcctaatgaaaccgctgaagaaataggtgttaaaggatacaaaaaaatcttcagcttattaaaagaaaaaaacaatgaagagctgaagtctgggaatcatttaagttatcattttaaagttgggaaaaactcatatttcggcccgtatgagttttttagtgagcagggtggggttaatggaaacttcataaaatataacgacagtgatgatgtaactgatttgttgacagataaggttttattttcaaaaagtaaaaaaaatgctgctgtttcaggtaaaaagaaaatccctttcgtgtttgatgccaaaacccatattctagcaatagatcaatctgcggcaccatctcaagaatatgataagttacttgaaatattaatgtattacattaacccaatagtaaaaaacttattccctgaatatacattaactatcaacttattatctctccctagtgctcttgatgaagtttttgcaaatgctatatcctataaaaatgttgaagttagcgttttcgcccctaatggagatgatgcagaagatattttagaagaaatgagaaagagcaaaatgcaaaaactacaattgagtggttcaagcggcgatagtagtatgattagcatacctaatttcttgaagaaaattctaaaatcagcacaaactcatgggaagataaaattaagatatagagttcaattgcaaaattctaatgaaacaaaattaatgacatatgactctgaaaaatctccactaaaacttaatctccgccataataaatctgataaagacgaccgaggtttcttaagaggttgtttaagaaaaatcagagagttttgtgagctgaaaaatgatgagatacaaggggattaa

SEQ ID NO: 430135 - DNA, 612 bp, Serratia marcescens
atgatgagatacaaggggattaatatgttcaaattattcagaaaaatccctgtcgttgggacaatgatttttattatcaacagttatgtctacaatggcgaccttagttcaggcgataagtttgctccacttgccatgtggataaaaaagctttttggtaagttcgtcgtggcttcacttttaacaggtcttgttttttgtaatgaaataacatcatatttaaacataaatacttttattgaaggtactatcaatgctaaaaacccaggcagcataatcgtatctacttttccatctctcataggctttgggataggagtgtatgctttaatattggtacttagtgaatcagttgtaagtaactttcaaaaaataatatcaggaaaaaataatacgtctggcagtgttttgatgttgagctcagatttagcatatcctatgttaattcttgtgctaacactttctgttggtattttacagggtgtgtttatcgacagttataagttatgtgtagtaacatggtttatgctctggtatagctttgttgttattattgagatgctgggggtattattcggtttgtcaaataatagcttgctggataagctttag

SEQ ID NO: 430136 - DNA, 762 bp, Serratia marcescens
ttgcataaactactagatacaataacgacgttaatatgtctgatttctttggaaaaagttgaggctattgctgcacgtattcgtcaaaccgaagcttgcaaagccacagcatcgttatcaggcgtggtaggaacacctgcagcaaatattgttattaagcagcttataatcgactgggaaaatacaaagattagttcagatgagcttgcgtccatgctcctcgctgcgagctatatatatacaaaagttacggcagaacaatcaactgagctcgtatggactggcccaacaacacctttcgtatcagctcgccgtaccgaacaagctcttctacaaatcattagcaatgccaaacagtcattatttattactagttttgtggcttatgatgtatctagtattgtcaatgctttgaacgtagcaataaaacgtggagtggttatcaccatgttattggaattatcatcagaatatggcggaattattaatttcgatcatatttccaagatgaaaacacttatgcctcatgctcgaatctacttatgggaaaataaaccctctgagttttcagatggtcgcgtacatgcaaaagtgatcgtcgccgatagtaatacatgttttatcacaagtgcaaatctcactggatatgcaatggaaaaaaatatagaagtcggtgtgcttattacaaatggaagtattcctgcattgttgcatgaacatctgaattaccttataagcaccaaggtaatcactcctgtttga

SEQ ID NO: 430137 - DNA, 1863 bp, Serratia marcescens
atgagtcttgatgagaaaacccccgttggtgaagtacgtcctagccaaatactttggacctatgggcctggagcactaattgatcttccaaacctatctgtcataacgcttggaatagatcggtgggaaaagaatcgttgccagccaattcaggaaacccggctgcttgaggcggttcggatgaaattgggagatcaagtcgaaagtttgcgtatgccaccatttcagaaaggtgaagtggccgacaagtggtctgctgaagcaaatataggagttcccgtacgtcctttcccgcgatggctacgttgcgtaaagtgcgggcttctttcaccttatgatactggattatttgagatcaaagaaaatcggtatagacccgaacgcactcgctttcgccacaaaggctgccgaggttctaaaggcgatcagcctgccagggacgcggatgccgtacctgcccgcttcctcttggcctgccgtgatggtcatcttgatgattttccatggcattactttgttcacggcggcaacaactcgtgcaaagggacgctgcgattctttgaaagtggagcctcgctacaaaccgaaaatctatgggtaaaatgtgatgaatgtggggcatcaaggagtatggctcatgcgtttggtaaggcaggaaaagagaatcttcctgcatgcagaggacgtcaccctcacctagattacttcgacaccgaatgcaatgtggaaccacgtgcagtattgttaggatccacaaatagctggtttcctatgacgctgtctgcactcgcgatccctctactacatgtatcaccattgcatcaaattattattgattattgggatgatctcgctgatgtagaggatcgttctgagttgaaagggattctcaaagcactcaataaaaggggggaggcccaaggcattgagaaacatgaccttgaggcaatttgggaagctattgaagcaaatcggtccgatagtagtgaagaatctgtcggtgagatcgatatcaaagggccagagtgggatgttctaatagaaccgaatccccccgcagactacccacatttcatgagtaagaagacccacacaccgccacgtttttcatcatttatcgaacgcgtattgctcctagaacgcttacgtgaggtcaatgcattaataggatttactcgagttgaagcgcctgaagaatctgacgatcctagtgaacgtgttccaatggctaatctatcacgaaacagacctgactgggtaccagccagccaggtacatggcgaaggcatcttcctccaatttaatgaagaagccctagttgcctgggagtctctggatgcagtcaaaaaagttgacagaatgctccgtggtggacataccggatggcgaaattcacgtcatcttgatcccgaggagggctatccgggtattcgctttgccatgctacacacactttcacacttattgattcgtgagatggcactggaatgtggatacaacgcctcaagtattcgtgagcgaatctatgccaatacaagcaatgataaccctcaagctggtatccttatctatacagctgccgcagattcagatggaactttgggtggcctagtcgatcttggtaaaccagaaaatcttggaagattactggaacaagcgctgaatcgctcaacgatttgctcctctgatcctctatgttctgaacatgatcctgagaaggaccgttcgttacacggtgccgcatgccatgcgtgcagctttgtagccgaaacgtcgtgtgagcgtggtaaccgttatttagatcgcgcattactcgtgccgacacttgagcatactgccgccgcgttcttcaaggatttctga

SEQ ID NO: 430138 - DNA, 3999 bp, Serratia marcescens
atgacagagaaaagcaaatcaactatatcgcctaatgcatggttcgctattgaccgtgaccgagtgaaagagcccgccttagcctcctttgcactgcaattaaaaggtggacgtccccttaatcaaggtatatccaatgacgattgggtattgatcctagataaaacaggtcatatcacccgagttgggcgtattctgcgtattcgctctgatctcgaaaccaccacactctttttcgatcgaatgttgcaggttgagccatcggtttcaattggtatgacctccatcaaattacctgctaaaggaagctctggtcgcattcaatggaaagatttcattgaaattctccccgatgtgctgcacacgagcattgctgaaataccaacgatcgaagatcaaacctacatccgtgaattactgcagttggctgtgatggatgacttgctcggtccggcagccggtcctaatgaacttatagttgatatgggagtgagagaccgctatttggttggtaagcttgcgccacgtgaagctgcggaaaaaggaatggagattccagtaaatcctgaggatgcggttgataatcctccagacctaattgttaaggctcagacggtaaaagttaaatctccgacagaacctggtcgtggggagcccgatacacaagaggaaattgatgccgctagcaaccaatcattggtaccaagcagcctcggaatgactttctgtgtagatggtgatattgttcaaattgaaatcgaagctcgttggggtcgttacgaacgcagcgaagatcatgagatctatcggactcgaaaaaataaggaaactggagtcgaagaacagacgaaagccaaggtgtggcagcgcatcccttgcggtggaaaattatccttattgttaaaagaaggggtaatttcacctcaatcactggacagttcctccccagaagtattggtacaaggcaccatccgttccaagaatcctaatggcgatcgtctggtcacactattccttgtaaatacgcaaaaagagccagaaaccaaccgtgatacagcatggatcttccaacccgaattgatcgttcgtcccgaaaaggatgcaaacgaacaagctattttcagacgtaagcccgttctggacgctaacggtatggatccagaacgcgaagcactggaaatgatttacctgaaccgcgtagagtttgcagtaggacatggtgttgcggtgcatgctgaaactgcagataacgtagaactagcaacagaaattcgtacgacggtgatacctcagtacgaggtacaaagaactgagactccaggtcttgatatatctgatcggccagcgctgcagaaaatggtaagtagtggtttccttgacatgcagacactggcgactttggatatagatgcgctcgtcaatgcattgagtatgctgaccaaggactatgatgcttggatatgtgaacagtactcaagcataggaaccaaggctacaagatttgacgcccaagccctagcagccatggatagatgcaaagagattcttatccgcctacaacaaggtatcgacacccttaaacataatgaaaaagcgttgacggctttccgtttcgctaaccgggcaatggcaatacagcgcatacgcagtttgtacgcactggaaaaacgtcgtggaaaagatgttacggtcgaacaatataatgaagaaaaaaaccgcagctggcgcccttttcagttggcatttctgttgctttccatcccatcgttggcggatccacgccatcctgatcgagtacaacctgtaaatgcttatgctgacctgttgtggtttcctactggtggtggcaagaccgaagcctatttaggcgtagcagccttcactatggccatacggcgcctacagggtaatttaggcgggtatgacagctcacgcggcttggccgtgatcatgcgctacacacttcgcctgctaacactgcagcaatttcaacgtgcaactgcattgatttgcgcaatggaagtattgcgccgcgaatcaattgataatggagataaatccctcggcatagagccattcactatagggctttgggtcggaaataaggtgactcctggtactaccgaagacagtcatcgagccgtagaagatgcccgtaatccagacaaatacaatgctgcagcagcgtcacccgcccaattaacaagctgtccttggtgtggtagcgaaatagtaccagggcaggatgttgaagttcgcaaggacaaatcgggtggccaaaccttcgtttactgcggtgacaaaaaagggcgttgtgatttttcaaagggcaaatcaagcaatcattcacatccaggtattccagtattggtagtggatgaagagatctatcaccgccctccgacgatgatgattgccacagtggacaagttcgccatgatggcgtggcgcggtcaggtacggacactttttggccgggtgggacaggaatgtccgcgacatggtttgctctggccaggagccaactgcaacggcaatcatccagccgccaaggggcaaccttccaccaaggcgaaaactatcggccctatccggccaccagacctgattatccaagatgaattccatctaatcagtgggcctctgggcaccatggtagggttatacgaaaccgctgttgatgagttatgtagttggacacttgatgacaagaacgtcaaaccgaaagtcatcgcttctacagcaaccgtccgaaaagctaaagaacaagtaaacagcgtcttcatgcgccaagtagcagtgtttccaccacatggattagatgttgaagataactttttctcggttcaacgtgcaataaaagagaagtatggtcgtcgttacctcggcgtatgttcacccggtagctcaaggcctgcaatgctgattcgcgtttacactgctttcttgaccgctgcacaagagttatttaaccacttcggtgaaccagccgatccctacatgactatggtcggttatttcaactcgctacgtgaattaggtgggatgaaacgacttgcagaggatgatgtacagacacgttcttatcgggtccaaatgagtatggttgagcggcctgcactggcacaacgcagcataagcaacattcgcgaactaacttcccgtgtatccagtcaagacattcctaaataccttgataacttagaggttaaattcaagtctgaatttgatacaactaccggtaaatatgttaccagatggcaggagggtgatactcgagccattgatatagtactcgccaccaacatgttatcagtaggcgttgatatcaatcgacttggcctcatggcagtgaatggccaacccaaaggaacagcggaatacattcaggctaccagtcgcgtgggacgctcatttcctggtttagtttgcacagtactcacatgggctcgtccgcgagacttatctcactacgaaacatttgaacattatcacgccactttctacaaacatgtagaggctcaatcggtcaccccattctctcctcgagcaatggatcgcggtttaacaggaactctgttaagtcttgtacgtctggagaatgatgcattcagcccgaatgaaggtgctggccaattgagtacgtctaatcaattcgaggtcagcaatgccatcaaagtgctggcaacacgggctgggaatgttgcggaagacaactcgcgtaaaaaattagcagagaatgaattgaaagagcgcgccgacgaatggacgaaaaaagcatctatgggtggaagaattctcggatatgaaaagcgtgggcctgaaaaggataagacagttaatttaattgaatcaccaggtctgaagccctggaataactggacggttccaatgtcaatgcgagaagtcgaacctggtgtacgactgataatgaacaaaagtcatatcactgatggtaaagattggaagccacgtccaacaacgaaggatgaggattga

SEQ ID NO: 430139 - DNA, 4059 bp, Serratia marcescens
atgagtatgactaatttacacgctgattggctatcactgatcgacatttcaggcccctttctcgcaatccccgtactgatggaagccttccctcaggggctggaagaactcaacggaaccaaacgcaaacgggtacggcaggcctatgatgaatggcgtgaagcactggaacaggacgatcctcagttaattgaattgcactatgcatggcttgatgaggtcctatctcgagttcttgatcttgatgaagatagtaaaagtgatgtactaaaacgcgtagaatggtgcgcaaaccatctggaatctgtgttaccggatcatggtgtagcccagtatccagatttagccgttgttgatgagcaacatgcaaacaagccattgatgctcatccacacctatacaccggacgtggagcttgaggccacaatgaaaagggatggatggctaactaccccggcagaccgcatggtccagttatgccgctctcttgattgtcgtctcgggttagtgactaacggtgaacgctggatgttagtagatgcgccagttggtgcagttacctccttcgccagctggtatgcacgcctatggaaccaagagccaattacgttgcaggcttttgtgcacttgctcggaatccgtcgtttcttcgttaatgaatccgagcaattaccagcattgttcgactgttcgctgcaataccaggacgaggtgaccgacgctttaggtgaacaagtccgccgcgccatagaagtattaatacagtccctcgacaaagcggatcaagatcgtaatcgcgaactgctgcacaacgtcaaagagactgagctttatgaagccgcactgactgtcatgatgcgtctggtattccttctctcggctgaggagcgcggactactactcttgggcgacgaacgctacgagaccaactatgcgatttcaactctacgcatgcagttacgtaaagagtcttcagaaatcctcgaacgacgttgggatgcctggtcacgcctgctggcaatctttcgtgcagtttactgcggcgtagagcacgagaacttgcgtctacccgcattgggtagctcactgttcgatcccgaccacttccctttccttgagggaagggccaaaggttctaattggcgaacagatacagctaaaccattgccaattgataaccgtactgttctgctcctactggaagctattcaacagttccagggccgcacactctcttaccgtgcattggacgtagaacaaataggttatgtctacgaagggctgcttgaacgcaccgtcaggcgcatcggtgaagtcacgctagaactagatgcaacaaaaaaagcgcaatcaccttgggtcaaattggctgagctggattctgcaaacatggatggtattgagtgcttggtcgaattgctgcaagaacgctctggtagttctgtcagtagggtacgaaaagatctgactaaggcagtcgacgacaccttagccgatcgcctcttaacaacttgccaaggcgacgtacaactacgcgaccgaatcaaaccctacgttcacctacttcgaaccgatccctggggttatcctttggtctatcctgccggggctttcatcgtcaccagcggttctaatcgacgcgagactggcactcactacacaccgaaatcgcttaccgaaaccattgttactgaaacgctaacgccgatggtctatatcgggccagtggaaggtactccacgtgaagcgtggaaacttaaatcccccgtcgaacttcttgatattaagatctgcgacccagctatgggttcgggtgcttttcttgtacaagcctgccgctggctggccgatcgtctcgttgaggcttggtcgctgactgaagaagcaggaaaaacggtgagtgcggatggctacgtactggagatgcctgacacaaaagagctactgccacgcgataccgatgctcgcatcgtcatcgcccgccgccttatcgccgaacgctgcctgtatggtgttgacttgaattcactggcagttgagcttgccaagctttccatctggctagtaacgttagctaagggtcgaccctttgggtttcttgaccacaacttacgctgtggggatagtttgcttggcatccataggattgatcagctcacccagctttcgatgaatcctacaactcaaggacagctgcgtctgttcggcaaagatattaagcgagctgtacacgaagccattgcgctgcgccagcaattacgtgagacacctatccgcgatgtccacgacgtggagtctatggcacaattgaacaccaatgcacgagtcagattagatgtgccgggaagtattgcagatgcgtttatcggggaagtattagcagcgagaggcaatgccgtagcattggaaaccgctttagtatctcttgccatccaagccgagcaagcgatggaaggtgataaagaacaacttatattaatgcagcaaagggctattactactttttctactgatttaccagccagtaagctgcctcgtaaacctttccattggccattagagttcccagaagtgtttgagtttagtggaggatttgactgtattgtcggtaatccaccatttttaggtgggcaaaagatcactggtaccatgggtgattgctaccgagagtatttggtaaacgcaatcgcaggcggcaaacggggctctgctgatttggttgcctacttctttattaaagctaattctttacttggtcctaacggattttttgggttgatcgcggtgaataccatatctgaaggaaataccagagaagttgggcttgattcaatacttaatttaggctcaatcatttatagagcaaacccaaatttagtttggccaggaaaagccaatgttgttacgagtagtgtatttatttcaaaatcaaaatggaacggccccttatacatttcagaacatccagtttcaatcattagtgcggcattaacgcatagagaaaactggcaaccagttagactatctaatagttgcggcttagtatttcagggtgccaacattcttggtgatggatttttagtcgatgaagaaacctatgctacttggaattcaaataatgataaatcgtgctcagtagtttttgactacttgataggtaaagaagttaatcaatctccaactcatcgcccaagcagaaaggttataagttttttcgattggtcattggaaaaatcgaaaacctatgggtctgcttttggtttggtccaaagtaaagtaaaacctgaacgtgataagcttaaaggtaacgcaaccgcagaggggaggagaaaaaactggtggaagtatggacgagatgcaaaagcattatttcatgccttgggtagaggatatacatttgaaaaacatcccaaagaatgggataaaaacaaaaaccctcttgagcgagttatagtttttgcaacgggtgcaacaaaattcccttgctttacgcttgttccaaacacttatatttattcacactcgctttgtgtaattgctagcgatagtttttcattgtttgcttgcctgtcatccgatattcatgggatatgggcgttcgaacaaggctcacgacttcatgaacgacttcgatatactcatggtgatatctttgagactttccctttaccaataaatatttttgataagaacgagaaatctctatctactcttggagaaaatttcttcgaattaagatcgaaatatatggtaaatgaaaatctgggaatgaccaagttttacaatgcatttcacagccctgatatatattctccatcgctgagcgagcttcgcaaactgcaagtaaaaataaatttagcggtgttacatgcctatggtttcgatgacctggacttaagccatggttttcatgaagtggcatacttaccagaaggaaaaaacattcgctataccatcagtgagtttgccagagaagaattgctctatcgcttggctaacctgaacagaattcggcatgaagaagaacaaagagaaggatctatttataagagaaaatag

SEQ ID NO: 430140 - DNA, 3174 bp, Serratia marcescens
atgggcggtactgaaccggaatctgaacatcttatggatatttcaaatcaagcagaccagtctcaacaaattactcctgaaccaggacagctcgttgaagttcgccgacgccaatggctcgttgtagaagtctcatcctctcaattaccaactgcttcatttcagcagcattcagtgactctttcttctattgatgaagatagtttaggggaactacttgaggtcatctgggaaattgaaccaggggctcaagtaattgaacgtgctggtttgccatcaattactggtctagatgactcagacacccttgaggcctttcttgatgctgtgcgctggggggcagttaccaaagcagaccaccgtaatttcttacaagcaccttttcgtagtggcgtcagcattgaggacttccaactggatcctttggtacgtgcaattgacatggctcgtgtcaatttactcatcgccgatgacgtaggccttggtaaaaccatcgaggctgggttaatcattcaagagatgttacttcgacatcgtgctcgtacggttttgattgtctgtcctgcatcgttgcaggagaagtggcgtttggaaatgctggaaaaattcggtctagaatttcatatagtcgacaccgattatatcaagacattaagacgtgaacgaggaattcatgcgaatccgtggacatcgcatccacgattaatcacttcgatggactgggccaagagcggagagggcctacgcgccatgcgtgatgttctccccctaaagaccagctatccacgcaaatttgacatgctggttattgacgaagcacacaacatcgcaccagtaggtggagcaagctacgccatggaaagtcagaggactcgattcatccgttcgatcagccctcacttccagcatcgattgtttctaaccgctacaccacataatggctataccgaatctttcacttctttgctagaactgctggacgatcaacgcttcgctaggaacgtacttccagacgagaaactgctgaatcaggtaatggtacgtagactcaaaagtgatttagtcgattctgagggtaagctgctctacgctcaacgcaaactcgaagccctatccgtcgcatactcagcgcaagagcgctccatccacgatcaactaaatgaatactgcaaaagtagagaacaaggtgcagagaaagctaataaaatctttgggactgcctttgtcaatcagctactgaagaaacgactattttcctcacctgcagccttcgcatccacgcttgaaaaacacatagcaactttaactcatggcaaacaaaccagtgacaagaacgctatggcagagcgtattctacgtaaagcaattcttcgggccgaagaagattacgccgacgatcaagaggtagagaatgcccaagcagaggccgttgaagaagcctctcgtcacaccctaccgctcacgcccaaccagaaacagatattgaatgatctgcgccaatgggcacaaatagccaagaaccaagtagattctaaagctaagggtgttcttgattggattgacacaaatttaaaaacacatggtcagtggaatgaacaacgggtgattctgttcaccgaatatcgaaccactcatcaatggatgcacgagattcttgccagtcatgggcttggtggcgagcgcttggctattcttcatggaagcatgccgcaggatgaacgcgagaaagtcaaagcagcattccagacatcacctaaaacctctcccgttcgcatcctacttgctactgatgccgcttcagaaggtattgatcttcaaaattactgtaattacctgatccatttagagattccttacaaccctaatgtaatggaacaacgcaatggacgtatcgatcgccacggacagcgccagaaagaagtcgtgatctggcatcccgtggatggaagtgaaaacggtgatcttcgtatcggtggtcacggtgacgacatccttcgagctctacgaaaactcgaatcaatgcgagcagacatgggcagtgtcaatccagttatcgcaccacaaatgtcaggtttgattgaaggctctatcaaagaaattgatactcgtctagctgaatccagaatcgcaaaaaccaaacgctttattacagctgagcgcgaactaaaagaacgaattgctaagctacatgatcgacttctgtctgctaagcatgattttcatcttactcctgagcatatccacatggccgttaataccggtctcacacttgcaggccgtccaaatctagagcattttgagctaccggatatacctcctggctctgtattcaagatgcctgctctgtcaggtacatgggcacgctgtcttgaaggattgcaacacccctacacccaacagattcgccccataacatttgatcactcagtagctaaaggccgcgatgatgtcgtactggtccacttgaatcaccgtttggtacagatgtgcctgcgtttactacgagccgaggtgtgggcacatgatgatgtaaagaacttgcatcgagttacagtacgctcagtaccagacacattacttgatagtcctgctgtggccgtcgtctcccgattggtcatcactggaggtaatcaccatcgacttcatgaagagttgacagtagcggggggctatcttggtgacaaagcttttcgacgtgaagaaggcgtcaataaaattcaacaatggttggaacaagctaaatcattgaccactgaatttgcgctatttgatgccttccgcgttcgttttaatcgtgcacaaaacagcattcttcagtctgttgaggcaagatcaaaagaccgtctgcaaaatttaactaatacccttcagacccgtaaaaatcgtgaattggctgatatcagtaatgttctcaatgaacttgaaagaactattactgctgagttggcgaaagatcaacaacctatgcagttttcactattctcagaagatgaacgaatacaactcagacgtgataatgctgccttggaagctcgtcttgcgcgcataccgacagagcgcgaacaggaaatacaagctattgaaactcgctacaccaaaattgatgactgcactttcccggttgcagtcatttttctcgttcctgaatcttctattcagaggggtgtagtatga

SEQ ID NO: 430141 - DNA, 1053 bp, Serratia marcescens
atgaaaaaagtatcttgtgttgatttattttgtggtgcaggcgggttaacacatggtcttgtgcttgagggagtacctgttgtcgcaggtattgatattgatcctgcctgcaaatttccctatgagactaataatcaagcaaaatttattgagaaaagcgtaagcgatttcacatcttcagacttgaatgacctttacgctgattctgatgtgaggattcttgctggctgtgcaccttgccaacctttctcaagctatgcaagacgttatgagcacggtggtaaggatggaaaatgggggttattgtacgagttttctcgcttggctgaggaaacgcgccccgatttgatcaccatggagaatgtcccctcagttgcaaaacatgaagtttttaacgactttgtcgacaccttagaacgcattggttaccacgtttggtttagtgttgttgattgtactcaatatggcgtgcctcagatgcgtaagcgcatggtactgcttgcctctttacatggtgagataaagctctctgagtcaacatgtactcagcctgttaccgtaagacaggccataagtgatttgcctgctttaaaagcaggagaaactggtactggggataagctacatgtgacttcaatgttgtcggaaaagaatatgcaacgtatcaaagcctcaaaaccgggtggaacatggcgtgactggcctgaacatttaattgctgattgccatcgaacggatcgaggcaaaacgtactctagtgtctatggtcgaatggaatgggataaaccggctccgactatgactactcagtgttatggttttggaaatggccgctttggtcacccagaacaagatcgcgctatctcgttgagagaagcggctattcttcagagttttccccaagactacgtatttatacccaatgaaagtaatgtaaatcttagagttctgggtcgaatgatcggaaatgcagttccggtaaagctcggtcaggcaatcgctcgcagtataaattcacaccttgatgatttgaacttagtcgcaacaaagtga

SEQ ID NO: 430142 - DNA, 516 bp, Serratia marcescens
gtgccactacagcggcagtttaccgttgtccggaccaatcaggtctgggtcaccgacatcacttacatccgcacctggcagggctggttgtatctggcggtggttatcgacctcttcgcccgtaacgtggtgggctggtcgatgaagccgaccctctctcgcgaactggcactggatgcgctgatgatggcagtctggcgacgtacaccggacagcgaggtcatcgtgcactcagaccagggcagccagtacggcagcgacgactggcaacggttctgtcgggccaataacctggcacccagtatgagccggcgtggtaactgttgggataatgcagtggccgaatcgttcttcagttcactgaaaaaagaacgcatcaggaagagaatatacaaaacccgggatctggcccgggcggatatcttcgattacattgaagtgttctacaaccgggcccggcgtcacagtcaccttggcggcgtcagtccggaggcctttgaacaggcttcgtcgtga

SEQ ID NO: 430143 - DNA, 351 bp, Serratia marcescens
atggaacgcttcttccgcagtctgaaaacagaatgggtgccgacggatggttacgcaggtagggacgaggtccggcagcaaattaatgattacatattgaactactacaatagcgtcagaccacaccactataacggagggctgacgccggaagagtccgagaacaggtatcatttttactgtaaaaccgtggccagtattacttggccactacactacacacctgcctctatctggcaaatgttacttacccatctgcttgaacagcactatggtctaacgctaaacgacacacctttcagtgatgaaacctttacacaggaacatttcactataggtatccatctctga

SEQ ID NO: 430144 - DNA, 864 bp, Serratia marcescens
ttgaaggaatatactggagcggttttttttgtagatattcttggcgttggcgctttaactcaaggtaaaatagaaattagtgaaaaggatttctcagcacataattttagatatgacagtaagttttcagagcatcagttttgcgcaaaattactattgaaatttaggagggtattaatatcatccactacacatgtaaaaaacattaaagtggctcaactatctgattgtgcattcatctggtctgatgatccagatatagtagttaatgtcgcaagggatataatgtggaaaagtgtactaggtggacttctttgtaggggcgggttggcaaatggacagatcgttgagcctgataaaataaacactaagttaggtatgtttatttgtggcggtgcagtaaccgacgcggtaagacttgaaggaacaggtaaaggtgcaagagtatttgtcaaacaagagttagtatcagagttaaaaaaaatcccatatacagcatttgttccaagaaagagtctaattgatttttccacaatagatgagtttaaatggtatcgatatcctgatgttatcaagtcggctaatgaaaacttaaataaaaaattagtcatgaatgagattgtaaaacttatagccatgcttaagcactctccaaaatatatatggaatgcgtcaaaccctttagggcgagttcaactagctagttcgattgatatcatctcatctgaaaccgaagtacttgcaggaaattcagatttaaaatttgattatgaaaatatggttgataatttaaataacagaagtgaagagaaatataaaaaaaccctaatcaattaccataagttaattaagtcatcagtttga

SEQ ID NO: 430145 - DNA, 414 bp, Serratia marcescens
atgaaagctaatttcttactggccattgcaggatcgatattgctaagtgcctgtactggcgatcgtctcgatcagcgctatgtgccggacatccctatcaccgcccatactaaagcgaatggcgacatctgtatctatccgtcaccaaaggaaaatgaaaggccagatacgctctttatcagtggtgatacggatgagaaattgattgaggtagcgagtcaggatctgaaaaatggcatttgcgttacgcagaacgattacatttttcaggaaaaccagacctataacataaggctaaatttcgtaccgattgataagcgccgagatctgcaggatgtttccggcagagcctttatcgcccacttcaaagtgagaaaatttaataatcactttgttatcgaaaacacccaataa

SEQ ID NO: 430146 - DNA, 198 bp, Serratia marcescens
atgctgactatcgtccttaaggacgagacgctttcaacctgcggccgcgctcacggcggcgcgctcgctcagcatgaagcggatcggctcagcccaagcaaggtcatcattttttcgtcttatacgtttggcgccgactggcgctatcttcaatgcgcaatacaggaagcggtggaaaagcctggctatcgttcttaa

SEQ ID NO: 430147 - DNA, 801 bp, Serratia marcescens
atggattacagaagagatattcttttacaagtattggagtatatggaaaagaatattgtggaagggctttcggttgagaaggtttcaattatctcgggttactctaaatggcatttacagcggttgtttaagcattattttggcattacgctcgggacgtatatcaggaatagaaagctgagccgatcggctgtcttgctcaaacagcatcaagggaacatattggatgtcgccttggcatcggggtttgcctctcagcaatgctacacccgggcattcaaacgtttctttggcgaaacgcccaacagctttagaaacagccggggatgggatttttccacgcagatccccccgtacggcaacgataataaaccctatttctatcatacggtcatgccggatgacatcgagatgctgaagcattacaaaacattaattttccattctataaggaaatacagagatgccaatgatattgcgcagactaatgagaaacggctaagcaaaaattggggggcatataatgtagagaaaagcagggggaataaatgccatgccaacggcaaggagcaggcggtttttcactccatcttcaacttctatatcccaatgggcaaatatattgttattccctttatgggcgagttgcctgagtacgttaatttttttgaggggatatatgacgcttacttgccggctatcaacgccaaaatgagggaaagcttctttatcgagctatatagagatgaaaattcaaacagtaaggttatcaatgtcgatatacttattcctgtgacgtag

SEQ ID NO: 430148 - DNA, 243 bp, Serratia marcescens
atggatagagaaaatcgccccgattcgatgaataaacggcaccgcgcactcctgctactgtatttaaggctgtctgcctttggccgaatcatcgtcgccggtttagggaaacgggccattcaattcacgctggcattcattctgttcatgttttcaggaaatgcgatggccaataattgggaacatcagccaatcgcgttggcaggaatgacctggatggcgtgcctgcacccgcagggatga

SEQ ID NO: 430149 - DNA, 798 bp, Serratia marcescens
atgtttagagtatttattttttgtttcgcctctttattatctcagcaagctttagctggcgcctatatgctcccggtctcttttgttaacctgacggttgttcaatcgctggttgcgtgggatgagagcccttctgatctcaacccttgctatgggtggacgtcttgttttattggccctgatgtaaaatacagtactcgatatcctggactacacggctcatgtgtagactccaaaaattgtcttcggattgaaaattatagaacagcaaaagaagtggagatcgcctggaagaacaccttcggcattccatggacctcgcagccttacctcgtgaatggcagagatgccagctgtgttgggatgttctatatacgaacgccggcaatatccggcggtgcgagtttatggcctaattctgtttgcggcatattaccaccacaaaaccaatcttgtgatgtgaatcttcctacagtgatagattttgatacgctttcacaagacgagatttccgggatggagagaacgatttatggaacaatcggatgcactcaatcaggcacgataaaaatttactctcaatctacattgggcgaggggaatatttatttaagaagcaacaagaaattttattcaacgctttttttagatggcaactctgcatggacaggcgtggattattatctggttggcggccaacaaagaaatatcagcctaaaagcaaaactgacagcccatgataccgtcgacccagggcctttctcaggtaatgctattgtatacattgcatttctataa

SEQ ID NO: 430150 - DNA, 912 bp, Serratia marcescens
atggcgaactgggcgcagaaattgaagctgcaccatctgcaaatgttagtggcattgggtgaacagggaaatctgacccacgttgcgcggatgatgaacatctcccaacccgctctgtcaaaatggttgtcgcagctcgaagatgagattgggctcacgctctttgagcggcatagcaaagggctgcgcccctccgagggggggaaattgctgcttcagcatgcgcagcgtttgatcaatgatctggagcgttcgcagtctgaaatcgcccgctttaagcaaggcgggctggtgggaagcctgaaaattggctgctcgccggtggcgaccgactgcgtttcgcaggccatattgagcctgctgcaagaaatgccgacgctgcatctcaatattgaggaaaaggtgatgaccccgctgctgcacgatctgctcgcgggcgcggtggatgtcgtcgtgggccgcgtcggggggcgggcgctgcaactgccgctcaactatcaagtgctctacaccgaaccggtatgcttcgttgcccgccctcaccatccgctggcaaaatccgcctccctcacctggcacgatctcacccactggcgctggatagtctggccgaccggcacgccaatccgcctcagcatcgataatgcgttggcagataacggcgtgatgctgcctgaaaacacggttgaatcggcatcgatgaacgtcagcaccaacctgctgcaaagcagcgacatgatctccattctttcactacggctggcgcagcgttatgccagccaggggcaactggcgatcctgaacctgccgaagattgagcagaaaggcagcgtgggtgttttctggcgcaacagcgagccgccttttgccgcgctgagccgctttttgcagctgctgacgcaggccagataa

SEQ ID NO: 430151 - DNA, 207 bp, Serratia marcescens
atgacctataaccaaaaaatctggttgggggttttgctgctatgcaccctgttttgggtggcggtgatcggcggcgcctgttcgctgtatcaacgcgtggatcgctttcaggcacatcacgcagagagcgagttcgcagcccgtcacggccaggcgccttgcgcgcaacccggcgctcaggcgtcgactgccccccggaatgggtag

SEQ ID NO: 430152 - DNA, 879 bp, Serratia marcescens
atgaaaatactcgtcactgggggtaatggattcactggaaagtatgtggtctcggcttttgaagcggcgggttatcaagtattggtaggggtgcgcagcacccctgtattagataaagaagttttatttaatatcctaaacaaagatagcctgtgtgaaactttattaaaatacagacctgatggaataattcatttagctggaagtgcatttgtaggtgagggtgactccagcgttttttatttaaataatacggttgggactctcaatcttatcgaagcgataaagctttctggtatagatataaagaaagtgatagtttcaagttcagctaatatctatggtaaccctaccgtttccactattgatgagagcattgagcctattcccgttaaccactatgcctctagtaaacttgcgatggaaagcatgctaaagggatggtattctcaaatccctgttattgtcaccaggccttttaattacacaggggttggtcagggaataaactttcttgtcccgaagattgtgtcacatttcaaacggaattgtgatgtaattgagcttgggaatattgatgttgaacgggatttttctgacgtttcagaaattgcaacttgttacttaaagctttttgaaagcgagcatacctctacggttgttaatttatgttctggtaattcgacctctttgaaaaaaataattgaggatatggagtctatcagtgggcaccgtatggaggtacgaattaaccctgcgtttgttcgtagcaatgaaataaaaattttgcgtggggataatgcaaaacttagaaatatgattaattttgccccttcaggtatattacatcatacgttagataaaatgtttaactcgtaa

SEQ ID NO: 430153 - DNA, 1110 bp, Serratia marcescens
atgaaaattgctattgtccatgattggttagtcacttatgccggtgcggaaagagtcctcgaaagaatgctcaaagtgtatcctgatgctgatgtgttctctatggtggattttttagaaaaaagggacttcatacaaaataaaaaagttgttacgagttttgtgcaaaaacttccttttgcgaagaaaaagtacagagggtatttaccgttaatgccttttgctgttgagcaattcgatctttcaaaatatgatgtcattatttcaagctcgcatgctgtggcaaaaggggttataaccggcccagatcagttacatatctgcatgtgttacagccctattagatatgcttgggacctccagcaccagtatttgaaagagtctaatctagaatctggggttaaatcgtttttcgcacgttattttttgcacaaaatccgcctttgggacattagaagcagttatggtgtagatcatttcattgcgatatcaaactttataaaacacagaattaacaaatgctatcgtcgtgattcagatgttatttatccgcctgtttttgtcgatgatttctcaacagtttttaacaaagatgatttctatatgacatcttctaggcaggtgccatataaaaaaattgatctgattgtcaaggcatttaatgagatgcctgaaaaaaagcttattgtgattggagatggtccacagcataaattgatcaaatcgattgctggaaaaaatatcactatcatgggctatcagaactttgaggttctaaaggatcacctgggtagagcaaaagcgtttgtttttgctgctgaagaagattttggtattgccccattggaggctcaggcatgcggcactcccgttattgcatatggaaagggcggcgcaacggaaacaatcattgctgatggtgataatgcgacgggggtattctttaagaaacaaagcgtggaggatatcattgacgcggtgaatagatttgagtcgatgaatatatctccaagcgcgtgtcgtgataacgcagagcgtttttccactgcagtttttgataaacagttcaaagagtttgttgagtgcaaaatcagtcaaaaatggagttaa

SEQ ID NO: 430154 - DNA, 1401 bp, Serratia marcescens
atggacagtttttcaaactccaagtcaaaaacaaagactaatacatccgttatttctgtttttcaacggcttcttgatttattctctgtgtttctgggctggcagcttgcaaccacttttggtagtgaagatgtaagcctgttaattgttttgtttgttatcattgcgtttcaattcatttctgacgtaaataatgcatacaccacatggagaggagagcatctgctggtaaacatttatcgcgttggtgttaatttttcactggcgctaatcttatgtggtacatgtttctattttttctatgatattaaaccgaagctagtctctttttctcttttttggttttttacttcgttattgctttttctgacttcggctatattcattagattgcttttttggttcttaagaaaaaaaggcatgcgcataaagaaagtcggtatttttggtgagtctgaaagtgcatatcgtttgtctcagcactttaatagctacccatggctcgggttctctcttcatggattttacaataactcagggactgaacacattggtgataatctgattaatcgtttagggaatgaagataaattgtttgctgatgttcagaaaggtctggtgaatcacgtatatattgctacagactattacaatgacgaagagctcaaaaggatattatcaaaactatcaaatacaacatgtagcgtaaactatatacctaatgcgatttcttatggtcttctcagagctgtcaatactgaaatagagggggtttcaataatttctgtttatgatacatcatttaatggtgtcaatatgctaactaagcgttgttttgacgtatttgcttcaatgttactaataatcttcttttcgccattaatggtgcttattgctttatccgttatggcgacctcacctgggcctatcctctttaagcaaaaacgctatggcctcgaaggtaaagaaattaatgttttgaagtttaggacgatgtattgctcatccgatgatacaaatttcagacaggctactcctgacgatcggcgagtgaccgtcattggccgtgttttgcgtaaaacttcccttgatgaattaccacaactttttaatgtcttctacggctcgatgtcgctcgttggccccagaccccatgccattgcgcataacgaggagtttcggaagttgattcatggttacatgttgagacacaaagttaaacctggaattactggatgggcgcagatttgtggttggcgcggtgaaacagatacgttagaaaagatgacaaagaggatagagtatgatttgttctacattaataactggacgttgatgttagatataaaaatactgattatgactatttcacgtggctttcttaataaaaatgcttattga

SEQ ID NO: 430155 - DNA, 1878 bp, Serratia marcescens
atgaatagacgtttttttttaaaggaagttagcctgttggctttgtgggttagcgttgaagcccgtttttctctttccttagccaaaagtctttctgctgaaaatccgcaactaataacacttgagtcaattaaaaaaagtatcatgcctgacaagcttgggagtgtgatagcgagagtttccgcctctgactactccggctcctctaccgttcgattgaatcgtgagtcttcagaggataataaggatatggcaggtaaggggtggtctgatatagggataataaataagaaagcattactgtttgattctgaaggaaaagctttttctctgatggccaaaagtggtttcttttccatcgaaagtcttggcggaggtatcggtactgacgacagtgcgctgatggagatcgctcaacatttatctacgcagcccgttcaattggttaaagataaagtttattactacggcaatccggtcagtcattccggaggagctggatggatcggaaataatgcgacgataaaatgcctctctacatcatctgatgctcctcggtttccatttatcacttctcctgtgacagctgacaatacacccaacgataccctgcattcgagctcaggagtacgaggtgtagtgtttaaggatctaactatcgatactgattatcacgatactactggaaaggttggattcctctatgcagagaatacactacatgattggagtgattgtctttttgataatgtaagttttaaaaatgctaaatttgataatcttgccatgcaaaaaaactgtcatgatatagtatttaagaactgttcatttaccaactctgggcaagatagtgtcgtggtcagaaaaacgtgctatgagatcaagttcattgatggatgttttttttcagataccgcaaaagtgcaatctggcggtgatggtgttgttataaaagggcgtggtattagcgttataggttgcaggtttgagaatattggcctcggtaaaaaaggggctgcgattgccaataatgctgaagatgcggataacgcacaagagtctagtgatggcgtgtttaatgataactactttctcaactgctatggtggtcttgggattggcacggtaaaaagctcactggctttctcaaataactggatatcaaatgtcacagcttctggtaatacatttgaaaatataaaaaaagttgctattggtgcaagatatgttcgtggttttatttctaacaataatattgtgaagaaccagtcgagtgcaagggatttttcaatagagctgctccatgtcgctgatgctgattgtgatttttctgtctcacagattgaggggggagccattcatctacgtgattgttccgggaaaattaaattattggcaaataatgttgctatctctggtttcaataatgccgtttttatcgagaaaagccatgatgttgtggcagatttgaccgtaaacaattccggccgtggtggaggctacattgataccctgagcagcagttcaatttctatcaagtcttcgatgacgaaaggagttgctctccaggtgctaaatgctacaagctctaaaatcagtgcggtagttagagactcattacttgatggtatctttttgaaagactttaaaaatattactctgaaagcagatgtaaaaaacagcggtaaaaatcaaaagggaaaatataatgccgttgctgtattttcaggaaacggtgtgaaaatagatttgtcttccgattctggcaactatttgtatgatttatttgtcgacaaaagtgctactcaagttgaggttgctgatagtttatctgtgttaaaaactaactactcagatgccgatttacgaggtaagtag

SEQ ID NO: 430156 - DNA, 534 bp, Serratia marcescens
atgcaggttatcgatactaaaatcgatggagtcaaagtcattcaaccaacggtatttagtgatactcgcggtttttttatggaaacgttcgagaagcgtcgctttcaagacatgctggatattgatttggacttcgtccaagacaattattcacgctcttctcggggggttttgcgcggactgcactatcaagatatcaagccgcaaggcaagttggttcgtgtggtgcgaggcgaagtttatgatgttgctgtagatattcgcccagactcacccacatttggcaagtgggaaggcattgtgctatcggaagagaacaaaactcagctttggatcccgccaggtttggcccacggttttgtcgtgctctctgagatcgcggattttgaatataagtgcacggattactattcgccagaacatgaaaggtgcctgatgtggaatgatcccgatgtcggcgtggcctggcctgttcggcaccctgttttgtcggaaaaggacaagaacggcaaatttctcagagaactgatttaa

SEQ ID NO: 430157 - DNA, 879 bp, Serratia marcescens
atgagagttcttttaaccggggctaaagggcaggtcgggcgctgttttatcgatcgggtacccgccgattgggttattttagcggccgaccgcaatacgatggacatttccaaattggagcaggttaaggccgtcgtccaggagtttaaaccgacggcgatcataaatgctgcagcctatactgccgttgataaagcggaacaagattgcgaggctgcgttgttagccaacgttgtgggcccagccaatttggccttggttgcaaaggcaatggattgccgactgcttcatatttctacagattatgtttttgatggcctgggcaagcttccctacaatgagttggctggtacccgcccactgtgcatttacgggaaaaccaagcgtgatggcgaattggccatcgtatcagaaatgcaagatgcgataattcttcgcacttcttgggttttcagtgaatatggcgaaaatttcgttaaaaccatgctgaggcttgctcggcaacgtgaatctcttgatatcgtagccgatcaacgcggttgcccgacatatgcgggggacatcgcagacgcgatgataaaaatgttgctttgtgaggttcagggagggatttatcacttctgcggggatgaagaggtctgctggagtgagtttgcggagcacatatttaaagttgctgcggagatgggggcgatttctcgcatgccaaaggtcagtaaaataacatcagagcaatatgtgactttggctaaacgtcctaaatattcaaccttgagttgcaataaaatcaatgagataggtattcctgcttccaattggcagtcagccctggaatacgtgatttctcgattgagaaaaatgggttacttacaagagtaa

SEQ ID NO: 430158 - DNA, 825 bp, Serratia marcescens
atgtctttaccggctattgaagatgaaaaatttcttacaatctcattagtaattttcaaaccgaatcttgtagatttaagaaaaacccttgccgcacttgttgagacaaacgtttttaaagcacgcgactgttatttattggttgttgataactcgccaactactgatcctgcagtcacttcgctaattaaagagttccttgacgttattcccggaaattacatatcacgaccagacaatcctggctttggagtgtcacataatttaagcttagctattaagtcaaaatacacccttattttaaaccccgatttagagatggataaaaatgcattagagaatgcattctccttcatggatgctcaccctgaatgtggcttaattacgccgtatgcaacctgggggagcggggaaacacaatatttgtgtaagcgatacccttctgtatttgtatatttattgcgtttctttgcctcggttaaaggaaagcgttttttcaaaagttatcttcgacgctatgaaatggctgatacgctaacgcctcacgatgtttatttcgatccgcctatcgtgagtggctgctttatgtttttccgctacagcgtactgaaagaattatccggattcaatcctaaattctttctttatttcgaagatttcgatctcagcatccgtacggcaaaaattaccagaatagcctatgtccctgatgtcaaagtcgtgcattacggtggccatgcggcgcgaaaaggctgggcgcatattaagctattttcacgctcaatgattactttctttaatattcacggctggaaaatttggtaa

SEQ ID NO: 430159 - DNA, 1086 bp, Serratia marcescens
atgaaaatcgtctatctttcagctgttccctggttgagcataagtcagcgccctcattttttcgccaaatatgcgctgacccatgccacccaggaacttttgtggattgagccttatcctagtcgttttcccaccctcgccgatctgacccccggccgccatgcccctgaacctgcaggattggatttgatagagggtctgcaactggctcggttgggttttgtagcccccgtggagccgatacctgcgttgtttaagctgctcaaccaagggaaaataaagaaaatcattgacgatataaagaattttatatctgaagataccattctggttatcggcaaaccctgtctgctggccaacatgcttatcaagcaatttaaatggcggcaagtgtggtatgacgccatggatgatttcccttcgttttattctggcctatcaaagaaaaacacggctaatcttgaaaaagaaatcgcccaacaagttgaccgcatattctgttcaagtcatgccttaattgagaaattttcgtctatcgcccccagcaaaactgagttggtgttgaatgcgtgttcagatgacatgcagaaaattcatatcccgaaaacatcgcatgaaaaaatcacatttggctatatcggcacaatcgcaagctggtttgactggaagtgggtgttcgagttggccactaaaaatccggaagcaatcataaacctcgtagggccaagaaaaaccggaattccggaaagcttacctcaaaatatcatcctggaaccccctatcccacacccccaggtaatgaaaaagatatccacatttgattatgtgattattccatttttgcagaacgacattactaaatatgtcgatcctgttaagttctacgaatacaggttggcaggaaaagccatcctatcgactccatttggcgagatgctatggcatcacaaagaagaagcctacaattctgacacaacgctaggcattactatacctgacaacacgctagtttttccttcacctaaaaaaccaaacgacatcccaagatggagtggacgattctctcatgtctttaccggctattga

SEQ ID NO: 430160 - DNA, 1113 bp, Serratia marcescens
atgttaaagaaaattatgtgcgttgtgggtactcgtccggaagcgataaaaatggcgccggtgatcaaggcacttcatgcctccggtgaattcgacgtttgcgtattggcgacggcccaacaccgagacctgttggatcaggctttccaacttttcgaaattgaagccgattatgatcttaatgtcatgacacctgggcaaacattgccagagttgaccgcgcgcctgatgaccagcatcgaccgaactctcgaagaggcagcaccggatttggttatcgcacaaggcgatacgacgaccgtattcgtgacgtcactggcctgtttctacaagaaagtgcctttcgctcatctcgaggcggggctgcgtacacacgacctctattcaccttttcctgaagaagcaaaccgtattcttgccggacatttagcacgcttgcattttgctccgactgaagtatctaaaagcaacctcttgcgcgaaggcattcctgcagagcatattcacgttacgggaaacaccgtgattgatgccttgctgacgaccgcacaaaagacgtttgatatcggcgtcgatattccccaagacgcccggatgcttcttatcacttctcatcgcagagagaacttcggccaacctattgtcaatatctgcaacgcagctcttgaacttattgaaaagtatagtgatatctatattcttttccccgttcaccccaacccaaacgtgcgcgaagtcacggatcgtctgttaaaagaccacgaaagaattaagctggtcagcccatttgactatggccctttcgttgccgccatgaagaatgcctacctgattctttccgactctggcggcgtgcaagaagaagctccggccttgggcaaacccgtcttggtcttacgtcgtgataccgagcgcccagaagccgtctcggaaggcgtggtgaaattaatcggaacggaacaagccgacatcgtaagagaagcgtctttgctgcttgatagccctcaggcctatcaagaaatggcaaaaggaagctctccttacggtgatggtgagtccagccagcgtatcgtccgtatcgtccgcaatttctttactgaacaatgccaatga

SEQ ID NO: 430161 - DNA, 1053 bp, Serratia marcescens
atgcttcgtaaaatagcatttatctatccttgggcgacgcatggcggtgttgagaaagtcatgctcacccgtgcccgtttattaaacgatataggcacctatcagattgaccttctttttactcatgattccggtgcggcgaaggcgatcaccgccgcactctcggactgtaaaaatgtcgatgtcaaaatcatcaacttcgattatttattaacgcaaaattacagcctcattttttgcattgatttccctgcggctctgacattttgccatacgcacaaattgaaatactttgcggaatgccatacagcctataaagaaaacagggcttacttgaataaaattccggacagttgttcggcaatattgtgcccatccgcgttctttatgaagcagctagagcctgaattgcacaaaagtgcctgtccattgttattgctgcgtaatttcgttccttgggatcatgtctctcaagaaccgcatgcgattccctctctgccaacatggtcgagaagacctattctcttcctgggacggatggacaagctaaagaacctgactgaattactggacgcattcgttattttaaaagaacgacacgcggaaaaatacatgctagttctgtgcggcccgcagtcttctgaaatcaacaccaacgccgagctggagagcagaaatctagtgggcgacaccgtatgcttgccgccagtgccattcttgaatgtggacaagctgctgttggcgatctctcaagccaacgggatttttgtgtcgccatcaaccggagaatcatttggtttatcggcttcagaagcgatttgtgcagacgtccccgttgttttgtccaatatcgaagcacataactatttagttgccacgcgtgaaaatgagtttacttactcgttgcatgatgctcgccaattgtcagaaaaaatagcctctatatctgacaattatgcgcaatctaaagcatcacttgccgctctgaaagaaaaattttccgcccatgcctttatgaacgattgggacgaattgctacgcagaaccgaatag

SEQ ID NO: 430162 - DNA, 2766 bp, Serratia marcescens
atgaataaatcaatacttatcataactcagtattactcaatcggtgggttggaaacctatatcaacactcaggtaaaggatctggtcgcccacggttaccaggttcatcttatgtacgccgttgtcgcagacccgtcattactccctgacgggttgagctcgtgccatgaaaatattcatttaagcaacggctctatcgaacaactcgttcaaggcgtagacctgatacgacaggttatcaaagaaaaaggcatcgatgtcattcatgtgcatccttttgactgcattttccctgccgttatcgccgcagactgcgaaaaaataccgtcgctattaacattgcacggccctctgtcgctgcagcattttactcggaatatttataatcaggcgttggccatttattttctcaaaacgctacataccatattttgcgtttcgcaggaaacggcggatcaattggcggagatcatagaccacccctcggtgatgatcgttcctaacctgatagacaccgcccaaacgcatcccgctatcacggatgagactggtgagaaaagatggcttatcgccagcaggctggatgaggataaatccgcagggattatgaagttcattgacttcgccagccgctgccaaatgattcatggtattgatatttacggtaccggtagtgatgaagacactataaaaacctacgttagcgataataacttcaacgaatgggttggtttcaaaggcgttgtcagtgacatcccttccgtcatgccgcaatacgcggggtttgccggcatgggccgcggagtactggaagccggcattagccagcttccggtgtgtctggttggctacgacggcattaaaggcattctggacgatgaaacctttaaacatgccgcttactgtaatttctcaggcagaaatctggccaatgccgaagaagatgtgcttcaagagcaatttgccgccgctcgtcccctgcccccagacttgcttattgaataccagagcgatggccgttggagccaaatcctcgagaatatggttctcccggacaaagagcgatacgacaacggtgattcgctgcaactctaccagcagctgtgtaaggcaccatcatcacaggaaaacgaaagttttttgatcgcgaatgcctttactgtcgctatatttaaaacgctagcaaaccaactgatcgccaacagtatcaagatcaacgctcatgatgatagcgtgaaagagaccgtcaaaatggaagataaagcgagccaggctcccctggacacccctgttaatgctaatgcagcaagttcagggaatgatgtcatcgccaagttagctgcgttggaagaacagaatctctctttgcagaatgacgttaaatcgttagtacaactcctgacatcggtagcggcaaaacaagaagactatttcagaactttgcctcacgcggttgcaccgagtgcagggcaaaaacttcgatatttggttcaggttgccgttcaatcactgaccagagcggacaaacgctatgaactggccaaaacactttattggagactgcccgagtctgtcaggctaaaactacagacccagcggcaccgttacgttcaaaaacacttcgagcacgcttgcaatagcgcgatgacggatacctctacacctgaagacattccagactgggtcgcagcggtaaaccaatcagagaaagtcgtcttcattccatgcagcttcgaattcgatgagctggtgaaccaacggccaatcaacgcggcaaaatatttctcggaaaaaggctatcaggttatctttatcgcctggcaatggacgccacaggaaacgttgtcgaaaggttgttcgcaagtctggaacaatgtctatcaggttccgctgtatgattttgtgaaatacacccgtcagtgtcatctgcatgacaaaaccgcgttctttgtcatcacgatgccggcgaaagtcttcctcactccgctctatgagtttagagcgcaaggctgcaacatcatctatgacattatggatgaatgggaatgcttccataaggtcggacaagctccttggtaccagaaagagattgaagaaaccctcattctacaaagcgattacgtctgtggcgttgctccatcactgcgtgacaaatttgcttatcttcgcagtgatattgaagtagtcggtaatggctattccgagaaggtcttgggcgatacacgtaatatagcgaaagacaacggcaacaaagtgggctatttcggccatctaacggactcgtggttcgactgggatatcgtatttaaattagctgaacaattcccacaatatcacttcgagatcattggttacggtgagcctgagtgggtggtcaataaagcgaaaaatattgctaacatcacactggtgggcaaagtaatgccaaaagaccttcatcaatatgtcaaagaatggtcgatcggcctaattccattcaaaagtggcgagctggctcaagcggtagatccgatcaaaatttatgagtacctctattttggcttaccaactctagtgaccggcattgagcatattaaacgctatccgatgacctatttctctgacggcagcgacgttgtcgatctgtttgagaaaacaatcaatagcgagcgccactctgacgagttggaaaccttcttgcaagaaaccacttgggcagcccgattcgaagaaatggagttgaacactctgaaaagaaaaggaattagggagttatatgcttcgtaa

SEQ ID NO: 430163 - DNA, 1335 bp, Serratia marcescens
atgtcatctgaattcgcaatttcagtcaaaaatatttcgaaacgctttgaaatgtatgcaaatcctaagcatcgtttgtaccaaatgctttctttaggccgccgtacattcttcaaagagttctgggcgctaaacggcgtttcttttgacgttaagcgcggtgaaacgcttggcattttgggccgtaatggcgaaggcaaaagtaccctgctgcaaattattgccggcaccttgacagccacctcgggcagcgttgaggtcaatggcaaactggctgcgctgctggaactcggcgcgggcttcaatcctgagtttaccggccgtgaaaacgtttatctgagcggcatcattcttggtatgacgcacagtgaaatggaacagaaattccctgagatcgaagcctttgccgacataggcgaacatatcgatcagccggtcaaaacctactccagcgggatgtatgtgcgtttggccttcgccgttcaggcttgcattaagcccgaagtgctcatcgtagacgaagcgctgtcggtcggtgatgagaaattccaacgcaaatgcttcgattatatcgaatcgctgcgcgcgcaagggtgttcaatcatcctggtgacgcattccacgtcgaccgtggagaagttttgccagcgagccattttgttgcgaaaaggccgggtagaagccattggcagtgccaaagaaatcatcgaccaataccatgccctgctgtactcagatgaaaaaacttacctgcgctatctgaacaacattgctaaaaacaccaatcagtccatcaacgcgccccagaaagaaagccaggacggcgtcgccgcccatgaggcctccatcgcggaacaagccgagatacaagctgaaagcgaactgaccagcggtgcccttattgaaagttggatcatcaaagatgcccacgatcagccttgcgatctattccgcgtaggtgaaaaagccatcatcagcttcgatatcagcgtatttgggccgatagaagagctgcaagccggcttggtcattaagaccgttgaaggtattacggtatttggcaccagcaccttataccataagaagaatatgcataacgccaaaggcggagatgttcttagggcaacgtttgaacttgacctggcactgtgcgaaggcagctattttatttcactcgctatcgccaacgccatcagccacgccgatatgtcctatcttgataagaaaaccgacgtgatcgtccttaaggttatagagcctcgcacgacaatgtcaggtattgccgcattgcctgtttctttatcactcgaaaagtggtcaggagagcatgaataa

SEQ ID NO: 430164 - DNA, 828 bp, Serratia marcescens
atgaatattttctctattcttgttaagactttttatcggtgtcttcatacacttgccaccaataagaatcttgttatttcactttctaaacgggaaatcggcagtaaatacaaagggtcatttatcgggcttctttggtcgtttattaacccagtattgatgatggtgatttataccttcgttttcagcgttgtattcaaaattcgctggagtgctggagtcgattccaaaggagaatttgcgttagcattattcatcggtttgattttcttcgggcttttttctgaatgcattaaccgcgctccctatttgatcgtcagtaacgtcaactacgtcaaaaaggttgtcttcccggttgaaacactccccattgtttcactctgcacagctttattccaaatggtgattaacttcgtcgtttggttgctgttctatgtcgctatcgtagggatccctacgtggcacattctatggctacccgtcatcatcgcaccgttccttatgatggttctgggcgtatcctggttcctttcttcgcttggcgtttacttgaaagatatcgctcaggttattggcgtgcttaccatgattctgatgtatctttcgccgatcttctatccgatctccatgttgcctgacgcatatcacatcttcatgcaactcagtccattgacttatgtcattgagcaagcgagggattgcatgatgctgggcaaaaatatcgcctgggggagctggggcatttacaccctcatctctttcgtcatcatgctgttaggttatggttggtttatgttcacgcgtaaagggtttgctgatgtcatctga

SEQ ID NO: 430165 - DNA, 138 bp, Serratia marcescens
atgatggtggttgaactgaacgcgtgtcatggtgttttctctcagcaaaagtcggtaaaaaaccgtatggcaattaagctaaactatccgctgtccgccgtgcaactcttttttatcgtcataaatttaatttattga

SEQ ID NO: 430166 - DNA, 834 bp, Serratia marcescens
atgaaaatcaacattgatctggttcctgccgcgttcggggcgcatcggcaggcgctgttccgcaatgcggatttcgcggtgagcgcccatcgctgcgcagagcgcgggccaatgctgacgctggcgaatcggcgcggggcactgacggtcttgccgtatcagggcctggcgatttgggatgctgaatttgacggttactcattgaaatcgggccgccgcagcgggcggggcgccggaagaaagcgcgatgatgtcgccgcgttctgccccgcctggccgagtcacgacggcgcatcgctccagatgcaacgcgtgtggctgcagctggcgggcgacgagctgacgttgcagggcgaaggcgagcggttgggcgagggatggcgcatcggcccggcgctgcgcttggcggcgcagagcgcgcagttcgccattgagatgaaagtcaccaatctggccgatcggccgcagccgctgcgctatgtgtgccgcctcaactacgattgcattcccgacgcggtattccgccaaaacttgccgacgccggcgctgttgggggaggcgctcgggcaggaactgctgtgttccgaggatctgtctcgctacgtggaccgagccgaattctttatgctggcgccgcaaggccggcgctatgtaacgcgtttcgccaccgggcaattcaactatggtctccggcgcatcgccgttcagggcaaccggcagttgctttcctttatccagccggcaaactgccgcccgaatgcgccagagggtgagggagtgatgctgggagcgggaaaaacgcgggcgttctgcgtgaccaccggcgtggtgtga

SEQ ID NO: 430167 - DNA, 774 bp, Serratia marcescens
atgaaaaaaatcatactcattatcacgatgctagtgtctatgctcatcattcaggggtgcaaacaaggtatggatttacaaccgcaggattattttgaagggacgcagctggacatcgctaacatcatctacgagggtgacaggcaaaagctggataaggttttaccgacggtaagcaaagaaacgttaaatcgaccgggcaaggcggagatgacgttgctattctgggcgataaataacgctatctttgacaagaacacgccagagcggcttaagataattacagatctggttaaggcaggagcagacccactgcagccaaggccggaagggagaagtagtcccgctgaatttgttatgaaagcagataagggaatctggataaaatccatgttagatggggggctatctcctaatgcaaaagataaagtcaacaataagccaattatatttaaaagtattcttgcgaagaacacagagacattagaggtcatgttggattatggcgctgatataaatataagaaattcactgggtgatacgctgctcatcgatgctttagattatcactcctatgaccacgtcattcttctattagaaaaaggcgccgatagcgatataaggggcaactcgggttggacgatgggcaatcaactgcaacggctgattaatagaagtccggacggcagtgaggcgaaagcgtctcttgagcgcatcaaagacgagctaattaagcgtggtgggaaatggccacctctccctgtcagtcaataa

SEQ ID NO: 430168 - DNA, 744 bp, Serratia marcescens
atgaggcacagggctcttatcattatcatgttgctgtcgatgctcatgatgcagggatgcgaacaaggtagggatctacagccacaagattattttgaagggacgcagctggccatcgccaaaactatctacgaaggcgagagacagaagctgaatgcgatgttaccgacggtaagcaaagaaacgttaaatcggccggctaaggcggatatgacgttgctattctgggcgatcaataacgctatctttgacaagaacacgccagagcggctcaagatcattacggatttggtcaaggcgggagcagacccattgcagccaaggccggaagggagaagtagcccggctgagtatgtcatgaaagcggataaaggcgtctggatacaggctatgcttgaaggcggactatcgcctaatgcaagggatgaaataaacaatcagccaataattttcaaaagttttcaagcggttaatacagagacattgagtactctaatagcttacaaagctgatgttaatatcaaaggcgctatgaaccgaatgccattaattaatgcgctgtataacagttgcccagaacacattgaggttctgttggctcatggagctaatccattagccaaagatgattttaatgacagcttcctctcgctgatttctgcggaaatagctaaaggggataagagcaatgcgtatataaagaaactaattaaaattaaagaaaaaataaaacaggtgaattag

SEQ ID NO: 430169 - DNA, 1566 bp, Serratia marcescens
atgttcacgccacgctatctgtcctggttgctctgtgccgccatgctgccgctcagcggctgcgatcggcaaaaagtcgccgatgcgatgggcgggagcgccccgccctcggccgcgcccgtcacgagtgccagcgcgccggcctatacgccgctgagcgccgatcaactgtaccagttggtcagcccggtggcgctgttccccgacaagctgctggcgcaggtgttggccggcgcgggctatcctgaccaaatcagcgccgcggatgcctggctggcgcaaaaccgcggcttgcaaccggcggcgctcagctcagcggccgacgctcaaccctgggatcccagcgtgcgcggcctggtgcaattccccgacgtgctcgatcaaatggcgaaaaacatcccctggaccaccgccctgggcagcgcctacctaaacgatcccaccgacgtgatgaacgccattcaggtgatgcgtcaacgggcggccagccaaggcacgctgaaaaacaccccgcagcagcgcatcgtcgtggcgccgacgacgcattatgtcgaacagcagccctatcgccagcacgtggtagcggcgccgggcgaaaccatcgtcatcgaacccagccagccggatacggtttacgtcccgcattatgatccctgggtggcctacggcacgccgatcccagcctatccgagctatcggtatcaaccttcgggctacagcggcggcgacatgttggcggccggcgtgatcagcttcggtgtcggcattgcggtcgcctcattgttcaatcagcacaacagcggctggcacaactgggatatgcgctgggacgatcgacgccaaccggtggtctaccgcgatgcgccctacgtatcgcattccaccaccgtggtgaatcgcgtcaccaacatcaaccaatataacaacgtgaacactgtgaatcgcagcagcaccagcacggtgaacaactacaataccgccgccgcgccggcgccccgcgtcactcaaccgacgcccatcggcgcgccgcaacagccgcacgtcgcgcctgcggcccacgcgccgatgacgttgccgaactttgcgcatacccagccggtggcgcctcacgtacagcagccggtagccatacaccagccggtagcggccgtcccgcacgtgcgacagccggtcatcgcgcctcatgcacagcagccgatgagcacgccgacgttcacgcatgccgttccgacggcacctcacccgcagcagccgacagccgtacattcagcgccgctacagacgcatccaatgccggccgctgcgccggtgcatccagccgtcgcgcgcccgcaggttctgcaggccccacacgtcgctcagccggtgatccgcgaaccggcagcgccgcagcatccggcggcgataagcccgatgccggcgccgcaacagcgcatcatgccgcatgcggccccggcgccgcagcgccatcagacgtccgttcagccgatgccgcatcgccaggagccggtgcccacgaagccgcaggaacaccgcccaatcgtcgagcagcacaaggtgggataa

SEQ ID NO: 430170 - DNA, 1317 bp, Serratia marcescens
atggtgtgttcccacaacaatcatcagcagcatagtcattccgcaccctcggcggcgcagcaggataacctgatgctgtgcccgcagtgcgacatgctggtggcgctgccgtcgctggcctatggcagcaaagcggtatgcccgcgctgcaaaaccacgctcagcgcccgctgggacgagccgcgcaagcggccgatcggttacgcgctcagcgccttgttcatgctggtgctggccaacattttcccgtttatcaacatgcgcgtcgccggcctcggcaacgaaatccggctgatccaaatcccggaagtcatggtggcggaagactacgccagcatggccaccttgtttatggtgttcgtgcagctgatcccggcgttttgcatggtggcgatcatcctgctgtgcgccagggtgcgcttgccgctgggtctcaaagagtggatggcccgggtgctgttccagttcaagacctggtgcatggtggaaattttcctcgccggggtgctggtcagcttcgtcaagctgatggcctacggcgacatcggcatcggcagcagcttcgtgccttactgcctgttctgtctgctgcaggtgcgcgctttccagtgcgtggatcggcgctggctgtggcaggatatcgaaccggcgccgcggcttaatcgcccgctgacggtggggcgcaccggcatgcgccagggcgtgcgctcctgcgcgtgctgcacggcgatcctgccggccgatcaggtgcgctgcccgcgctgccacaccaagggctacgtgcgtcgccgccacagcctgcagtggacgctggcgctgctggtgacctctgtcatgctgtatattccggccaacctgatgcccatcatggtgaccgaggcgctgggtaacaagatgaattccaccatcatggcgggggtgatcctgctgtggggggacggctcttatccggtagcgatggtgattttcatcgccagtatcatggtgccgtcgctgaaaatgttggcgatcggttggctgtgctgggatgcgaacggcaggaagaaaccgcgcgccgacagcgagcgtatgcatttgatttatgaagtggtcgaattcgttggtcgttggtcaatgatcgacgtgtttgtgatcgccgtgttgtcggcgttggtgcgaatggggcagttgatgagcatttatcccgcgacgggcgccgttctgttcgcgctggtggtgatcctcaccatgttcgccgccatgacatttgatccccggctgacctgggatcgcgcaagtgaaacaataaacaaggagccgcaaggtgacggaaaataa

SEQ ID NO: 430171 - DNA, 243 bp, Serratia marcescens
gtgcccagcccggagacgccttcacggccgatctgcggcttcaccacccagaaggcggaatcctggcgcagcaatttctccatgccggaattgagacgcgcctgcaccatcaccttgctcaggtcatcgctcaacgtgacggtttccaccacgccgacgtcaacgctgcggcttttgattttggttttacccgcttccagcccttccgccgtcgtggtcaccagcgtcaccaccggcccctga

SEQ ID NO: 430172 - DNA, 684 bp, Serratia marcescens
ttgaaaacggtcggtgacagcaagctaaaagaagcgttcattgaggttcacgatctgcaaacggcgctttcgcccacgctgctcgccgcactgcgcctggtgagcgtcgaagccggcgaatacctggtgacgcaaagcgatcgtttgacccacctgttttttctcgtgcagggaaaattgcaggttgagaattttgatgtgaatggcgcgcacattgtcttttccttcgaaacggatttctcggtaattggcgatctggagctgttctcccaggcgcagcgcacgctgttcagcaccgtgcaggcggtgaccgacgcgctgcttctcgcggcaccgatagaggtcatcaacaatcacgccctgagcgacccggcattcctcacctttatctgccggcaattgagcaataagctgctgaattcctccttgctgcatgcgaacggcgttttgacggcggaatataaactgcgaaaatttttattattcaaggtaaagagcgaaggggagttgattgagctggaaaaccgggaggcgctggcggcgagattgggcatctccgtcagacaactgagccgcgcgctggcgcagctcgcggcggaaggcatcattcagtttaaaaacaaatcactgcgggtgaccgatcgccaacggctgtccgctatcgaaggtaaccaaagcggttaa

SEQ ID NO: 430173 - DNA, 1011 bp, Serratia marcescens
atgagcatcagaaatattttacccggcaagatcggtttgggcggcgcaccgctcggcaatatgttccgcaacatcccgcaagacgacgtgcaagccaccgtcagcggcgcctgggatctgggcatccgctacttcgacaccgcgccgctctacggttccggcctgtcggaaatccgcatgggtgaagtgctgtcgcactacccacgcgatgagtatgtgctgagcaccaaagtgggccgcatcatgctggacgaagaagaagacacttccgcccgcgatctgggcgagaaaggcggtttgttcgaacacggcttgaagaacaaaatagtcaacgactactccgccgacgccacgctgcgttccatcgaagacagcctgaagcgcctgaaaaccgaccgcctggatatcgtctggatccacgatccggcccaggatttctacggcgacaactggattgaacagttcaacatcgcccgcaccggcgctttccgcgcgctgacccgtctgcgtgaagaaggggtgatcaaggcctggggcctcggcgtcaaccgcgtcgagccttgcgaactggcgctgggcctgagcgaaacgcagccggacgccttcctgctggccggccgttacagcctgctggatcatgaacgcgcgctgcaacgtttgatgccggaagccctggcgagcaacgtcgacatcgtcgtcggcggcccttacaactccggcgtgctggccggtggcgagcactacgaataccagaaagcatccccggcggtgctggcgaaagtggcgcaaatcaatgcgatcgccgctcgcttccaggtcgacgtcaaagccgccgcgctgcagttctcgctggctaacccggcggtcgccgccgtgatccccggttcgagccgccctggccgcatggccgaagatctggccgcgctggacgccgttatcccggctgaattctgggccgaaatgcgccgtcagaaactggtggccgacaacgcgccgctgccgattcgttaa

SEQ ID NO: 430174 - DNA, 1137 bp, Serratia marcescens
atgaagcgatgcgcgcaaagatgggcgatggggctttggctgttggcgctgagcggcgccgtttgcgccgctgacgacggcattcccgccctgttgaaatttgccgaacagcggcaggctccgccggccgcgctcaaggaggaaaccgcgcgtaaaccggcgcccgcaccggccgccaaaccggccgccgtcgcgggggcagacggcgctcgtttaacttctctgaagcactctgtacaacagcaggcggagaaaatccgtcagctggagcgccagttggcggcggctcaggccgccgcggcgccgaaaagcgagcggaccgatgtcgatattcggccactggccgatgccctgaaggcgttgcggcaggccgttgcgccgttgcctgaggtcaccgcgctggccgcttcgctcacgcgggccgaacagcgcagcgcaagcttgacggcgcagttggcacagcaacgacagcgggtagacaccttgctggctgagcggcggcaggcggctgaggccccggtgctggccagcgaggcggacaagcaggcgtatgccgccggcgtatcgctggggcgcgatattttgcatctgcaacaggagaaccggcgtgcgggactggaggcggatcggcggcttttgctggcgggcatcgccgataccctggccgggcggttgcggctggatgaggccgccatcgacagcgcgctgcgcacggcgcagcaacgtttgcagcagacgcaacagacacaggctccccctccggacggcaaggcctatctggccgatttcgcccgccaggagggagtcaagcaagatgcgctcggtttctactaccgggtggactatgccggcagcggtgcgatcggcgccgacgatcgggtggatatcgtggtgcgcgaaagcctgaccgacggccgggtgatcaaagacatggagctcgcgggaacggtgatctcgcagccattgacgcgctatccgccgctgtttcgcgcggctatcgagaagctgcagcgccacggctcgatcacgctggtggtgccgccggcgctggcgtacggcaagcagggcagcccgccggcgatccctccggacgccaccatgatttataccctgcgcattgctgacgtgcagtcgtga

SEQ ID NO: 430175 - DNA, 123 bp, Serratia marcescens
atgatttccaacgaaggattgcaggtcgcgctttcacccgtgcagctagcggccgtgatgtcggatagcacggtcacagaaggggaaacctggggtaatcggctcatggggggctgggtttag

SEQ ID NO: 430176 - DNA, 672 bp, Serratia marcescens
atgtgctatgcgcctgacccaacattgttaaccaaagtgggatgcgtggtcgttggcactcatagcatggatagcataaaaaccgcatcaaatcagatcattaccggccgatcattgactacagacacttacaagtcggcggttttgctggctcagagtctgggggccgacgaagatatggcttacaacgtcggtttaacggtagatattgccgttcctttggtgtttgcaaccgctttaggcgctgtacgcgtggcttccgttcgggtggggcaattaaaattgcttgaacacgagtctatagccggtgcaaaaggaggtgggcacactattgctaagcatgttgctaaaagttcagaagagctgctggagcgcttggcaaagagtcctggtttacagtcagcctcgacatttacagatttacgtactgctgaagacgcgattagtcgggcgttgaaagtgaataacgcgcttattaagcgctgggcgcaacagcctacttcggccaacgtgcttgaactcacgcataaggtgggtaaagcggttggttttggctacaggcaaggaagcacaattcaattaacgtccaacagcgtgcgggttgtcttgctaaagaaaatttacaacggtaagccgtattacattttaaccgcttaccccattatcagataa

SEQ ID NO: 430177 - DNA, 2187 bp, Serratia marcescens
atgcctgtacttcccgatcgtgacgtgattgatcagatcatctccggccattacgccgatccctttgctctgcttggcatgcatgcgaccgataacggtctgcaagtgcgcgcgctgctgccggacgccggcgcagtctggctggtggaacagcaaaccggccggcgactggtgcagctgaactgcgacgatccgcgcggtttcttcagcgccgtggtgccgcggcgaaaaaatcctttccgctatcagctgcaggtcagctggcgcgatcatcaacagatcgtcgacgatccctaccggttcggcccgctgctgcaggatatcgacagttggttattggccgaaggcacgcatctgcgcccctatgaacggctgggcgctcacctcgtcacgctggatggcgtcgacggcgtcagctttgcggtctgggcgcccaacgcgcagcgcgtctcggtggtgggggaattcaacttctgggacggccgccgccacccgatgcgtctgcggcgtgagaacggcatctgggagctgttcttgcccggcgtgcgggccgggcagctgtacaaatatgaaatcgtcgattgctatggcaatacccaactgaaagccgatccttacgcctttgaggcgcagatgcgcccggataccgcctcgctggtggcgccgctgccggaggtggtgccgtcgacgccggcgcgccgccgcgccaacgattttgaccagccgatcgccatttacgaggtgcatctcggctcatggcgccgccacaccgataaccacttttggctcagctacggtgaactggcggtgcagctgatcgactatgtgaaggacatgggattcacccatatcgagctgctgccggtcaacgagcacccgttcgacggcagctggggctaccagccgctggggctgtatgcgccgacccggcgcttcggcacgccggccgacttcagggcgtttgtggcggcggcgcatgaggcgggcatcaacgtgatcctcgactgggtgccggggcacttccccagcgacgcctacggcctggcgaatttcgatggcactgcgctgtacgaatacgccgatccgcgcgagggctaccatcaggactggaatacgctgatttacaactacggtcgccacgaggtgcgcaactacctggcgggcaacgcgctgtattggctggagcgcttcggcatcgacgcgctgcgggtggatgcggtggcgtcgatgatctatcgcgactacagccgcgccgacggcgagtgggtgccgaattactacggcggcaacgagaatctggaggccatcgccttcctgcgttataccaaccagactatcggccaggcgcagccgggcgcggtgacgctggcggaggaatccaccgactatcccggcgtcaccctgccgccggacgccaacggccttgggttccactacaaatggaacctcggctggatgcacgacacgctcaattacatgaagtgcgatccggtgcaccgcaagtatcaccacaaccagatgaccttcggcatgctgtacgcctataccgagaacttcgtgttgcctatctcgcacgatgaagtggtgcacggcaaaaaatcggtcctcgaccgtatgccgggcgacgcctggcagaaattcgccaacctgcgcgcctattacggctttatgtgggcgcatccgggcaagaagctgctgtttatgggctgcgaattcgcacaggggcgcgagtggaatttcgataccagcctcgactggcatttattggaagggttggataactggcataacggcgtgcagcggctggtgcgcgatctgaaccactgctaccggcagcaggcgccgctgtacgagcgcgactaccggcctgacggcttcgagtggctggtggtcgacgatcacgacaactcggtgttcgcgttcgcgcgctacgattcgcagggcaatgagctgatcgccatcagcaactttaccccggtgccgcgctaccgctaccgcatcggcctctcgcgcgccggtgactaccgcgagatcctcaataccgattcgcaccactatcacggcagcaacgccggcaatcaggggcgggtctcttccgaagcggtcggcagccacggccgcgacttctccatctgcgtaacgctgccgccgctggcgaccatttatctgctgcgggaggcgccatga

SEQ ID NO: 430178 - DNA, 540 bp, Serratia marcescens
atgtaccaggtcaactttttgccctggcggcaacgtcgcgatcggcggcgcggctgcttctggctgggcgtgttgctgttgcagataacggtgctgttgctggcagggggcctcgtcgccggtcaactgcgtcatcaacaggcgcagcgtcaggagcggctggcgctgttggaagaagagctggcggcagtgacgctgctcgtccgtcagcagcagcaagagcgggcgcaacgggcgcgatacagcgccctcgctgaacggcaggcgcgcaatgcccaacataaccggcgttatttgcaactgctgcagcaactctcctcctgcctccccccaccgctgtggctcacggcgttggacagcgatgcggcgaacggcctgcggctgcgtggattgagccgttctcctgccgccatttcgcagttcgaacggcggctggcggggatgcccgcgttaccgcggctgcgtttggcggaggtggcgcaacgcgacgacggcctgtacgcctttcatctggtggcgcaatgggggcgtgatggataa

SEQ ID NO: 430179 - DNA, 495 bp, Serratia marcescens
atggataaccgtttgccatctgggctgcgcttcttgctgggcctgtcgggccggcgattgctggccgcgcaatggctgggcatcggcacgttggcgttgttgggtgggggctggatgctgcaagacgaatggcgtcagcgggaaagtgcgacagagcggcaacagcgcctgctgcaacagatcgccgtggcgcagcgccaactggacgaggcgccggtcgccctgatgccgccgacgccgctcgctccggccgccaccggcgatctgacgaacgggctgcaacgtgcggggggcgccttattgcgctggcagcggcaggaaaaaccgccgcggcaaacgctgagcttgcgcattgactaccccggtttgttggcgctgctggaggcgctgcccgccgatttgcgtctcgaacaattgagcgtggagacgccgccgcagggcatgacggcgcggttggttttacaggatgccgccgaggagctggccgatgagtag

SEQ ID NO: 430180 - DNA, 360 bp, Serratia marcescens
atgagtagaagatccggccgttggtggtggctgctatggccgtgggccttatgcgccgaaccgcgcgacccgtttgcgccgcccccgatgcctgcttgcgcccagacagagacatccccggcgggctggcgactgaaaggcgtcatcgggcaaccgacgcagcgctatggctgggtggtgacgccggcggggcaatggttgcgcctgcggccgcaacaacgggtgcttgccgagcgctggcaggtgacgcaggtgcaggcgcgcagcctgacgttgaaggcgctgacggccgaaccggagtgcccgacgagccgcgacgacatatcgctgatgatcgacgacaaggatgacaaatcatga

SEQ ID NO: 430181 - DNA, 1197 bp, Serratia marcescens
atgactaaggcggcttgtgttaaacgcagcggcttatggagcattcccgccagaaccatgacgctggcgtgtctgttggtgtttatggcgcaaatggcgacgaccgtgtacttgccttcgctgccgacggtgatgcgggagctggcgatgagccggcgcgccaccgagttgtccatttcaatcttcgtcatcggcgccgccttgccggtgctgttctggggcgcggccgccgatcgctttggccgccgcgcgcccctgacgctgtctttatttcttttcattggctgcagcgggctgttggcgctgtgcagcaacggcgcccaattgctgacgctgcgtgcgctgcagggcgtgggtgccggcggtgcggcgatcatcgcgcgcatcatcgtgcgggataactggagcggggacgaactggcgcggcgtctgtcggtgctctccatcgcctttatcaccgcgctgggcggcggtcagtttatcggtggcctgctgagccaatatgcgcactggcagatgggcttcgtcctgatgggcgccaccggtttgatcattctggtgctgatggcgacgctgccgctggaggcgggacgggcagggggcgtgcgcccggcgatggcggcaacctactttgccatcctgcggcggcctgggttcttttggccggcctgcgtcggcgggctggggtttgccaccacggtgacactgcaggaagtgagtccgttcgtcatgcagcaggagtttggtctcaacgtcacggcgttcggcgccctggggctggtgatcggcgtcgcctacttcagcggggcgctgacggtgaaccgtacggtggcgcatctcggcgggaaaaaactgatgcaggccggcagcggcatcgtggcgctggcgacggcggcgatcctgctgctgtggtggagcggcgttctggccggcctttccggcatggcgctgttcatcgcgctgtattgcctgaccatttttggccaggcggtgctgtttcccaacagcatggcgatggccgtcagcgatgccaaagagtacggcgcttatgcgatggcgctgtgtggctttctgcagcagtgtctggcgggcgtcgccgcggccggcgcggtgttgttggaacaccatggcctgtgggcgctggcgatagcgctgctcggtttgggcggctggttaatggttaagctgcggatgtaa

SEQ ID NO: 430182 - DNA, 732 bp, Serratia marcescens
atgtgcgtccacgccattattgagcctttgtcatgggaaagtgagtttttcgcgctggacagcgcgaaactcatcttctcctcctcagccccggttctggctgaggccgacttggcggcttatgccctggtgcaggccaaaatctccgcgcagcaactggccttggcggatggattggccgatttcggcttccgcctggttgagggcgaggtcgatctggttttggcgcttgataacaggtcgatacttgaatttggtgaccgcgtacaggcgatacgctttgcgaccgaggccgatatccccgcattgcgtagcgcggcggctcaggcgttcgccgccagccgctttcgtgcgccctggtatcaacctgatgacagcggccggttttatgctttgtggatcgaaaaggccgttttgggcaccttcgatcatcagtgcctgttggcgctggacgaacaggggcacccagaaggattcgtcagcctgcgcaatttgggcgaacgggaaacacgcatcggcctgttggcagctttccccggcgcatccggccgggggattggttccaggctgatggcggcggcgctcgccgaatcccggcgtcaggggatgcagcacctgcgggtcgcgacccagataggcaatatcgccgcattacgactctatcaacgacagggtgccgtgattgaaagcaccgcgtactggttatacagaggtagacatgattccatttaa

SEQ ID NO: 430183 - DNA, 171 bp, Serratia marcescens
atgtctaaatcacctattggcactacagccacgacaggacagaaatgcccggaaagcggcgtctgggaagtggttggcaaaccctcaaccacagcgccaatcgctaaaggcaatatcatgcctccttatggcggcaaaggggtcacctggaaattgatccaatacgcataa

SEQ ID NO: 430184 - DNA, 1446 bp, Serratia marcescens
atgaacagagtcgtgatcccgctgctgctgattgcgctgagcggctgccgggcggtagggccggactacgctcggccgcagaacgcgctgcccgaaagctggggggagcaggccggcggcggggcgctgccggtggcctggtggtcgatattcaacgatgcgtcgctgtcgcaactggtgcagcgcgcggcggccggcaacctggatctgcagctcgccacggcgcgcatgcaacaaagccgcgccttgctgggcgtgacggaggcggcgctgatgccggatctgagtctggacggcgcttatctgcgccaacgcgccacctcggtgggcagcatggatccgtccggcaacggcggagaggcggattataacctctggcgcggcggagccagcgccacctgggagctggacatgtggggcaagctgcgtcgcgcgtcggaaagtgcgcgcgccagcttcgccgcttcgcaggagaaccggcgcgcactgctgacgtcggtgacggcggaggtggcgagcgactatctgcgcctgcgcgccacgcagcaacagctggcggtggcgcaggaaaaccgcactacggcgctgcgcacgctgcagctgacgcaaaaccgttatcagagcggcgcgggcaacgaactggatgtcgatcaggcgcaggtgcagttggcgcaggtggatgccctgctgccggcgctgttcgatcggcaggaacgcttgatcaacgccatcagcctgctgttgggcgagcgaccgggcgcgctgacagcgatgttgtcgccgacggggccgctgccgacgctggcgcgcgccgtgccgatgggggtgccgtcggatctggcgctgcgcaggccggatattcgcgaagcggcggagcgtttgcatcaggcgaccgccgagatcggcgtcgccaccgccgactactacccgcgcatcacgctgaccggcaatgcgggctatcaggcgttggcgctggcggatatgggcagttggtccacgcataccttcgccatcggccccgccctgtatttgccgctgttcgacggggggaaaatcacccaacgggtgcgcctgagcgaataccggcagcaggaaatggccatcgcctaccagcaaacggtgctgcgcgcctggcacgagattgacgacgcgcttgccggttatcgcgcccagcagcgccgccagacgcacctggccgaggcgctggccgccaaccgacacgcgtttgcgctggcgcgcgacagctatctgaacggcgccagcgattttatccacgttctgagcacgcagcgcgcgctgctggatctgcagtccgcgcaaattgtttcagaggaggagacggcgatcgccgtggtgaatatctatcgagcgctgggcggcggctgggaacacacctacccgtctgcggcgccacaggagaaggccgatgcacaacacgctgaataa

SEQ ID NO: 430185 - DNA, 930 bp, Serratia marcescens
ttgaaaaaaaacattatctacgaattactctcgggacagatcgtcccaggccctgtctggaggaagaagagcttccgtgcaaagttcttacttcgacttattttatactattcaccgactaaaaaggcactatccattttaactcaacagagtgatttaaaatcgatattatatcatcaaaacacattcccttgtaaaacgcacaggcaatacctgatgcgcaaccttaatgccaaacaacgcgcatcggctattgtcagccattaccgatatgtgtcttccctcaacaacaaaatgctgtccaatgcgctgatctcacaagaagaaacgattttggcggaattcaccggcagagaagaggcgcgttttaccatttcagcctcttgtgcgcacaaggcagaacgagaaggtgagtcaacgctatggctgcgtggtgacaataatgtgttactcgccagcgtgaccttttcggccgtgtccgaaggggctgaatggcatttcatcattggtggtctgcaaggccctggacggcacgtaccgcacgagacaatcaaagaagctacgcgtgctctgtcgggtattttccccaaacgtgttttgatggagtttatcagccgcttcgctgaactcactgcggtgcgcgccatttatggcgtcagtgataatggacacgtttttcgctcattgcgctatcgactgagcaaaggccggcatttacatgcaagttacgacgatttctggtcattgataggcgggataaaacaaaatgcctggcgctggcaactgcccttgacgtttgaaagaaaatctttggagcatattcccagcaaaaaacgcgcggagtatcgccgacgttttcaaatcatagatgatattgcagagcaagttcgcacgcttaatacgccccgcctctgcgcgaaaaacgcttaa

SEQ ID NO: 430186 - DNA, 1335 bp, Serratia marcescens
atgcgttgcccccctactccagagaaaaccatgttgccatccgtcaatcggccagcgccaccgcacatcgacgcgtcgtcacagaataagacgctctgcccgcagtgtgacatgctggtggcgctgccgccgctggcctatggcagcaaagcggtctgcccgcgctgcaaaaccacgctcactacccgctgggacgagccgcgcaagcggccgatcggttacgcgctcagcgccttgttcatgctggtgctggccaacattttcccgtttatcaacatgcgcgttgccggcctcggcaacgaaatccggctgattcaaatcccggaagtcatggtggtggaagactacgccagcatggccacgctgtttatggtgttcgtgcagctgatcccggcgttttgcatggtggcgatcgttctgctgtgtgccaaagtacgtttgccgctggggctaaaagagtggatggccagggtgctgtttcagttcaagacctggtgcatggtggaaattttcctcgccggggtgctggtcagcttcgtcaagctgatggcctacggtgatattggcatcggcagcagcttcgtgccttattgcctgttctgcctgctgcaggtgcgcgccttccagtgcgtggatcggcgctggctgtggcaggatatcgaaccggcaccgcgtatcgatcgcccgctgacggcggggcgcaccggcatgcgtcagggcgtgcgttcctgcgcctgctgtacggcgatcctgccggccaaccaggtgcgctgcccacgttgccacacccccggctatgtgcgccgccgccacagcctgcagtggacgctggcgctgctggtgacctctgtcatgctgtatattccggccaacctgatgccgatcatggtgaccgaggcactgggcaacaagatgaactccaccatcatggcaggggtgatcctgttgtggggaagtggctcttacccggtggcgatggtgattttcatcgccagcatcatggtgccgtcgctgaaaatgctggcgatcggttggctgtgctgggacgccaacggcaggaagaaaccgcgtgccgacagcgagtgcatgcatctgatttatgaagtggtcgaattcgttggccgttggtcaatgatcgacgtgttcgtgatcgccgtgttgtcggcgttggtgcgaatggggcagttgatgagcatttatcccgcgacgggcgccgtgctgttcgcgctggtggtgatcctcaccatgttcgccgccatgacatttgatccccggctgacctgggattgcgcaagtgaaacaatcaacaaggagccgcaaggtgacggaaaataa

SEQ ID NO: 430187 - DNA, 165 bp, Serratia marcescens
atggcgcaatccattcgcatccgctcttcccgagcgcgcttcctgcgggcatccaaactgccgatacttcaccatccgatgtgcctgccgcctattccggtgcgaaagggtcacttccttttgcgttcatcctggcactcattgcacgccctgtgcattccctga

SEQ ID NO: 430188 - DNA, 564 bp, Serratia marcescens
atggcgaagtccatcagcacccacagcgcggtcagcaacgtcaggctgccgccgaccgagggggtgacggcgatgaactgcggaaaaaaggcgacgaagaaaatgatgtccttagggttggcgatgcccaccagaaaaccgttcacgatcgccgagcgtttttgcggcggcgcaacgggccgcgcatcgggggccggcgaggagaaatcctcatacagcgaggcgatcgccatgcgggcgataaacaagcagcccaacaggctgatcccctgcagcatgcgcctttcgacggcgaacagcccggtgacgatcagcgcagcgatgccgatcagcagcagtgaggccccgttgctgcccagcgcggtccacagcgcccgccgggcgccaaagcgcgtcgcggtgttggcgaccattaccaccaccggccccggcgtggcgataagcaggaaaatagcggcgaaatacgccgccagcaacgacaggttcatctttatttcactcacattcagacggttggcatcggatcattatgatgccgccgcccccgccttgaaaaaggagtaa

SEQ ID NO: 430189 - DNA, 2412 bp, Serratia marcescens
atgaccaaccactgggttgatatcaagaacgcgaatttgattatcgtcatgggcggtaatgcggcggaagcgcatccggtggggttccgctgggcgatggaagccaaaatacacaacaatgccaagctgatcgtgatcgatccgcgctttacccgaaccgcatcggtggcggacttctacacgccgatccgctccgggaccgacattgctttcctgtcgggcgtgttgctgtatctgatgaccaacaacaagtttaaccgcgagtacgtcgaggcctacaccaacgccagcctgctggtgcgggaagactttgccttcgaagacggcttgttcagcggctacgacgcggaaaaccgcaagtacgacaaaaccacctggaactaccagttcgacgagaacggcttcgccaagcgcgacgtcacgttgcaggatccacgctgcgtgtggaacctgctgaagcagcacgtgagccgctacacgcctgacgtggtgaccaacatctgcggaacgccgaaggacgatttcctcaaggtgtgcgaatacatcgccgaaacctgcgtcgcggataagaccgcttcgttcctgtacgccctgggctggactcagcactcggtcggcgcgcagaacattcgcaccatggcgatgatccagctgctgctcggcaacatgggcatggcgggcggcggcgtcaacgcgctgcgcggccactccaacatccaggggctgaccgatctcggcctgctgtcgcagagcctgccgggctacctgacgctgccgtcggagaaacagaccgatctcgagacctacctgaaggccaacacgccgaaggcgctgctgccgggccaggtgaactactggggcaactacccgaaattcttcgtcagcatgatgaagaccttctacggcgacaaggcgcagaaggacaacagctggggctttgactggctgcctaagtgggacaaaggctacgacgtgctgcagtacttcgagatgatgtcgcagggcaaggtcaacggctacttctgccaaggctttaacccggtggcgtcgttcccgaacaaaaacaaggtggtggcttcgctgtccaagctgaagttcctggtgaccatcgatccgttgaacaccgagacctccaacttctggcagaaccacggcgagttcaacgaggtggattcctcgcagatccagaccgaagtgttccgcctgccgtccacctgcttcgccgaagagaacggctcgatcgtcaactccggccgctggctgcagtggcactggaaaggcgcggacgccccgggtgaagcgctgaacgatggcgagatcctggcgggcatcttcagccgcctgcgcgagatgtatgcgcgcgacggcggcgcggtgccggaacaggtgctgaacatgcgctgggactacctgacgccggacaacccggcgccagaagaggtggcgcaggagaacaacggcaaggcgctggcggatctgctggatgccgacggcaaagtggtggtgaaaaaaggcgagctgctcagctcgttcgcgcagctgcgcgacgacggcaccaccgccagcggttgctggatcttcgccggcagctggacgccggccggcaaccagatggcgcggcgcgacaacgccgatccgtccggcctcggcaacacgctgggctgggcctgggcatggccgctcaaccgccgcattctgtacaaccgcgcctcggcggatccgcagggtaaaccgtgggatccgaaacgccagctgctggagtgggacggcgccaagtgggtcggggccgatatcccggactacagcaccgccgcgccgagcagcgacgtcgggccgttcatcatgcagccggaaggcatgggccgcctgttcgccaccgacaaaatggcggaagggccgttccctgaacactacgagccgttcgaaacgccgctcggcaccaacccgctgcacccgaacgtggtgtccaacccggcggcgcgcgtgttcaaggacgatctggcggcgatgggcaaatccgacaagttcccgtacgtcggcaccacctatcgtctgaccgagcacttccactactggaccaagcacgcgcggctgaacgccatcgcccagccggagcagtttgtggagatcggcgaaaagctggcggagaagaagggcatcaagcagggcgataccgtgaaggtcagttccaaccgtggctacatcaaggccaaggcggtggtgaccaagcgtattcgcacgctgcaggtgcacggccaggaagtcgacaccatcggcatcccgattcactggggttacgaaggggtggcgaagaaaggctttatcgccaacacgctgacgccgttcgtcggcgacgccaatacgcaaacgccggagttcaaggcgttcctggtcaacgtggaaaaggtgtaa

SEQ ID NO: 430190 - DNA, 615 bp, Serratia marcescens
atgcgtttcattgtattgaggcatgcggagtcagaatggaaccgctcggggattattcaggggcgaagtgacagtccgctgacagaagaggggcgacgtcaaatcgctgggcttggcgctcgcttgcaaatgttatcggtcactttgttgatcagttcaccggctggtcgggcttttacgacagcggagacgttggctgagagatgtggctgcactgtgcaaatggatgagcgtttgcaggagcaagattttggccgactggaaggattatcttatgcgcaggccatgcgcgattatccagaagcgacgcagtgcctctttgccggtaaggcagaggcgtcggctccgggaggggagaatgcttatgaggttgcctggcgcctgatggcttgtctgtccgatctggctgtcgatggacaaaatcaaacgcttggtgttgttacgcacggccatgctctgcaggcactgatttggtggcttaaaggggccgacccgcaggaggacctccgcagatacggtcatcgcaattgcggctacgcaatgcttgatgcgaccgcctctggttttaacttgttgaattggggagtcgcgacccacctgttgccacaaagatag

SEQ ID NO: 430191 - DNA, 615 bp, Serratia marcescens
atgaacggcaatgttgtgatccatatggctccaccggcggaacgcgtaccgttgctaatccgtcaattgctcatctggctgcaacaaaccgacctgccaccgctgatcggcagctgtgtatttcactatgaattcgaatttatccatccctttgccgatggaaacggccgtatgggacggttgtggcaaacgctgattttgtcacgctgggatccgttgttcgccaacgtgccggttgagagcctggtacatgataaccagcccggatattaccaggcgctgaatgccagcaaccaaaagaccgattgctcacccttcgttgaattcatgctggaaatgattctaaaagcgcttgagctgagcattaccccccaagtcaccccccaagtcaccccccaagtcgctgacttgctagcggcgctgcaaggggagatgtcgcgagaaacgcttcagaatgttctacagttgcaagatcgaaaatctttccgcgagcgctatctacagccggccttgaatgcgggttggattgaaatgacgctaccggataaacccaagagccgtttacaacgctatcgcttgactgctgccggtatcagactgttacgccaaccataa

SEQ ID NO: 430192 - DNA, 951 bp, Serratia marcescens
atgaacagtaaaatcaaggcgtccggcccaacgtacattcttggatattgcatcctgggtgcggccatagatgtttttctctcaggtttgttgcagagcatcgatctgttcgtattattgttttggactttcaccttgacctggctcggtttctttgtgatctccgtgctgtttttccccgtcaagctgcgagcttgcctcaacgcctggaagttaattctattattgaatatctctacgctgggagcttgggttgggcttttcgttgggttgaaatggacggagccctccattctggtggccatgctttttggactgagcccgatcatttctgttttcattgagatttataaccgaaattcggtgggtgtaaaaaacatcgttatatccgtgatgctggcttttattgtcgccgtgctgatgatattggccgtgaaagggcagcgttttaaccccttcgattcaaacaccctatttgttctggcgcttggcttagtgtgtctcgtcacctcaacctgtatggctgtcggcacctatattgcaaaatcattgtccaaacaagcgtttaacgccgtcaatattcagtcgttcagatttcccttgctcattggcgtttgcgcgctgatgttgccgagcgaaggcgtattggcaacgacgcaatccagcttctggatgtacctgccgatcatcgtcatattagggaatatattgccgctatggatgctgcaaaagggtattgaactcaccagcgccttgaccaccaacattattgtgaatgtttcaccctgcattacgctgttgctggaggtttttgacccgtcgatagcctacagccatatgaaactggcggtgttggtgatgctgctgctggtcatgctgatcgccaatgacgacgtgggcaaatttgtcgtcagcaagataagggggaagcccgtgagtttgacggagtga

SEQ ID NO: 430193 - DNA, 1263 bp, Serratia marcescens
atggacatcaaagacacgaaaaaaatcgtcatcctcgttgacgcctactcatccggaaatgatgtggcaccggaattcaataaaaaaggatacgggtgcgcgcacattcaaagtcgagaagatatcccggcgaagctgctgaatagctacagaggggatgatttctttatcagtttgcaatacacaggggatgagatcctcaatcaattgcaagagtatgatgttatcgcggtgattgcaggctgtgaaacaggcattgaactcgcagatcatctggctgagcttctggacctgcccggtaacgataccggcacgagccgttctcgcaggaataaatacctgatgcaggagtgcctgaaaaatagcgcgatcaatcatatccccacgctccgattaactacccttaaagacgccacgcaatatgcgaccgagctgtttaaaaaataccggaagctggtgctaaaacccgttgacagtgcaggcacggactccgtttttgtttgcaaaacggttgaagaagttgaagctcattcgggtgatttgttcaaaaaaagcaatcagctcaatttaaaaaatgaagtcattattctgcagccttttattgagggggaagagtacgtcgtcgatactgtcagttatcaaggccgtcacaagatctgtgcgatatggaagatgggcaagggcagttacaacggggccgattccatctgtgagttcaccgaactgacctccttcgatgcgcagaatcacgctcagctcaaagattacatctttagctgtctggatgctttagggatcacgtttggcgcagcgcactcggaactgtttttaaccaaagacggttggacgctaattgaaaccggggccagaccgcacggcgcgggttttccggcgttgtcatccctggcgttgaagcgcacgcagattgacgaactggtactgagcgtgtgttcaaccgaggcattcctggaagcggtcgcagaggaatataaaccgttaaactatttaaaaattaaagagctgatatcttttagcgctggcactatcaaggctgttaagcatgtcgataccatcgccggtttgccatcctacaagaaatcaaatctgccggatgttgatcaggaaataaaactcacgacggacgtttacagctctccgggctggattgcgttaagccaccgttgcgccgatcagctcaatgccgactatcaatatatcgttggccttgaaagtaagggcatgtttgaagtctatgaacagtaa

SEQ ID NO: 430194 - DNA, 927 bp, Serratia marcescens
atgcaaacaggctcaacgttgaatagtgatgaagttcaccgcatagaatctctttatgggctgacggtaaaaagcagcgccttcttggggatgggatctggcaataccaattactgcctcgaaacggatatcggccgctgtgttttcagcattattgaagagcaaagccgtgatgatgttgagatcatggcaaagacgctggtatggctggaagcacatgattatgagacctccttgctggtcaaacccaaagggcaagaaagctattcaattatattaaggggcaagcactctctattaagaacctatatggatggcgccgtccgccgggatttcaacgaacatatgctcaggcagctcggtgttgccatggcgaaactgcatacgatccccgtccctaatttcttaacagactcagtcttctatgagcagaaaaagttcatggatgccctcgatgccaatatcgatcaggattatgagcgctgggccaaagatagactcaggcatcttgccgtagaacgcatcagcggcttgcctacctctgtcatccactccgatcttttctatgacaatatgctgtttgaaggcgagcagttcgtcggcatgatagattttgagttgacctgtatttatcactccgttttcgatatcgccatggcgattgtcggcacctgcggcatcaatgggacgctgtcgccggaaaaagcgaagcatatcatcgcgggttataattctataagaatgcttgaagcgcgcgaaattaaggtgttgaaaacctatacggaatacgccgccatcctgacatctctttggcgttattggcggtatagaatctatcagccgggtggtgataaatctgataaatatcgcgaaatgacaagcctggctaaaagtattgaacgcaccgacttctcacaaatttgctga

SEQ ID NO: 430195 - DNA, 969 bp, Serratia marcescens
atgtgcgcattggaaagcggtggtgaggccgctctggtattcagttccggtatggcggctttcgcgacggcgatgctttcgcatttaaaagccggtgaccatattgttttacaaaacggcgtgtattcaggtgcgctcaagtttgtacagaatcattttgcaaaattaggcatcacatacagcgtttcggagagttgtgaagtagagagcatcatcgcattagtccattcgaatacgcgaatgatatatatcgaaacaccgactaatccgttgcttaaaatcctgaacattgagctattgacccgattcgccaagagtcggggggtgttcaccattattgataacaccgtggcgacgccgatcaaccaaaaccctctggaatatggcgtcgatttggtattgcacagcgccaccaagtttttgggcggccacggcgatgtgtcaggcggcgtggctgtcggcagtgaagagtccattgctgcaatggccgaatatatgaatgactttggcgggtgtctgaacgcgcagtcatgtcatctgcttgagcgaagcttgcgcacgttggccattcgaatgaatgccattaaccgcaacgcgatggaactggccagccgtttaaatgagcaccctaatgtgacgaacgtgttctatccggggttgccgagtcatcataatcatagcgtagcccgcgaacaaatgagggggttcggcggcatggtcagctttgaaatcgccccgcggtttgacgcgacaagttttcagaagaagttaaatctcatcgtcccttccaacagtttgggggatttggagaccacgctgaactcgccttatcaggcctcatcgtcgttcagaagtcttagcgagcaggagcagaaaaaatcagggattacgaggcaattaatacgaatgtcagtcggcatcgaagacgttaatgacttgtatgaagatttgcatcaagcgctcaagtga

SEQ ID NO: 430196 - DNA, 780 bp, Serratia marcescens
atgattcgtggtaacattaaagagtttgagaacacacttgagtgccgtgtgagcgcataccccatgatgacagatgtagggtattgcaaattggcttcggatgactttaaccttaccgatgcgcaaaaatcagacttaagtattattcagcggcatttcgatacgcttgctctggatccctacggtgaaaatgcggggcgctatcggcagcacagtaaatatgtgcttttaccttgctttaatctcttgattcctcaatcttccgaacacgcctacagttacaaacaagatgtcggatttaatgatgaagtcgttgaggaggcaaggaagtttcagcctgttccaaacgaaattttgtcaaataatctgatcacgtcgcttgtcctgcatgattttaaaaactccccgttacatgagtatgcttccacgattcccatggaggtcggcattcacttcatcagaatgaaagcgacggttgatgcgccggggatttccgtaccgaatcgacttcataaggatggcgagccttgcacctggatacatttgatcaatcgtgatggtgtttctggcggtgagaacatcattacagataacactaagacgaacatcctgtgtaatgaggcgatgctcaaaccgctggactccatcggcatcgttgatgatctagtctggcaccaggtgaaaccggttcatgtagatgggcacggtaaggtgggcttccgcgatgtcatattaatcgatttcaccccgatgttcgcggtgccaaataacccatcgtaa

SEQ ID NO: 430197 - DNA, 1122 bp, Serratia marcescens
atgaaaatctcacacctgtattggcctgtcactttcttctccacggcattcggcgccgggattttctttttgccacaggcggtggggccgggcgtgctggggatgaaagtgttcatgctgtttatcgttatcgccatgtcggtatcgatgatggcgcactatctttttttcaaattcatcatttcgcacccggagaaagatttcctggcggcatcatcgacatttatcggcgagcgggcagcggcaatcgtctgtgtgctgtttattttgtcgatgattattatcgtgctgataaatttcatcaccttggtcaacgtcgtcgcgtcttttttccacaacggattctgggtcaggggcggcatttcgctgttgctgagtgccgcgctgtcggtggcatggttggcgtttagtcagcgaatcgagcacctgatttccagaatggcactggtttctatcgtactggtggcgatcctggcggtgtttttcctgttacaacctgcggtggggcagcaggcggtgcaggcaccgcctggcatttcattgcagacgtggctgctgctgccgatttttctttttacatttaactttaccccgtgcatccagcgctttgcgaaaagcgccttacgaccgcaggcgcgcagtattctgtttggcaaggtactgatcatggcgtttatcgtcatgatcgttatcgccatcagccgtttgctgacgctggatgacatctcaatcattaacagccgcaatgtagatgcgctgttttataccgccggtttgaccggcaacgccacggcgtggttaggcgctgccctgttgctgtgtttactgaccggcggcgcctatatcggcacgttgaccggcgtgatcgatggcattacgtccttcggcgtggcgggcaaaaagagaatcatcgcagggaatatcgttgtctgtacgtttattggcgcgatcaacccgagcattatcaagatcatctcgggctggtcgatacccgttatcgtgatgaccgtctttttcattccatcactgtattttttgctacggggcgacggcaggcaaaaggggatcggcgtcgtcgtgctgggctgcgggatcgcggtaatcgcaacgttgttggtgtaa

SEQ ID NO: 430198 - DNA, 894 bp, Serratia marcescens
atgccagatctcgaattaatgccgctgcaaagcgccgatttttataagacagctgaacgtgttgtttttaaagaatataaatgtaactgcaaaaaaggttggaagggtgaagatcgctttattgtctacaaagccgatcagaatgggatcgctgaggttatcaacaatgaggtttcaaataacaacgttgaagacctcatcgcgctggcatcgtcttttttgacggataaggtggtgatttccggtgggcataccgtggttaatttggacgatcgtttttctgtcagcagtgaagtggaaaagtccgcgcgcttctgcatcgactacattgccgaatccatcagacggctcagtgttcagcctgacttcttgatggaaataaatgatttctatatggaaaaaagtgatggcagcgagatagacggcgctaacgaattcaggaagatggcgacatcgccgtacattattccggaaaaaataaacgcctacattctggcgtcgaatcaacgtcatggcattgatatcaatgcattttatgtcagtgagaaaaacatggcggatcgctttaaacgccacattaaaaaccgtatggataaagaggcgtattttcagcgccaagacggaaatgtgaagatgacggtgggtgaacacgcgttcgatatcatcaaggaaaataaaccgacctgcgcggcgggaaatgctgcgacgttcagggctattcggtatcgcatttcctccaataaaatctttgataattacacgtcgcatattggcgtttttccgctgtgttcacgcgtcaacgtgcttaacggctatcgtgcggccgcgactttttacgataacttcgctttgccttctttactggtcttcttcggcaaatcctgtttcgaatga

SEQ ID NO: 430199 - DNA, 1449 bp, Serratia marcescens
gtgaaaatttccgatcgggcgctattccgccaacaggcatatatcaacggccaatggcgcgacgccgacaaccaggaaaccctgccggtgagcgatcccgccaccggccaactcatcggcagcgtgcccaacatggcgacggccgaaacccaacgggcgatcgacgccgcccagcaggcgctggaaggctggcgcgcgctgccggcgcaacagcgcgcgcagctgctgcggcgctggtttgaactgatgctggaacaccagcaggatctggccaacctgatgacgctggagcaaggcaaaccgctggcggaatcgctgggtgagatccgctacgccgcctcctttatcgaatggttcgccgaacaggccaagcgcgccaacggcgacatcattccttcgccgagcagcgataaacgcctgatggtgctgaaacagggcatcggcgtgtgcgcggcgatcacgccctggaacttcccggcggcgatgatcacccgcaaggccgcgccggcgctggcggccggctgtacgctggtggtcaaacccgccaacgaaaccccttattcggcgctggcgatggccgagctggccgaacgcgccggcattcccgccggggtattcaacgtggtgaccggcaattcgcaggcgatcggcgccgagctgactcgccacccgcaggtgcgcaaactcagctttaccggctccacaccggtgggcaggctgctgatgcgccagagcgcggacaccatcaagaaagtgtcgctggagctgggcggcaatgcgccgttcatcgtatttgacgatgcggacatcgatgccgcggtggaaggcgcgctgatcgccaaataccgcaacgccgggcagacctgcgtctgcgtcaaccggttctacgtgcagcgcggcgtttacccgcagttcgccgagaagtttgtcgcccgcgtggcggcactgcaggtcggcaacggcttcgaagccggcgtacagattggccctctgatcaatcgcaaggcgcgcgataaggtgttggagctgctcgatgacgcactgagcaaaggcgctcaggtgctgaccggcgccacgccgcacgcgctgggcggcaatttcttcaccccgacggtgctgggcgacgtgcagcccggctcgctgctgctggaagaagagatcttcggcccggtcgcgccgctggtgatattcgatgacgaagccgaggcgatccgccaggccaacgacaccatttacggcttggccgcttacttctacacccgtgatgcggcgcgcatctggcgcgtttcggaacggctggagtacggcatggtcggcatcaataccgggcttatatccaacgaggtggcgccgttcggcggggtgaaacagtcggggctggggcgtgaaggctccgaatacggcatcgaagactatctggagctcaaatacctgtgccaggcggtataa

SEQ ID NO: 430200 - DNA, 1773 bp, Serratia marcescens
atgatggatcgttcccgcttgctgaaattcctgctgccctatctgtggccgaaagacaacccgcggctgcgggggtatttggtggtggccttcgtgttcatggtggcggccaaggtcagcaccacgctggtgccgctggcctacaaagcgatggtcgatgcgctgagcggcgagacggcgaaaatgctggcggtgccgctggggctgatcgtcgcctacggcgtggcgcgggtgggcggcgcgctgtttgaggaactgcgcaacgtgatgtttatccacgtcagccagaacgccacgcgcctgttgggcgtgcgggtgtttcgccagctgcatgcgctgagcctgcgcttccatctggagcgccagaccggcgggctgtcgctgtctatcgagcgcggcacccaggcggtgtccacggtgctgtcgcgattgttgttctccatcgtgccgatcctgttcgagctgacgctggtcacggcgatcatgtggcatatgctgaacggctggttcgcgttggcgatcctgaccacggtcggctgctacatcctgtttaccgtgctggcggtgagctggcgcacccgttttcgccgcgagctcaacaaggccaacgccgacgccaacagcaaatccatcgacagcctgctgaactatgagaccgtgaagtacttcggcaatgaagcgttcgaggctgagcgcttcgatctgtcgcgccggctgtacgaatacgccgccatcaagaaccaattcagttttaccgcgatcaacctggggcaaaccgccattatctcgatcgggctgatcgtcatgatggccatggcggcgcagggcattacgcaggggacgatgacggtcggcgacttcgtgctggtcaacgcctacctgctgcagctgtaccagccgctgaacttcttcggctttatctactcggaggtgcgccaggcgctgatcgacatggagaacatgttcgatctgctgcaggaaaagcgtgagatcgtcgatagcccggatgcgcagccgctgcgcctcgagcgcggcgaagtgcggttcgacgcggtcagcttcggttacgacacgcgtcggccgatcctcaagcaggtgagctttaccattccggcgggccacacggtggcggtggtcggcgcctccggcgcgggcaagtccacgctgtcgcgcctgctgtttcgcttttacgacgtgcagggcggcgccattaccctcgacggccaggacattcgccaactgacccaggccagtctgcggcaggcgatcggcatcgtgccgcaggatacggtgctgttcaacgatacgctgcgctacaacatcggctatggcaaaaccggctccagcgatgaagaaatcgagcgtgcggcgcggctggcgcatatccatgattttatcgtcggtctgcccgacggttacgacacccgggtgggcgagcgtgggctgaagctgtcgggcggtgaaaagcagcgggtggcgatcgcgcgcaccatcctgaaaaatccggccatcctggtgttcgacgaggcgaccagcgcgctggatacccagaccgagcgcgaaatccaggggcacctgcgcgaggtgagccgcaaccacaccacgctggtgatcgcccatcggctctccaccgtggtggacgccgatgagatcatcgtgctggaggcgggggagatcgtcgagcgcggggggcatgaggcgctgttggcggcgaacggccgctacgccgccatgtggcaaacccagtacagcgaagagcaggaaccgcgctga

SEQ ID NO: 430201 - DNA, 945 bp, Serratia marcescens
atgcgcctgctcgcggttcggggttatctggcctggcgtaacggcctggacgccgtggcgcgtctctcggctgtccgcaccggggtgagccggagtctgacgtgcgctctgctgcggcgcgtggattatcgcctgtggctaaagatgcagaggcggttgaggtggggtctgcagcaacgccgttttcgccaccggcaagcggtcgctgaggcgaatcgccaaagcctgttgggcgacggcaggctggacttcgcctggctgatgcagcggcggcaatggctggatttggcggcgatccaggcccgcaacgccgtgttgatggagcatttggcgcagtgcactttacagctcaatcaggtggtggagccgctgcatcgcgccggggtgccggtgttgttggcgccgatgcacacggtttccgatgtgttggcgacgctggtcggcgcgggcgtttatcccgggcgggcaacggtgatcgtttccggtgacgcacagacgttagcgcggcgagcgcctgagggggaatggcggcagcggctcgactattgctcgattcacgacgatccccggcatattgccggcaccttgtcgcaggcgctgctggaggcgacggagcatcggcgcaacatcatcctcttcccggacatcacgccggattacaccttgaacagcacccgggacgcctcggccaaactggcttgccgtttgttcaaccggccagcgcatttgcatagcggtatcgttcggttatctcgagcgatgcgggctcgagtggtgtgctattcgctttattacgagcgcggcgttcgcattcacatagaagaaccaattgctacagaacaggtcggccgcgccgtgccggcgatcgtcgagcgcaccctgcggcgacatgcggatgattggctgctgtggcattcgcactctctattttttatcaacgaataa

SEQ ID NO: 430202 - DNA, 255 bp, Serratia marcescens
atggtaggggatatggaaaagtatcatcgattgtatgaggcgatttgcggcctgttgtatgaagccaaaggattggacagaacgctgctatcggccgatatgccgctgcaacagttggggttggacagcctagattatatggagttgatgctgctggttaggcgtgagttcggcattacgctcaatgcggaaatgtttatcgaacggcctgatctgacccttggcgagctgtgtcacgttatgaccagtcaataa

SEQ ID NO: 430203 - DNA, 738 bp, Serratia marcescens
ttggtggatctcaacgctgagctgccgcctcaaccgctcaccgccaccctgaaccgcctgctgtccgcgttggtcagaaacaataatctggtggtctcccgcgataccctgctgacgcaagtatgggaagcgcacggccaggtggcctccggcaataacctcaataacaccatttccatcctgcgcaagatgttcgccgccatgggcgaggacgacattatcgtcacgttgccgcgccagggattcatgtttaccgccgcttcgttgaagacgacggacagcctggcggagagtttgccggagatgccgagcccggcggctgcagaaaacgccttgccgaccaggccgctgcgaacgcagcgatttaagcgcttcgggttggccgcgttgttgctgttggcgacggggagcggggtatgggcctggcaggatgccggttatgagccgctcagcgcggtaagcgtaggcaatatcggcagctgtgaggtgaagttcgtagcttcttatcataaggtgggccccggcgaggccgatctggcgcatttgaaaaatatgctggcgcaaaataagtcggttcggtgtacagaaccggcgacgctgctgtactacgacagcggttcggtgatgtcggaggccgttgggcgagcccgggtatcttattacttctattgcccacaggccgagatggccgcaggcaaagtgcaatgtgagaactattatgaaagccgggttaagtaa

SEQ ID NO: 430204 - DNA, 492 bp, Serratia marcescens
atgaaagccgggttaagtaagcgcctttggcgttatcgctatgcgctgttgagtgcgctggcaatcgcaggctgcggcgtttccgcctatttcttgttttttaaaccgcaaattccggagtgccgcgcggtgctgcgttcaaccgatcagctgcctggccaattaatgcagcgtgtcttgctggtgagcgttgtacccgaaggcgcgcggagcgtgaccctgttgctgagcggcagtttttttgacggcgacacgcgttataccatcgagcgggcaatgattatggactatcagcggcaggggagtaactacacgctgcgccgcaaggaagcggtcagaaagccgcaagacaatttggataatgaagcgcttaaccgccgtttgcccatgtcggcgccgttgatccattggcgaattgaaaaaatcgatgaacgccactatctgttcagcggcaaccatgcgccgttgttcgtgtgcaccacggcttcctga

SEQ ID NO: 430205 - DNA, 756 bp, Serratia marcescens
atgatttttatcataaatgaagacatcctctttaatgaggatgagggcacgctgtcgcatgtcgataatgccagtaataaaatagcgttacttaaaccgaccagcagattgctttcgttgtttattcgcaataatgataagctgctgctgcgagagaggttgcttaatgacgtctgggttgaacatgggctcaaagcctccaataacaacctgaataattacgtttccggcctgcgtaagtcattggcgcagttcggcgtggaagatattattgttacctatccccgtcaggggtttaaatttagcgccgcaagcattcagctgatggatataaataccgatgaagttaataataatgattatagcgaaaccgaaatagcttcaacgccgccaccggttgcacgaacgccgaactttcgtcgctctgttcagcgcttaattatgattatggccgcttgtttagtgccgtttgccgcgattgtgctttaccaaaacagcacgcgcatcagcgtttatccgttgggcaatgagcaaaattgccaaatttacaccatgcggttaggcagcggtgagttggcaaacattaagcgagagatacggcaagccggcttcaactgccaataccgggcggatatctattactatgacaacattcgcaatgagggcgcagaaaaggacgaacagtggttaacctattgcccgcgggcgagcaatagcccctgcattaacaattacatcaataataaacaaccataa

SEQ ID NO: 430206 - DNA, 561 bp, Serratia marcescens
atgaaactgaataaaattatgattgcagcggtattggcctttggtgcttcttccatgatggcgcaggcggcaaatcagggtagcggtactgtcactttcacgggtgaaatcattgatgcgccatgctctattgcaccgggcaacatcgatcaaaccgttccactgggtcagatttccaacctgagcctgaaagacggccgcgagtctgaagtcaaagaaccgttcagcattaagttggaagactgcactaatgctacggcacaaaccgtcaagacgacctttaccggtgaggccggtggttccgccggtaccgataagaagatgattgccctgggcagcggcagcaccgccaaaggtgcgagcattgttattaccgatacccttaattctaacgccgttgtagagctgggcacagcgaccaccgggcagaagatcgaaattggtgatactggtgccgaactggcattcaaagccttcctgaaagggaacggcggcactctggataccatcattcctggtgcattcaccagcgtggttaacttcgcgctgagctaccagtaa

SEQ ID NO: 430207 - DNA, 546 bp, Serratia marcescens
atggctcccgttgaaaaaaatagagtggcgccttccctattggccatgctttttatagctcagacgatgccggcagcggcggcggttattggctggggaagagtcaatatggaaggcgctattgttaatgccgcctgtgccattgaatcggcaagccgtgatcaaacgattgatatgcaaacattaccgatagaacaaattgcccgggacggccatggcttgactaagccattcagtctgcggcttttaaattgcagtttggcagacatggacaaagtgcaaccaggccgccagcattttcaaatgacgtttgatggtcgagtcgatagtgaattctttggggtgacgggggaggcaaaaggaattgcattacgtatttcagatagcctcggtaatgtgatttacccaggtttagctatgccaataggcggtaccatcatcaatgagagctacttaaattattccatgcaactggtagctaatcgccaagtgttacgtgccggggattatagaaccgctattcgatttaaattgaattactactga

SEQ ID NO: 430208 - DNA, 2532 bp, Serratia marcescens
atgaaatcgaacgcgaacaaatcgaaaacgcctctgttaagcctgctgggaatgtgcatttctttggcgatatatagtttgcctgctcagttgcaggcaagtgacggggtacagtttaacatcgacgtgttagatttaaatgacaggaaaaatatcgatctgagccaattttcgcacggcggttttattatgcctgggaaatatatcatgtcggttaatctgaacacactggtgttgcctgaagaacctgtcgcattctatgcgccggaagatgagggcaagggaagcgtggcctgtatttcgccaacactggttgaaaaactcgggcttaagtcagatgccttagcgaaattacgttggtggcatgacgggcagtgtttggatctcggcagccttaatggtctggaagccaaaggcgatctggcgtcatctaccttgtatttgaatattccgcaggcctacctggaatattcatcgccggattgggatcctccatctcgatgggatgaaggtattccagggttgttgctggattataatctaaattcacaggtgcagcgcacccagcagaatagccaacaatcctataatctaagcgggaacggaacagcgggggccaatctgggggcttggcgtttacgtgctgactggcagatgaatatcaatcatcaaaccggcacaggcttaccaacgcagcaagattttgactggagtcgatattatgctttccgcgcgctgcctaagtggggtgctcgcttgactatgggtgaggattatctggcgacggatattttcgacagtttccgctataccggttttagcgtgacttcggatgacaatatgttgccgcccaatcttcgcggttatgcgccagaagtgacggggatagccaaaagcaatgccaaggtcgttattagtcagatgggccgtgtgttgtatgaaacccgggttgcggcgggtccattccgcattcaggatattaatgattccatcaacgggcagctggatgttcgggtagaagagcaagatggcagcgtgcaggagtttaaagtagataccgcaaatattccttatctgacacgccctggtacggtgcgtttcaaattcgcgggtggtaaaccttctgattggaatcatcatgtgcgtggtcctctgttcgctactggtgagttttcctggggtgtgagcaacgggtggtcattatatggcggcgctttgggtgggggcgattataaagcgttatctatggggctaggccgcgatctattggcatttggcgcgttgtcttttgactccacgcaatcgcgagcggaattaccccaacagggcggcaccaaaaccggcggctcctatcgggtaagttattcgaagagttttgatgaatatgatagccaaatcaccttcgctggttatcgtttctctgaacagaactttatgacgatgagtgaatacctcgacgcccgttatgatgaaagtcgcctcgggaaaagccgagaaatgtataccatcacgctgaataagcagtttcgcgatttagggttaagtacctatctcaactacagtcatcagacttattgggaccagcctgttagcgaacgttatagtttggctctttcgcggtatttcgatttgggagccatgaaaaatatcagtgcgtcactcacggcttttcggaataaatttcagggtgccaaggatgatggcatgtatttatcctttaccttaccgtggggggttaattctaacttcagttacagcagttcgtggaaccgtaatgaaaatacgcagcggcttggttattacgaaaggctggacgaacacaataactatcagttgagcaccgggctttcacgccggggaggttcagcaagtggcttttatacccatgagggtgataacgcgcgcatcggcgccaatgccagttaccaggggggaagttactcatccatggggttctcattgcaaggtgggatgacggccaccgccaagggcgcggcgctacaccgcaacagtactttgggcgggacgcggttgcttttagataccgaaggcgtgggcgatgtgccggtgcgtggatttggggcgacggcgcgcaccaatatgttcggtaaagcggtagtggcggatatcaacagttattaccgcagcaaggcgagtatcgatctcaacacgttgccggataacgttgacgctacgcagtcggtggtacaggcgacattaaccgagggggcgattggctatcggcgctttaatgtgattgccgggcaaaaggcgatggcggtgattagcctggccgacggcagcgccccgccgtttggtgcggtggtctacaacagtcggcagcaacagaccggcctggtgaatgatggcgggagtgtgtatctgagcggaattaaacccaatactgaaatgacagtgaattgggatggtaaggcccaatgccggatcacattaccgacaattcgaacggatattatgttgagcaacttactgttgccatgccgcgtgaatactgaggcgagagcggaataa

SEQ ID NO: 430209 - DNA, 750 bp, Serratia marcescens
atgcaaaagaacatggtaaaaatattttcagtcgccggtgtgttgtcggcaatggtattgagcagtcaagcccaagccgctattgcgctggatcgtactcgcgtaatttttaacggttccgagaaatcggtgagtctgaatatcagcaataaaaatactcaactgccgtatctggcgcagggatggttggaagatgccgaaggcaagaagattaacagcccgctagtggtattgccgccggtgcagcggctggaacctggaacacagagccaaataaaagtgcagtcgacgccagcagtgaatttgttggcacaggatagggagacgctgttctatttcaatctgcgagaaataccgcctaaaagcgagaaagccaacacattacaaatagcgttgcagacgcgcatcaagctgttctatcgcccggcggcgattacgccaggcaaaggcagtgcttttacgccgtggcaggagcagttaacgctgactcgtcaggggacgggcttccaggtgaataatccaacgccttattacatcacgctggttgatgccagcaacagcaagaagggaaaaacggcacagggttttgaaccgttaatggtgccgcctaagggaagcattgcgctgggtgcctctgggttaggcaatgcaccggtgctgacctacatcaatgattacggtggccgcccagagctgacattcaaatgcggcgccagtgattgccaggtcgtgcctgacgcaaaaggataa

SEQ ID NO: 430210 - DNA, 615 bp, Serratia marcescens
atgcaaaaaatggacaacggttacagcaatctgaagggcagatctttggcgtgtcaagcaggcatggtctccatgctgttgttggtcttgctggcggccaattctgcgaaagcagaagacggaaatcacggtgtgttgtttgttcatggtgcattgaccgagggggcttgccggctggatatggtgtcggcgcgccaggacgtttggttgggggaaacggcgaccggcaacctggccaaagtgggggagcgtacagagccggtcgccttccagcttcgcctacgagattgcttgcgtactggggcagccatgcaggacgaacgcaggggcaataaagtttgggatgcttatcagccagcagtgagcgtgagtttcaacgcccctgcggatgcggacaatccgcgcttggtgaaggtacgaggcgctggcgggatagcgttgcgattattggacagtgacaaaaaagatgtacgtctggggcaccgtagccggcctcagttgttggcgataggaagcgacgcgttgaatttttacgtgatggcggaacgcacgcgtgcgcctatggtggcaggagcctatcaggccgcaattgattttcggatgaactatgactga

SEQ ID NO: 430211 - DNA, 570 bp, Serratia marcescens
atgggcaagttatggcgctgtatgtggcgaaaggtggggacaagcctactgctctctctctccttagcggccactatgacggtaacctcggccttaaccttatcgggagtgttgttggtgagccaggttggttgggcagcgacggcgacggttacagtcaaaggtgccgtggttgccaagcccaagtgtgaaattaacggcggccaggatatttttgtgtccttcaatgaactgatcaccacaaaaattgatggcgaaaaatacggtaaaaggcttatcccctacgaggttagctgtagcggcaatatgtccggcaacgccgggttgttgaaagtgagcctgcaagggttatcgccggactttggggatggtttgctgcacaccaacaataacgatttggcgattaagctactgcaagagaatggtcaacagctgaggttgaatgcctggatgaattttacttatccgcttacgccaaagttatacgcagtaccggtgaagcgcagcggcgccacgctgagaggaggggacttttccagttccgccacattgctcgtagaggttcaataa

SEQ ID NO: 430212 - DNA, 528 bp, Serratia marcescens
atgaagataatgaatatggaaaaaatgaatatggtgcgtggctcaggcttggccgccatgatctgcgtggggttactaaccatgggggctgcgcaagcggtaaatgtaaagtttaccggaaagttggttgagcaacccacgtgtacgctgaatgagggtaaagatattagcgtggattttgccaacgtagccatcaataaaatagacggcgtcgcgtacaaaaaaatggaaattccgtatagcgtatcttgtaacggcggttctgcgggatacggcgatctgaaagtcaaactggggtttgcaccggtgtcctggggggacagcaaaccgctgcagtcaagcgtgggtaaccttggcttgcgtattacacaaggtacaggcgacaccacttacgtcagcgataccaaattaattattgacgctgccaaccctactaagctttacgcggtgcctattgcgcggccaggaaccatgctggtgggggcagattttactggaaccgcgacgttaacggcggagtatgaataa

SEQ ID NO: 430213 - DNA, 963 bp, Serratia marcescens
atggttaattataaagcggttttttttaaaaataaattcccatgggcgagacgtgctattttgtcttcccttttggtttttatttatatctgcaaagcaaatgcaggtatggtgtgggaaaccaccaatgcgcctattgtgaatgggcttattaactccgggaattatgctggtgcaggcgcctcaggccggcttgtgagcattgatgttaatgatcagacgcagaacccttgttttcagcgctcttgtatagtcactattggggtctttaccaatttcaatcaattcctagccccttatgtagggacatccttatctcctacatggcaagcaactctttatcctgagatgaacaccgcctggacaatgggggagctatataaaattataactaaaaaagttaaaaaccccatagatgttgggtttaatgcacgtgggtaccctaattttagttattattgcgatcctgattatagcccctcattttgtattattaaaaaaaaatgggaggcctactcaaaactgtgctatgcgcttgtttatcagttttcgtcatctgtatattataatgctttccctgggcaaagctgcattggtcccacgccgccaaataatgaatgcaacatcgatgcaggggcggtaacactggatcacggtcagttaagtactgacgaagttaatggccataagaaaaaagagagcgtgaggctttcttgtacttatccggctaacgcggatatttctgtggtgagcaataatgccagtgagaaaatagagctaaaagctgacgggagtcttttctcgaccgtcactatcgatggtgttcccggcatcactggcaagaaaatcaacattcctactggtggggtcgctattgatctggaatcgaccttgcacaccaccggaaatgttgaggaagggccattcagtggtaatgccatacttatcattaattcatattaa

SEQ ID NO: 430214 - DNA, 546 bp, Serratia marcescens
atgaaggttatcaatattatcatcgatgatgacaatcgttatttttctgctggtctgaaaagcagtttaaatcagtatgctcaagccaataataaggtgctttgttttttaaatcaggatgcagtaacccgacctgatgtgatattcgtttcatcaagacgaattgctcatcgttggcgaagcgcggcgcatgaaaatgggtgcacgcctgtcgtcatgataaaggaaaggccgattatttctgatgaagtttcccgcgtgctgtatcgaacggatagcattgataaattgttcgtactgttggcaaaaatactgagtgatagccgagccacaacgcgatttgtatatcagcctctaacccgtcgcgagcgtcaggtagtgaactatcttagaagagggtttgaccaatcgcaaaccgccagggtaatgggggtgagcgttaaaacggtgcacagccataaacgttcggtaatgggtaagctgatgctaaaccgcagccatgattttatttattggctgctatccccagaggcagagtattcctaa

SEQ ID NO: 430215 - DNA, 207 bp, Serratia marcescens
atgcttccaggtggttggcattacgacgtcatcattgacgtcgcttcggaaatgtatggcgtagcatttttaccagagagtgagttccgcctcaacgaaattgggcacgactcgcctggtgccgccactttcacgcttaatgccgagaatacggtaacccggttatccttgaagccaacgtttgtgtggggggagggagccaagtag

SEQ ID NO: 430216 - DNA, 246 bp, Serratia marcescens
atgatgcaattaacctttggtcgccagcactttaccctgagcgacaacgacgcactgtttatcgctgaggccatcctgttacaacgtaaagagcctggcgtcgtcttgccggagcaccgcagtgaaaaacacggcgttattcgtctggcgagtcgccaggccgagccacgcctgttccgagccgggccggtgccgctgaacagcgtggctgccgatacccgcaacgaccagcttaccgactgttga

SEQ ID NO: 430217 - DNA, 264 bp, Serratia marcescens
atgttgaccgtttccacccccaccccatccaccccgtcgccggttattcctggcagttacaccccgcgcgagcgctttatccgcctgccggaagtgctctacaccaccggcctgtcccgctccaccgtgtacgagatgatgagccgccggcagttcccggctcaggtctccctcggcggtaaaaacgtcgcctggctggcctccgaggtcgagcagtggatggatgaacgtatcgccaaccgtcaccagggggccaccgtatga

SEQ ID NO: 430218 - DNA, 744 bp, Serratia marcescens
atgccgatcatcaccattaatcaggttcaaaaatattacggtcagaatcatgtgttgaagggcgtggatctggatatcgacatggggcaggtggtgtcgatcatcggccgcagcgggtctggtaaaagcacgctattgcgctgcatcaacgggctggaagggtatcaggaagggagcatcaaactgggcggcatgaccatcaccgatcgcgattcgcaggcgcgtgaaatcagccgctcgattggcatggtgtttcagaacttcaacctgttcccgcatatgacggcgctggaaaacgtgatgctggcgccgcgccgggtgctgaaaaaaagcgctgccgagtgccgcgagttggccgaacagatgctgaacaaggtgggattgggtgagcgcatgcattacgcgccggccaacctttccggcgggcaacagcagcgggtggcgatcgcccgggcgctggcgatgaaaccgaaggtgttgctgtgcgatgagatcacctcggcgctggatcccgagctggtgggtgaagtcctgaaggtgctggaacagttggcgcgagagggcatgacgctgattctggtcactcatgaaatgagcttcgcccgcgaggtgggcgaccgggtggtatttatgcaccagggcaaggtgtgggagcagggaaatagccgcacgctgttcgccaatccgcaaacgcaggaattgaaacagtttatcgcttctgtgcgcgggttgtcagaagcctga

SEQ ID NO: 430219 - DNA, 657 bp, Serratia marcescens
atgctgacgtttaccgattgggacatcgtgcgcaatctgctgttggcggctcgctggacgctgctgctgtcgttgacggcgttcttcggcggcacgctggtggcgctgccgctggtgttgatgcgcctgagcaagcgccgctgggcaatgcgttttgtccgcgtttacgctgaactgtttcagggcacgccgctgctgatgcagctgtttttggcgtttttcggtctggcgctgttcggcgtcgacgtcagcccatggaccgcggccgcgctggcgctgacgctattcaccagcgcttttctggtggatatctggtccggcagcatcgccgccttgccgaaaggtcagtgggaggcagcccgttgtctcgggctgagtttcacgcagacgctgatgcgcgtcatcacgccgcaggcggtgcgtatcgccattgcgccgaccgtcggtttctcggttcaggtgatcaagggcaccgccttggcgtcgatcattggcttcgtcgagctgaccaaggccggcaccatgctgaacaatgtgacttatcagcccttcaaggtgtttggtctggtcgcgttgggctatttcctgatgtgctatcccttgtcgcgttacagccattatctggagaagaaatgccatgccgatcatcaccattaa

SEQ ID NO: 430220 - DNA, 666 bp, Serratia marcescens
atgacctatcagctgaatttctccgcgctctggccctacatgcctgagctgttggcggggttactgacgacgatggcgctgacggcgctggcgacgttgatgggggttgcgttgggcatttgcggcgcggcgatccgcagtggccgggccggcgcgctgagccgcctctggggcgtttacgtcgaagtggtgcgcaacacgccgttcgtcgtgcagttgttcttcatcgtgttcggcctgccgagcctgggctggaaactgacggccgggcaggcggcgctgctggcgatggtgatcaaccttggcgcctacagcaccgaaattattcgtgccggcattcaggtcacgccgaaggggcagtgggaagcggggcgcgtgttggggctcagccgcagccagacctttttacgcatcgtactgccgccgtcgctgcagcgtatttatccggcgttggtgagccagtgcatcatcgtgatgctgggatcctcggtggtgtcgcaggtctcattcgaagagctgaccttcgccgccaacctgatccagtcgcgcaccttcctcagctttgaagtctatctggtgacggcgctgctttatctgttgttgtcgctgttgatgcgtcaactgttactggccgccgggcggcgttttttagggagccggaactga

SEQ ID NO: 430221 - DNA, 792 bp, Serratia marcescens
atgaacatcaaaaaaacgctgtggacggttttcactgggatcgccttgctggcgcaggccgcgccgaccatggcggatcaattgcaagagatccggcagcgcggcgtcctgcgcgtggcggtgccgcaggatttcccgccattcggctcggtgggcaccgatctgcagccccagggttatgacatagatatggcgcgttatctggccgataagatgaaacttaagttgcagttggtgccggtcaccagcgccaaccgggtgccttatctgcagaccaataaagtggatctggtgatctccagcctgggcaaaaatccggagcgtgaaaagaccatcgctttcagccgcgcctatgcgccgttcttcctgggggtctttggtcctaaagacggcgcgttggcggacatggcgcagctcgatggcaagaccgtcggcgtcacgcgcggtgcggtggaggatatggttctgagcgacggcgcgcctaaaggggcgcagatcaagcgttatgaggataacaacacgacgctgtcggcctatctctccgggcaggtgcagtacatcgccaccggtaacatggtggtgagtgccctggcgcgccagaatccgggcaaggcgccggccgccaagttcatgttgaaagattcgccgtgctttgtggggttgcgccagggagaaccggccttgaaagcggcggtggatgcgctgattggacaggcgctggcggacaagacgctgaatggcctgtcggagaaatggttgaaggcgccgctgcccgatggttttggcgcataa

SEQ ID NO: 430222 - DNA, 840 bp, Serratia marcescens
atgcagcccttcgatgaacgcctgcgcaacgaatatccgcaattggcgccgcaggaacagcgcgtcgccgactttatcctcgatcatttcgatgacctgatcagttacaacagcgccgagctggcgcgcttgagcggggtttctaaagccacggtcagcaggctgttcaagcggttggggtatcgcagctacaaggacatgcgcgctgagctgcgcaccctgcgccagagcggcatgccggtgaccgacgagaggcatgcggtgcagggcaatacgctgctggcgcggcattacaagcaggaaatggctaacctctcgcactgggtgagccatctcgatgtggagcaattcggcgcggtgatcgccgcgttggcgcgggcacggcgggtcgcgctgctggggtttcgcaacagctatccgatagccatgcatctgcgtcagcagctgatgcaggtgcgggagcgggtgctgctgatgccgcagcccggccagacgctggcggaggagctggtggatctcgcgccgcaggatatggcggtggtggtggcgtttcggcgccggccgcgtcagctcaaggcgatactgacgcagctgcaaactcgccgggtgccgacgctgttgatctgcgaaccgcaggcgcagtcgctgatcccgctggcggactggcatttggccgcttcgctggacagcgtctccgccttcgacagctattcagccgccatgagcttatgtaacctgctcagtaacgccctgctgcatgagatgttggagcaggggcgatcgcgtattcatcatattgccggtctgtatcaggatttggacgaactggaaccgcgctaa

SEQ ID NO: 430223 - DNA, 1587 bp, Serratia marcescens
atgattaacagcaataccgcgccacagggcatggcggtcacgccacaccatctcgccagcgaaagcgcgctggcggtgctgcgcgaaggcggcaacgccattgaggcgatggtggccgccgccgcgaccatcgccgtggtctatccgcacatgaacggcatcggcggtgacggtttctggctgatcgtgccgccgcagggcgagccgctgaccatcgacgccagcggcgccgccggctcgctggcgacgccggcgctgtacgccggagaaagccgcatcccgcagcgcggcccaaaagcggcgttgaccgtggccggcaccgtcggcggctggcaggaggcgttggcctattcggccgaactgggcgaaacgccgctgccgctgtcgcggttgctcgccgacgccatacgctacgccgccgacggcattccggtcaccgcctcccaagaggcggcgacgcgcagcaaacgccacgagctggaggagttcgcccccttcgcccgcatttacctgccgcagggaaagatcccgcttgccggccaacgattctgccaaccgcagctggccgatacgctgatcgcactgagtgaggacgggctcgacagtttttatcgcgggccgctggctgaaagcatggcggcggacatggcgatgttgggcatgccgctcaccgctcatgatctggcgagttatcggccatgccgccgtcctccgctgcgcctggaacaccaaaaaggtgaaatattcaatctggctcccccgacccaagggctggtgtcgcttgccatcctcgggctaaccgaccgtctgccgctggtcggacagagcgaaggcgccgtggtgcacgccgtggtcgaggccaccaagctggcgttcgatctgcgcgaccgtttcatcaccgatccgcgccacatgacgcaggatccgcaggcgctgctggcggccgaccatttggataggctggccgggcgcatcgacggccaaaaagcggccgactggggccagggcaaaggacccggcgatacggtctggatgggggtgatggacagcagcgggctggcggtctccttcattcagagcatctaccacgaattcggcagcggcatggtactgccgaacagcggcgtcctgtggcaaaaccgcggcgcctctttcagcctggacgccgatcatctgctggcgctggcgccgggcaagcagccgttccatacgctgaacccggccgccgcccggctgtatgacggacgcacgctgatctacggctcgatgggcggtgacggccagccacagactcaagcggcgttgttcgtgcggcacgtggtgcaagggctgccgctgcagcaggcgatcagcgcgccgcgctggctgctggggcgaacctggggcgaaagttcggactcgttgaagcttgaggggcgctttaacgcggcgaccctcgactatctgcgacagcgcggccacgccgttgaactgctgccagcgttcagcgaaacggtcggccatgccggcgccatcgtacgccacaccaacggcatgttcgaaggcgctttcgatccgcgaagcaacggcagcgccgccggcttctga

SEQ ID NO: 430224 - DNA, 192 bp, Serratia marcescens
atgaacaatcaacacgccgccgattgggcggcctatatccaccagatggaaaacgtgctggccgtggaactggacgatgtccgccgccgagaactgttgaaacagatcgaacgcatcgccgcgctggccgaaccgctgatggccttaccgctggatccgcgccaggaaatcgcgggggtatatcgcccatga

SEQ ID NO: 430225 - DNA, 1395 bp, Serratia marcescens
atgaaccccttaagcgccctgtcactcgccgagatccgtacggcccttgaacgcggcgcgctctcggcgcgcgagatcgtccggcatacgctcgatcacatcgaccgtcagaatcccgcgctgaacgcctttacgcacatcacccgggaacgcatgcaaaaagaagccgatcgcctcgaccgttcgcgcgcgcttgggcaaacgctgcccgctttggccggcattccctatgcggtaaaaaatctgttcgacgtcgccggagaaaccacgctggccggtgcccgcctgttcagcgatcggccaccggccgaccgcgacgcctggggcgtctcccggctggcggatcaaggcgcgttgctttgcggcatgttgaacatggacgcctacgcctacggtttcaccaccgagaacagccattacggcgccacccgaaacccgcatgacctcgggcgcatcgccggcggctcttcgggcggctcggccgcagcggtggcggccggcctggtgaccttttcgctcggcagcgacaccaatggctcaatacgcgtgcccgcctcgctgtgcggcatttatggtctgaaaccgaccttcggccgtctttcgcgcagcggcagccagccgtttgtcgacagcctggatcacatcggcccattcgcccgccgggtgcacgatctcgcgacggtgtatgacgcgatgcagagcatcgacgccgaggatccgttccagagcgatcggccgatttcccgcaccgaagcgttgctggcacagggcagccagaacctgcgctgcgccgtgttaggcggctatttcctgcaatggtgcaatgatgacgccaaagccgcagtcaaccaggtggcgcaagcgctggcagccagcgccgaagtcgagctgccgcaggccgagctggcccgttcggcggcctttatcctcagcgcctcagagggcggccatcgctatctgccgcagttgcgcagccaacccgaacgcttcgagccactgtcgcgagaacgactgctggccggcgccatgctccccgccacctggtatttgcaggcacaacgctttcgtcacgcgtttcgccggcaagccgcgccgctgttcaagcactgggacattttgatcgccccggcgacgccgtgcagcgccacgccgatcggccaggaaacgatgcgcatcaacggcgtcgatctgccgatccgcgccagtatgggcatgctgacgcagccgatttccttccttggcctgccggtcgtgacggttcctttgaaaagcgcatccggtctgccgatcggcctgcaactgatcgccccgccgtggcgcgaagatttggcgctgcgcgccgcctatgcgctggaatgcgccggcgtcgccacttgcgtctgcaaacaggagtaa

SEQ ID NO: 430226 - DNA, 390 bp, Serratia marcescens
atgaacagtgaacatatcgatcggccggcggtgctggcggaggtcaacgccgccttttaccgctatgagcaggcgttaatcagcaatgacatcgatgtgctggacgagttgttctggcacgacgcgcgcacggtgcgctatggcgccaccgaaagcctctacggtatcgacgaaatccgcgattttcgtcaacggcgcccggccaacggactggagcggctgttggaaaacacccaaatcacgacttttggtgaagatatggcggtggccagcacggaatttcatcggccgggcagcaaccgcagggggcggcaaatgcaaacctgggtcaagctgccctgtggctggcgcatcgtagcggcgcacgtcagcctgctcgacgcgccttag

SEQ ID NO: 430227 - DNA, 528 bp, Serratia marcescens
atggtgaaaatgtgtaatcgttttggctgcaacctggcgctgaccggcgcgttgcttttgaccgtaccggcggcgcacgcggtatcgaaaatagtgattagcggcaacattaaagccgccccctgcgaaatcgacggtgcgaacggcactgtgtccgtcaatttgggagacgatatttccgctgctaccctggcgacgtccggggctttcagcccctggatagagtttcctctgacgttaaaaaactgcccaagcaccaccacctctgtcgtcgcgaccttcagcgggacgcccgccgaggaaagcgccagcttgtacaagagcaacggcggctctcgtcgggtgcaaattgagttgcagaatagccaaggggccaacctgggcaatggcaagagcatgacgcaactggtggatcgcgcgacgaataatgccagattcgatttacgtgcgcgggcatacagcacccatggcggatcgacgccaggttcaatagacggcgctctgcaggtcacttttgtctatcagtag

SEQ ID NO: 430228 - DNA, 1059 bp, Serratia marcescens
atggcgacaggaatatcgattcaacgcagggcgatcgccggtgggctgctggcgtgcgcaatactggctgtacagcaggcgcaggcggcgccagggcagtgtacgccgatatcaggaacgcacggcttttcatttgccttttccccaagcttaagcgacccatcgcaaaacgtgacggggcggattatcaagaacgcggataagaacgcatggaacttgcccggttcgtattatgtgaaatgcgaatgtaccgctcgcacggcttcttacatcaccgccaaaatgctgttgaccaacccggtatttcaggagggcggattgacgtattacgcgttgaacgaatatctgggcgtcgccagcgaggtcttcgtggcggggcagcgcaatgaataccttgctgcaccctttaccaatgagactaaccgtaagaccagcatggatggcgatgatgaatcctgtgcccgttcgccctacaacagcggcgcgcgtgggcgcattcacctgtatttccgtcggcccttcgttggcgtgacggcgatcccgaatacccgactggtggaaacgtatgtatcggtagtgagtggcgtgaaaagcgatacgccggtttccaccatctctatgagcggtaccgtcaccgtgccgcagagttgcgagatcagtccccagacggtggtggtcgactttggcgatatcgtcagcacccatttccaaacgaaaggcgcgatgccacctcgtttcacaccggaagagagaacgctgacgctctcttgtcgcaatatttccgagggcgtcaaagtcagtctgtcatttcgcggcgaggccgacggcaacatgccggaggcgctgaagaccagcaaccgcgatatcggcgtgatgattaaggatatgcagggcaatgtgattcggccgcagagcgggcgcttgcccatcgataacttccactatcccgaccaaagcggcagttcgcggatcagcgtatatccgatcaataccaccgggcaagccccttcagtggggcagttcaatgccacggcgaccattcaggccgaaatccaataa

SEQ ID NO: 430229 - DNA, 132 bp, Serratia marcescens
atgctttttggccattggataggcaaaaaagaaattgccgacccctatcgacaaagcaaagaagcatttgagcacatttataaacttatcgatgagtctgctgaaaagtgggctcaggcgctgaataaataa

SEQ ID NO: 430230 - DNA, 2193 bp, Serratia marcescens
atgttagaaaaaaataagggggcggtatccccaaacgtagcgaagaacgaagatatagatttaggtcgcttgatcgggacactaattgaccatcgctggttgattacaggtataacaactatatttgctgtcgtcgggttgatctatgttgtattcgccactccgatatatcaggctgatgccctggttcaggttgagcaaaatatgggtagctcaatattgaatgatatctccaaagtccttcctgatagccaaccagtctctgcgacagaaattgaattaataaagtcaaggatggtaatcggtaaaactctggatgaaatgaatttagataccgaagttgaaccaaactatttccctgtatttgggaaaggtttttcacgtttaactaaaagtagttccgaaaggcctcaagtcgcgttaagcagtttacacgttccagattatttgctggacgagaagttagatcttacgttcaagagccacgatgcttatgaactatcatactcgggcgataagatactcgaaggcgttgtgggaaaattggctacagggcatggcgtgagcatactggtcagcgatttccgaggaagcgatggcactggcttcacgcttaaaaaacgacctcgcctggatgccatcaatgatttagtggatagattaactgttgcggataaagggaaagatacaggaatactggccttgagtctaacgggtgatgattccgttcaaatcagaaaaattttaaacagtattatcaataattatctgcaacagaatgtcgagaggaaatccgaagaagcgggtaaaagcctggaatttcttaaggcacagctaccgcaggttcgacaaaacctcgatttagcagaaaacaaactgaaccaatttcgtcagcagaacgactctgtagatttatctctagaagccaagtctgtattggatacgatggtggcggtggagtcgcagttaaatgaattaacctttaaagaagccgaaatttctaagttgtatacgaaagaacacccggcatacagagcactgaatgagaagagagcaacattagaaaaagaaaaggctaggctgaataaacgcgttagcaatatgccaaaaacgcagcaggaaattctgagcctaacgcgcgatgtccaggctgggcaagaagtttacatgcagctgttaaacaaacagcaagaactaagtatcaataaagcgagtacggtaggcaacgtaaggattgttgactatgcggatacgcagctgaaaccggtaaaaccaaagaaaatcttcgttatcctgttcgctatcattttgggagctgtttcttcgataacgttggtgttggtcaaaatgttgcttcataaaggcattgacagcgcagaagagctggaaagcaatggagtgaacgtttacgcaagcattccactgtccgaatggcaaagcgcgagggataaagagctgaagttgcgtgggaaaaaactcaacacgcgctcaaatgagcttttggcgacagggaatcctgcagacttggctgttgaagctatcaggagtttgagaacaagtttgcactttgcaatgctcgatgcaaaaaacaatattctaatgatttctggtgcgagtccgtctattggtaagactttcgttagcgtaaacttagctgcaactattgcccagtcgggtcagaaagttctggtgatcgatagcgatatgcgtaaaggatatattcacgatatctttggcgttaatgcgaacaatggtctttcaacgatacttgccggacaagtcagccctgctcaaactgtcgttcattctactgttgctaatttagatgttttgcctcgaggcaaagtcccgccgaatccatctgaattgttgatgagcgagcgtttcgaaaagttattggcttgggcaagcgaaaattatgattttgttctggtcgatactccacctattttggctgtaactgatgcagcaattattgggcaccatgttgggacttcattaatggttgcccgttttgatgtcaacaccgtcaaagaagttgaagtgagtattcgtcgttttgagcaaaatggagttgaaatcaaaggcgtcattcttaacgcgatggtcagaaagttgggctcttactattcaaattatggttattaccaatatgaatataaaagtgacaacaaaggtaaggataagcactaa

SEQ ID NO: 430231 - DNA, 1119 bp, Serratia marcescens
atgaaaaaagtgttagttttgaccaatgagtacagtcccttcaatggagggatttctcgttatactcaaatgcttgttcaacataaaccgggagatatttcggttgagcttatcgcgccaagttatcaaaaggaagagtcaaaagatctcggaacgctaacgataaatcgatattctggtgggaaatttacatggaaggagtttcctaagattataagagaagtagcagcaatccagcctagtgactatgacagagttcatgtggccgattggccattttggctggcggtatgttttagaaataaattttttccctggaaagaaaaaataaaattcacgagcacggtttatgggagtgagatccttaattttaaaaatggccgcatatctccatttgtaaaaatactgtcgccatttaaagatgtcacggctctgtatcctatcagtgaatatacaagaaagatcatggttgagaacttccctgaaagtgaagtgttaccatgcaaaactgtattgctgggtattgatgagtcgtggcggaaagaaattgaggtcggccatgtagcatcgattgatgaggttgatgcagcgagggattttgttttagttactgtcggcagattggactcgaggaaagggcatgacctaatcattaaggctatttctcaatccgaattggcagagaaaataacctacaacattatcggaagaggagacgatagctacaaaaagcagcttaatgaactggcagagaaacatcgtgtccatatcaacattttcgataatttaaatgatgatgaagttaagtctaagtatcgtgggtctgacttgtttgttttagctgcgcggaccgatgttagaaaggtagaaggtttcggtctcgtttttcttgaagctgcggcatgtggagtgccttctttagcaactaacgtgggtgcgataccagaggtagtaacctcggagttaggtgtaatagtcgaggagtcaagcgagggaatcgcaatggcgattcgtcaactatattacgatgctgaaaaattagccgctttgaagaaaacatgcggtaagaaagcagcatcttatagctgggaaaaaaccgctcaggaaactttcgcataa

SEQ ID NO: 430232 - DNA, 1134 bp, Serratia marcescens
atgctcggtgccgataagtttggcttgtgggcctctgtgtccgcattgtgtaacatcttaagtccgcttattattcttggtattggcccctgcataataaaagttcacgcttcagataaagactttagtttgtttagaagttactactatttaggtgccttgttactcgcgattggcaccttggtattaactcctgttgctgccttgttgtataaaaccaactattctacagttgcattggtactaatcgcggagttgttcgtattcaggcaaatagaattactatcacaaatgtatttggcgaagggaaataaactggcattctctttattcccggtcgcatttattgtttttaaattgctaattgtctttgttatattttggtgggggggttctgatgattttatttatgttaattttatttcgtcattagttttcattttgccagtgatgtgctgggaggaattaagaagcgtcaaatcaaacttgaagcttcaattccagaaagctatacatatgatgagagaagcggtttacttttcattggcaacaacggctaaaacagtttataccgactcggataaggtcattttaggggctgctaacaacctgagagacgttgcgaattacaatattgcatataagttgatcagcttggtgtttgtacctgtttctgcggttttatctattcaagctcctacgctatatcatctgggttccttggaaaataaggccgcccttagagaaaaaattaaaagacttatcgcgctctgtgtagcaatgtcttcgctgattggtattgggataattatttttctgccgattatactgtctttcttcggggatgaatatgcaaatgctaaaaacatggtctatttgttattgccagccccaataattatgagtatccactacgttttcgccgatgggataacggcaatgggttaccagaagttaagagcctatatgtctattataactgcagttcttaatgcggtattgggacttgtctttataccaatgtacggagtggctggggccgtaggtataacgttattttctgaaactcttcttcttgtccttttctcatctgtctacatgtcgaagctaaagaaaaaatatgttgaacattaa

SEQ ID NO: 430233 - DNA, 1170 bp, Serratia marcescens
atgttgaacattaaaatatcttggtggggaatatatgtaattactgcgtttgtgctaggttgcataaagatcaatatcggcaatggtgatatttactttatagatctatttagcgcgatgacgttcttttatgtagtggttaacatcccacactctattcgtaccaaatccttcatttttattattagttatgtgcttatttgttgtttgatttcgatcaactcttcaattagacatggtgtgcagcttcccactatagttggaatggttcggtattttgaatatttaatttggggtatagcctttttcattaaatatcagcataactacgatgctggaaagatacctatcgaagttaaaatactgtatttcttccttctttttgtttctgtgttgcagttctttggttcaacaatctatcttgagtcatggcaggaatttaactttaagtatggtgatggctttcgtgccccaggtgtgtttttacatcctaatattaactcatttttcctttctttcttcccgcttttgtatttctatgggaagagggataatactagaattcaaatattagtggctgcagttataactcttgccttagttttaacgaatagtcgcggcaactttgctatagcaagtattgcatttgttatgttatatgtgcgcggtataaagataacacttttagctactttttcagttttagctgtgatagcaatatctagctatattgactattcaggtttagctggctggcttcgtttggattcaaattattcactgacggataatacatcattcacattgcgcttggaactgtgggaaagtgctttgaagatgttttatcagtctccaatattgggccaaggatttaaacagtttccagtgctgactgatgtatttatctggggcgactcaggcaatggtgtagaagaagttaaaacacatgctaattcatttattttaggttctctggcagagaatggtttggtctttactcttcttatcctgtatagaatgaaaaagatactcgctgaatatggcttatcattcttcttactattctcatttatcttgatgtatgacgatctattccatgatccatactcaatgactttgcttttatttatggcaatttccttaactaggtataaacaggatgaaaagtaa

SEQ ID NO: 430234 - DNA, 1194 bp, Serratia marcescens
atgaaaagtaaccaggtattgggcgtgatttgtaataacagaatgctgtcagatgcgaatggcgattattgggtaagtaaacaaacatacggtgatagtttttggattcgatacttggcggttttttccgtagttaggcctatatgccgagtcactaaagttaataaagtgccggatggttgggtgaaaattacacttgaaaatgtgaagcccattcctattaccggttttgagggaattgggcaactgataaaagtttttagtgttttaagaaaagagttacttaattcgatcaatatagttgataaagtgattgtccgtggtccgacgattctttcctctgtgatccaagattggttcatgaaaaacgatactgcctatggtattgaggttgtttctgatccttgggatgattttgctaagggctcttacaaacataagttaaggttttttctacagcagttttcttatatcacattcaaaatgcttgtaaaaaatgcctatgttatttcatatgtgacatcgagttatctacagaataaatacccagctaaaaatgcgactttcagcactaattactcttccatttcattgaagtcatccgatattgtggaccaagaaattcgtgtgttccctcgtggtgacatatggcacgttggtcttatcgcacggctagatactccccataaaggtggagatgtccttttgcgagcggtgaggaagtgtttgactgcgggagctcagctcaaatgtaccattgtcggagatgggaaggagttggcagttcttaaagaactcgctttgaaattagacattgtcgatcgtgtcgtgtttccaggcgcagtctctactaaatctgatgtgttcaagtaccttgacagttttgatatatttgcacttccgactcgccaagaggggctgcctagaagtgttattgaagccatggcgagaggtctaccttgtctttcaacacctattggtggcgtaccggagattgtcaatgcttctgaattgttcgagttggataatgttgatgagttggcgaaaagaataataaatcttattgataatccagattattgcgttctgctttcagaacagaacttgcagaaaagccaaaactatgaggaaactgagctggaggttaggaggaataagctttactcagttttaatggaagcgcctgtaaagtga

SEQ ID NO: 430235 - DNA, 546 bp, Serratia marcescens
atgttgtatggcggtcagcagaatagcttcacattaactgacaccggggacacgaccatgagcaccaccaccttaccgaaatacatcaccgataaactgcaagccctgcgtgacgctcgtgccgcccacgataaaaactatcaggcattgacggacgttattacggggatcgcacgctgccatcaacagaagaaagacacagaagtggagagccatgaggcagaaagccagtggcgcaccctgtttcgcaaactgcacggagaaatgacgccagaactgcaagcgcagcaccacagtcggatttccaagcgggagctggcgaaagagttcgacggcctgattgaggagatgaagcgggacaaaatgcagcttcacctcaactgcggcggcacagccccgaagatggtgagcgcgcacaaagacgccctcacgacctttacaactcacgcgatgcatcaggccgtggatgcgctgagcaaggcgcttatcagccctgacgttatcaaggcttacgcactggcggcgtctatgcggacaatccgatga

SEQ ID NO: 430236 - DNA, 228 bp, Serratia marcescens
atgaggatgattgagcaacaggtactgggaacgctaaaaggccgtattcacattgccatggcagagcaaaatatcgatcacccagtgctgaatgagattggcctgacgataccagaagaaaccggcgtattgcgggagcgacaaagatgcctaatgcgccagatgcaaggggtaacagaattagtggaaaaacgtcaacgcttgcagcagaaaggggcacaatcatga

SEQ ID NO: 430237 - DNA, 255 bp, Serratia marcescens
atgatgcgctgcccgctgtgcacccattcgtcctatacacgcaccagtcgctatatcacggatcgcacgaaagaggcgtattaccaatgtcaaagcctgacctgttcttgcacattcaagacggtggaaagcgtcgataaaatcctgtgccagccgatacaagcgcaaccggtcgatgagaacgccttgccaccgccggagaagcggacgttgaaccgctatcgccgttacaacagcaatcctactctgcactaa

SEQ ID NO: 430238 - DNA, 1410 bp, Serratia marcescens
atgagcaccattgagcaaaatgagttatttgatgagcttttttcatccgaaaatttacttaaaacatttaatgaaaaatttattaattcgggtgctaagggcattgatcgcttaaatgggatgcaatactcaattaggtctcagaatgatttgataaagacgtctgaaaaatgtttaaatgggagttttcgcttcagcccgtatcttgaaatgttaaaaagtaaaggcaaagggaaaaacccaagagtgatttcaattccaactgtccgtgatcgtgtcgttttaagacagttaaatatatttctctgcaatatatttcctgagtatgtaccgaaaagcgtagcgtcaacttatattagagcgttatctgctgattttctatcttctaatccagatgagatttacatttgcagttgcgacattgaaggattttacgacaatataattaaagatcgacttattaaaaaactttcatcgcggataaaatctaaaaaagcactaaacctaatcgttcgttccttattgacaccgacatctcctgactcaattaagaaaaatcaaagaaaagagtctttcaataaagagaaaggagttccgcaaggactttcaatttcaaacattcttgcttcaatatatatgtctgatattgatagttcaatgagttcatataatgtaagatattatcgatacgttgatgacgtccttatatatggtgataaagattgcgtatccaaagcttaccagtcaataagaagaaagttaatacttagagggttaaatacacatccaccatcgtctccaaagactcacttaggctatcttaatcagcctttcgggtttcttggatatgttttcaaagggaatgatataactgttagagattcaactacagaggcgttcttacaatctattgcttctaggtttagtgatttcacccataataaaaacaaaagacttaaaaaacacccccacttatccattgaagatttaaaagaaatatttttagaggagttaaatgaaaaaatcacaggtgcaattagtggtaacaaacgatatggttgggttgcttactactctaacattaatgacctctctctccttcacaagatagactttattacaaaggaaatgttttcgagattgattgattttgattctcagccaccaaaaggacttaagaaaatgtccagggcttattacgaaataaaattcaacccacaaggtgggtatattagagactatgataaaatagagacactcaaacaaaaaacagattttttagtaaccagggggagaatttctcctgatgaacggcttaccaaagagcaaatcgaagagcgatttgaacgttataaagcgacaattttgtccagaatgcaagcagatgaaggtgaaatatatcctaagtaa

SEQ ID NO: 430239 - DNA, 642 bp, Serratia marcescens
atgaaagaatatttagatagcttaagcaaatcagcttgggaaacatcctgtgcaagatacaattcatctcgaagattgaaaataagggagattttttctacgataagtatcgctttgataggtttatcaggaattgctctttctctaatacaattctatttcgatgaaatattagggaaaaacattagtaatcttgtggctgctttttcaatcgtattaagcatgttacttataataataagtttgattgaatgggggtttgctgcaggtgctaaatccgaggccttgtttcgcaacgcagagttacttaatgaatatgaaagaaaagtaatattcgttaagggaaaattaacagagggcttatcacaagaagattataataaaattgatattctccgtgaagagtatgagaaaataaaatccacttgcgtatttaatcatagcccaatagatcacgaattccataaaataataaggaaaagattttatatttccaaaaacaacgaacatttcagttttataagaaatctgtatgggaggttgtcatattatctttgtagcatttggggctatttattaatatgggggttggtagtgctgtttttttatgcagtgattaaagaaattatttcattacattaa

SEQ ID NO: 430240 - DNA, 642 bp, Serratia marcescens
atgtttgagttatttaaacttattgggctagggttggttttattactgccgctggtaaacccattgaccactgtggctctttttcttgggctttcaggcgacatgtctgaacaagaaaaaaagaagcagtcagctatggcggctttctatgtctttgtgattatgatggttgcatggtatgccggtaaggctgttattaatacctttggcatatccattccgggattgcgaattgcaggtggaatgatcgttgcctttattgggtttaacatgctgtttccgcaggatgtgaataagcctcaaaacggcgagaagggaaaaaccaaaaatatagcatttatccccttggcaatgcccagtacggcaggcccgggtaccattgctatgttgatcagtgccgcgtcgacattcagcgctgaaacatcgcatctggatttgtgggtcgcctacaccgcgccccccctgattgcgatagccatttctctgattttatgggtatctctgcgggcgtcactgggtgttatgaagcttgtaggaacatctggaatcgatgctatttcccgagtgatgggattcctgctggtctgtatgggggttcagtttgttataaatggcgtcgttgaactcgtcacaatacaataa

SEQ ID NO: 430241 - DNA, 3054 bp, Serratia marcescens
atgaatgcctctgaacccgagaagtttaacctgtctgcctgggcgcttgccaatcagcaactggttgccttttttatgttggttctcaccattgccggggtgatgagctattacaacttgccgcgtaatgaagacccggcgtttactattaaaacggcggtggtttccgcgagttggcctggggcttctgtggaggataccgtcaatttcgtgaccgatccgttggagaagaaacttcaggaagttccttatcttgattatttggagagttacagccggcccggcgagtcggttatttttatctatctgcgtgataatacgccgccggagaaagtgaaagaactgtggtatacggtcaggaaaaaaataaaggacgtttcccctcagcttcctgccggcgtcagttcacctgccgtcaacgatgaatttgatgatacctacggcaccatctatggctttacgcgtgaaggattcagcgagcgcgaactgcgcgatctggttgataaagttcgcacggacgtcttaacgctgccagacgtcgggaaagtgaacctgctgggcgttaaagaagagcaggtcatcttatcattctcaccgcagaaaattgcgggcatggggctgacgctcgaccaaatcaagaacgccatcagcgcgcaaaacgccgtcactccggcgggagaaatcagaaccgacaaagataaagtcatgttgagagtcagcggcgctttcgcatcggaagaaagcctcaaacagctgacactgcatattcaggataaattcgttcctctgacggatattgcgactatctctcgcgaggcggtcgatccgccgactccggccttcagagttaacggggagtcggcgattggcctggccatctccatggccccgacaggcaatatgctggatttcggcaaagcgcttaacgaaaagatggatgatatctccagccgcttgcctgcgggtatcaacgtgctgaaagtggccgatcagtcgacggtggtgcatgacgcggtggggagctttatgaaagtgctccttgaggcggtcgtcattgttctggcggtgtctttcttgtcattaggcactcgtgccgggttagtggttgcagcatccattccgctggtgttggccatgacgtttatcggcatggaaattgctggtataggcatacagcgcatctcactcggcgcattaattattgcgctggggttgctggtcgatgatgccatgatcactgtagagatcatgatgtcgcgcctggagaaaggagaccctgtcaaaaaggcggcgacaaaagcctggacgacgacggctttcccgatgctgaccggcacattggtcatgatcgccggttttatcccggtcggtttcgccacgtcgagcgcgggggagtactgttattctctgttcatggtggtgctgatttcacttatcaactcctggattgttgccgtacttttttcaccgctgataggcgtgtggcttttacctaaggtgatgaaggaacacacccacggtaaaggtaaagtcatgcaaaagtacgaaagtacattgcgatatatccttaagcgccgagggatgaccggcatagtggcggttctgttgctggccattgcttttatcggatcctcgcacatggaagaggagttctttcccgcttctgacaggccggagttactcgtcagtctgactctgccgagaaatgccgtgcaggaagatacggcgagggaagccattcgcttggaggaaatcctcaagaaggatcccgatattgatcattttacgacatacgttggatcgggggccgtgcggttttatttgccgatggacctgttgcttgataacgaaaatatcgctcaattggtcgtggtcaccaagggacttgaagagcgtgacgcggtgaagtccaggcttgaaaaaattctgcaaaaagatttcggccatcttgttacgcgtgcttcgccgttggagctggggcccccggtaggttggccgttgaaatatcgcgtttccggcccggatctgaccaaaatccgtgagatatccatggagttggcgggtaaattgggtgacaacccgcagacaagagaggtcaaccttactgcgggagaaccgcaacgagaactctatataacgcttaatcagacggaagcgagggccttgggattaagctctcaggatgtcgcaagcgctcttgctgaaatgtattcggggtccgctgtaacgacgatcagagacagaaatcgtcaggttaacgtggtgctgcgggcttcggaaaatacgcggagagacattgaaaccgtcgcggatttgcaattaacgacggccgatgggcgcgttgtgccattaaagcagatcgcaacgataggctatacgttggccgaacctattcagtggcggcggcaacgagagcctttcattacggtgcaaacggatattgcgccagggctgaatgcgtccggcgtatccaagagtttggcgcctgttgtcgatgaattacgcaaaagtctgccaccgggatatcacattaccgaggggggaagcgtcattgaagccatgaaaggcaaccgttcagtattcgccgttctacctgtgaccttattggtgatgctgatcttgctgatggtgcagttgcgtagtttctcacgcatgatgctggcgctgttgattgcccccttcggtttgattggcgttgtcgctgccatgttacccaccggaacaccgatggggtttgtcgcgattcttggcgtgattgcgttggcggggatgattatccgcaatgccgtgatccttattgaagaagtggaaataaacagagcacaaggcgcagataatactgaggcgatcgtcgaggcgtcactgcatcgttccagaccgatactcttgacggcttgtgcagcaatattagggatgatacctatcgcgcatcaggtattttgggggcctatggcctatgccattattggtgggctattcgttgccaccctatttaccctgacggtattgccggctgccatcagcgccgttctgcaatgggagaaatctcgatag

SEQ ID NO: 430242 - DNA, 1122 bp, Serratia marcescens
atgtcagtaggtttgttcaggttaataagtacggtcaagagtgtgtttctatttcaatattggaaactgtttattattcccctgttcgtttttttggcgggatgtgatgataaagcaaagacacaggaggtgcctacacgttccgtacgaacgcttgtcgtcgataatccggttggcggagttttgataaagcataccggagaaattcgcccccatgaggaatctcagctctcgtttcgcattgacggccggatcctcagccggccggtcgatgtgggggacaaattaaaggcggggcaaacgatcgcgactttggagcccagaaataacgagaatcaggtgcgcagtgcgcaggctgaactggccggtgccgtttcttcagagcgcttggctgcgctcaatttcaggaggctgcaatcattgatcaaaaccggtgctatcgcgcaggctcaggttgatgaagcgagggtcaatcttgaagtcgcagcggcaaaacgcgtctctgcccaatcgaatttgaaaatcgctcaggagcagttgggttacacccgtctggttgcgcctgcagatggcgtagtgacttcggttaagctgaatcctggacaaactgtcagcgcagggcagggggtcgttacgctctcactcaatcagggagtagatgccgtatttgacgttccagaagcaattttgtacagcaatctttccgataataaagtcaagattgcgctgctttccgatccttccgtcgtgactgagggcgtgatccgagatgtgaatccacaggcggataagcagacgcggacctggcgagtcagagtctcgctgccgaaccctccagagaaaatggctttgggtgcgacggtgcagggaagtatcgtgatcccggggcaggctgcgtttgttctgccggcgtctgcgatgacccgtgatggcgcggatcctgctgttttaatcgttcaaccggatacattaaccttggcattgcgcaaagttaacgttattcgctatagctccgaggacgtgtttatcgctgatggcctaaaacctggtgacaaggtggtgatcgccggcgtgagtaagttacggcctggggagaaagtgagtttggaggataaattctga

SEQ ID NO: 430243 - DNA, 1185 bp, Serratia marcescens
atgaataagaaaagcaaaagagtttcgctttggaagtggatttgcgtgagggtaatttctcaatctgtcggggtgattgttattattgcactctgtatgtggttgcgctatgccatttatagcacctgggttttatatcatgaaatgccggcggatgtccgaaaggaattcctgcacttgcttaataatcccaatgaagatttgtacaggttttatagcctttttcactattggtatggcattgactttgctaatccgtcgatcacgtcgggggattggattatgctggctattttggttgttgtcgctatacctctcatggtcttactggggctctatatgtcgcggccattggcgaagcaattttcctatttggtcactgccgcgagaaaagtcgccgagggggatttctctgtgcaagcaaaattagaagagaaagcgccggaagaacttcttactctaacacacgatttcaatgagatgaccaaaaaactgacttattatgaaggggagttgcgtgcttctcatatcgctatggcgcatgaattacgctcgccgttaacggcttcaattgcacgccttcagggcattatggatggggtttttgagccggacaagaatcagttagatctggttatgcagcccttgaatagcctaaatcgccttattgatgatcttcaaacgctgtcattgtcgcaagccggggcattatcattagaaaaataccatgtgaatctgtgcgatttgattcaggagcgtttgcaatggttaaaggctgaagcttctcagggaaacttcacgattgaatttgaatgtcctgctcctgtattcgtctacgccgatccgttccgaattgggcaagttgttacgattctcataaaaaatgcaatgcgctacgcacattccggcaagaaactgacaatcaccgttaatcattttaataatgaggctatcgtcggttttcgcgattatgggccgggtgtcagtgaagcctttttgcccttgatgttcgaacgtttttcccgggaggagagctcgcggtcgagaaatctggggggaagtgggctaggtctttctatcgccatggcgataagccgcgaacacgacggcagtctcagtgctcagaatcatcctgacggtgggatgctatttcaactaattcttccaatgaaaatagagtcttga

SEQ ID NO: 430244 - DNA, 660 bp, Serratia marcescens
atgcatgctgcagaagtcctggaagcttatctaaaaagagagtgctttgccgttgctaaggtaggggatggtgttaaagggcttgagatggttttttcctggcaacctgatttggttttattagacgtcatgctgccgggaataaatggcaatgaaatattggcacgtgtgcgtagaaagagtgatgtgcctgtcatcatggtgacggcaatcggcgagattcaggataagatctcctcgttgaggcacggcgttgatgattacatcgtgaaaccttacaacccgggcgaggtcgttgctcgggttcatgccgtgctgagaagagcgactgcattaaatataaaatccgagcttattatttgtggcccggtacaacttgatgaagaggcgatgttggttcacgtttgccccgccgaaaacattaaaattgcagttgatctcacaccgactgagttcttactgttatctgtgctaatgcgtgcgcctaaaagagcgttttcccgccaaacattgttaaatatgtgtttgcctgaaagtgatgcatttgagcgggttgtcgatacgcatatttataatttgcgcaaaaagctcaactcggtaggggtagatgatgtactgcttaccgttagagcgatgggctacaggtattggaataaatga

SEQ ID NO: 430245 - DNA, 408 bp, Serratia marcescens
atggaaatgagcaaaattgaacagtctagaatatttattaatagcgttatcaatctgttggaaatgcatctcaagcaaccggtaaacatcatcaacctgattgataaaactggatattccagatggtatgttcaacgtaagttctgcgctttggccggcatatcgatgaagtcttacatcaggtcaaggaaaatgacagaggcggcgaaaatgattttatctacagacaggaagatcatagacattgcacttgaatatggttatctggaacagcaggctttctgtcgcatctttaaaaaccactatggcgtttcccctacgatgtttcgcaaaatgaataagtcacgtgaggacatttggatatcggctaaaacagtgcttgtaaaatttacaaacaatgggaaataa

SEQ ID NO: 430246 - DNA, 2340 bp, Serratia marcescens
atgagcgcccacttcgtttcccagaccgtacgcaccgccaccggccagtggccggtgatactcccggcgctcggcatcgccttgcagccgaacggcaagccgcagccgtgcccgacctgcggcggtaaagaccgcttccgcttcgacaaccaggacgggcgcggcacctggttttgcaatcagtgcggagccggggatggcctcaacctggtggaaaaggccctgtcactgtctgccagggccgccgccgaacaggtggccgccgtgatggggaataacaccaacactttgccaccggccgctgaggccggtcattcaccacaagacaaagccgaggcccagcgcaaggccgcgcgacaggcacaggctctggtggttgccgctcagtgcaaaagcggcaatgcttacctgagcgccaaaggctggccggaggcagaaaccctgaccctgcacggccagtcgctgcgcgtcggcggtatcacctaccaccccggcgacctgctgttgccgctgcacaatgccggaggcgaagtggttaacgtgcagctgattaacgccgccggtgacaagcgcatgctggcaggcgggcaggtgaaagccgcctgccacaccctgagcggcccggacaacgcagttatctggctcaccgaaggctacgccaccggccttaccgtgcaccgcctgaccggtgagacggtgtgtgtggcgctcagcgccaacaacctggcggcggtggcggagcagctgcgcagccactacccggatgcgaggctgctgctggcggccgataatgaccgcagcggcaccgggcagacccgcgccgccgaggcggccacactcaccggcggcactccggcactgccgcccacggaaggcgactggaacgacgtctactgtcagcagggcgctgagtccacgcgcgcccagctccaggcgctcagccagccgccgcagcccagcccgttcgacacgctgagcgatgctgacttaaaagccatgagtgccagcgagaaggccgaactgctggccgagcactacggcaacaccctggcggtgccgtcggtgggggaagagctgtgccgctatacgcgcggcgcctggcaggtgctgccacaccggcaactgagccgagagattgccgcattgttccagaaggtacgcgcgccgttctccgccgccagtatcaacagcattctggacaccctcaagctgatggtgccgcagatgggcgacccggcccgccggttgattggctttcgtaacggggtatttgataccgtcagcggccagttcagcgcccaccgccaggagcactggctgcgcaccgtcaacagcgtggactacacgccgccgcgtgccggggagaacctggccgaccatgcgccgcacttctggcagtggctgacgcgggccgccgggggcaatcacgacaaacaggagcgcatcctcgcggcgctctttatggtgctggccaaccgctacgactggcagttgttccttgaagtgaccggcccgggtggcagcggcaagagcgtcatggccgccatcgcccggctgttggccggggccgacaacaccacctccgccaccatcgacaacctggagtcggcgcgcgaacgggcttcggtggtcggttactcgctgataattctgcccgaccaggagaagtggagcggtgacggggcgggcatcaaggccatcaccggtggcgatgcggtcgccatcgacccgaaataccgcgacgcctacgcggcgcacattccggcggtaattttggcagtcaacaacaacccgatgcagttcagcgaccgcagcggcggtatctcgcgccgccgcgttattttgccgttcccggaagctatcgcacccgaagagcgcgacccgttgctattggcgaagatcaccgaagagctggccgtaattgtgcgtcacctgatgcaacgctttgccaacccgaatgacgcctgcgtactgctccaggcgcagcagagttcggcggaagccctggaaatcaaacggcatgccgatccgctggttgatttttgcggttacctgacggtgctgggtaccccggaagggatgatgatcggcaatgccaacatcaccccaccgaacccgcgccgctacctgtaccacgcctacctgtcgtttatggccgcacgggggtatcagcacgtgatgaacctgacggcgttcggccaggcggtgccgcagacgctgaaagagtatgagcatacgctgctgaaacgtcgcaccaagcagggaatacaaaccaacctggtattgagtgaagagtgtgaagcggactggctgccgaagtgtggcgccgtgggacaatga

SEQ ID NO: 430247 - DNA, 279 bp, Serratia marcescens
gtggcgcaggcctatctggacacctgcgccttttaccgggtgaacctgggttacacgctggacgagctgcagatgacgattgccctgcgtctggaagggcattttgtgcgtcagtacggcgcagaggatggcatggacatggcgtgcaccatgttgagtgatatggtgcagccggacgttctggtggccgcgccgcgcctgaccgcgctggggcaaaagatgatggacgagctgtgttgcgagcgcctgtcggcggcacagcacgctaccgtacactga

SEQ ID NO: 430248 - DNA, 1137 bp, Serratia marcescens
atgttcatgagccagcagcccgctcaaccgcacatgcgcctcccttgccgccgcctccgcgccgcgccgatcgatgtccaggcgcagcggcagcgtgttgataaacagccccaatgcccgttccgcgccttcagcgccctgcaggcgccccagcaatacggtgccgaatacgaccgcgtctcgcccgctgacgcgcgccagcacctgcgcccaggccagatggcacaaactggccaggctgacgcccaaccgccgcgcctgccgccgcagccgcaggttcaaggccgaagaaagcgcctggtagcggctgacgatctgccgtccctcgccatgcacatcactcaagccgaacggcaggaccggctcgctgatatccgccaacatgtcgcggaagaaacgttcatgctctgcttcgctgagcgtcaggcgcgcctgcgccaccgcattgcggaacggctgggcggcgccaagccgtgcgccgcgaccggcgaggatttcgctgacctcttgctccataaaggccagcgtggagtgatcgccaatcagatggtgccactgctgcaaggcgcaccaccggccatcctcctcttgcgcgacggtaaagttgagcagcggcgcacgggtcagatcctgtcgctgatgcagcggatcaaaaccggccgccaactgttgccaaaccgggccgtcggccagatcgaaacgccgctcgctcagtgccagttcggccttgcgccacaccacctgcaccggcgaagacacgccctgcgtgatgaacgcggtgcgcagaatgtcatggcgatcgatcacctgctgcatcgccgccagccaggcatccaggcgcgcgcggctgtcgaaacgcaacaccgcggacagctggtacggatcgccctgctccgccagcagatggtggaacaaaatcccctcctgcagcggcgacaaagcgtagatgtcctgtacgttagccacgccgcccggcacctgcgccaccaccgcgtcgatctccggctggttcagcgtcgccagcggcaacatctccggcgtaatggcggcgcaacccggcaagatgcggttttccggtatgtcgatttccccttgcgcgctcaccgcctgcgccagcgccgccagcgtcggcgttga

SEQ ID NO: 430249 - DNA, 219 bp, Serratia marcescens
atgctgacgccccagctgttgttgatcacccgcacgccgctcttgatcatcgcctgccagccggcattggtgacggcgccgtccaggccgaggaattcgccgtacgccgggccgtcgttgtcattatcgacgctgatcacctgcgaatcgaaggccacgccgtgcatgccgacgccgtcgcgattcgccgcgctgatccccgcgacgtgcaccccgtga

SEQ ID NO: 430250 - DNA, 147 bp, Serratia marcescens
atgcccggcgcgcccatgtcggtggcggtggttttcagcacgtcggcaatctgcgccgagttcatgtacgggaaacgctgcagcaacaccgccactgcgccggtgacgtgcggggtcgccatcgaggtgccgtttttattgccgtag

SEQ ID NO: 430251 - DNA, 423 bp, Serratia marcescens
atgccgaccaccagcggcggtctggcgcagatccagcagaagctgatgcagacgttggataagattaattcgatgccgatcaatccgatgatcagcgaagcgaccaagacgctggcggaaagccagaaaaccatgaagtcgacgcagcagaccatgaagtcgttgaacgacatcatcgccagcaaagagatgcaggcgctgccgcaggacatgcagaaaacgctgctggagctgaaccgcagcatgaaagggttccagcctggttcaccggcttacaacaagatggtgggcgacatgcagcgcctcgatcaggtattgcgtgagctgcaaccggtgctgcgcaccctaaatgagaagagcaacgcgctggtgtttgaagccgccggcagcactgaccctcagccgaagaaggccacgaaatga

SEQ ID NO: 430252 - DNA, 234 bp, Serratia marcescens
atgagcagcgatcaggatgtgctgaacgtcaccatcagcggcttccacggccgttttgacggcaaggcgatcgttcgcggcgagtgggtgctgaaccgccaggggcgtttgatcaaacagcctttcagcctggaattgaaacagggtgaggacggctatgatgccctggtgcgcacgctggcgcaaggctggcagcaggaagcccaggctatcgccaaggtgttgtccccctaa

SEQ ID NO: 430253 - DNA, 246 bp, Serratia marcescens
atgatgcagctaacctttggtcgccagcatttcacccttgatgagcgcgacgcgctgtttgtggcggaagctatcctgttgcagcgtaaagagccaggcgtcgtcttaccggagcaccgtagcgaaaagcacggcgttattcgtctggcgagtcgccaggcgcaaccgcgcctgttccgagccgggccggtgccgctgatctgcgcggcggccgatacccgcaacgaccagcttaccgactgttga

SEQ ID NO: 430254 - DNA, 1194 bp, Serratia marcescens
gtgctcaccgatgccaaactccgcaagcttaatggaaaacccatcccaaaactgatcgagatgcctgacggcggcggcctgtctatccgtataaccccacttgggctgattgtcttccagtatcgataccggtacgcaggtaaggcacgccgcatgacgcttggaagttacgacgaaatttcgctcaaagaagcgcgcgatatggttcaagaggccaagcgcgtattggccgaagggaaagaccccatcacagtgaaatccatgacgctggaggatatcgctggcgcagcctctgtgaaagactgtctatcacattggactgccagcgctcaggctcagcgccttgtgaaattgcagtattgggagagggcatttgagcggcatgtaatcccatatgtcggcgatatgattgtggatgaaatgcagatatctcactggcagccagttttcaaaaggatgagaacgaatggggcggaaacctttgctggtatcatgctttcaaagctaaagcaggtgttttcgtattgcttgagaacggagaagattcgcgttaatccgatcgccgcattgcgaattagcgatgttggaaaacctgtcggcgtggttaaacggtatttcagcgatgatgagataggagctttttggttggctcttgaaggttctcggattgttcaccagaacaagatcttcattaaattgttgctgcttacagggtgtcggggagttgagctaaggaaggcaaagaagggtgagtttgatgtcaaaaacagaacgtggcgcgttcctgcggaaaattcaaaaacgcgccagccgtttgtgagaggactatcaggggacgccgcaaagctgattgaggaggctatgtcgctatacccgaacatatcgcaattgttcccgccggcgattgtgcagggcgatcgccctatgtcagcaggtgttctattgaacatggcggaacagcttaggaatgagatgggagttcatgactgggcaatgcatgatctacgccgcactgcaaaaactaaaatgagcgaattagggattgagccccacgtatccgaaaaggtactggggcataaactcggtggagttctggcggtatatgaccagcattcatatctcaaagagcagcaaaatgcgctggatatttgggccgctcatgtggcgtcctgcgtttcatcaatgaggccttga

SEQ ID NO: 430255 - DNA, 648 bp, Serratia marcescens
atgacctatcaactcatctatgcagatccgccgtggagttacggcaacacaatcagcaatggcgccgccggcaatcactacagcacgatgagcatggcagacctgaagcgcctgccggtatgggctgttgctgcgcaagatagcgtgctcgctatgtggtacaccggcaaccacagccaagaggcgatcgagctggcagaggcctggggattcagcgtaagaacgatgaaggcttttacatgggtgaagctcaaccagcaggccgaacttcgcttcaacaaggcgctgctgcaacaaaccatcttcgacttcaccgacctgctcgacatgctcaacgccgaaacccgaatgaatggcggcaactacacccgcgccaactccgaagacgtgctgatcgccgttctcggccaaggcatcgagcgcgccagtgcatcgataaagcaggttgtgttcagctgcctcggcgagcacagcgcgaaaccctgggaagtacgccggcgccttgagctgctatacggcgacgtgtcacgaatcgaactattcagccgtggcgatgcgcctggctgggatcattgggggaatcaatgcccagtaaacagcctgcaattgctgccggcagcgttcagcaaaacgcactcagatcagtag

SEQ ID NO: 430256 - DNA, 372 bp, Serratia marcescens
atgaacaattatgagatgctgcaattcctcatcgaagacgggggctggtacacagcagcaggccatttcgatttgctgaaatccaagttcccagaaattaccgagaatcacataaagtcattgcgtagcgcgatccaacgctcccctttggtcgtttcaaaaagcaaatttgccgaagggaaaaaagccttcaaggttgtctctatcgacccaagctacatcacatacgccagggcaagaccgccgactacgccaggtaaaattacagacagctatatccgcagtgaaccgccggaagtagtgagaatgattctgcttgtccagcaattcaaccagctgatcacccctgtaacccaccagcgcgcctactga

SEQ ID NO: 430257 - DNA, 219 bp, Serratia marcescens
atgatcacgatacccgacgataacgaaatcatctcacggctcagcattgccggttccacgccggattctgtcgcaaatctcctccgctgtgccggctataacggcatgaccgggaaagccatccgccagcgcctgatgaaactggaaaaagaaaaagccgtcgagaaagtccgccgccctggcatccgctccgcttgctgggcgccaattaccaaataa

SEQ ID NO: 430258 - DNA, 762 bp, Serratia marcescens
atgacactaacgattgagcaattgaaaactagaattgaggcgctgagaaactcagcaagcggcattgtgtccacgtcttctgcggatgccgatgcgctggaagagctgttgcgctatcgggaagcgctgccggtgccagcgggtaagtttgcgggctggggtctctatcataccaaatctggggaattcggaaattggttaaagtccactccagagtcggataacagccatgcaataagtcagggctatgcgaacgttaagctctacaccgccccgccagccaacgcaaatgcaaatgcagtggcatgggaaatgcgctactggaacagcggccacaacatgtggggagaatgggagcgcatcacagcagaacagcacgcagagatgagcgtgaaacacgcggcggacaacgattacgagtttcgtgtgctgtacgatgcacccccagcgccagcagtgccggagaaatgtccagagcatgtgcgctcacttatgaacatacatgcggacgatcttttcgatgatgccgatgctcaggagatctggaacgcctgccgcgccgcaatgctggctcaacctgtaagtagcggttacaagttggtaccggcagaggcaaccgaagacatgatcgccgccgcaatgaactgtgacgacgtgtcattcaatgccgacgaaactttctgcgttaacttcggcaacatctacgccgcaatgctggcagcagcgccggagggtgggaatgatcacgatacccgacgataa

SEQ ID NO: 430259 - DNA, 261 bp, Serratia marcescens
atggcaaagctgaccaaagcagaaaagaaatggctggacgagctgcaagaggttctgaaccgctgcccatccgagcgccttgggttctataccatcggcgatcctcaggttgtcgtatatgaccgatcaaaggaggatgaaatagaccacctcttggacattcaggcttcctgggactggtgcggatgtgttcttaaaacaggtgccaattttgacgagtggctggatttcccggccgccgttcactctacagcaggttaa

SEQ ID NO: 430260 - DNA, 396 bp, Serratia marcescens
atggataaattcagcgaactgaaagtggccgccgcgaaatactccgcagcgctcaaggcacacagagaaaacccgacagacaaaggcgcgatgtatgcatgggatgaggctagttcggagtttgacagcgccataaaccacaacgagatggaaatcatcctcgccctgctggcagagctggaagccacaagaaagcaaagccaggagttagcgaagcaatgcggaagattaggcgccagagctgcaatagctgaacgcaagctggctacgccagtgcggttgaaaaaggtcgattccagcaatgttccctttgccggtgacggctttaatgccgccgttgattattgcgccgaccgcgttcgcgccgctggcttcaccgtacagggggatgagtag

SEQ ID NO: 430261 - DNA, 369 bp, Serratia marcescens
atggacaataagcttagcgaactgagcaagccggtggcgactgttgacgttcaacgcggccgccctgatggcaatatgtttggcgttgcatggagttcggcaggccatgcgatgccggatggcccgcacttactctactcgcaagagtacgtctccgccctgaaacacgaatccgctgttaactgggaagcggcggcatcgctgaacgttgaaaaccaggagctgaaaaagcgcatcgccgaactcgaacaggctatgcgtcacatccacggcgcgttgttggatatcaccgtaccgagagtcgcgatagtcaaagccgcagaattggcggttgaacacgcagccatgaaggagcagagcaatggataa

SEQ ID NO: 430262 - DNA, 183 bp, Serratia marcescens
atgccagcaaatgaactgaagccaggaagcctgcgctatttcgatgaagaaaccggcgcgcatgttgtttcagagcctggctctacttcgtacagctcaacagcgatggcggcaactgagttttttaacggcatcgagtggttgccggtagacggcgacgaggcccaggagaaagcattatga

SEQ ID NO: 430263 - DNA, 645 bp, Serratia marcescens
atgaaagagcgcccagtgattttcaacggcgagatggttcgcgccattatcgaaggccgaaagacccagacgcggcgggttatgaaacctcaacctgagccatgcgatcgcggcggtcattggtggccaagcaacacgtttaaaacgatgttgcacatcgaagagcagatgcagaacgacgcgggcggctggggcgggctggcaggagatgcctgcccgtttggcgctgtaggcgatcggctgtgggtgcgcgagacgttcatggacttaaccggcaccggcattgaagccactaccggaaagtttgagggattagcatatcgcgctgacaccccggcgggaagttatggcgatgaagtccgaaaagactatgggctgaaatggacgccttcgcttcacatgccgcgcaaagcctgtcgcatcctgctggaaatcaccgccgtgcgtgttgagcgcctgaacgatatcagcgaagaggacgccaaagccgaaggcgtgaaagccggtgtttgccctggtcacgaacacatgatgcatcaggtggcattcagggagttatggcaatccatctacggcgaagagagctggcgcgccaacccctgggtttgggttatcgagtttcgtcgcttggaggtggaaaagtga

SEQ ID NO: 430264 - DNA, 639 bp, Serratia marcescens
atgacaaccatcaagcgctttacccctgactacaaaatgcacgcagttcggtttgaggctttcgcgcgtgaagctgagcacggtgaatatgttcggtttgatgcccaccagcagaaggtgagcgcgcttgaggctgagcgcgatgcgctggcagatcgagttaatgagctggctgtagagaacaaggggctgaagagtggatgcggatttttcgcatacgaccctgacaatggctttgaggagttcaaaatcaaagatgaagccattgcagcggctgaatcctacattgattactaccgcggtgaggcttgcgatggctggcctgacgaggttgctcaggtgtcatggggaatcatcattcaggaatcaaccagggttaacgagcggccgcgtaccgaggatgatggttgcgacccgggcattgagacggtttgtgactacgcgctactaccgaacatcgataccccagccactgacgcagcacttgcagcaatccatgcgcagggagtggagaagtttgcagatgaccttcacaaaaccgccatggctatgtgctcagtcaagccggacaacaccaccccaggcgcttacgcgggaatggctcgctcattcgctaagaagctgcgggaggccaaatga

SEQ ID NO: 430265 - DNA, 786 bp, Serratia marcescens
atggctaaaaactcaacggaggcctacggcgccagcggaaaaaccaacgtactcaattttgagcccgaacgactgcaccttgtaaccgacacagcacacccgctctacgatgagcgcattcacttgccgctggatgagtcgatgatcttgaacatcatggatcagggcgtgctggagccaatcatcgtttggaaagaccctgaaaccggcctgtcctgcgtcgttgatggccgtcagcgagttagacataccgtagaggcaaataagcgactggctgccgctggcaaggatctgctgttcgttcctgcagtaactaaacgaggttcagctgtacgcatggcgcaggcaatgatcagcgccaacgagattcggcgtgccgatacaccgctggggcgcgccaagaagatggctgatgcattggaacgcggccacgatgaggaagatttgtcactgatgtttggcgtcggcgtgcagacgatccgcgccacactcgcactactcgatgccacccaggccgttaaagatgcggttgaagcaggcgccgttaccgttacccaggcgcgccaactggcgaacctatcacccgatgagcagcgcgaaaaagtgaaggaggtggaagctgctaccgccggcacaaaaggccacgaaaaagcacggcgccaacgccaggtgatcggcgatgccaaaccccgcctgaagtcacgaaaagaaatcacgaaagccctggaaggtgcgagcggtgattacgctcaggcactccgctgggtgctgggagacgaagcatga

SEQ ID NO: 430266 - DNA, 213 bp, Serratia marcescens
atgcaaaccaataaccagcgctgcgaacactgcggccagacccgcgacgtagcaaaacaagctgtgagcattcagcgctatgaagacggcagatataaggccgtgagaatccttgtctgcgctgatacttgcgcgccggtgtatgtcgtccgccagaacatcagaacactgcagcgccgcctgcacactcagcagcggaggccaacatggtaa

SEQ ID NO: 430267 - DNA, 162 bp, Serratia marcescens
atgaaagcaatcaatgagcacgttggctggggtactgatggtcacggcctgaaggttctgttctgcaacaaatgccgagaagttttctaccgcacaccggatgcaggcaaagcaatccaggctcagcgcgtattcagcaaaaagcaccagtgcgccaactaa

SEQ ID NO: 430268 - DNA, 663 bp, Serratia marcescens
atgcgtattaccacttgcaatagcaatgcgaatttgacgcttaatacgcgtggctataaatttgctggcatgaaaacgacacttgcagaacgccttaacatggcgatggccaaacgcaacaacatgactcaagcagctcttgctgaggcatcaggcgttgctcagccgaccatctggcgattaactaaaggaaaggcaaaaacttcgggacggctcgtcgatattgctaatgcccttggtgtgaatgttgactggctggctaatggcgttggtgaaatggagggtgaatcacctcctatgacaactcgcattgaaaaatacagccagatccctgtatgggatgaaagcggggctactgatgactttgtgatttcgccgaaaggaaaagccgaaccatcatggaaggccttcattctcaaaagaaatagcggatgcgctgaggcgccagccggttccattgttattgctgactcggcctctacgccaggatccggggatttagtagtagcaaaagtgaataactcggtttctgcttatcgctttgttgatggcgggtcacatggatacttatccgttgacgatgccagggttccattgattgaactggcaccggattcattgatcggtgttgtagttctactgcttcgcgacttcagaatgtaa

SEQ ID NO: 430269 - DNA, 291 bp, Serratia marcescens
atgcaaaccgcaacaacacgcaacgaagctcaggcgattcagagcgagatcatgagccgcattgcagctatcggggtgacaagcctggccggcgcgatcggcgttgataaatcgcaggtgagccgctggcagagcaaaggggggttggtggagaaagcgagcttgcttctcgccgctaccggcttcaagcgttcggaaaccatgctgacgttcaggggcgaggaaaccgcagaactggcgcgcgggttaatggcgatgctggagcacatccgggaaccaaagacggaatag

SEQ ID NO: 430270 - DNA, 681 bp, Serratia marcescens
atggcaaacgtagcgatcggtggcaacagcccgaaaatgacgagccgtgaaattgccgagctgactggcaagcaacacggccacatcatgcgcgacatagaaatcatgctggaacagctgggcgaaggcctggatgggtatatccagatttggagacacccccagaacggtcagcaataccgggaatacgcgctcgacagagaacataccgaatgtttggtgacaggatacagcgccagcctgcgcatgagggtgatcaagcgcctgcacgaactggaagagcaaaactccccagtaccgcagacgctgcctgaagcgctgcgcctggctgctgatatggcggaacagaaggcaatgctagagcagaaggtgcaggccgacgcaccgaaggtggcctttgtcgatcactacgtagacgcgtcaggttcaaaaagcctgcgcgccactgccaaagttttgaacatgccggagaaagcgatgattgacgcgctgatccgcgacaaggttctgttccggcagtccgggaatctgcttccccacgctctacgccagcgcgacgggctattcaccgtcaaaactggcacgtctgattttggccacgcattcactcaaaccagggtaacaccacgcggcattcagtggatcgcggaacgttacgcctcagagctgatggcgagttaa

SEQ ID NO: 430271 - DNA, 177 bp, Serratia marcescens
atgagccaatacgttcccgttgataggacatatctcgatgagcacggcaaccccgtgaaggtcatcttctgggatcgtgttgagcgtcaggtgatttttatgagagagggctacccgcatgaatgcatgcaacctcttgaaagatttaaagagaaatttaagcgagtggacatatga

SEQ ID NO: 430272 - DNA, 1083 bp, Serratia marcescens
atgagcgccttaatgcagcttcttgatcggcccatagcttaccagccgtctttcgtcggcctgggggttggggtgaccggcgctgttctgctgtcgcagttggtttactggcataaccgaatggatgccggctggttctacaaaacccagaaagagatccgcgatgaaacaggccttacgcgtgaggaacaggaaacggcacgccgccgccttatctccgctggggtgcttgaagaggatcgccgtggtgtaccagcaaagctctattttcgggttaaagccgatgctcttgagttgcttcttctgaagaaaatcaaagagaaaacccagaatgcgggaaaccctcattccagtatgcgggaatcccgcattcaagagtgcggtaatgccgcagacaagaatgcggaaaaccctcagacaagtttgcgggaaagcagcgtgccagattgcgggaatcccgcagacattcatacaggagattacacagagattacttcagagactacagcagagaaaaaacctgtacgtccgccggctgcgccgactgaccagccgcaagaagaatctctgaaaatcgattacgacgaagtgctacggatattccgcaccacgctgccagaactgccggacgtcttgaagatgaccgacgggcgccgcaaggctctgcgcaagctctggaaggattacgagatggacatggagcgttggggcgcttacctgcggtacatctcgaagaaatgccgctggatgttggaagaccgcccagacacgaacagcggaaagacctggcggaaaaaggactttgactacctgatcaccgagaaatgctacctgaaggtcaaggaagagcgggctgatgatctcccgaaagtccagcgacaggacagcgtcgcccgcgaagaggcctatgtccgcctggtatcccagcgccagcagccacggaacgaggtggagaagcttgcgaaggagatggccggatcccttggtcgcatgaccgattacgacgcccgccgagcctggtctgggatttgggctcaggcagtagccaaggccagcgagaacgatttagcgaggattgcctga

SEQ ID NO: 430273 - DNA, 975 bp, Serratia marcescens
atgagagcgatagtcaaagcagctgtacagcgtgatctgggtattgccctgatcccggttgacgaaaagctggcgtttcacatgacaggccgcgtgatggtttccacgctgccgaaagagttcaaagacgcgccagaaggtatcctgccggccgttgagcatgagatcgccaacgacccacggctacaggtttttttcacagatgagcgcgtcatcaacgcttgcggcggcgttaatgcgattgaagcctgggcgactcagttcacgaaatgtcagtacagcaagcacgaactgccggagacaattctggacaccgagcgtgttggtaattcggccgttcgcatctgtcctgggtgctacaaaaaaagcctgggcgtatcgccgaagctggaaaaaatcgccgcccgcaacacggcgcgctgggttgtggcaacggcaaaacaccgcctgaagtctgagggacagctgacaatcccagagttgatgctgtgggccatgctgtcaggcgtattcgacctgatccccgatgacgtcacgcgcaccgttaccgatttaccggagccgaaggtgatcaccggcgcccgcaaggagtccgaaatggactgcacgccggcggccactgcgattatttccaagcaggcggtcaagtgcttcaccgtggatcctgaaccgcccaaggccttcatgctgcggccgaagcttacccgtgtagaggacaacaaatacactcgctgggtgaaatcgcagaagtgccttggctgcggcgcccgcgctgatgaccctcatcacatcattggccacggtttgggcggaatgggaaccaagcccagcgactacctgacaatcccgttgtgccgcacctgtcaccgcaatttgcatgacgacccagcggcctgggaagccgagcacgggagccaaacagatttgttcgcgcagttcttcgactactcggtatgcatgggggctatctcatga

SEQ ID NO: 430274 - DNA, 399 bp, Serratia marcescens
atgagagacatccagctagttttagagagatggggccagtgggcgaaagacaacagcggcgtggactactctccgatcgcagcaggatttaaggggttactgccgaatacgagcaagagtaagccttcatgttgcgataatgacggtctgattgttgacggcgccgtgggtagattgaagaaggtacgcgacgaaagagagcttggggtaatcatgctgcactaccgatacggggtgtcaaagtcggagatagcccgtagatggaaggtttcagaagggaacataaggcaaaagctgatgatggcggaaagctttatagaaggctgtttagctatgaccggggcgacgcttgagatggacgcctggacgagcagatcagaaatttcggctgtcgcgtaa

SEQ ID NO: 430275 - DNA, 573 bp, Serratia marcescens
atgatcacaatgctgttctacacgctttgtgttttagcgatattgcacttcatttacgagaggatcgttttgccgtcagttaggcttcactaccgtaatgagcttttcaagatccgcgatactgttagaaatgaaatgatttctggtgttgatggaaaggatattgagatagcgaagttggttcatgatgggttgaataacacaatcaacagacttcactacctaacgctaggcaacaaggttcgagctcagatgaggttcgaaaataacgaaaacatgagaaatcatgttaaacgacaagttgacatgatgctgtcgtccaaaaatgagattttgaaaaaggctctggatgatactgtcagcgtgatggataagatgttaatttttaacaacatgtttttcttcgtgtatacattgccgttagtgccgttagtcttggctgtgagcatggtcatttcagcagtcaagaaagcagtaaaaacctataaatctagaatgaaatcaaaggagtttgaagaaacgattctcttgatgaatgatggatttgtaagaatggcggtagttccggcttaa

SEQ ID NO: 430276 - DNA, 660 bp, Serratia marcescens
atgtatccaggttggcccgttaacgatccagttgatatcaatgaccctttagtcctgaagtttgccaatcaaatccgcaaacactcatcccccatagaagtcagtaaaataacagaacctttaccaataggtaattgctattggaatgttgaagaggctgttaagagactcggtggaaagatggttacaggatggctaataaataagtggactaattctcatctagttgggatgcaccatgctatttatgttgactctaatgggagaatgttagatatatcccagtctcctccgtgcgaaataatcactgacacttcagtgtttgttatagataacagccatagaatcgacacagataaaatcccggccattggatctttattttacgtattcaatgaaaacacttttactactaactacatagaatcgtacaaaaacctaaaccaaaaagagaagaaccttagcaaggtaatgtatgcagctggcagtagatgtgaaagcaataaagcaattgccaatggcatccaaccgacaggaatacgactcactgttgaacaaaaaaaatcaatagatgaggcatttgaattaataaaagaagcccaaaaacgcttaggagcatcaatggaagagttgaaagaattcacaaaaatcgttaaatag

SEQ ID NO: 430277 - DNA, 255 bp, Serratia marcescens
atgtcatacaatctcggcaatctgccaaaagaagaaatggacaaggtgaacgtagaccttgcggcgtcaggcgtagcgtacaaagagcgcatgaacatgccgattgtgccggctcaggtggaggcggagcagcctgaacacctgcgagagcttttccgcgaacgactgcaacactaccgcagccaaagccacaaattcccggggccaaacgacccgcgataccagcagatggctgacgctaacgggaaaagatag

SEQ ID NO: 430278 - DNA, 249 bp, Serratia marcescens
atggcagaggcaacagaaattacgcaagcagaaagcatcaggctgaagctactagagattgtcggttacgacacagccgcggctaagcaggctatcgatttcgttaaagacaatccactgaaggcggatatgtttgaacgccagttccggcgatttgagctggaatcaacggatccgattgccaggacacttagggctattcaagagagcaccgaggcgctgatcctctttaatgaaccggcggcatag

SEQ ID NO: 430279 - DNA, 321 bp, Serratia marcescens
atggctaatacggaacagaatgaaggccatgagaggcgcccataccctccgctccgctttatcgaagaccatcagctaactccatacatcggcctggtgcctgcgaacgaggtgcaggagtggatgaagcgccaaatcatcgatgatgccggcagcctgtttaacccagaccacacccatcttgcagacgccgatctgcgctttatgtgggcatcatccgcgtttgagaaaaaagggcgccatgtgctcggccacgctgaagaagttgcgatgcgcgccggcggctggcagaaagcccggatggaacagcagatgcattag

SEQ ID NO: 430280 - DNA, 456 bp, Serratia marcescens
atggcagcattatcgacagaggttaaagccttcattgttcaatcactcgcctgtttcgaaagcccgacaaaagtcattgagcttgtaaaggctgaatatggcatcgatgtctcacggcagcaggtgtcacaatacacgcccggcaacgcaatggcgtccaagttgagccagaagtggatcgacctgttcaatgtcactcgtaaacgattccagaatgagatcgccgacatcccgatcgcaaacaaagcgtaccggttgcgcgttcttgaccgaatggcgaccaatgctgaaaagatgaagaactacggtatgacctcgcaacttatcgagcaggcagccaaagaaatgggtgacgcctataccaaccgccagaaagtagagcacacaagtcctgatggcagcatgactccgaagcctaccatcatccagttactgcccgttgagccgaaagcatga

SEQ ID NO: 430281 - DNA, 1029 bp, Serratia marcescens
atgcaggaagttaagcaggcgatcctgtcagtgccatggctggcagccaatttcgatattggtgaaaagtacatccgaaccatcgataagagcgtgaattatgtgttctgtggtctgcgacataacctcgatagcatcaaatcgaaggcgcggatcttgctttgctgggttgatgaggctgagtcagtcagcgaaatagcctggcagaagctgagccctaccgtgcgtgaggaaggctcagagatttgggtaacgtggaacccagagcgcgacggtagcgccactgataagcgttttcgcaaagaggctggcgatgactgcattaccgttgagatgaactacaccgataatccctggttccccgacgtgctggaaggtgagcggctgaacgatgagcgccgtcttgatccggcaacatacgcatgggtatgggaaggggcttacctcgaaaactcggataagcaggtactggccggcaaatatcggattgctgaattttccgacaatctctggaaagaggcggaacgcctgttcttcggtgccgacttcggtttcgctaaagacccgaatacgttggtgcggtcattcattctgcataaccgcctttacatcgaatatgaggcatatggtcagcataccgaacttgaccacatgcctgagctgtacgagaccatacccggcgtgcgtgactggcccattaaggccgactcagcacgaccagagactatcagctatctcaaacggcagggattcaatatttcagccgctgaaaagtggcagggaagcattgaggacgggatcgcccatctccgtggctttgacgaaatcattatccatccacgttgcaagaacgtggcgcgtgaggcaaggctttggtcttacaaaactgaccgcattaccggtgaagtcttaccaaaactcgcagatggcaatgagcactgctgggatgggatacgttacagtcttgatggacacattaagcgcaaaaatctgtcacttgggatgatgatacccaagcgtttaaggtag

SEQ ID NO: 430282 - DNA, 1329 bp, Serratia marcescens
atgaacaataatctccaactggccgtcaaccacgcgttgaacgacgccaggattgagcgtgctcgtatggcgatgcttgggccgtctatgggcctagataataaacgcggctccgcctggtgcgaatacggctttcctgagcagatcacttacgacaatctttattcactgtatcgccgtggtggtattgcgcatggcgccgtggaaaagctggtgggcaaatgctggcagaccactccggagatcatcgagggtgataaggccgacgagaagcgcgcggaaactgcctgggagaaaaaactcaaaccggtattcacgaaccggttatggcgcgcttttgcagaggctgaccgccggcggcttgtcgggcgttactctggcattttgttgcacatccgcgatagcaaaccatggaataccgaagcagccagagggcgaggcctcgagaaagtcacagtagcatgggctggttcactaaacgtgagcgagtgggataccgggcttaactcgcaaacatacggccagccgaagatgtggcaatacacggaacggctttcaaatggcgccacgcgccgtgtcgaaatccatccagaccggatcttcatccttggtgactacaccgacgacgctatcggattccttgagccagcatataacgcatttgtcagcctggagaaagtagagggcggttctggtgagtcattcctgaagaacgcagcgcggcagttggcgcttagcttcgacaaagagatcgacttcggtagcctggcgtctatgtatggcgttagcgttgacgagctgcaggataagttcaacgaagccgcacgcgagatgaaccgcggtaacgatgtgctgatgagcctgcaaggtgccgctgttacctcgcttgtttctccggtatcagaccctggcccaacctataacgtgaacctgcaaacggcttctgccggcgttgatatcccatcacgaatactggtagggaaccaacaggctgaacgctcaagcaccgaagacctgaagtacatgaatgggcgttgccagagtcgccgcggtgatctgtcgttcgaaattgaggacttctgcgacaagcttatcgacctgagaattatcgattctgtcggccagaaaacggttatctgggacgatctcaatcaacagactcgcgctgagcgtctggcggactccaaagccatggctgaggtgaacaaggccatggttgaaagcggcgactcggcgccgttcagcggtgaggaaattcgcactgctgcaggattcgaaacagaaggcggcgacccgcttggagagacaggggatgacgacgaaacataa

SEQ ID NO: 430283 - DNA, 927 bp, Serratia marcescens
atgacgacgaaacataagcctccaatcctgccgagtaacatcaaagatcccacaggagttgataagttagaacgtggcgcgatgcgtgagtttgcaaagcgcatgaagctgataacgaaaggctatatcgacatcctcaaccgcatcccctccgaacccgtcgtaaacgagcgctacaccttccgtcttgatcaggggcttctgtcgatgctgcttcagaacggcgaagcgctggtggatgaaattctgctggagggaggggagttcaatctgtggttctttggccgctatgtgtctgttgcttaccagcgaggaacggcgcaggagtattacaacctctcccagcaatcctctgcttacgctgccggccagcaggatgttcccaacatcttgttgagtgagccctatcagctgcggctgattctggtcagagcgcgtgaattcgaagagatgaaagggctcagcgctcaggttaagagcgatatggcgcgaattctgactgatggcattgccagagggctaaacccgcgggacgtagccaaaaacctcaacgagcaaaccggccttgaaacccggcgcgcgaatcgcatagccaggacggaaatcactaccgcactgaggcgcgcacgatgggatgaagctcaggatgcgcaagaccgctacggcatcaaaacaaagctgcttcacatctccgcattaagccctaccacccgagcaacacacgctgcccggcatgctcatctgtacacgcaggatgaagttagggagtggtacacgaagaacggaaacgccatcaactgcaaatgctcgcagctttccgtgctggtggatgacaaaggaaaccctctcactccttcggtcatcgacaaggccaagcagacgttcaacgacatgaaggagagaggctacaaatgggcagagggttaa

SEQ ID NO: 430284 - DNA, 1263 bp, Serratia marcescens
atgaaagttcaagttaacgtcaccacgaaggtcaacacccaggcaattcgccgggagtcatacaacggccgcgagcatcttgttttgccgagctacacactgccggcaaacgtggtcatgaatgatgggctgtatacggccagcgaaatcgatgctcactatcaagggctggaaggcacgctggcgccgctggggcatcctcagctaaatggcgcattcatctctgccttttctcctgaaggtatcaaccagggccatatcggcgcctggaatcgcaatgtgaagaaatcgggcaaccggatctacctggagaagtgggttgatacccagattgctaaccagagcgagggaggtagggagcttatctcccgcgtagaggccattgagcgcggcgaagatgttccacctattcacaccagcgttgcggtgtttctcgaccagcttgagcccaatgagcaacagaaggccacaggtgccaagtgggtggcgaagattcacggcatggatcatgacgcaatcttgctgcatgaagtgggcgcagcgacgcctgagcagggtgttgggctgatggttaacgctgaccttgctacgccgttaaaggccaactctggcgcgctgattggcgaatcctaccgggatcgtgagcaacgcctagaccgcgctgcaaaagataaatttgctcccggcgaaaatgaatatgcctgggtggctgacttcaccgactcacaggtggtgatcatccgcaacggcggcgcagcccaggtttatggctacacatcggagggcggaaaaatcacctttgatgaaaccggcacgccggttgcgcgtcaggaatcctgggtgacggtcgtcgccaacaaagttaaatcccttttccatccgcaggaacaacctgcaaccaaccaccaaacggagggcgacatgcctttaaccactgaagagaaacaagagctgatcaccgaaatcggcaaaggcctggccgccaacttcgccgaggcgctcaagcctatcaccgataaagttgatgcgctgcaggccaatcataaccaactggccgaaacccttactgctaactcccgcgcagaagagaaaaccaagcgtgaagcagtggcgaaagttcacggcgaaatcgtggcaaacgcgctgcaaggcgaagcgctggaggcgatgtttaaaacgctgggtgagtcggcgccgctggcaggtaactcaggccagcatcagcaagaatcaggcgcacccgccgcagatgcatacttctaa

SEQ ID NO: 430285 - DNA, 447 bp, Serratia marcescens
atgccacgttatcgccgcgtaaacatcgacggaaagtcgctgtataaaaccgaaaccaaaaccactgccgcggcacttttgccaggcactgctgctgtcatcaacgccaacgatgaattcgctcaggctaccgcgttaaagggccggatctacatcatcgacgttgcctaccatcaagggctgaaaatcaccgaggcggttcctgctggcgactctgctgtaggcaactacgtggaagaaggccgtgaactggcgctgctctgcgtacctggcgcgtacaagaaagatagcccgatcaagcttggcgctaacggccaattcaccctggcaactgctgacactgattcagtgatcggttacagccaggatgaagccaccatcgccgccggcgctaccgatttcatccgcgtgcgtatgcgcgttggcactgtcgccgctggcgcttaa

SEQ ID NO: 430286 - DNA, 1077 bp, Serratia marcescens
atgtatttctccaaagagacattggctgcaaacagccgcctcggcggtcactggaatgagctgtgggcgaaccgcaatatgtggaacgccaaccataaagccatgatcgctgccaaccgcgcccacatgacacaggagtgggtagcagtaaacgctgctggtggctttaatcgtgatttctgggctgaaattgatcgccaggtacttcaactgcgcgatcaggaagttggcatggaaatcatcaacgatctgatcggcgtgcaaacggttctgtccgtcggcaaaactgccaagctgtatagcgtggtcggtgatattgctgatgacgtgtcggtaagcattgacggccaggcaccgttctcctttgaccacacagaatacgccagcgatggcgacccaattccggtattcactgccggctatggtgtgaactggcgccatgctgctgggatgaacaccgtgggtatcgatctggtattggattcgcagatggctaagatgcgtaagttcaacaagaagcgcgtcaactattacctcaacggtgatcctaacatccaggttcagtcctatcctgcgcagggcattaaaaaccaccgcaataccaaaaagctcaacctgggggctggtgccggcggcgcaaacatcgatctgactgcagcaacgatgactcagttgttcgagttcttcggcaaaggtgcattcggtgagctggcgcgcgccaacaaagtcgctcagtacgacgtgatgtgggtatccccagaaatctgggcaaacctggcgcagccatatgtggtaaacggcgttgtgagtggcactgtattgcaggcggtactgccatttgcaccggttaaagaaatccgcatgacctttgcgctgaagggtaatgagttcgtcgcttacgtccgtcgccgtgatgtgatctctccgctggtcggcatggctgtgggtgttgtcccgctgccgcggcctctgccaaacgttaactacaacttccagatcatgtctgccgaaggtctgcaaatcactgcggacgatcaggggctttctggtgttgtctacggcgccaatctggcgtaa

SEQ ID NO: 430287 - DNA, 294 bp, Serratia marcescens
atggctaaatacgaagttattcgcccctggaatggcgtagagatcggggatgtgttggaactggaaaatcttcacccagcgctgaaatctaacgtgcggttgatgcgtggcgcggccggcggtgaactgtccccggccaccccggatgccggcaacgaaacaaagtcgcgcaaggatgctatcaaggcgcggctcactgatctggggattgagttcaaaggcaacctcggcgaagaaaagctcgctgaactgttgccggaaggcgagctcgaaaatctgttccctgctgaataa

SEQ ID NO: 430288 - DNA, 399 bp, Serratia marcescens
atggtgaataaagaaaaggccaaggaatatctggagtcacagggtatcaccttgcctgatttcgtcctggatgcgctggtggagcaggtgaacagcattcaggaatgtctggatgctaattacccagcatcaacagcgttactcatccaactctatcttctcgggctcatgggattaggccagggtgataaatacatcagctctcaaacggcgccaagcggagcatcgcgttcgttccgctatcagtcatttagcgatcgctggaagggggcgctgaacctgctgcgcgggctggacaaaaaagggtgcgctacaggcctgattccacctgacccaacaaacaaggcttttgccggtgtctggatcggcaagggcggctgcatgtgcggtggtggttga

SEQ ID NO: 430289 - DNA, 348 bp, Serratia marcescens
atgtcatcattagccatttggtcatatacggctgaggccacgatatggcgcaatctaggcaatagtgaagcgggcgatcctcttggttgggctccgcctgaaattatcatgtgcgattaccagggcggactctcggcgaagccgaacaatatcggttcggaaatcactgtaaaaaacactgtgtggactgaattcaccgaagccaagaaaggtgactatctacttatcggagtgtctaccatgatagacccgatcgccgcgggcgccgatgaggtggtacaggtgatccgctatgccgatacgtttgaacgcctggcggaggatatagccattcttacgggagcgtag

SEQ ID NO: 430290 - DNA, 399 bp, Serratia marcescens
atgggcgtaaagataaagggtatcaaagaggcccagcggcgccttgatgccgtggttgaggatgtcaggacgagaaaggcagtcagggctatcaaatcggctgtgatgataatcgctaatgaagcagcgctgatgaccccggtaaacatcggtaacctgataaattcgcagtaccaggagacaatgatcaacggtactcggattactggccgtatcggttactcagcgaattatgcggtctatgtccataacgccagtggcatcatgaaggggttgccgcggccaaacaaccgtggcaattactgggatcctgctggtgaacctaaattcctcaccaaggctgcagagaaaacccgccggcaggtggacgagataatcaggaaggagatgatgctgtga

SEQ ID NO: 430291 - DNA, 750 bp, Serratia marcescens
atgcaaggttgtgcaaatgataccggcaagctgatcggtaaagtcgcggtgctgcgtatggctttcggctgtgctgacacgctgccggcactgagtgactggaagcgcctcggcgcgctgaccaccaagggcttcgacttctcgccaaactccgtgacgtctgaagcggacgacgcgaaagggctggtggagaacctggtaaccagcatggatttcaccatttccggtgaaggtgaattccgccgtaaagacaaaaccactgagatcggcgctctcaacatctccaagtacattttcgatgaagtgcaggctggccggcagccgtcgatttgggttcgattcgatttcgttggcgaagattccggcacctacatcatgggctacttcaacaccacatcgtggtctggtgattttggcacgagcgacatctccactttctccggcgagtggaaagttgctgatgccgatactgtcgtgtttgaagtggccgcggatgtaccggttaccggtgtgacagtggcgccagcaacagcgagcattgctgtaggggctactcaacagcttaccgccaccgtagcgccggctgatgcaagcgacaaaaccggcacctggtcatcctcggcaaccggtaaagccaccgtgaatcagtcaggtctcgttactggcgtttctgccggcgcggccacaatcacgtttaccaccaatgatggcgccaaaacatcaaccagcgcgatcaccgttaccgcgtga

SEQ ID NO: 430292 - DNA, 336 bp, Serratia marcescens
gtgtttcgccgcggaaagatgccggcgaacgatattatcgtaatcggccaatcactgatcactcacggtatcatcggtaaagcaaagatccgcaagctgcagcgacacgagtcgaacagctacgtgaacgagttcaacgccttcgagtacatcagcgcagcacggaatcacttcaacatgcctcgagccgaagcggagcgcctttctatgaccgagtttcagttgctgctggcggcaaagtacccagagcagaaaggcttcacgcgcgaagagtacgatcaggttatggacgaagacgagaagcgctggcaggcgatgatggataaaggaaggtag

SEQ ID NO: 430293 - DNA, 363 bp, Serratia marcescens
atgagtaagtacccaagccaaatgcaagacaagttcaacctgcgctttccggatggaatgcgtgatgctgttgcagagagagcaaaaaagaatggaagatcaatgaactcagagatagttcagataatccaagatgctttaatgtttgatggcatcgacgacagcaccgagcaattcactggttttcagaacgacctcaaaggccttcaatcaccagaagatcgtgaaaagtatctctcagctttggaaaaggaagatccattcgctgccgctcttctacgggagaacgacgctcaccaagcaaaactgataagaatcttaggtgagcacatagagaaacagaataacaaaaagcccacctaa

SEQ ID NO: 430294 - DNA, 174 bp, Serratia marcescens
atgaacgacgtaatgtataccgggcgtaaaaatgaagtgttcaacctgcggcttccagaacgcatgaaggaagagatccgccgcatggcggagatggatggcatctcgattaactctgcgattgtgcagcgtttagcacggtgcttgcgtgaggagcgggcgaatggtcagtaa

SEQ ID NO: 430295 - DNA, 708 bp, Serratia marcescens
atggtcagtaaaaacggcgagacccggcagtgcgcgaacaccaaccgggtctctatgtcggcaatctcggagaaaaccaacgtgaatattgtagcaaaatcagaattcaacttccaaggcaaagcgcttgttccggtatctaacatttctggcgtgtggttcacatcggcagatttggctaaagcgctgaagtactccaacagccgggcagtaacaatgatctacaacaaatatgcagacgagttcaccagcggtatgtctcaggtactcgaagtgagtacctcagggaattaccgtaaaaaagtgcgagtgttctcccttcgtggggctcaccttatcgccatgtttgcacgtagcgatgttgcgaaagagttccgccgctgggttctggatattttggatcgcgaagtcgaacactcgccaatcgccaagcagttcactgatgaagagttatacgatttagcctgtctgtggtcggtatcacagattattagcgacgacgcaaaaatcgttaagtctgcaatggagttagtaggatcgccgattgctctaaaaattaatgtaagcgatgttgctgttgggtattttatggacaaagcacgagctcttcttctacgtgaaagcaagcacattgccaaaatgaaaagcccagggattggatgggagagagaattgaaaaggttgaacggaataaaggagctgcattga

SEQ ID NO: 430296 - DNA, 600 bp, Serratia marcescens
atggattatccaaaaatggatgattatgattctaaagagttttctgtcaaaaggaaggtgtacaacggtcgggttgtcattgctgagatatggctagaccatgatctgaccatgacacttatgaccggatacagcatcccgctgcgccacaaggtcgctaagcggtggcgtcaactggaaaccggcgaggcgctgccaaccaagagcaacagcggtctgcctgaataccggcgcgcccgcacattgaagatgaccgtcgaagccgtcacaaacctgtttgacctgatgccacacttggcgccggaagcgaagcaggtagcagctgccagcctcatcaatccggtagccggtttcgatgccatcccgctgccggctatggaagagagccactacacagcgggagaggtgggaaaaatgctggatgtgtcagcgaacaaaatcggccgcatagccaacaagcacaaccttaaaactgaagagttcggcaagttcttcctggacaagtcggcgcactcggcgaagcaggttgaggcgttcagatacaatgccaacggagtcgaggcgctacgccacctgatccacggcgctgacgtcgcataa

SEQ ID NO: 430297 - DNA, 228 bp, Serratia marcescens
atgctttgccttcagcgctttcatcgccagtggggcaagggcgatctgctgctcacacagcgctatagctttcttaagatgtttattttcagcgcgaagcttatagtgagccttgatctgttcctgcaatccgaagtgaacctgaattatctggtcatacgaaagatgccgcaggccatccagccattcttcctcagtcacatccctatccccatcaatcaaagatag

SEQ ID NO: 430298 - DNA, 2694 bp, Serratia marcescens
atggcggagcaggacggtgggagcttggtttaccaagttgatattgaaactgcaaagatggtcacaggtagccgtcaagcagctgtcgtgttaggggagatggaaaaacaagccaatcgttcatctaaagccgttgatggactgacatcctctgccgatagtgctggtaggtctatgtctgggtttaaatcagtgttgagcggtgttgcaagcgcaatatcagttgctttgattatcgattacggcaaggcttttttgacagtcgcagataacattacgcaacttcagtcacggatcctcaggctatcaactgatgccgcaacagcaatgtctacgtttgaaacgttgacggccatagcatcgactactggcgctagcctcagggatacggccaagctgtgggaggcgatgacctccacgctaaaagggactggagcaaccaacacccaaatacttgcattaactgatacgcttcagaaaatagggcgagttggcggctcttctacagaagagatggcaaatgcattaagacaattcggccagtctatttcctccggcacagtaagagccgaagagtttaactccatccttgaacaaatgcctgaacttgctaggcagattggcgcagggatgggactatcaatggggcagttgcgacaagcaatgcttgaggggaagttgagtgctcaggatgcacttaatgcaatcatgaagcagtcatcggctgttaacgatgaattctcgaagctcccaaggacgatggatcaggcgagcaattcccttacgatttcccttcaaaatctaattgggaaaatgaacgaagctatgggcgctagcgcaaccatggtgaaggttattgactctattagcgcagcaatagataggctaagtgggaaaactgagacggcatcacagaagattgcagatctcacgtcaactggcgaaatgtatgcacgaagagcaagaacgtggtcatggcttggccttgatggctggtcagaacaaaatcaggctttagcagctctcagcaacaaagctgccacgctgatcggcgacatgaattcggtggcaaaagcttcagaaaacgcagccaatggaacgattaatttcaataactcaggtactgcaaaccctaagcaagatgcattggtgaaacgttctcagcgacgcatagagctatcgaaacttgaaggagaatcaagggccaggctacaggcagtatatgatgctgaagatgcaggcatatctaagaatgatccgcgagtgaagaaactccaagatcagtatgccgagatagagcgaaataccaaagcccagaaagaaagcaatgcggagggcaagaaatcagccaaccaggctgaaagcgttgcccagaaactggcaaacctgaagcagcagtcagagcttgccgcggactcaacgagcgagcttagccgagagcaggcgatcctgaccgcacagcaatcactggggaaaggagctacacaggcccagatcgctgaggctggtgtttacgccgctaagaagtgggacacggccaatgctatcaaggcgcaggcggccgcagagaagctactcccggaagccaaagagaacgccagctacgcgcaagacgtgaaggatttaaacacggcattggcggctaagaaaatcagccaggagcagtacaacaccacggctgagcaactggagcaacagcatcaggtaaatctggcaaaaatccgggctgaagctgtggtaagtcctcagcagcaagccgctggaatggttgacccagtgcagcagcttgccaatgaaaacgcgcagaagctggcgcttatccagcagttcgagactgagaagggtgtgattacccagcgcggccttgagttgatgagggcggcgaatactcagtatgaacaacagcggatcgcggcacagtgggagatattccgcaatcaaaacgcaggcaatgaggcgctggctgcgtcatttgatgcattcgccggcaacgcgtccaatgccttcactggcattatcaccggcagcatgagtgcggaagaggcagcgcgttcgcttggctcaaccgtccttaatagtctggtgaatgccttcgtgcagatgggggttgattgggttaaatcggcagttatgggctcaacagcacaaacatcagctattgccgccaccacggccgcgcaagttgcggggacggctacgacgacagcagcgagcaccgctgctgctgctgcaaccacaacagcctggacgccggcggccatcgttgcctctatcggttcattcggtggtgctgcagcgattggtatcggcgctgttgtcgcggctatggcgctgtctagcagcctggcagggaagcgtaagaatggcggccctgtaaggtcgggcagcatgtaccaagttggcgagggcggtctacctgaaatttaccaagccagcacaggtaagcagtacatgatccccggtgacaacggcaaggtgatcagcaacaagcagatgactgccggcggcagtgtgtcgccaaccatcatcatcgaaaactactcatctggtgctggggtaatggatacccaggctagcaggggggcggatggtggcgatgtagtgcgcatcgtgctggcggatctgcagcagggtgggcaaatcagtcagggaatatcccggtatcaccaggcgcctcgaaaagccactgaatag

SEQ ID NO: 430299 - DNA, 468 bp, Serratia marcescens
gtggcaataccttatcccgactggctatcacttccccagaaggccaacaaaagccgcacgattgatgccgggttccgcaccgatcagccggcagtgggcgcgcctatatttcagcgcctgacagatgacctcaaaactacctggtcgctgacgtggattttcacgctgcaagaagatcgggcattcgagcagtggtatcgcagccctcgttacctggataacggcaatcagtggttcacgatgctgtgcaatctgggtggctccggcctgcagctgcaagaactgcatttcgtggcgccgccggttcaaacaagcatcaatggtaacacgacgacgtggacggcgagcgtaatcacccggaaggtctacaacccggatgacgagttctcagacgtcattgttgagctgcctccgggtcagtgggggatcattgatgaagtggttaaccgcgacatgccggagtattga

SEQ ID NO: 430300 - DNA, 471 bp, Serratia marcescens
atgcctaccttacgagaatttcagtcacagaggccgaaccggattatctacgacacgatgacatttagtcatccgacgtttggggttattcggctggtggctaaccaaatatacccaaagacgttcgccggccaggtgttttcaccgtgtcgaatggaggtcgcagagagccagcagagcagcacgcctgtgatcaattcgactgctaagtttggacgtctggctctggactttaaacagcaactgaagcagtggcgcgcgcactcacgcataacaccgatctctgccacatatcagcgtttcgatgcggcggacatgaatacgcctctgaagtcgtggacgctctatgtgaaggacgcatcaatggacgagagcgatgtgacatgttccctgacactacagaatccactgaacaacaacatcgcattcctctacaacaccaccgatttcccggggcttgccaatgcatga

SEQ ID NO: 430301 - DNA, 2499 bp, Serratia marcescens
atgccgttgatcgaagttcagcgcgtgccggggttgcctaaagaacgtcataaccttcccgccggcagcatgttctatccctggctgaaatcggccaaccttcactgcgatgttgaaattctgcgtaacggcgtgaagctgcagccagatgatgagttaaatttcccgctgaacgatggcgacgtgatcaacgtgttcgatcagccgaaaagcggcacgcttggaacaatcctcaaccctttagagcactttaacccgataaaatttactcaaaaaattctctcttcacttatcgggcaaccaagtgccagcgttgcagcaggaagtagtgctaaaacgtcaccaaacaatagcttgaaagggcagacaaacatcgcgcgaaacggagaagcaaagccggacaactttggtcaggtgcgtgcatttcctgatcttattcaggagtcgatgttcgagtacgacaacaacatcaagaaagtgactgaatggatgaacttcgggcttggacgctatgacgttacgtctgttaggtactcagaatcaaaccttggcgcgcttgctggcgcctcataccgcatctaccagccaggcgagaacatcccgctgatcaatgaggggtttgctttcgacgacatcgacggccaagagctgccggggccgaacgagagcggtgattttcctgcagaaacggcgacgacgaccaccgatatggtttctggtgagttcatcgccggacaggcgaaggtaaaaattaagcaaaacagcgactttgattacttctatgacctgtccaagcctcactctgtgtcgttcgtcgttaatgtcacctacaacacggtatctgggccggtaacgcgcgatataacggtgtttgccgatctcttcagcgcgacgacaactgacgatggtgccccagtaaatccgcagtatttctacgagttcacatttgtgaatctgagcggcaacgatatcagccagatccccggtgatgcggtgataaatacgtcgatattcacgcttaatgacaatgaaccgttggtaattggcccgtcgttttctcccgttgaagggacgcagctgtgggttcatctgcaggcgcaattgggacatggggactacgccagaaccagcgtcacgttctggaaagttgatgatgataacaaccagatccccggcacgctggaaagctacaacatcgggcttaacaacgatgacgagaacgcggatacaaaatatgacacgttcaagtttacccctgtgtcaggcaatgggcgctatgcggtaacgttcatccgcaccaacaacagtaatgatcactcgatcctgaaggtagaggccgttcacatcgtcaggacgcgcgctaatgttgtttacccgaatgacacgctcgtaaccgtcactgttacagctacagagcgagctaccagtgcgagagagcgaaaatataacgcgctaataacccgccacgtcatcagctacaacctggctacacagacagtagattacacagaaaggccgtcacgctcgtttgcagacgcggtattgcacacctggctaaagatgggcggtcagccagagtcgagcatcgacatctatgaactctactctatcgcggcatcgctatcagatcagcgcctgggctatttcgattacaccttcgatgatgaggatatctctctgggctctcgcgttcagacgatctgtgatgcggcgacggtaacagcattttgggatggcggggtgctgtctttcacgcgcgatgagcggaagccaaacgcaacgacggtattcaaccgcgccaacatgaaagcggaggattacagcctttcatacgacatgacgctacctggcggttttgatggtgtggaggtcaaatatcggaacccggtcacgaataagcaggcattcatccgctaccggatcgtcggaaattcgatagaggatggggagccggtaaaggcgaagaagttcgacatgctgtttatccgtaattcgtaccaggcgcgggatcgagcattgaaggaggttcgccggctgctgtattcacgccaaaccatggcaattcgcgcgctggccgatggcgaatgggtgaacgtcgggcagatggtgcaggtggctgatatctacgacgctaaccagcaggatggttatattgttgcgcgttcaggcaacaacttcgacacaagcgagcgcatcgaatgggccggggatatgtttgtcgtcatcactgatgcgaatggcacgccaacggctcgtgttcaggcatcacagcgcagcgatacgatgtttggcttcgcagcagcaataccagcaatcaacctcaacatattcgacggctacaacgtccagtcaccgtctcgttacgttattgccacgcaaatggaaatggacgcaacgaagtggacgatcaccgaaaagaaaccaaatggcgacgggactacctcgttaaccatgtctgaatatagcgatgaaatgtataattacgaggtaactgaataa

SEQ ID NO: 430302 - DNA, 1917 bp, Serratia marcescens
atggctaccacaccaacgcaagagcaaatcccaagcgaaaacgttagggatttaaaatttaacgccgggaaaattgaccaaatagtttcatcaaacgaaccaacgtatacagacaggtttggtgtagtaagatacacatgggctggcgcattaaagaatattgccccccttgggcatccgtggacgcatgcagaagctaatgccgctatagcatcaggtgaaataccaaatgattcctatttctttatttggtctgaaaacgttaacgacgttgctgatgtttataagaataataatggtgttgctgtgccagctggcaaaagctacccaagttcagcctttgtatcaaaaatcgctgattttaactcagctctgtctgtaggcatgtcttctacatggattgacaaatcaagccagaacgagaaagtaaatatcatcgttgatagcgcaggacgtcgtgttgcttacgcgaataactctgagaagcggttggttgcttatggtaagcgattggccgatgaggaggttgttaatgatatcggtgctgagacgtggcgatacaacggaagcaactcgaatgaaattatcgaactggttgattctgcagggcgcattatcagaaagacatcaatagctgaaaaggttatgtatgtttttggtgtgcctgtcggcagtggctcagtaagccaaaactacatagcccccacctcgtggcctgaattaactgacatgggttcatatggccaatcattatcgatatcgcgacttggcgagcctggcgtggaaacggtaatgcaaaatgcacttatgtttaatggaggtgttaccacatacgacaggacgttatcttcaattgtcacattgcccaatacaaccgttaccgagtatcacgaaaaatcgatgattcatcagcttaatgctgattaccccgatgaaaacagattttatctggcagctgctcgtggagtcagcggctatgctatggaacaactgaggcctgggactcctccgtgggcgcagtacatggcgagtattgatagaggtaaagagattgctgatgtgatggcgcgccaatatggcatgatcgcccaaaccttcttccaaggggaggaggattcatatcgcggcactgatcctaatgtctatcgcgaagggatgcaaataattcagtcaggggtaagcagcaagtttaaactggtatcaggcttacctcatgatattccaatggtgatttatcaaatggcatctcatgggagatatgaagggttggttaacccaagctatgttataccattggtacagcttgacgaggcgctaaataacccattaattcagatgtgcacaccgatgtatatcttcccatataaagacggtgttcaccttactaatcatggatatcgctggcttggtctttatcgagccaaagcaataaagtattggttcgataataaaaaaccatttaagccattgcatcctgttaatgttagccgtgtaggtaactcgacgcttgttggcgattttgcgccgcctactggtaaaattcaattcagcgagcaaattgttactcaggctagcgacggcatgaatgggtttgaaatttggtctgaatctcagagcggtgtgctgtcacggttgcctgtatcagaagcacaaattatcggagataaaaagataaaagttcgttcttcttcgaactttggtgctaatgaaaagatttaccttgcatatgcattcacccctgaaaatcgtggtgcaattgaagaagggaaatacccatcatggaatgcagggccggtaactggtgttaggggtaacctttgcgacagtgacgaatctgtaactgatctgctggatgcaagcggacaaccttacccactaaacaactattgcgtaatgttcaagaaagaggccaaataa

SEQ ID NO: 430303 - DNA, 759 bp, Serratia marcescens
atgccgaactatctttttacccgtctgaattatgaagttccgtttgatggcgccgagtatatcaatgaaagtgacgttagtcgggttatcgagcctacagtttccccccagcctggttacgttaactggctattccatagtggggattcaagcttaacttccattgatgggagttacaccttaacgccttcgtcagtttttactccgtcctacactgaaaacagcgtcattttgcctgcgctgccgtcagcagcgacttataacgggttgagttctccctttaaggactccgctacacagaccatgtctgcagtgatcaaatacactggcgcagcgtcccagatcttcctgggttgcatctccgatacagtcggcgaggccatcacggccagcgcctcaggagtgatttcatatctctatcgtgatgccagtggttcagttgtgtcaaacagcattccagctcctgctatgacgccgggagatttcatctttatcgcattctcccgctcagggagtagcgtgactgcgatgatcggcggggcttcatcggtactgacgctgtcgaatgcagcaaaaagcacagcaacaccttataacgttggccccggtaacaccgcattcaacgtagcaggattctcaaagagcctggaggtgatggaattcctttacagcggtggcgatgcttcagctggcgacctgcaggttttgtacaacaatgctaagttgcgttgcatggctcgtggggaaaacattctttaa

SEQ ID NO: 430304 - DNA, 423 bp, Serratia marcescens
atgactttcttttatccaacaccaaacccaaccaagctcaaaatcccgctgttcgccgacaaggttccggcgggatttcccagtccagcggcagattacgtcagttcgcgcatcgatctgaacgaatactgtattagccatcccaatgcgacctattttctctatgcgacaggtgattccatgcttgaggcagggatcactgagggctctatgcttgttgttgaccgcagcatcagcccagcccatggcgatattgtgattgccagcatagccggcgaattcaccgtgaagcgcctctgtttgcaccctcgcgcgcaactggaacccatgaacccgaagtatgagccgatcctgctccatgatggcggcgacgatctggaggtgatgggcgttgttgtgtcgtcgataacgaggctcaagtga

SEQ ID NO: 430305 - DNA, 1269 bp, Serratia marcescens
atgtacgcgcttgctgatgtgaacagcttttacgcgagctgcgaaacgctatggcgccctgatctgcgagggcgtcctgtggtcgttctgtcgaataacgacggatgtgtcgtagccaggagcaaggaagcgaaggcgttagggctaaagatgggagaaccctacttcaaaattaagcgggaatttgagcgcgtagggggtatcgcgttcagcagcaactatgagttatacgcagacatgtctcagcgtgtgatggctgttttagaagagatggcgcctcgcgtggaagtgtattcaattgacgaaagtttccttgatctgactggcgttcgtaactgcattgatctggatactttcggtcgtcaggtgagggccaaggtactgcgcaacacagggctaactgtgggcgttggcattgcccaaactaagacgttagccaagctggcaaacttcgcagcgaagaagtgggacaagaccggcggagtagtggatctatccaatgaagggcgccagcgcaaattgatgggcctcgtgccggtcgatgaggtctggggtatcggacgccggatatcgaaaaagctcaacatgatggggattgaaacggcactacaactggccgatgcaagcactacgatgatccgcaagcatttcagcgttgtgatagagcgaacggtgcgagagttgcgcggccagccttgtctcgagttggaggagtttgcgccgacaaaacaacagatcatctgcagccgcagcttcggtgatcggatcaccgagtatgaccagatgcaccaggctatttgtatgtacgcgacgcgtgccgctgagaagttgagggaggagcaccagtattgccggcatgtcagtgcgtggctcaaaaccagcccattcgccatcaatgaggaatactacggcaacaccgcaagcataaaattgagcacgccaacgcaggatactcgggacattatcgctgcggctatgcgttgccttgatgcgatttggcaacctggccatcggtatcaaaaaggcggagtaatgctgcaggatttctatagtcaaggagtggctcagttagggctgttcgatgagtacaaaccacggcataacagtgaacaacttatgggcgtgattgatcggatcaacaattcgggcaggtcgaaactgtggtttgctggtcaaggggcgcaccagacgtggtcaatgaaacgtgagctactgtcaccggcatacacgacacggcttagtgatctgccgcgcgctcgggtttattaa

SEQ ID NO: 430306 - DNA, 708 bp, Serratia marcescens
atgtgtggccgttttgctcaaattcaaactcgtgcagattatctggatgttctagcatccgaccttgaatttgccggcgcactagataacgtgccgattgctcgttacaacgtggcgccaggaactcgagttctggtactgacccaacgtgacgacaagctgcatcttgatcctgttgagtggggatatggccctgattggtggcgtgaaatgaagcgtcagccggttatcaatgctcgcgttgaaacagccgccacaagcagaatgttcaagccgctatggaatcacggtcgcgcgctggtgatggcagatggctggtacgagtggaagaaagacaagcatgacgccaaagtaaagcaaccctatttcatttatcacgaatcgaaagcacctatatttttcgccgcgataagccgccatcatcccgatgcaaaagagcctcctgatgatgacggttttgtcatcgtgaccagcgccagcgattcgggcctgctcgatattcatgaccggcggcctgtcgttctaccaccagcagttgcacgggagtggatgagtccgcacaccacatccgcgagagcggaagagctcgcgaacgaagcggccacacctcccgatgatttcgcatggtatcctgtaggaaaatcagtcggcaatatccgcaatgacagtgctgagctgattaagcctatcgccaatccgctggtttaa

SEQ ID NO: 430307 - DNA, 3084 bp, Serratia marcescens
atgagtctactgaccttgcagcaaggtgtagcccgactgttctatgccacactgggcaaaaaagccgatgatgacgcgttgacttatttcgctaaaaagctggaaaaagacgattacacgcaaagcgaattagccaatatctttattcgttcgcaagacgggcaccatcgttacgatggcctgagcgtcagccaaaaaatacaatacatctatcacaataccacgggcgcacagccggacgccttgacgttgaacgcgctcaccgcacaggtcaacgcgggaaaaactctcggcaatctgacgaccgaactgatcgccaacatcacaaactacatgggcaacgatgtcgggctgcaagctcaacaacagcatttgcagaccatcgtcaataccacgctgtacccttcagagctggtgcaaccgtcacagctctctgcggcagcggatgtacagggcctctattatctgctcggcagcatgacccattccgctgccgtccaatactggagcgacctgctggtgagtggcaagaaaagcaccgtcgatatcgccaatgcattcatcgccacgaaaggctatatccattcactcagcaacgacgattttgtcaggaaaatattttcgacggggttcggtaaaacggccggcgagagtgatctgcaaaaatacgtaaccggattgaacgaccagagtgaaacccgcggtgaggtgatggtgcgcttgatggaagacgtcagaaatgacgccgcagccaccaccgccaagcaaaacttcacggcggcgacccatgtctatgcacccggtgaattaccactgcctgtttatactgaagcggtgatggcgctgtacctgacggtcgccggaaccgccgctgacgccacagcgctcgataccttcagccgtttattggccagcggcacctctcacagcgatctgctgaaaatgttgtcaagcgcctaccaattccgcaacgccggggattatcaaaagatttacctcaaactctatggcaagccactcgacagcacttcagctcaggctatcctgttggaagctggcaacgacaatatcaaggcatcctcgctgatcatcgatgccttccgcgaaggcaaattcccactggataatcacccctacccgccgctgaccagcgtgctaaaaaaattcgatgtaaaattgggtgatgcattgggctatcaaaaggactttaacggaacgtttaccctgtcggataacggcaagctggtggcaaacatcaatgggcgggcggatcatgaggtcaccacgaccgaaatcgccctattgggcttgagccagataaacctcaacgccaacatttccacgagcgtcgatgtgaccatactgaagaatgtcagctccatcgaattgtccggcctctatgccgcaaacactacggtgctctcttccctgagcaataaagtcgtttccctgcgcctcaacgatgccaatatcgccaatgcggatgccgctttacccattagctttttaaacgtcgtggttgaagcaggcagcagcctgaacgatgcccacatcaacctggcggtgacaaacttgctctgggccggcaatggcgtcaacggtggcgccaaccacatcggcagcgattttttggcagaggccaactcagcgagctcgtccactatcacgtcgctctcggctaacttcattaccaaagcggtttatctgacgacaaatcagcttggtaagctcgaaggcagtatcgtcagcaatgtcaaccaattcagatactttgactatatcgatctgacgcactacagaggaacgggcgatatttatctggacgggaaatgggttgccaacgaaggcagcaaagtcttcgacttcggccttttcagccaaaatgccggcatccataacgcggcttacgccaacgcatcccctcttacccaagccgagttgcccctgagtaacggcaacggctataccggccacgccggcgggatcatttcggcctattccggcgacctgacgctgcttaacgtcggcaatgactcgttcaaactggccgggggtctgacaagcaacagccatattcatatacacgatacccggcaaagcgatacgcactttacactggaattcgtcccaaacaacgacaaatttatagcgtggaatatgggcacgttcagcttcacctccgaccataagcaaacgctggaaatctatatggaaaccccccgcgtgttggaacaaacccgcactatgacgctaagcggcggggacaactcgatctctgagctgctcttgaccagcctcatatatggctccaatccgtttggcgaaaatccgacggtggtgctcaatctcaccgtcgcggccgatttcagcgataacctgcaaaccattcagggaaatgcccaacccgactcgaacatgaaattgcagttagtggcggagaaaggcggcaccggcgggggcgatttttacgacacattgaactcactggccaacaaagatgacttcagcaccgtcatcaacgaattgagcggacaccagctcgtcattggcgatgatggtctgaccgtgttgagcgcacaagtaaaaggcaataccacggtgaatctcacgcgctcactcaccttcagcgacagtaaaatagacgatctggttaccttgaactacgactatccgaacagcgtgatcagggtaggcgatgtcggcaatcagtggctcttcgccaaaaccggcaataaaagtcctgtacagtatggcaaagcgagcagcgccagcgaactgcaggcggtcttcagcgatctgacggcgaccgacaatgcccaggcgttgttctcgcagattctggcgaagcagaccaacggtgccagcacccatcagttggcagaagtcggcttactgcaactgggaaagtcggtctatgtcatcgtggataaaaatcataaccagacgtttgacgataatgattttgttttctcggtcggcaaccataatcccaacgtagttgccgccactctgcattaccactcgcccgccgtcaccgtgaacggtgttgcggccgaaaactcgctgccggaggcgtttgcctaa

SEQ ID NO: 430308 - DNA, 3081 bp, Serratia marcescens
atgagcctactgaccttgcaacaaggtgtagccaagctgttctatgccacattgggcaaaaaagccgatgacgacgcgttgaattatttcgcaaaaaaactggaaaaaggcgattacacgcaaagcgaattagccaatatctttattcgttcgcaagacggacagcatcgctacgatggcctgagcgtcagccaaaaaatacaatacatctatcagaataccacgggcgcacagccggacgccttgacgctgaacgcgctcaccgcacagatcaacgcgggaaaaactctcggcaatctgacgaccgaactgatcgccaaggtcacaaactacatgggcaacgatgtcgggctgcaagctcaacaacagcatttgcagaccatcgtcaacaccacgctgtacccttcagagctggtgcaaccgtcacagctctctgcggcagcggatgtacagggcctctattatctgctcggcagcatgacccattccgctgccgtccaatactggagcggcctgctggtgagtggcaagaaaagcaccgtcgatatcgccaatgcattcatcgccacgaaaggctatatccattcactcagcaacgacgattttgtcaggaaaatattttcgacggggttcggtaaaacggccggcgagagtgatctgcaaaaatacgtaaccggattgaacgaccagagtgaaacccgcggtgaggtgatggtgcgcttgatggacgacgtcagaaatgacgccgcagccaccaccgccaagcaaaacttcacggcggcgacccatgtctatgcacccggtgaattaccactgcctgtttatactgaagcggtgatggcgctgtacctgacggtcgccggaaccgccgctgacgccacagcgctcgataccttcagccgtttattggccagcggcacctctcacagcgatctgctgaaaatgttgtcaagcgcctaccaattccgcaacgccggggattatcaaaagatttacctcaaactctatggccagccactcgacggcgcttccgcccaggctatcctgctgaaggccggcaacgacaatatcaaggcatcctcgctgatcatcgatgccttccgcgaaggcaaattcccactggataatcacccctacccgccgcaggccagcttgctgcaagacttcaatgtaaaattgggcggtgcattgggctatcaaaaggactttaacggaacgtttaccctgtcggatagcggcaaattggtggcaagcatcaatggcaggggggatcatgaggtcaccaagaccgaaatcgccctattgggcttgagccagataaacctcaacgtcaacattcccacgaatcttgatgtggccatactgaagaatgtcagctccatcgaattgtccggcctctatgccgcaaacactatggtgctctcttccctgggcaataaattcgtttccctgcgcctgaacgatgccaatatcgccaatgcggatgccgctttacccattagctttttaaacgtcgtggttgaagcaggcagcagcctgaacaatgcccatatcaacctgatgacgaaaaacctgctctgggccggcaatggcgccaacggtggcgccaatcatatcggcaccgattttttagcagaggctaaaccactgaactcttcccccatgacaatgttgtccgccaacttcattaccaaatcggtctatctgacgacaaatcagctcggtaatctcgaaggcagtatcgtcagcaacgtcaaccaattcaaatacttcaactatatcgacctgacacactacagaggcaccggcgatatctatctggacggaaaatgggttgccaacgaaggcagcaaagtcttcgatttcggtcttttcagccaaaatgccggcatccacaacgcggcttacgctcacgcatccccccttacccaagccgagttgcccctgagtaacggcaacggctataccggcagcgccggtgggataatttcggcctattccggcgacctgacgctgcttaacgtcggtaatgactcgttcaaactggccggcggcctgacaagcaacagccatattcatatacacgatacccggcaaagcgatacccgctttacgctggagttcaccaaagacagcggcaagttcttcgatctggatatgggcacgttcagctttacgtcagatcataagcaaacgctggaagtctatatgagcagcaacgtagaaatgctacaaaaacgtaccatgacgctaagcggcggcgacaactcgatctccgacctgctactgaccggcgcgatgtatgccggcgatcaatcactggtactcaacctcaccgtcgcagcggatttcagcgataatctgcaaaccatccgcggaaacgactacatcgatcgccgatattactcggacatgaagttgcagctagtcgcggagaaaggcggcaccggtggcggcagtttctacaacacgttgaattcgttagccaacaaagatgacttcagcaccgtcatcaatgaattaagcgggcatcagctaaccattgacgataccggcctaacggtgttgaaagcacaggtaaagggcaataccacggtagactctgcacgcacactcaccttcagcgacagtaaaatagacgatatgatcaccttgaacgtcggctatcagaacagtgtgatcaatgtcggtgaggccggcagccaatgggtcttctccaaggccggcgataaaaccgccacgctgtatggcagcgcaaccagccccaacgaattgcaggccgcctttagcggtctgtcacccgccgacaatacccaggcgttgttctcgcaggttctggctaagctgaccaacggcgccagcacccatcagttggcggaagtcggtgtgctgaagttggataagtcggtctatgtcatcgtggataaaaatcataaccagacgtttgacgctgatgatgtggtgttctcgatcggcaatcaggacccctatctggctgccgtttctctgcactaccatgctccgaccgttaccgtgaacggtcttgcggccgaaaactcgctgccggaggcgtttgcctaa

SEQ ID NO: 430309 - DNA, 897 bp, Serratia marcescens
atgaacaatgatgtcatcatcatcggcggtagctttgccggccttgccgccgccctgcagcttggccgtgcccgtcgcacggtcactgttctcgataccggccttcagcgcaaccgcttcgctagccgctcacacggtgtgctcggccacgatgacaagtcaccatccgacattctggccacggcgcggcagcaactcgcgcgctaccctgctatcaagatggttaatgcccgcgcggacagcatctccggtactatcgacaatttttccgtcttcacgggcgatagtgaaatccttcgtgcgcgccgcctgatactgagctatggcgttgttgaccagatgcctgatattccgggattttctgaaggctggggcacatccgtcatcccatgcccttattgcgatggattcgaagttgctgaccagcattggggcctcgtctggtctggagcgcagtcgatgaatcaggtcaggctgtttcacgactggaccgacaggttgactgtcttcagcaatggtcacgacatcacccctggcatacgggccgatctggcggcccgacaggtacctctcgttgatgggcggatcaccgaaatcgcctgttacgggagccatagtgccaccctcaagatcgataccggccccgatgtcgcagtcgatatcctcttcgcgcatccgcgcaccaggccgtccacaagccttcatgacgcactgggcctcgccacgctcaatacgtcaaccggcatcgtcctcaagaccgacgaacgccacgaaaccagtatgcctggcatctatgccgccggtgaccttgccaatcccgccatcccctcagtcaccacggcgatatggcaaggcgcgatggcgggtatcttcgctcagcagtcgatgctcacttga

SEQ ID NO: 430310 - DNA, 222 bp, Serratia marcescens
atgggtaccgtcagagatatcaatagcgcttccccgatgaatggtgttgcgctgacagaaatggatatacgcaatgaacattcggtacaacaggcaattgaaaaagtggtagccaaagccggacgcatagatgttctggttaacagtgcaggtgtgtccctgactggcgctattgaggagtcatccgtggaggaggcctaccatagcgcgcttctcctatag

SEQ ID NO: 430311 - DNA, 1086 bp, Serratia marcescens
atgaaagcaattactattggtcaatttataaaaagagaaaacaataaccttgatttaattagaattttgtgtgcttattttgttatctatgcccacgcctttgtcttatctccatcagaaggaagtaatgacatcttatacaaaataaccttactggggcatatttcattcggtgggttagccgtaaaaacctttttcctaatcagtggcctactggttaccaatagtcttcttgccaatggcagaataataaattatgttagctcacgctttctcagggtttttccggcttatgcgctaacggtcatcgtatcagcactcattattagcccctggttaagcatattaagtccttccgattattttgcatcaagtgaagtttggtcttatgtcgttaaaacattaaaacttgatgttcagtaccacctccctggtgtctttagcagcaatgcctccaacgccgtaaacgggtcgctttggactatccctatggaagtgaaggcatattcttacctgctcttaatatacttggtcagtcttatctttggcccctacaagaagctatttatcgcattcatatccatcgttatactccttgagccttttactccgttaaaaggtcatctgattgtgaaatcagatagtccaaccatctatttactttatcctttttttgcaataggttgccttctggcaatactgaaagatctggcaaccactcgcgacctgttggcgacagccattatcgcactcctcgctttctttatcgtcgatgatgagatcggcaagaccgcgttattttatgtgttctcttccatgcttttgttatactgtgcatcgacatcctatatgaaaaggttgaagataaagaatgatatctcctacggaatttatctttgggcgtttccaatacagcaagtcatcgcatccgtatttgtggcctcgccatacattaatatggcgatatcagtgatagtttcaagtgtttttgcctatttgagtttcaaatggatagaaagtccggccatgaaaatcaacaaaaggctgcagaaaaattacgtatcactgcaaagcgatcgtgtttaa

SEQ ID NO: 430312 - DNA, 594 bp, Serratia marcescens
ttggctggggtagtagcttttacgtgtaatggcctgctgttgctgtcgggcgccaaccacagcgggcacgccgagggcacgacgaaggccggggttagcgaaggtacgctgataatccgtgacaccggcagacagcagcaggatgtggtgcagctgaatcgggataccgagcatgccaacgacggcagcatcagcccgatattcaacaaggagaaggagcaaaaccggctcaagcaggcgcagcttatcggcgagattggcggccaggtgatggacgtgattcgcacgcagggcgatatcgccgggctgaaggcgcaggccagggagcagcttgagaagagcggtaaaccgacgaacgatgcggcggtgatgcagcgggcgtacgacaacgcgatgcggcaatacggcaccggcagcgacctgcagaaggcggcgcaggcggtgacgggggcgctgacggcgctggcgggcaataacctggcgggcgcactggcgagcggtgcttcgccgtacctggcgacggaaatcaagaagcgggtcggtgaagagaatattcctgggggcgacatcttcagacaaactgtcgtccgttaa

SEQ ID NO: 430313 - DNA, 309 bp, Serratia marcescens
gtgatcccggtgggagaacgtgcactgtggtgggtacaaaactatatgcagcatactcgcccggagatgttgagtaaccccgggtgcagtgcgttgttcctggcaatggatggcgtggccgggctgacggccaacggtgtgagcatggctgtggtgccgtacctgagagcagcggggatcatgaaaggcagttgccacctgttccggcatgcgatggcgacgcagatgctggagaacggcgcggacctgcggtggatccaggcgatgttgggccaccgcagcgtggagagcacgcagatctacacgtag

SEQ ID NO: 430314 - DNA, 531 bp, Serratia marcescens
ttggctaatcagattgtgtgggcacctccctttgacaactctttcggtaacgacatggtttatagggtattttcggctgctggaaatccttatgcggtaggttttgaggagttacagtcgcagcaggctttaaccaataaaggcatcaatctcaacaaagcaatgccacagtttcgtttcccgcaaagtggtgtttgggctattgttttcgatgaaatcgacttggtgacattgtcattcaataactttcaacatcggcaattaccgggatgtgcgggcggtagagtgttgtttaacgttgctagtataattaatgagcattatactgtcagcaacgctggagcatacgttttttcggcagcgccggacaaaagtcatacacgaaaaactgatttaactggcatatataatgggcttttaggattgagtggtcgaaaatctaaaattctagggagcttcccaggatggtattgttacagcgattttttagcgggaggtagaggttatgtcatcacgactcaaagttactag

SEQ ID NO: 430315 - DNA, 219 bp, Serratia marcescens
atgtttcattgcaatatctgcggaactgctgcacacgctcgctcaagtcgttatctcagtgagaacaccaaagagcgttatcaccagtgtcagaacatcaattgcagtcatacatttgtcaccatggaaaccatcgagcgcaccattatgaagcccggccatgtggtgccggtattgccgcacccaaacaattacggtcagcaaagcatgttgatgtaa

SEQ ID NO: 430316 - DNA, 1170 bp, Serratia marcescens
atgattaccgggatgacgctggatgccggagcaaccatcgccccggcgtttatgctcaaaatgggcgacaaggatatcacacacgatatcagcgcccgcctgctctccctgacgctttcggacaaccgcggatttgaagctgaccaactggatattgagctggacgacgccgacggtcaggtcatgatgcccggtcgaggcgcagtgctgtcgcttcatcttggctggcagggggcgccattgttcaacaaaggcaactttaccgtcgacgagatagagcatcggggaacacctgacacgctgactattcgcgcccgctccgctgattttcgcggttcgctcaatgcccgccgagaagagtcttatcacgacacgacactcggtgcggtgattggcaaaattgccgagaggaacaagctgaccgcccgcgttgcgaaagagctggccaggattaaagtcccgcatatcgaccagtcgcaggagtccgacgccaagtttttgacgcgacttgccagccgcaacggggcggaggtgtcgataaaagccgggaggttgctatttatccgggccggtaatggcgtgaccgccagcggtaagccgataccgcagatgaccatcgagcgccgcgacggtgaccggcatcaatttgcgattgctgaccgggccgcatataccggcgttacggcgaaatggctgcacaccaaagacccaaagccgcaaaagcagcgggtcaagctcaaacgcaaaccgaagcctcagcacctgcgtgcgttgcagcaccccaaggcaaagccggttactgccaagaagacggcggccaagccgaaagaggcgagggaaggggaatacatgaccggcgaggccgataatgtgtttgccatcacgacagtctacgccagcaaggcgcaggcgatgcgcgccgcactggcgaaatgggacaagctgcaacgtggtgtggcggagttttctatcagtctcgccatgggccgtgcagatttatgtccggaaacgccggtagcggtgaaggggtttaagcgcgtcatagacgagcaggcgtggacaatcactaaggtgacccattcactcagcgataacggctacacgacggcgttagagcttgaggtgaagctttctgatgtggagtacgaggaggaagtttcacaagattaa

SEQ ID NO: 430317 - DNA, 483 bp, Serratia marcescens
atgctgattcttgggctgtttgtgttccagttgcagacggtgccgtatcaaacgctggcgcgttcggtagattatcgctggccgtcaaacagccgcgtcggccagcggcctgcgctgcaatttcttggcgtgaacgaggaaaaaatcacgctctccggcgtactgctgcctgaaatcaccggcggcaaaatctcaatgcaactgctcgatgcgatggcggccgagggcaaggcgtggccgctgctggaagggactggcaccatttacggcatgtttgtcgtgaacagcgtcagcgaaacccgcacggagtttttctccaccggcagcgcgcgccgcatcgagtttacactcacgctcacgcgcgtggatgaatcctttacggccatgtatggcgatttgcaggcgcaggccgaggggatgctcggtcaggtgagcgagctggcggccaaggcggggaacatggcgggagggctgctccaatga

SEQ ID NO: 430318 - DNA, 2448 bp, Serratia marcescens
atgagtaataacgtcaggttgcaggtgctactcaaagccgttgaccaagcgagccgcccgtttaaaagcatccagacagcgagtaaatcgctgtctgcacaaatccgcgacacccggcaaaacctcaaagaactgaacgcacaggccgggcgcgtcgagggattccgaaaatcgagcgcgcagcttgccgtcaccggtcaggcgctggcaaaggccaagcaggaagccgccgcgctggcggtgcagtttaaaaataccgagaagccgacccgcgcacaggcgcaactgatggaggcggccaaacgctcggccgccgagttgcagctcaaatataacgggctgcgtcagtcggtgcagcgtcagcgtcaagagctggcgcaggccgggattaacacccgcaccctcgccgccgacgagcgccgcctgaaatcctccatcagtgagaccaccgcccagctcaaccgccagcgggagacgttgtcgcgcgtcagccagcagcaggcaaaactcagcgcagtgagccagcgctatcaggccggaaagcaactggcgggcagtgtggcgggcgcgggcgctgcgggagtcggtgcggcaaccgtgggcggttttgcggccaaaaagctcctgacgccggggtatgattttgcgcaaaaaaactccgagttacaggccgtgctcggcgtggcaaaagactcggctgacatggtggcgcttcgcacgcaggcgcgtcagcttggtgataacacggcggcgtcggcggatgacgctgccggggcgcaaatcatcattgccaaagcgggcggcgacaaagatgcgatcaccgccgcgacgccggtcacgctcaatatggcgctggccaaccgtaaaaccatggaggaaaacgccaccctgttgatgggggtgaaatccgcatttgggctggcaaacgaccaagtcgcgcacattggtgatgtgatttcgcagaccatgaataaaagcgctgccaacttcgaagggctcagcgacaccctgacctatgccgcgccggtggcgaaaaatgccggtatcagcgtcgaggaagcggcggccattgccggggcgctggcggatgccaaaatcaccggctctatggccggtacggggagccgcgcagtgattacccggttgcaggctcccatgggtaaggcgaatgatgcattgggcgagctgggcgtcaaaaccgccgaccgcaaaggcaatatgcggccgctattcaccatcctgaaggaaatgcaaaggagcttcgataaaaacaagctcggcaccgcccagcgcgcggagtacatgaaagtcatcttcggcgaagaagcgtcgtcggccgctgcggtgctgatgggggatgcagcttccggcaagcttgaccgtctgaccaagttgctccgggagtctgacggcaagactgaggagctggtcaaagtcatgcaggacaacctcggcggggatttgaaagagcttcagtccgcctatgaggccatcggcatcgacatgtatgaccaactggaaacgcctttccgtgagctgacaacccgcgcgacaaagttcctgctgaaaattgacctttggatcaaaaacaacaaagagcttgccgggacgctggccaaagtcgcgctcggtggccttgcgattgtcggcactctgggggcgattggcttggcatcgtggccggtcatcatggggattaacggcatcattgcggttgctggcgcgctggggacggcctttagcgtggcgggcggggccatcatggcggtgctcggcgcgctgacgtggccgattgtggcggtgggggcggccatcgtggccggtgcgctgctgatccgcaaatactggcagcctatcagcgcctttttcagcggcgttattgaggggcttatcagtgcatttgcgccggttggcgagttgttcaggccgctgaagccggtttttgactggctcggcgagaagctaaaggcggtctggcaatggttcaaagatttaatcgagccggtgaaatcaacgaaggagaccctcgacaactgtaaaaacgccgggctggcgtttggccgaggattggccgacgtgctgatgctgccgctcagggcattcaacaagctgcgtcagggcattgattgggtgctggaaaagcttggcgtcatcaatgctgaatccagcgacctcgacaagaaagcgcagaaggccaatgactacgccaacggggcgaacgggcgcgggtattccccgtcgggtggcttgctgacgggcggctatgtaccggttacggccgggggcgggaaatcttatgtggataacagcgtcaataatttccacgtcggcagtcagcaccccggcggagccagcgcggcggaaaccaagcggatgttgctggacgtggtggaagaacgggagcgcaagcgccgcgcggcgcaacgctcaaatatggcgatggattaa

SEQ ID NO: 430319 - DNA, 303 bp, Serratia marcescens
atgaaagacgaaaacatcatcgccgcaaccgaaaacccgaacgtcgtgaagctggatactcccgtcaagcgcggtgaaacctttatcgatacggtgacgctgaccaagcccaacgcaggcaccctgcgcggcgtcgggctggctgcgttggctaactctgaagtcgatgcgctgattaaggtgctgccgcgcatgacgtatccgcccctgaccgaaagtgaagtcgcggcgctggagctgcctgaccttgtggcgctggccgggaaggttatcggttttttggcaccgagttcggcacgctag

SEQ ID NO: 430320 - DNA, 519 bp, Serratia marcescens
atggcactcccgcgcaaactgaagtacctcaacctgtttaacgacggcctgagctatatgggcgtggtcagctctgtgaccctgccgaaactgacgcgcaagctggagaactatcgcggcggcggtatgaacggcgcggccccggttgatatggggttagacgacgatgccctcagcgttgagtggactatcggcggtttccccgatgaccagctctggtcgcagtacgccgccgccagtgctgcatctgtgccgcttcgcttttgcggttcttaccagcgcgatgacaccggcgatatggtcgccgttgagattgtgctgcgtggccgtcacaaagagtttgattttggcgaccagaaacagggcgaggacaccgagacaaaaatctcgacgcaatgcacctatttcaaactgaccgtcgacggcaaagagcacatcgaggtggacaccgtcaacatggttgaacgcgtgaacggcgtcgacatgctggcgcagcaccgtcgcaatatcgggctgtaa

SEQ ID NO: 430321 - DNA, 1170 bp, Serratia marcescens
atgggcgattatcatcacggtgtgcgcgtcgtcgaaattaatgacggcacgcgcgtcatctctaccgtatcgacggctgtcgtcggcatggtctgcaccggcaaagatgccgacccgaagcttttcccgctcaacaccccggtactgattaccgatgtgattgccgccgccggtaaggccgggaaatccggcacgctggctaaagcgttgtcagccattggtgaccagtgcaaaccggtgacggttgttgtgcgcgtcgaagagggcaaagatgcggcggaaaccacgtcaaacatcatcggcggcgcggacgaaaacggtcgttataccggcatgaaagccttgctcactgcgcaggccgtcaccggtgtgaaacctcgcattctgggcgtgccggggctggattcgctggaggtggcgacggcgctggccgggatttgccagcagttgcgcgcgttcggttatatcagcgcgtacggatgcaaaagcatttccgaggccatcgcctaccgcgacaatttcagtcagcgcgaactgatgctcatttggccggatttccttgcgtgggataccaccggcaacgtcagcaccacggctcatgccaccgctcgtgcgttggggctgcgtgccaaaatcgacacggaaaccggctggcataaaacgctttctaacgtcggcgtcaatggcgtaaccggcatttccgccagcgtgttctgggatttgcaggcacccggcaccgatgccgacctgctcaatgaggccggggtcaccacgctggtgcgtaaagatggttttcgcttctggggcaaccgctcttgctctgatgacccgctgttcctgttcgagaactacacccgcaccgcgcaggtattggctgacaccatggccgaggcgcacatgtgggcggtggataagccggtcaccgccacgcttatccgcgacattgtcgagggcatcaaagccaaattccgcgagctgaaatccaacggctacatcatcgatgcggattgctggtacgacgaatcggccaacgataaagagaccctgaaagccgggaaactgtatatcgattatgactataccccggttcccccactggaagacctgaccctgcgccagcgtatcaccgataaatatctggtgaatttggccgctggtgtcaacagctaa

SEQ ID NO: 430322 - DNA, 522 bp, Serratia marcescens
atgcaacacattaagaatttgaagagatacacgccggaagaattattcctcggcgagaacgtgatttatcttcaggatgataacggtattgactggtacgccgcgcaaaaattgttttcgccgggcaccgtaaaactggcttatgacgaaagcggcattatctgcgcgattaacagtgatgtgtcgatgctgtggccgattggcttatcggttattgagctgaacccaacgaaactgcctaagcgctgtctggctaatggtgagtgggtgtttgacggtaagaaggtgagccagcgcatctattccgctgaagaaaggatggcgagcgctgaagccagaaaaaatgaattgctggcgagcgcgggtaaggctgtcgcgccgcttcaggatgctgttgatttggatatggcgaccgaggcagaaaaagcactgttggcggactggaaaaaataccgcgtgacgctgaatcgccttgatatgtcagccccggaaattgactggccggtggcgccagccgcctaa

SEQ ID NO: 430323 - DNA, 2094 bp, Serratia marcescens
atgaacaaataccaagcgattattaccaccgccggggcggctaagattgccgccgccagcgcgggcggcacgcagttgaaaatcgtctctatggccgtcggcgacgggaacggcatgctgccgacgcccaatccggcgcaaacaaaactcgtcaacgagaagtaccgcgcggcgctcaacgggttgaccatcgataaggcgctgaaaaatcacattctggccgagatgattattccggcgaatattggcggcttctggctgcgtgaaatgggcctctatgacgaggccgggacgctgattgccgtcagcaacatggcggagagctacaagccgaagctggaagagggcagcggccgcacgcagacgctacgcatgatcctgattgtcagcagcaccgaggcgattcaggtaattgccggaggcgacaccgtgctggcgaccaaggattttgtggccgacgcgatcgccgcgcatgagaaaacccgcaatcacccggacgccagcaccacggcgaaggggctggtacagctgagcagcgcaacaaccagtactgacgaaacgaaagccagcacgcccaaagcgttaaaagcggtcaacgatgccagcatgaagaaggccgcgaacctctcagacctgaccgacaaggccgccgcgcgcggcaatttggcgttaggtacggccgcgacgaaaaacgtcggggtagagggcgggcaactgatggaggtcggcgcatttggactgggaagcggctcacgtcaccgggaagatgcgtattgcaatcaggctgaaatctaccgggttaatagttcgtcaaagaatacgccgggcggcgatgtttatggcgtgctgagtttgccctgcgacggtggcccgtcgggcgcgtatatggcggtacaaaacaacggcaacgcattctttggtcgatcgaatatccccagtaatggggtggtgtggtttcaggcttacacgacgaagtttaaaccgaccgcggcagacgttggcgcatggagtaaaacagagtccgatggccgatttgtaaaacagaccggcgacacgatgaaaggagcgttaactctgccgcgtatcgtattcccgaacgaaaataccgccaatgctgacgatgacttaaatcgcgaaaatggctttaccgttgagtcattggttgccactgccaataagggctatcccgtgccgggcggcatgggagtgttgtttaccgggaaagtgaacgagttccgcaatgtgcaatttgccttaggctccggcgacttggcgttttacttgcgctcgatgcgaaaagacagcgcggcttcgctccgctgggcgcgagtttatacgacggactacaaaccgacggcggctgacgttggcgcgctgacggatgcgcaggccgcccagaaatacgcgctccgttccatcaaggtgaacggtaagccgctgtccgctgatgtgaatttgttggccggtgacgtcaacgcatggaataaaaccgaagcagatggccgctatctggcgaagaccggcgggcagttaaccgggacgctaaagaccagcgcggagatccaatctacctacattgataattatcgcatggtcggcggcgggttcggttccttctggcgcaatgacggcaaccggctttacctgctgctgacaaaagaaaacgaccagtacggcacattcaacaacctgcgtccgttttctgtggatgtcagaaccggtgccgccgcctttgagtcgggtatgcatatcggcggtaactggcccgcgatcaccacgtcaagcgggacgacgtggcaccctgacggcaacgttcaaggcagttgttggggcggttatctcagcaactggcttaatcaaaatatctcggctgcgcaaaacaatgcgcagaattgggcgtatcagcatttggttcagggtgtgcgcatggccgggcgtacggttatcgcggataccggcgggcgcatcgatttaccgtcgggctgtgtttataccggcatgtccggctcaaactacaacccctcaatctggggcgcttactcagcggttcaggtgctgattaacggcatatgggcaacaattggaacggtgtaa

SEQ ID NO: 430324 - DNA, 534 bp, Serratia marcescens
atgactaaccgcctattgcctgttggttcctcagtgctggaagtcgctgccgctgccgcgtgtgccgagctggagcgcgtgcctgttcccctgcgtgacctgtggaatccgaaaacctgcccggtgcatctgctgccttatctggcgtgggcgttctctgtcgatagatgggatgaggcttggccggaggacgtgaagcggggcgtggtgtctgccgcgttctacatccaccggcacaagggcaccatcggtgccgtgcgccgcgtggtggagccgctcggctacctgattaacgtcattgaatggtttcacaccgacggcgtcgatccgcccggcaccttccggctcgatattggcgtacttgaaaccggcatcaccgaggaaatgtatcaggaaatggagcgcctgatcgccgacgccaagccgctgagccgccacctgatcggcctcaacattttgcaggacatccccggccggatttacaccggcgcggctgccatcgatggtgatgtcattaccgtttaccccggataa

SEQ ID NO: 430325 - DNA, 909 bp, Serratia marcescens
atggccactatcgatttaagccaactgcccgcgccgaacgtcgttgagccgctggactatgaaaccctgtttgctgagcgtaaagcgacgctgatttccctgtacccggccgaccagcaggaagctattgcccgaacgttggcgctcgaatcggagcctatcgtcaagctgcttcaggaaaatgcgtatcgggaggtattgctacgccagcgcgttaacgatgccgccaaagcggtgatgctggcgcacgccaccggcgaagaccttgaccagctcggcgcgaacttcaacacgccgcgactgttgattgccccggcggatgaaagcaccattccgccaacaccggcagttatggaagcggatgaagattaccgcctgcgcctgcaagacgcgttcgaggggatgagcacagcaggttcggccggttcctaccgttttcacgcccgctcggccgatggccgggtggctgatgtgacggcaatcagcccatcaccggctaacgtgaccgtcaccgtgttgtcacgggacggcgacggcagcgccagcgctgagctgttgcaggttgtccgcgacgcgttgaatgacgaggatgtgcgtcctgtcgccgatcgcgtcattgtgcaatcggccaaaattgccccgtatgccatcgaggccgttttatacctgtaccccggcccggaggttgcgccgatcctcactgcggcaaaacaacgtttacacaattatgtgctgaccatgcgccgcttaggtcgcagtatccggcgttccggcatcatcgcggcgctgaccgtggaaggcgttgaacgtgttgaagttgctcaaccggcctccgacatcgtgcttgataaaacgcaggcgggctactgcaccggcgtgaacatcacaccggggcgcgccgatgactaa

SEQ ID NO: 430326 - DNA, 351 bp, Serratia marcescens
atgaccgtgcgatatatcggcatgaaccgggacaccggccagaccctgacggacagagagcatatcagccagagcgttcgcgacatcctcattacccctgtcggctcccgagtgatgcggcgggaatatggctcgctgttgtctgccctgattgaccagccgcaaagcccggcggtgaacgggcaggtgatggccgcctgctacatggcaatcctcaaatgggagccgcgcatcaggctgtcgtccatcaccttcgagaagaccttcagcggtcagatgttcgttgacattaccggcgtacgccaaggcaccaccggcggcacattttcgttaaccgtcccactgagctga

SEQ ID NO: 430327 - DNA, 441 bp, Serratia marcescens
gtggtgttggcgctgggtggcgagctggataccgcctttgtgctgcctgctatcaactccgatgattttccggctccgtcggtgtcgccggaggcctatcacacccgcttttccggtggcgcggtcatcgaatacgagccagacaccggcgcactgagcgttaccggcattaaaacggccaatatcagtgcgcaagtggccgtcgaggtttctgcgccgaaggtgacgattatcgccagtcaaaaaattacgcttgatacgccggaggtggtctgtaccaacaagctgaccgccgacacgctggagctgaaaaagggcgggaaaatgtcggggaatatcgagcacggcggcggtacttttaaatccaacggcgtgcaggtggataaacacggtcacggtggtgtgcaacgcggcggagactggacggagggaacccaatga

SEQ ID NO: 430328 - DNA, 1581 bp, Serratia marcescens
atgctaacttcaatcggcgttaagaatcttaaaagcataaaaaacaaaacatcaattgaattaaaacccatcacagtgctgttaggaagaaatagtagcggtaaaagttcgatgattcgtttatttcctcttctaagacagtcatttcaagaagatactacgggaccaattttgtggtacggaaagtatgcagactatggtgattatcatgaggctttgacaaatgaagttgatggcaatattgagctaagcttcggtgtgtcactagatttatcttatagaaagaaaagtcacatgccggacttccccgcgctaaattttgtcgttgatttgaaacttgactcagtagatagaaaaactgttatgcgggaggtaagtttttctgttggggaaattaaaatttccattttacccacagaacaagataatgttgtcttgaagttaaaatctaaaaattattctgatgaaatccccctatcaatctatagctcagaagataagttcttcccaactgtatattttgaaggagtagataagaagcgtaaggacataaatgaacactggccgccttactatttcatagaaaatagcagcagaatgtacagcagagcaattggatttaagtcagaaattgcattaaatgagcttgtttgtgaaaaagccgcagatgttattaaggagtattttagtgcaagggcaaataaagaaaacatcattaaaggcttattggatattaagtcttatgctaaagatagactatattattcattgttagattctttttctgggcattctgttttccttaacaatcttaaaaataaacgcaacgaaatattagatgcaatccttccatttattttgttgaaaggctacaacgaaatagctgttatgctgaatagtaatcttgcagaaaactttctatctgttaaatatctttacccaatcagagcaactacggaacgttactatcgttttcaagatctacaagttgaagaaatggaccacacaggttcaaatgtagcaatgatactcaattcatttggtgaatctgagttacaatcattccagaaatggactcacgaaagtttgggctttatcgtttatgttcaagaagtgggctctcattatgctatcaagatcaaaacagataatgatgacaaagaacataatatcagtgatatgggattcggtttttctcaggtgttgccaattgtaatgtcaatctggttggagacaaggaataatagttcatccaaaggtaaaacttctatttttgtgattgagcaacctgagttacatcttcatccagcatatcagacgcagttggcatatctatttgcaaatactattaagctagcatctaaaactaaaaataatatacagattatttttgagacacatagccaggcaatgatagacgctttgggggactatattgagaatggggaaattgataaggatgatgtaaatattgttttttttgagaaaaatggttctgaaggaaccacagtcaaaacagcggaatttgatgaagacggttatttcattaattggccaattggctttttctcaggaaaatga

SEQ ID NO: 430329 - DNA, 1101 bp, Serratia marcescens
atgttattaaaattaataaatttccagaatgatctagaaggtaacgagcacctagaaatagctcttaccaatctctttaattcacatttagagaagaagcatataatttttgcgagcaaagagttgtttcaggttgttgtatcttcggatattttttccagaagagttagaaatctggctgagtatttattaactaattaccgagatttgcgttcaattctggataaagttagtacttatatagaggtcgatctaaatttacaacagattgacttgagcaaacaggaaggtatatctcgtaaattaggttatggtttttttattgatagtgaatcggtacaaagagccaattttctatgtgaagatttaatggactgtaatttttataaattcctaggtgatttttataaaagtgaagtttctgccaatggcctagtcataaatttagagttcagaaatggcggtggttctggcactaaaagaaattatgatgacttagttcgcaacaataaaatttgcttatgtattttagatagcgataaaaaacacccatatggagcaaaaggagctacatgtttagcattcaatggcgttgctgataaaaatttctcacatcatttcgttttagatatgcatgaagctgaatctctaatcccgatggacttaattagtcaggctctggaaagtggtaaaattaacagcgcccatgtgactgtctatgattcatttttaagaatattcgatgttgatgcaactgcgaaaaagtatttggatcataaaaagggattggaggtaaatgcagcagcagagatcgatgagagattaaatagggaatactggaaaagtatagtccctagagttaaaggaatccccaagaatagatgcgtaactcggtttgaatgtgaatgtcgagagccatgtaaagttgtaggggggtttggcgacaggctattagctcatattattgaagaattagaagaaacttctccacatagattgcgtagtttcatcaaagatgacctgtatgatgattggtttaacatcggcaaggaaatatttagttggggttgcgcttcaaataagcaagcaagaacatcttag

SEQ ID NO: 430330 - DNA, 450 bp, Serratia marcescens
gtgaatgagcttaagccttttgatgacaaactcgccgggttgattgcagggctatcggcttcccgccgtcgcgagatggcggccgagattgcgaagcggctgcgcatcagtcagcagcagcgcattaagcgccagcaggcaccggacggcacaccgtatgccgcccgtaagcggcagccgattcgtagcaaaaaagggcgggttaagcgcgagatgttcgctaagctgcgcacccatcgctacatgaaagccaaaggcaccgctgatgaggcgctggtcgagtttgccggacgcgtgcagcgtatcgcgcgcgtgcaccaagagggcttacgtgaccgcccgaaccgccatagccgggacgtgcagtatgacgcgcggccgttattgggctttggaaacgttgaccggcagattgtggaagatgttatcattttccgattgaaagggtaa

SEQ ID NO: 430331 - DNA, 468 bp, Serratia marcescens
atgttaaagccgaaaagtctgcgcaaagcgctttatgacgcggcgccgaagctcagggcgaacccggatatgctgcgcatatttatcgacagcggcgtcatcggggcaacgctggccgcctccctgtcatttgagaatcgctatacgctcaatgtgatagtcgaagattacccggatgatgtggatttgctgctggtgccgattggagcgtggttgcgggaaaatcagcccgatatcatgaccacggacgagggcaagaaaaatgggttcacctacttcgccgacatcaacagcgacgacagttatgacatcagtatcagcctgcaactgaccgagcgcacgctggtgaaagaggttgaccgggcgctgcacgtgtcccatgtgccggagccgccgctacctgagccggtagcgcgtccgatggagctttacattaacggtgagctggtgagcgcgtggggtgaatga

SEQ ID NO: 430332 - DNA, 438 bp, Serratia marcescens
atgagcagcggtagtaagctttttctggcgctggtgttgctggcggtcattgctttgttgaaatggcaggtcattacgctcggcgacaatctggatgccgcgaagctggaaaacgtcagggtggcggcagcgctaaccgaaagtcgcgcggctatcgctgcgctacaggatagcgctctgcgcaacgagcgcgaacaggtcatgttgcgccagcgcatcgccgccgctgaccagttggccacccgccgcaatcacaccattacgaggctgttcaatgaaaatgaagcgctgcgccgctggtatcagtctgctttgcctgatgacgttatccggctgcatacccgccccgacttcgccacccccgacgattatttacgctggctgtccgaaggtcagcagttgcccgctgcccggcagcaacccgaagaccaacggtga

SEQ ID NO: 430333 - DNA, 510 bp, Serratia marcescens
atgaaatcaatcgttaaacgttgcagtgtcggcgtcgtgctggcgctggcggcgttgttgccggaatttacccggttgcattcgtcactggcgggccttgagctgattgccaatctggaagggtgccgcctgagcccgtatcagtgtagtgcgggcgtctggacgagcggtatcggccataccgctggggtgaaacccggcggggttatcactgaacgtgaagcggcggttaatctggtggccgatgtcatgctggtcgagaaacgccttgcgcagtgtatgccggtgaccatgccgcagccggtctatgacgccgtggtcagctttgcgttcaacgttggcacgggcgctgcgtgcgcgtcaacgctggcgcatttcatcaataaaaagcagtggcctgccgcgtgcaatcagcttccccgctgggtattcgtcaacggcgtcaggtctgccgggctggagaatcgccgggcgcgcgagttggcgctgtgtatgtcgggggcattatga

SEQ ID NO: 430334 - DNA, 210 bp, Serratia marcescens
atggagaaagtcacatcgttcattgcttatgccgtcgcggtgctgctggcatgggtcggaaagtattccgcgcaggacatcgcactgattgtcggtgcggtggtcggcgtcggcacctttgtcaccaactggtactaccgccgcaaaagctatttgctgctgaaaaatgtcggcattcgacgggaggttttcgatgaaatcaatcgttaa

SEQ ID NO: 430335 - DNA, 204 bp, Serratia marcescens
atgaacgccgtcgcgcttcagggggacacgctcgacgcactgtgttatcgcgtctacggccgcaccgcaggcgtggtcgaggcggtgctgctggcgaatccggggctggctgagctgggtgtcatcctgccgcatggcacggtggtcacgctgccggtcattgataccgccccggcatccgaaaccgttcagctatgggattaa

SEQ ID NO: 430336 - DNA, 507 bp, Serratia marcescens
atgacgacagtgattgtccgtaacccgattaagccgccggacgagccgacggccattatcccgcaaccggctgtaccggagccggtgattaaaaacacgttctttttcccggatgttgacccgaaacgcattcgcgagctgatgcgtcttgagtacacggtctcgccggagcgtctgcgctttgccattcgcagcggtatctcggagacgaatgccgagctgtatctctatcgcgagcagcaactcgccgccggtttcaaaacgctggccgacgtaccggccgacgaggtcgacggcgaaagtgagaagtgctttcactacctgagtgcggtctgcgccatgacaaccgccacgctgtacgagcgctaccggggtgcggatgccagcgccaagggggacaaaaaggccgacagcgtcgaggtgtccattgatgagcactggcgggatatgcgctggtcaatcgcccggttgcagggtaagccgcgctgcattgtcgggcaaatctga

SEQ ID NO: 430337 - DNA, 744 bp, Serratia marcescens
atgacgagtcccgcacagcgtcacatgatgcgggtctcggccgtggaggctgcgcagcgggtggaggacccgctgcgccatgccaccgcctacgagcaaatgctcgtcaaactggccgcagaccgcaccaagctgaaacagatccattccgtcgagaaaaaggctgagcacaaacgcgccatgttgccgttctacgcgccttgggtggccggggtattggccgaagggcggggcgcgcaggacgacatcctgatgaccgtcatgcagtggatgctcgacgccgatgacattcccggcgcgctggaaattgcgccttatgcgctgaaataccgtctcaaagtgccgaacaacaagcgcccggtggcgtacttgctggccgaagaggtggcgctgtcggcggagcgcagccgcaaggcgggcaacccggccaagatggatgaccttcgcgctgccatcgagatgacggccgccgaggatatgcccgacatggtcaaggccaaactgttcaaggtgaccggcctgatgttgagcgactgcggtgactatgcgcaggcgctggagcacctcgagcgcgcgatgcagctcgacggtcacgccggggtgagaaaagagatccaaaaatgtgagagcgccctcaagccgaagccggcggccgccgccaaaagaacaaccacgcgcccgcgtaaggccgccacgccggccaagcgcggacgcccacgcaaggcggtaaaaaccgccggttaa

SEQ ID NO: 430338 - DNA, 1200 bp, Serratia marcescens
atgaaaaaaacgacccgctttaaatttaacgcctatctgcaacaggttgccaagctgaacggcatcacggacgtcggcgacgtcggcaaaaaattcagcgtagagccgtcggtgacgcagtcgttgatgaacgtcgtgcaggaatcttccgagttcctgacccgcatcaacatgacgccggttgccgagttgaaaggcgagaaggtcggcgtgggcgtcaatggctcgattgccagcaccaccgacaccgacggtggcaaagaacgtcagaccgctgatttcacctcgctggagtccaataagtacgagtgccagcaggtgaactttgatttccatatgcgctataaccagctcgatttatgggcgcgttatcagaacttccagttgcgtatccgcaacgccatcgccaagcgtcaggcgctggatttcatcatggccgggttcaacggtatcagccgcgccgccacgtctgaccgggccaaaaacccgatgttgcaggatgtggcggtgggctggttgcagaaataccgcagcgaagccccggcgcgcgtgatgagcaacatcaccggcgaggatggtgcggtgatttccccggtcatccgcatcggcaaggggggcgattacgccaaccttgacgccgtggtcatggacgcgaccaacaacctgattgcgccatggcatcaggaatctcctgaccttgtggtgatttgcggccgtaagctgctggccgacaaatacttcccgctggttaaccaagagcagccgaactccgaggcgatggccgccgacgtgattgtcagccagaagcgcatcggcaaccttcccgccgtgcgcgtgccgttcttcccggccaacgcgattatggtcaccacgctcgagaatctgtcgatttacatcatggatgagagtcaccgccgccatatcgaagagaacgctaagcgtgaccgcgtcgaaaactacgagtcgatgaaaattgactacgtcatcgaggactacgctgccggttgcctgattgaaaatatcgagctgctgcctgcgtcgacagaaaagtcggacgtacggggatccaaagaagacccgcagtcagcgggggccgatatcagcgccttggctgacgctatcgtgctggccgtgaaaggggcgaccgcgcaacctgcgtcagccggtgaggaaacgccaaaaactgaaggcgaggcgtaa

SEQ ID NO: 430339 - DNA, 846 bp, Serratia marcescens
atggcaaagaaagtatcgaaatggttccgcatcggcgtcgagggcgacacctgcgacggccgcgtgattgacggcaacgacattcaggagatgtcggaaatcttcgacccgcgcgtctacggctgccgcatcaatctggagcacatcaagggactgtttcccaacggcgattttaagcgtctcggcgacgtggtcgagctgaaagccgagaagattaatgacgactccatccttaacagcaaatgggcgctgttcgccaaaatgaccccgaccgacgagctggtctccatggtcaaggcgagccagaaagtttacacctccatggaaatccgtccgaactttgccaacaccggcaaatgctacctcatcggtctggcggttactgacgacccggccagcctcggcaccgaatacctcgaattctgttcccgcgccaaaactaacccgctggccggtaaaaaagccgagccgggcgatctgttctcggtggcgactgaggtgctgctcgagtttgaggaacagcctgacagcctgctgaccaatctgaccgagcgcgtgaaaagcatgttcagccgcaaacaggccagcgacgacgcgcgcttcagcgatgtgcatgacgcagtcaccgccgtcgccgagcaggtgcaaaccaacggcgacagcgccgagcagcgttttgcgcagcttgagcaggaaatcgcggggctgaaaggtgaggtgacgaccggtcaggaagcgctttccgagcttcaggccgcgctcgataccaccgaaaacctgaaccagcagcgccgcccgaaagcgcccggcggcaatggtgaagacaacctgttgaccaactgctga

SEQ ID NO: 430340 - DNA, 1773 bp, Serratia marcescens
atgcaaatccagacagacacatccttactcagcgacccacgcaggcaggccgcattgctgtactggcaaggcttctccgtgaagcaaatcgccgaaatgctgaagcaaaaatcgcccacggtgcagagctggaagcagcgggaaaaatgggacgatatcgcgccgatttcccgcgtcgaatccagcattgaagcgcgaatggtgcagctcgttctcaagacaaaaaaagagggcagcgactacaaagaaattgacctgctgggccgccagattgagcgcctcgcgcgcgtcagccgttacatgaactccggcaacgaagccgacctcaatcccaacgtcgccaaccgcaacaaaggcgagcgcaaaaagccgacaaagaactatttcagcgaggacgctattgcgaagctggaggagattttttatgccgagtctttcgaatatcaactcggctggcacaaggccgggcttgagcatcgtattcgcgacatcctgaaatcgcgccagattggagccacgttttatttttcccgcgagtcactgctgcatgcgctgaaaaccggccacaaccagatttttctttccgcgagcaaaacgcaggcgtatgtcttccgggagtacatcattcagtttgcgcggcgggttgacgttgagctgaccggcgacccgattgtgctcggcaacaacggcgcgaagctgatttttctcggcaccaactccaacaccgcgcaaagccataacggcgacctgctggtcgatgagattttctggatccccaacttccagaaactgcgcaaagtcgcctccggcatggcctcgcaaaaacaccttcggtcgacctacttttctaccccgtcaacgctgggacatggtgcgtttcctttctggtccggcgagctgtttaacaagggccgtaaaaacgccagcgaacacgtcgagatcgatatcagccacagcgcattagcggccgggaagctgtgcgatgacggccagtggcggcaaatcgtcaccattgaagacgccctgcgcggcgggtgtaacctgtttgacctcgacgtgctgaagcgggagaacagcgccgaggacttccgcaacctgtttatgtgcgaatttgtcgacgacagcgcgtcagtattcccctttgaggagttgcagagctgtatggtcgacagtctggtcgagtggacggacgttaacccctatgcaatccaaccgttcggtgaccggccggtgtgggtcggctatgacccggcgcactccggcgacagcgccggttgcgtggtgctggccccgccgatggtcaccggcggcaaattccgcatactggagcgccaccagtggaaaggcatggatttcgccacgcaggccgaatccatccgcaggctgaccgaaaaatacaacgtggaatacatcggtatcgacgccaccggcatcgggcaaggcgttttccaactggtgcgcgcgttctacccggccgcccgcgaaatccgctatagcgccgaggtgaagaccgccatggtactgaaggcgaaagacaccatcggcagcggcaggctcgagtacgacaccgcgtataccgacatcaccaaatcgtttatggccatccgcaaaaccatgaccgccagcggcaggggaatgacctacgaagcgagccgcagcgaagaagccagtcacgccgatgtcgcgtgggccaccatgcacgccctgttaaatgaaccgctgaccgccgccaacggccaaccgtctaaatccattctggacttcaaccgatga

SEQ ID NO: 430341 - DNA, 1032 bp, Serratia marcescens
atgagcaaacgcaatcgccgcaaggcaaaaggaaatctggccgccaccgaggcggaccagaaaatgcaggcgttcacctttggtgagccgtcggccgtattggatcgccgtgacattctggattacacggaatgcgtcggtaacggtaaatggattgagccgcccgtcagcttttccgggctggcaaaaagcctgcgcgccgccgtgcaccacagctcacccatttacgtgaagcgcaatattttagcgagcacctacatcccgcacccgctgctgtcacagcaggatttcagccggtttgtgctggattatctggtgttcggcaacgcctttttagaaaaacgcttcagtgtgaccggcaagctgttgaagctggagacctccccggccaaatacacccggcgtggcgttgacccgagcgtttactggttcgtgcaatcgttcgctgagccgcacccgttcgcgcccgacagcgtttttcacctgctggagccggatatcaatcaagagctgtatgggatgccggaatatctgtcggcgctcaactccgcgtggctgaatgagtccgccacgctgttccgccgcaagtattatcagaacggcgcacacgcgggctatatcatgtatgtcaccgacgcagcgcaaaacaataccgatgttgaggcgttgcgcgaagcgatgagcgactctaaaggcatggggaactttaaaaacctgttcttctacgcgccgaacgggaagcccgacggtatcaagattgtgccgctcagcgaggtggcgacaaaggataatttcttcaacatcaaaaaggtcagcgccgccgacctgctggacgcccaccgcatcccctaccagctgatgggcggcaagccggagaacgtcgggtcagtgggtgacgtggaaaaggccgcaaaggtgtttgtccgcaatgagctgacaccgctccagcagcgcatcaaagaagtgaatgactgggtcggcgtcgaggtcatccggtttaaaaagtacagcctcgacaacgacgacgaatga

SEQ ID NO: 430342 - DNA, 1425 bp, Serratia marcescens
atggcttcttcaaacgttaaaatcaaagcatttccagcaaagagattttttgttgaaatgcttactcgggatattgagctgtcggactccatcctagatttattagataactgtttggatggggttttgagaaaaaacaacctcaatcatgatcaaacatttggaaaatcagacatttactctggataccatgcacacattgagtttagcgaaaacagcttcaaaataatagataattgtggaggtattcctggagagttggctgaagaatacgctttccgattaggacgaccttcagaaagaaagcctgaagaacttcctaccattggtgtatatggaataggaatgaagcgagccatttttaaaatgggaacatcagctcaaatcttaagcaaaacagcaacagagcagttttcagtcactatatctcctgaatggatgactgatgacaataattggtcattagatctagaaaggaatgatgtcgacttagacgaaacaggcgtaagcattataataaataatttaagaaatgatatcaaagcttcactatcaaaagatcgtgactttgaaggcaccctgataaacatcattgccaatcactacagcttaataatcaagaaaggattcgaagttaaaatcaatggaaaaactgtaaaaccaaatagcacaactctgatttttgatgaggatgccattaaggataacgctgatggcatcgccccatatgtttatagaaacgatcttaatggcgtatctataaaagtagctgtcggtctttatcgtaatttacccagtgaagaagaagaagagagcttactttctggtcgttcaactacagaaaaagccggatggactattatatgtaatgatcgagtagttcttcatgcagacaaaacaaaacttactggatggggtgaagctggtgttcctcagtatcatactcagttcattggtatttctggtgttgttatatttacctcttcaaaagctgaattattacctattacgacaaccaaacgaggtgttgatggtaactcagagctatatttatctactaaagattttatgagggaaggtctcaagtttttcactgactttacctacaagtggaaaagtaataatgaagaaagaaaacaaataataaatacagcttcaagtatggtttctacaaccgaaacagacttcacaaaatcaattccacaagacaaatggtctccagtacgtcgctccatcggggggcaagttttcaagcccaaactcccaatacctcgcgaaacggatcctttgcgtcagataaaatttagccgcagacatagcgaaataaaattagtatcggaattcatttttgatgatgcaactcaaccaccaactgaagtcggtcaattttgttttgatgattttttaaaaaaggctaaacaatga

SEQ ID NO: 430343 - DNA, 993 bp, Serratia marcescens
atgagtacaggtggaaacatcccatatcatttaaggcaaaacaaagccattgaaaggaatctatttatagaatctttaagaaggctaaataactacacaaacatatctgaatatgtatacatcggatttggaggcccatttttggaggacttcaaacaggttcataatctgttaaaagtgaataagatgatatctattgaaggtgatgaaaacgtacatcgccgtcaacagtttaataaaccactgtcctgtatcaatctaggtcatcagccagaaatgagtggtgacttcattaaccgttataactttgatgataaaacgatcatctggttagattatgcaataccttctggtctaaactcccagttaaatgaagtagttaatttaattaccaaactaaaacccaaagatattttcaagattacattaaatgctcacccagaaacattaggaaaagatcctagtgaacgagaccctagaccatatagatatagaagaataaatgaaatattaacagaaagcttcatgcctacagacacaaccgaagaagatgttggattaaaaaaatatccaacactgcttatcaatgcattaagaagagccattggcaatggtttaaaaggacgacccgatataagggttcatcctctaacgtcttttgtctataaagatgggcaacaaatggtcactttaacagcaattgtcctagagaattcagatgaggaggaggctaaatttatcgactcttccagaataaggaattggccattttatgcaggagaatggcgtaaacctaaagatattaacgtgcctgcaatgtctttaaaggaaaggattcatatcgaatcactattacctgaagcaactgttgataacattcatgaagaactaggtttctatattggctccagcgtagatggagccaatatagatcttagtaattttattgaatactacaaggttgtaccatggtattcaaaagttcttgtctaa

SEQ ID NO: 430344 - DNA, 1116 bp, Serratia marcescens
ttgagcttgggggcaactcgagcagggtttaacttggctggcgcagttgagttagataagcatgctattttttcacatcagttaaattttcctcaatcaattcatttacataatgatgtgagtttacttacagcgaaagatattttatcagcttgtgccatcgatgaagttgattgcgtgattggtgggcctccttgccaaggattcagttctattggaaagggtaatgcagatgattcgagaaatgaactatacgtccatttttttagattggtgagtgagctagaaccaatttgttttctagcagaaaatgtcccgggaattatgaacgaaaaatataattctgtaagggataaggccttctcattagtcaatgaccgttattttttattgcatccaattaaggtgaatgcatcaaattacggcgcgccgaccacaagaaccagagttttttttattggttttaggaaagatttggttcacaaattgaaagagtctgattttttccctaagaatggaatagagcctactcttgtcaaagaagcattttacgggcttcctagtgtaataagagaagagtggcaagaagaggagcaaggttggcgcagcgtaaaaatggataggcaaggatatttttatgacaggctgtggggtcatgtacctgataagattggcgattctgagtctcttttaaatctgaaaaaaggattggtttctggctttctgggaacagttcataatgaggatatcattcagaggtacagggggctttcctttggtgaaaccgacaaaatatcgagatcaaagcgactggacccgaatggtttttgtccaacattaagagctgggactggtagtgataaaggtagctatcaagcggttaggccaattcaccctactcaggcacgagtcattacccctcgtgaagctgcaagattgcaaggttttcccgattggtttcgttttcaccctaccaaatggcatagttttaggcagataggtaatagcgttagcccactagttgctgaggctatgctattacctatttataattattgcttaaatgttagacaagaacttttgaataccatggtacaaccttgtagtattcaataa

SEQ ID NO: 430345 - DNA, 1788 bp, Serratia marcescens
atgaaccttaacgcctcgccatgctttatggctgaggtggataattatgcgtgtctgccgggtatgggagataaggatttgcggcgttttgctgaccgtatcgctgggcagttactacaaaattatgaccgttactgcgaggagtttcttgctgcaaatggcggagataattctttgctgctgagtaacagcctacaggctgtgttttatgggcgtatcgcatgtatggcgcgagtctttaatatcacgccaatgcactggaaaaaatactgtaaaggcaagctggacgcgcattcggctgtagccagtttgtcacggctagctaacgcggagtggtgggaacgccagttgaaagcgcaacgcacacgctggcgcgaggcgctactgattgccgccggtgaagtaaacctaaaaaaatacccatacgcgagcaagcaggcgattagggaagtgcaaacccggcggctcgccaatatggattatctgaaagggtgcgatctggagaatgtcgctaccggtgaacgttttgatctaattgataaggtcatggcgagcatttctaacccggaaatccgccgcaaagagctgatgagcaccatcgcagggatagaaaaatatgctgccagcgagagtcacgtcggcatgtttatcactatcactaccccttctaaatatcacccgacgcgcgttgttggcaaagaaggggctgaaaaagtccagtttaaccacaattgggattcagaggctttttcaccgaaagacggccagcgttatctggtgcgcatctggagcaaaatgcgcaccgcgtttaaagacaacggcctgagcgtttacggtatgcgtgtcgttgaacctcaccatgacggtacgccgcactggcatatgatgctgttctgcgagcgtaaacagcgccagcagataatcgacatcatgcgtcggtatgcgctgaaggaagacggtgacgagcgcggtgcagcaaagaatcggtttgaagccaagcacatgaataaaggcggcgctgcggggtacatcgctaaatacatcgctaaaaatatcgacggttatgcgctcgacggccaaattgaccacgataccggcaaaccgttacgcgatatggccgctgcggtgacctcatgggcgtcaacatggcgcatccctcagtttaagactatcggaatccctaccatgggagcttatcgagaatgccgggccgcctgtttacgccacatcagccttgctgaaacttttgatgagcgtgtcgaggctgtgcgcgcggctgccagcgctggaaattttgccgcctatatggctggacagggaggcgcaaatgtcccgcgcgacgtgcagaccgttcgagttgcgcgcaaggtggccgatgagctaaacgcttatgacgaagaggtgcaaaaggttgtcggcatttttgcgccgcaccttggcgtgggtcatatccacgaaacccggacaacagagtggcgtattgtccgcaaggccgttgaccttgacgttgatcctttgactttaaaaagcgcctctggcgcgcctcggagtcctgtcaataactgtggggcggttcagcgagaaccagacgcagttaggcaagatacgccgcctgagtacgtcactgcggtgattaacttgatagagattgatgcggtaagctgggacgatgctgacgtcgccaaagcaattagagacgcgataaagtgggggatggcaaggcaaagcgcaccgatcgtattaagcccagcgataagttgtgccgtcggcacgtttaacaccagatga

SEQ ID NO: 430346 - DNA, 594 bp, Serratia marcescens
atggaagacaagcagacgttaagttacaggggttcagcgggatactatgctgacaacctgaaattccttgaagatatagatacaaagccaaagtcatttattctggctcctgcacatcgtttgattgagatttgcgaagttctttgtcagtgcgcaccgcttcgagtaaaagagcgctggcctttatcaaaaaaagatcgaagaaatcttgctcttcagatggagtggaatctccccaaagctcccccaccgcgcgagcaatggaaagaagcaattcagacctcattaaaaatcgtgtatcaacaaatgccgaagccccaaagatttgaatgggaaaagacgggctatctggcagagctagagacagatattcatgttgctgctgattgcacacttcagacggtacgttttttttgcaatgataagattcatttgccgctaaacacctctgtttttcttgcgtcaccaaattggaatgaatttgtgtcttcgctaattgctggagacttgtatcctgcttgggttgctcctgtcgattcagcaaaaacgccggggtgtattcaggggcaatttccacgctacatgcctcggtaa

SEQ ID NO: 430347 - DNA, 291 bp, Serratia marcescens
atgctgcgtattcctgtcggcaaggattgggttatcaccagtgacgtccatcagttcattttgaacaaaaagaagcttgttaaaaccggtggcaaggcgggagaggagtggctcgacgcagttggttattacccgactgtctctcagttggtttccgggctagtgcattaccacgttcgtgactcaaccatcatcagtattgcagatctggcctctgagattcatcaggttagtaagttctgccaagaagctttctgcattcactgtgaggagaaaggaaatggtatctaa

SEQ ID NO: 430348 - DNA, 216 bp, Serratia marcescens
atgccggatttaatggacttggtgcagcagcgccagcaggaaactctcgccgcacaagttaatgctgcgcgcatcaagggcggggtgtcagcgtcaatttgtgaagagtgtgaccaagctatccccgcagcacgccgtgcagcctttgctggtgtgatccgttgcgtgtcatgccagaccatccacgaacaacaaaccaagcatttcagggggtaa

SEQ ID NO: 430349 - DNA, 300 bp, Serratia marcescens
atggttgagcgggagtatgtggaaattaataacgtattcgccatcgtgaaaatggaagagggcgattttattctggccgaagtaaaaatagataaagagacaaaagaaaaatattacccgacccgagctatctactcgaatgagttaaagctggttgctgaccttattaatctgtcggtaaagcgcggtgtttttcttaaaaccattaccagtcttagcgagctgatgaaagagtcacatcgcatcgcagaattagctcaacaggtactcaatcaactgaacagtgaatcggagcaataa

SEQ ID NO: 430350 - DNA, 258 bp, Serratia marcescens
atgcacatgtataaaaccgttggccaagaaatgagaaataaggctgatgcggatttgcgtaacttcatgctgaacagcgctcgtacggaagcaaaggcagatgcggccgttagtttctcctcccaccttgaccgtttggcgactcatgcggcggttaatcatctctcatgtgtggaaatcatcgagctgttgcgtcaggagtcggagaaatttgaccatgaaggacgagcgcacaagcaggagttgaagcatggttga

SEQ ID NO: 430351 - DNA, 171 bp, Serratia marcescens
atgcaacaacctatctccattgttccgctgctgtggaaccaccagacggcgcgcaagactgatatcaccatcactcacggtaagggccggaaaggcatcatcatccgtacccgcccggtcaaccgctggatcttctccatcaaatcagcaatgcggggtttttcaaaatga

SEQ ID NO: 430352 - DNA, 276 bp, Serratia marcescens
atggaaaagcaagtagtaaggctttctgatgcattgccgtatcaagaatttgccaaagtcatcggcaaaaccccggaggctgtaaaaggaatgatcgataagggcaagttgccaacgattgagatgcgtaatcccgagacgccaacggcgcgcgcagagcattgggtttaccttcctgcgtggaacgcgggaatgaaattagcctatgagcgtcgcccgaaagaaattcgtgatgggtggcttctatggctaggactcggtgagccattttcttga

SEQ ID NO: 430353 - DNA, 984 bp, Serratia marcescens
atggcgattaagaagctcgaagatggtcgatatgaagtggacattaggccgaacgggcgcaacggaaagcgcatccgtcggaaatttgataggaaacatgaagcacaagcttttgagaagtacataaccgtcagctatcacgacaaagaatggctctcaaaacctacggataaaaggtcattatctgagctggttaaattgtggtggaagtaccatggcaagaacaatgaccacgggcagtcctacctacgaaaactggagcgcattacgcgaatgatggacaacccagccgcatttcagattgataaatctcgcattacagcttatcgatcggcgcggctagccgaaggcatcaaagcatccagcattaatcgcgaaatgaccgcgataagcgggatgtttaccgaccttgtcaactcggggctttactgtggtgagcatccgattcgtggcagcggcaagctcaaagaagccaatacggaaatgacttatcttgaccgtgatgagataggcgcattgctactggcgttagatggtgataaccgccgggtagccattttgtgtcttagtactggcgcacgttggggtgaggccatgaaactcaaagctgagcatgtcattcacaaccgcgtgacctttgtgcaaacgaaaaacggtaaacggcgcagtgtccccatttctcaggaagtatccgacgagatcgtatctcaaaagtctgggctattgtttcctcaagcctcttacagcactttcagagatatccttaaggcgaccaagcctaacctaccccatgggcaagcatcccattcgttacgccacacattcgcaactcatttcatgatgaacgggggcaatatcatcacgctccagcggatacttggccatgctcggattgaacagacaatgagctacgctcactttgcacctgattttctacaggatgcaatttcctataatccgctaggaggaaaaatccatgtttag

SEQ ID NO: 430354 - DNA, 1017 bp, Serratia marcescens
atgatgattaagatgaaaacgctggcggcgggagggctgttcgcgctgctggggctgtgttcgagcgcggcgcaagccacctgtacctttttatccggcagtgcgacggacggcgaatccatcaacttcggcgatgtgatcgtccagcgcgatgcgccggtgggcagcgtggtggcgtcgatttcttcaaattccctcagcagccgcggcaacttcgttcactgcgatgaatctgtggttcaaaccatgcgttggtcggcggaaggcaccaccaccgtcaggtataacggcgagcaactgtttagcgtagggatcacggggttggcgatgcgggtagtcacgcctggcggaggttatggcctgcgatttaccggggatttctctcgagacgctacttgggggggatgtgttgccgatacgccaacgacctggcggcggtattgcggtgcgtcctggggcggcgccactcgctttgaactggtgaaggtcgccaccaccaccggcagcggcaggttaacgattccggggcgcattcgggccagcatcgtgagccgaacctacgtttataacttcagctttggcgaatcgaatgtgaataccgtggcctgttcggtgaccaataccaccattcaggtgccgatgggaaatatcaaacgcagcgagtttaccggcgtgggatttagaactgcacctacttcgttttttattcccctgctttgtgatgccggtacccgtgtcaatatcacgattgatgcgacggctgacgcttctggtgtggcgggtgtgatggcgatcgatccggccagtatcggcatcgccgccagcggggtggggattgaagtgctggacaaccatggtgcgcctgtgcaattcggtacgcaaacgttgctcggcacctatccaggaaccggtggtcaagtatggtatccctttaccgcccgctattatcagactaacgctcgggtaatcgccggtcaggccaatggcactgccaccttcaccatgacctataactga

SEQ ID NO: 430355 - DNA, 2553 bp, Serratia marcescens
atggaaaaacagcaccgtaatcggatcacccgtcccgctgccgcaggtatcgagcgcagtcagagaacccgtctggcggtgatgatgccgtcgctgttggcgctgggttttgcggcgtcgaccgtacaggcgcgtgattactttaaccctgccgcgttggagctgggaaacagcgccgcctccgcgctcgaactggaacagttttcggtgcgcggcgggcaacttcccggcgtctaccgagtggatatttatctcaacggcaatcagatcgagacccgggatgtcacctttgttgaggtggcgggcaaactgcgaccggaactaacgccgacgcagcttgacgccatgggcgtgaaagtggacgctttcccggccttgcaacagttgccgcccgaactgccgctgaacgatctcggccactatatccccgatgccgacagtcagttcgacttcagccagcagcgtttgaacatcagcatcccgcaggcggcgctgaccagcgaggcgcgcggctatgttgatccggcacagtgggatcagggcatgccggcggcgttgctcaactacacgttcagcggcgccaatacccagcggcacaaaggcgccggcgccgaggacaattactacctcaacctgcgttctggcctgaatctgggcgcctggcggctgcgtaactattcgacctacaacgaaggcaacggtcagcggcattgggataacgtcaatacctacctgcagcgtgatattcaatcgctgaaagggcaactgacgctgggcgacagcgcgacgccaggcgatgtgttcggcagcgtacagttccgcggggcgcagttggcttccgatgacaacatgtatccagacagcctgagaggctttgcgccggtggtgcgtggcatcgcccagagcaacgcccaggtgaccgtgcgtcaaaacggctacatcatttaccagacctatgtttcgccaggtgcgtttgcgataaccgatctgtatccgaccgcctccagcggcgatttggaggtgaccattaccgaggccagcggcgccgagcgtcactttgtacagccgttcgccgccgtgccggtgatgctgcgcgaggggcggatgaaatacgccttcaccgccggggagtttcgttccggcaccgatgcggcgctgacgcccacctttggccagggaaccctgatctacggcctgccgcatgactccacggcctacggcggtctgctgttggccgaccgctacaatgcgcaggtgcttggggtcggacacggctttggcgtttggggctcgttgtcgatggatatcacgcaggcgaaaaccgagctgcgcgacggcagccgccacagcggccagtcttaccgcttccagtacgccaaagacgttgaggctaccaacaccactttcaccctggcgggctaccgctactcgacccgcggcttctatgacttccaggaggccaatgagttggggggggataacgaaaacgactggcggcagaactacaacaaacgcagccgggcgcagatcaacatcaaccaggccttcagggagtatggcagcctttcgctctcggcctaccagcaggactactggggagagggcggctatgagcgcagcctgagcgccggctacaacctgagttacgacggcatcgcctacgggctgaactacacctacagccagacgccgggcaacaaccccaatgaccagcaagtggcgttcaacgtgcaggtgccgctcagcaagtggttgcccaacagctgggccagttacagcctgaacagcagcaagcgaggcagcacggcgcagcagatagggctgaacggcactgcactggcggataacaacctgagctatagcctccagcagagctacggcaaccgcggcgacggcgccagcggcagtctcggcgccaactacaagggcacctatggcgaaatgcaggccgggtacagctacacccgcgactcgcggcagatcaactatggcctgcagggggggattgtggcgcatccttacggcgtgaccttctcgcagcagcaaggggatacgctggcattggtgcgggcgccgggcgcggcgggggcgaaagtgcagaacaataccggcgtgcgtaccgattggcgcggctacacggtggtgccttatgtcggcacctatcgcaagaaccgcatcgcgctggacacagaaacgctgggcggtgatgtggacatcgacaccaatacccagacggtgatcccaacccagggggcactggtgctggcggatttccaaactcgcgtaggcaaccgcgtgctgatgacgctgagctatcagggcaaaccggtgccgtttggggccattgccgcgctgcagcaggaggctggcgcactggagaacagcggcatcgtcgggccggatggccagctgtacctgagcggcgtgccggagcaggggcagctgcaggtgaagtggggcaatgccgccagccagcagtgtcaggttgcattcacgctaccgtcggcggaggccgccgccgcggtgctgccggttacggccgtgtgccggtaa

SEQ ID NO: 430356 - DNA, 684 bp, Serratia marcescens
gtgttaccaggggttaaatcgctttgccttgccgtgggtttgctgagcgccgcgcagtgtgtttgggccggcgtggtggtcggcggtacccgggttatttatgacggcgctaaaaaagaggccgctatttccgtcaataacccggaaaaaactgcaccgtacctgatccagtcctgggtagaaaatgccgcggggagcggcagcagcaagccgccgtttctgattacgccaccgttgttccgtctggatgccggccaggaaaacgtgctgcgtatcgttcgcaccggcgggaaactgccggatgatcgggaatcgctgtattggctgaatattaaatccattccttccaccgagcagtcggatcaaaaccgtttgctgatctcggttaagacgcgcatcaagctgatctatcggccttcagggttgagtggcaatgccgccgaagcctatcaaaagctcacgttcagccgccagggcaaccagctgcgggtgaataaccccacgccttattatgtggcgttctacagcgtcaaggttggcggtaaggagatcaaagaggtgggcaccgttgggcctaaaggctcactgagttggccgatgccggtcggggccggcgctcaggtgagctggcaggcgatcaacgattatggcggcatcacgccggcggccaatcaggcgttctag

SEQ ID NO: 430357 - DNA, 540 bp, Serratia marcescens
gtgaacaacatcatgatgaacaagacaactatcgcaatggttattctggcgggttccgcgtttgcttctgtggctcaggctgccgacggtaccattaacttcaccggtaatatcaccgatgccgcttgtacggtcagtgccggcaccaaaacccaaacggtaaatctgggcaccatcagtgcaagcagctttgacgcggcgggtgcggtctccggcgcttcccgtttcaacgtgacgctggaatcttgccctgcctctgcagccaccgcttcggttgttttcgatggccaggctgataccgccaacagcaccctgctggcgctgaccccgggcaccggtgtggcgaccggcgtcggtgtggggatctatgaagaagactccgtgacccaactgccggtcagcacccgctccgccagcaaggcgctgtccaccacggcaccaaccacctttacctacgttgccaaatacatggcgacagcggcgaccgtacaggccggtaccgctaatgccgtcagcgacttcactatctcttacaactaa

SEQ ID NO: 430358 - DNA, 609 bp, Serratia marcescens
gtggcaatggataagaaagagaaatgcatcgctattttagatagctgtcaatatacggtacaaggtattactttgctgtgcggaaaaataccgggttggcatattgccggggtggcgaagtcatactatgacctgctgcgattggttgaaagaaaacctatcgatatggtgatttgcggaataggcaaccactccgatgatttttctcggttgctgaatttgtcccgatacccgacgagaggtcgtattctgttaatggataaatcctctgcggtgttgagcaaaacgtttctggcggcggggttcgatgcggtggtcagcaaacaggtcgcattaaatgaattgattacgataatcgcgcgcatcttgttttcagaaaaagatgccgtggctgaatatggtgatgaacattgctatttgccacaggagcgagaggtattaagcgccttattgaaaggtgagcgtccttgcgatattgctagaacgatggggatttcttaccgtacggtcagtcgttataaattgagcggtttgcgccgtgctgggttgaatagcctgaatgaaatattggccagcaaaaaacattatgctatcggcaatactttatag

SEQ ID NO: 430359 - DNA, 627 bp, Serratia marcescens
atgaataatgtattgatcgtggacgatcatccggtcgctcggctggctgtcagaatgttgttggaaaaagacggcatggtgatcgtcggcgaaacggatgacggtcttgaggcgctgaagctcgcccggcaacttctccccgatctcattttggttgatatcgatattccctcactaaacggcattgatgtcgtgcaacgcctgcgcaataacgaattccggggcggcattctggtattgacgggcaaagatgacgaacactacatcaaacgctgcgccaccgccggtgccgacggttttatcagcaaacgcaataatctcaccgaacttcatgatgcggtgcgtgcgataagaggcggctacggttacttcccgctcaatcgggcgcgtctggaagcggcaaatgcggcgccgctggatgacaaaggcaagatcgcttcgctttccgccaaagagttgcaggtgctgcgtttaatggcgcggggcttaaaaatcatcgaaattgcgcagcaaatgcgcatcagcgataaaaccgtcagcacctataaacgccgactgatgcaaaagcttgagctgcaaaatatgctcgaactgtacgacttcactcaacgcaacaacctggactga

SEQ ID NO: 430360 - DNA, 3615 bp, Serratia marcescens
atgcgccatatgctgctttgcattttgttgttgctgtcaacgccgctgctcgcagagcctcatgccgaagccccccaaagcatgaagctgttcagccgcgaaaccgtcacgccgctcaatttcacgctcagcgacgacgactggcgttggctggggcaaaagcgcgaagtcaatatcgccacctacgcccccgaaaatccacctttcgccattattcccgaatcgggcaccttcgaaggcatctccgccgactatgccttgctggtattgcgctatctcggtctgagattccacgtactgcattatcctaatcgcaacgccgcgctggatggggtgcgcagcggcaaagtggatattttgctggatgacgacggcggcctgttgacgcagcaacctggcctgattaagagcatgccttatatgccggatcatccggcgctggtctcccgcgagacggccatgtccaagccaatgccggtgcttgccgaggcgcgcatcgcgctggtgcgcggatacctgagcgacgactgggtggcgaaccattaccccaatgcaaaaatcacccgctatccctcgccgcaaagcgccttgtcttcggtggcgttcagtgaaaacgactattttatcggcagtctgaccaccgccagttttttaatcgagcgcaactacgccaccacactgtccatcgcggacatcttcccgcaagaagataccggcccccgcttcgtttttcgcgaggcggacattccgctgcaacgttccgttgatgccgtgctgcagtcgatatcccccgttcaacacaaggtcatcttccgtcattggagccaaggccccaatctgtggctgtatcaatctcgcttgccgttaaccgaacgcgaacaacgctggctgtcgcaacacagcgaactgcgcgtagtcatcaacccgctgtatgcacctttcactttgtttgacacacaaaaacagtttcacggcatttcagcggacattttgcggctgatccatctacgcaccggcttgaattttaaggcggtggaatccgacaccatcggcgacatgttcgatttggtcaaacagcaacgcgcggattttatcgccgccatgagctacagcacgccgcgggataaacagctgctgtttacccgcccttacgtgttgccgcctttcgtcttggtcgtccgggatagcctgaccgctccgcacgccttaacggatcatctcaaaatcgccatcacccccgacaacgcgctgcggccatggctcaaagcgcaatatccatcgctgacgctgatcgatgccgaaaacgccagcgtagcgatgcaaatggtcaacgagggcaaagcggacggcgcggtgaacaacctgatcggtgcccgttacctgatcgatcgttattttcgcgggaaacttaagatcgctttccggttgggcgaacaccccgcacgcatcggttttgccgtggggcgcgatcaaccggagttatacagcatcctcaacaaagcgttagccgatattccaccgcgtgatatctcgatgatcgccaacaaatggcaaggcacgccggatgtcaaactggatacctgggcggtttatcagagtgagttttattggttggccggggttttcgccgtgttagtcatcacctcgctaatttggaattactatctgcatcgcgagattcgcctgcgcaaagaggcgcagaccaaactgcaagagcaggccacattccgggaaacgctgttcaacggcacgccggtgccggtttatgtggtcgatgccggcggcaacctgatcaactacaacccagcctgggcactgttttttaccggtgaaggcgaaagcctcagccgcttgccgttgaattccgccaaacatccgctggctgatattttccacgatattcgcccgctgcttaccgacaccgtgacaccggcgtcatcacctaaacactaccgggtctataacggcgtggaagagcgggtcattgttcatcaggcggtcacctatcaggatcataccggcgccgtggcggggctgatcggcagttggcaagacatcaccgaacatgaaacgttgctggccgcgctgtcgaatgcccgggaacgggcagagcaggccaacagaaccaaaagcaccttcctggcgaccatgagccacgaaatacgcacgccgatcagcgccattatcggtctgctggaattggcagtcactacgccggaacaacaacgtgcagaaacggaaaaagactccatccgcgtcgcctatgactccgccctgtcgttgatgggcctgatcggcgacattcttgacctggcaaaaatcgaatcaggcaaactggaattaacgccggaatgggtgcggatagacgatttggctctgcctgtcgttcacgtcttcgacggcctggccaggcaaaaaggcatcacgctcgaatgtcatatcgatgccttgcatcccgacgaagtgtatctcgacccgatgcgcctgcggcaaatattgtcaaatctggtgagcaacgccattaaattcaccgaccaaggcttagtgaacgtgcaaatccactgtttgccggagaatgaaaaccaagcgatgctgacgcttatcgtcaccgataccggcgtcggtatcgcgcccgaagagcaagccaccattttcgcgccctatgtgcaatccgaggccggtaagcatcagcagggtaccggtttggggctggcgatctgtgcacaattggtgtcaatgatgcagggcaccatcgatttacacagccaacccgaacgcggtacgcgaattaccgtctgcattccggtagagcaccgccaacatctgtcgattgtcgccagcgaacgagaagtcatcaccagcaccgaacaaccgctgtgtatcctggcggttgacgatcacccggcgaatcggcttttgctcacccgccagctttcccgcctgggtcaccaggtcattgaagcggaaaacgggcggcaagcgctggagctttggctgactcagcccatcgatctggtgatcaccgactgcaatatgcccgttatggacggactcgaactcacccgccagcttcgccaacgacagaggaaaccgctcatcatcctgggcttgacggccaatgcgcaaccggaagaacgcgtgcgttgcattgccgccggcatggacgactgtttgttcaaaccgttgcgtttatcgcagttggatgcgctattaaaacggctcccaaggcagtctgccgaatgggggaaggaaagccgcgttaccctgcaggaattggtcgacctgcccgcgttggagggcctggcgcagcaggataaaacgctgttgcgtcatctgctgcttgctactcgcgaagaaaatgcgcgtgacatgcaacatagccgtcagttgctcgatgaggagaattggcagggattggctcgcagcctgcaccgcctggccggtgcgacccaaatcgtcggcgccgccgaagcggaaaatcattgccgcagtttggagcagtattgtgaaaataccgccgccccggataaagaacaggttgcgcaaaaattgcacctggccctctccgcgcttcagcgcctgaatcaggcgattgacgactttaccgcagagtga

SEQ ID NO: 430361 - DNA, 963 bp, Serratia marcescens
atgtcattaaccaagatagggattgtcgtttttgatggcatcattccctttcatctttccgtgccctgtgccgtattcgaaaaagcccttaatccgcaaggtatgccttattatcagatggcggtttgcgccgctcagccaggaccattaagaacgaacgccggtttttccattatcgcggagcatgatttatcggtgttggatgacgccgatatcgtcattatccccagttgggtcgaccccaccgtcatgccgcctgcggaattaatctcggccctgcagcgcgcccattcgcgcggcgcaaaagtggtcgggttgtgtatgggggcgttcgttttggctgagagcgggatgttgcatggtcgtcccgcgacaacccattggaattggatgccgcattttatgcggcgttatccatccgtttctatcgatcgtgacgtgctgtatgtggacgatggcgatgtgatcacatcagccggtacggcggccagtattgactgttgcctgcatttggtcaggcagcaatgcggcgccgaagtcgccaatagggtggcccgccaattagtcgtgccgccgcatcgccagggggggcaagcgcagtttattgaacatgcggtatgcaatactcaggggggagaccgctttatgaaggcgttggattgggcggtcagcaatctgcaacttcctcataccgtcgaggctttggcggataaagcgtacatgagtcgtcgaacgtttacccggcgattccaacagtcgacggggacaaccctcacgcaatggctgttaagccaacggctggctctcgcccagcgattcctggaaaaaaccgaccaatcgattgaacaaattgccctggtggctggcttcagctctacgctttccatgcggcggcattttcaacagcaattcaaaacgtccccatcacgctatcgcaaagagtttcatctcaaggtgaagtag

SEQ ID NO: 430362 - DNA, 702 bp, Serratia marcescens
atgcgaaaaatgatcgcttacagtgcattggctttgtctatggcagcatatagcatgggttcacatggcgcaataaaacccgccgaccaggcgcctaccattcgcacgctgtccggtgcggaaaatacccggagtttagacaaaaacgccacggcgctgatcgttattgatttccaaaatgaatacttcgaggggaaaatgccgattcccgacgggagaaaggcattggacaacaccaaacgattgatcgactttgcacataaacatagcatgccggtctatttcgtccgtcatattggcccggcaaatggcgccttatttgctgaaaacagcaggttcgccgaatttcacccggcattgcaacccacacgcgctgattatgtcgtcacaaaaacaacgccgagttcatttgtcggcaccgatcttgacaaacagctcaaacaacgcggcatcaaacaactgattgtcaccggattaatgacgcatatgtgcgtgtcttccaccgcgcgcgacgctgtgccattagggtataacgtgatcattcccgaagacgctaccgctacgcgcgatctggctacctgggacaataaagtggtcgatcatagaacattgcagcaggccgcccttgccggcgtcgccgacgtttttgctgaaatcaaaaccacacagcaagttctggcgctgcctgtcgtaggcaattaa

SEQ ID NO: 430363 - DNA, 474 bp, Serratia marcescens
atgaaaaaccgcgcaatgctttttattttactctccgctatcgcggccggcgccggcgcaaaatcgctatcaacgccgtcactttctctctcgcaagccactcagctggccaatacggcgatcaaagcgtgcgccgctaaaggttataacgtcagcgtgaccgtagtagacgccgcaggcttgacccgcgccgttcaacgtatggataacgccgggcctcataccctcgaagccagctataaaaaagcctataccgccgcgtcaagcggtgtgatgaccagccaattgctggagacctcgcagaaatacccggcggcgcaaaacctctccgacattccgggtttcttgctactgggcggcggggtgccggtcaaagagaacgacaaagtcatcggcgccatcggcattggcggtgcacctagcggcagtgtcgatgaggcttgtgcattggaagccatcacgcaagcccgctga

SEQ ID NO: 430364 - DNA, 690 bp, Serratia marcescens
atgaaacatcactctcgcctgctcttgctgcccctgatttcattgggcgtatctgccgccatggcggccgaagatcccaagagcggttactacggcgcaatcaatgccatcgagacccgccagcaagcgcacaatatggatctcagcgagcgccccggcatcggttccttcgtcgccggcaacgagaagcaaaacttcctcaatggttcactggccgccggttatcaatacggcaacggctggcgaaccgagggagaatatgttttcaagaaaagcaatgagtacaccagcggctcatcgaccttcgctaccagcttcaaccacatgacaaccgattcgcagcgcctgatgctcaacgtttatcgtgacttcatgctcacggataaattcgccgtctacgccacggccggcgtcggcatcgccaaaatcgacgtcggcggttggcagggcaatgatactcgccacttcgccgacagcacacaaactaatttcacctattccctcggtgccggcgtgtcttatgaggtgctggagaatctgaccgcttatgccggttaccgttatgtcgatatgggcaatgtggagagcgggcgcaacacgttcgtcaacgcccgagggctacaggatgaaaacttgcgcgctcgcctgacgaacaatgaatacctgattggtatccgttatacgctgtaa

SEQ ID NO: 430365 - DNA, 417 bp, Serratia marcescens
atgaaaatagcgatcgggctggcaataggttttactctctcaccgttatctttccctaccctggccgaaacaatgaagaatccaatcagcattcacgttttaaacctccagtccggggaaccctcgatcgggatgacggtgctcctggagcggcaagaggggcagaactggctccgactctcttcacagaccaccgattctcaaggtcgcattgctgcactttacccgaaaaatgagatcgttaagccaggggtttataaagtcacgttcgaaacgcaagcgtatttcactcagtatcagcaaatttcattttatccagaagtccccgttatcattcatatcgaagacccaaacaggcattatcacataccgctgttagtcagccaatatggctattcaacctatcgtggcagttga

SEQ ID NO: 430366 - DNA, 276 bp, Serratia marcescens
atgatgaaaaataagatacttatgctaaaggctatcgccatttcctatttgattacgatggcaccggcatacgccacaccatccggaaacatcaccttttatggttccattacggagcccacctgtctttcgtcagtactgaatgaaaaattcaacgtggattgttccaagcgcagcgataaaccagagtcagtctgggaactcatcacccataccgaattggaatatcttggaaccaataaaaatctggcgatcgcccatatcgtctatcgctaa

SEQ ID NO: 430367 - DNA, 435 bp, Serratia marcescens
atgattatgctgagcaattcaaggttgtatgctttttcaccaggtgaacccctaacgttaccgctgtttgccgatcgcgtggcctgcggctttccttccccggcgcaggactatgtcgagagcaggctggacatcggcaagctgctggtgcggcaccccaacgccacttacttcgtgcgcgccagcggcgagtcgatgatcgacggcaatatccaggatggcgatctgctgatcgtcgacagcgccctgacgccggagcacggcaatatcgtgatcgccgcggtggacggcgaattcaccgtcaaaaagctgcagcgccaccccgacgtgcggctgttgccgatgaatcccgcctatgcgccgatcgtgttcgacgacgaggcgcagctggagatcttcggcgtggtgacctttatcgtctacgcggcgcggtaa

SEQ ID NO: 430368 - DNA, 618 bp, Serratia marcescens; identical to SEQ ID NO: 423278

SEQ ID NO: 430369 - DNA, 1917 bp, Serratia marcescens
atgaatacttgctccgatattgctacgttgcgaaaaactgtgcctgctatagcgggcgaattgattgaggttacttcttattattccgattggcatacgactaccggaattcccgaaggcggtggcgtatttaccgctgtgcaatctgccgtattcaatgatgatggaggcatttatatcaaatcggcagaaaactggacatgggtaagggtgcttgaagtgtctggtcttattacacctgcgatgtatggtgcgcgaggcgacaatgtgacggacgataccgagtcgctgacacgttgttttgtttctccctatagtgtcatttgtcgagcgggagccgtgtatttgacttcggatacggtaaacgttaaagatggcagaacggcgcgtaaaactatcaatttaaacggtgccacgatcaaagccaaaacggggcacgtaaaaccgatgtttgccaatgaaacgtcactgactggagcctacgattatcttcatggcgtagagatgtttggcggtaaattacttggcaatgctactcgcaatagcgtttataacgtggtgaaaagtcatgtgggttattccggcggagaaggaagttattttcaccatatgcaattaagtggattctgtgacggattcagtcttcaggggcgatcgctggcgcatgatattatcattgatgagtgccgtgatgacttttttgccacctacaatgacggtaacgtgatatcggatattacatgtggttattgccttggcgatggggtactgatcaaaggcaataataataatgtgacaaatatccgtatgttgggcgcaggtgtaccctctgataaacccgaggctggttaccttgccggtgcggttttaagtattgctcaggatggagaccttgggagcaataattttatttcgaacgtgcagtgtggtggatggggcagtggggtagttatctgctccggagggaataacagctgcgtcaatatcacagctggcgactgttattttctaaataatccgaccagtacagcaatcaaaaatcgtgcatgtgcggtctattcttcgggaacgaagcattcaatacgctctgtttctattggggcgtgcttgagcgggattgaattacatgatggctctgaagatacggtcatcgatgatatttcgttgcgttcctgttatcacagtttcgcgctgtccgccgccggtcagcaaagccgttgccgcattggtcgcatcgacattggaaaagtcgatagtgcggacagcttttttatcaaaatgccgcaattgatgattgacgagatcaatgtaggcgaattctcggccgcatacactgcgaacacggccatgtgccgtatcttggccaattgcgttattcgtcgtttgagttttaatcgaggactgcctgaagggacgctccccattgtgctgttggctgccgattgtgatatcgacgaattgattgtcaaagggactaaagcggtttgcttaacgacgacggcgacgacgattaatgttcctcgcaatttgaccattgaacaaagcgaagacgccattgattcacctgtaaaactattagggagcggtcgaagcgtggcggagcattggcgtattacaggaaagaataccgtgcggccagctttgcgtggtgccggggtgcaattgacccttgggcagtatagcgggttaccttggtatatcgatacaccagactcttcagccttatatatcggcaaacctgttggcggtagctatgaaagggctgtcaatgcggtggctcagggcggattttcgttgcatgaagggacggaacaggcagctcctgctgagttggcgatggcctgggatggaacacgtatgcatgttgcgctcaatggtctagacatcgggtttttaacgttgcaaaaatacgtttaa

SEQ ID NO: 430370 - DNA, 984 bp, Serratia marcescens
atgcgaaaaaattacgctccttgcgtattcttgagcgcgtttttgtttttattggtgagcgaggcgcaagccttcacctgtaaaaccagtgatggtggagtgattccggagggtggttccaatacgccagttccgctcagagtcaaaattggtcctaacttggttaatgggaaaaatgagctatccagtctcagtcaaatttcctgtaaaaatgagaactggagtgaggattggtgggatgtaatgaggctgaaaacagtgcttgttgtaaagcctgagttatccccttttactgttggtgtgaaattagcgtctagttattatgatataccaggaaatcggcttgatttagataagccggtgcttgctatgggcggcggacgatggtctccgtattaccaggttcccattggattatatattaaggtgggtaagaacccttcgcaggatgtttttatacagaaaggtgatgtattagtgcggttttatatggaacaaagtaacaatcagccgggctgccccctgtgtggcccctatatatgggatgtggttgctgataatgacgcctactttgctacgactagctgcaccatcaataaagccaaacagataaatgtcgattttgggccgatcagccaggacaacttcaccactagcgtggacagtgcagtgattaagcagaatcagaatctcgattattattgcgaaggctctaatgccagtcaggatatcgcggttcgtttagtcggcaatacaagtggattttcctctgaggcaattcaaacttcaaatgcgaacattggcattgccatgctgtataaaggtaaggtcataaagcccaatgaaatttttaattcaaaaattgtgaacggtatgggcagtgacacgttgaccttcgtaccgataaaaaagaacgttccttttaatgagataaatacggggccattttccggttctgcaacgttagtgttcagcgtaccttga

SEQ ID NO: 430371 - DNA, 255 bp, Serratia marcescens
gtgaacacaatgtttttgctgatggcagagtttgagacctcggatattcctctggagaaaatcgcggagaaatacctcggtatctcaatcgagttagccaacaagcgtgcaaacgccggtaagctgccgatcccgagcttccgggcggcagactcgaacaaagccccgcgcctggtgcatgtgaaggatttagcagactatcttgatcaacgcagggcagcagcgagggaggaatttaagcaggttaattcgtaa

SEQ ID NO: 430372 - DNA, 354 bp, Serratia marcescens
atggaaaaccgaattgaagtagaaagcctggtcaccattactgaccatctgaaagccctagctgaaatcaacgattcaatcgtcgaaatccgctatcagctcgattacgtgaaaggtgatgatggctggcgccgacgggcaggaatggcgctccgcaagtgcaaaagtattcggacggcgatacaggggcggctggccgtactgcgccaagaagagaaagagctgaacaaggaaatgaacaaaaggacgaatgactttctggtcaaggagttgaaaaagcatgtaccggaaagtgtcttcaaggcctgcaatattcaggcatgggcgatggctgcggaagaggtgatgaagtga

SEQ ID NO: 430373 - DNA, 243 bp, Serratia marcescens
atgagtgaattcactccggtaagcactgtggaagagctggctaagttgaacgacgaagagatcatcgagggctatcgttctggctacaaaggcgacccggagccagacagcaccaagtcaaagagcttttggcatggttaccgcaacggcctcgtcgattctgggcgctggaaaggtgacgaacaccagactgctttagcccgcgattgcatcgcacatggcatttttaaaccgcgacactaa

SEQ ID NO: 430374 - DNA, 309 bp, Serratia marcescens
atgtttctgcaaccgatggagtgggctcgcatggagtttaccccagacccaaaaacagtttgcagcttctgtcaggagcagccgccagccgaacagctgatcaccggccccggtgtcaatatctgctcagcatgtatcagcctctgcaacgaaatcactgcagagcgggaagagaaggaacgcacaaaggcgacagcgcagatcgttgagttgctgtccgaactacctgactcatggcagaaccacgacgcggccgtagccctatacgatgccggctatcgcaaagtgaacaccggggggggcagatga

SEQ ID NO: 430375 - DNA, 474 bp, Serratia marcescens
atgagcattcaaattgaccaaattcaactcgtggcggccattgccaaagagatcgaccgccagtccccgggcgccggcgtagaaagccgctgcttcaacacgatcatcctggcggcgaacagcatctgccaggagttcgctaaaccagtggtgaaggcatcggagggcatggggttgaccgcatggctcgccagcgacgacaccgggctaagcagccggttcatggcgtccaagctgaccggcatgttcgaggccgaatatgcctacccgcgtgacccggcagactttggccgctgcctgcgcctggtcgaagctgtgccggagctggaaagtaaaattcgtgacatgtcacagcatggcaaagagtgggcggtggttgccgcccattggtatgaatgggctgaggtgtaccgcgcagacgatgggaagcgactgtatcgcctgatgcggctttgctacgaaggaggtgtgtga

SEQ ID NO: 430376 - DNA, 270 bp, Serratia marcescens
atgaaggagttttttaaagttctcacctttatcggagtgacttccgtgtttgggcttctctttgcgctgctggttttaggcgccgctgcggaatcccgcgaatgggagaaattcaaggcagagcacaactgccgcgtcaccgggaaaatggctggcgacgtgaatgtgggttatggcgtatccaccagcggtaactcagtaacaactatcaacaccacgccggataaaaccggctggacatgtgacgacggcgtcacctactggaagtaa

SEQ ID NO: 430377 - DNA, 222 bp, Serratia marcescens
gtgaaaatcgactaccaagaccacggcgccaccgccagtatcacgctgaccagcacggtgtttgagttccgccggcataaccgcgtcgttgacacggcgctgtttctgaccagcgtcagcgcgcaccgtagcgggttgttcttcatgaaaaccgtgctatctggccgttctgcggcggtgctgaaggcatacaaggttgttctgcgggagatggcgcgatga

SEQ ID NO: 430378 - DNA, 126 bp, Serratia marcescens
atgaagaaggtatttgaactgattatgttcacgctgtttttctccagcctgacggggttcgggatggcggcaggactcttttcattcctcggcactgccgaactgatcgggagggttatctggtga

SEQ ID NO: 430379 - DNA, 360 bp, Serratia marcescens
atgatcggtactcagagcaaagtgatgaactacgacccgaactacacgctgtgtggacgcatggcaaagcaaaccgtccgcctgacgttcggccagtggaaataccgcacatcggtagacgtagttgtcggcggaaatagtaacgggttcagcgttattgagtgtgctatcggtgtcgcttatgagcaattgggcaccgtcccgttcttcaatgacgataccggtaaagatgacgagatggcggtgattaacatcggcaacctgcagtgtatggacgaatgcctggaaggcgaggattggctgaaagaaatgctgattggcgccgagattatcggcattgagccggagccagaccaatga

SEQ ID NO: 430380 - DNA, 831 bp, Serratia marcescens
atggaaaagcaaatgaaggtagtgaacggccagccactgatgggcagccgtagcatcgccaacgctgtagataaagagcacaaacaggtcgttcgcgatattaaaaccatgttggaacaacttggtatcgacagtacagatttacacgatgatgaatttaaaggatttttcatcgtatataaagaatataacggacgcactgtcgttgatgaaatctggcttgatgaaaccctgtcaacaactctcgttgccggttatgacgtgcatcggcgcctggcgctggtaaagcaatggcaggcgatgaaggttgagctggcacaaccacgtcttgccgcaccggccccggtacagcaggcgatctccgcatccgatcacattctgtcggtcgcccgcgtcgtagcagaggctaccgcgtccgcgacgatgaaagccgtgatggaactttccggcacgcaggtgtttgctgcgcaggctctgccaccagcatcacctgatccggcggcgcaggtatcggtagtcgccgctaaaccagttggcacaccgccagccccggaattctcaccagtcatcgatctgatgtgggcctttggcatctccgacgcagcatgccggcgcctggcaagttacgccaacctgccgaccaagctgaccaatggcgagcgcggccacctgctgatccaccattcctctttcgctgatgcggtattcaccctgatcgacgaatccacaccgccgacgggtaagcgaaaacgctggcagcacccagacttcggcggcttcacgctgaaggtcaccgaggccaacaaagccgccgtggaggccaaacaatga

SEQ ID NO: 430381 - DNA, 828 bp, Serratia marcescens
atgaaaaaagtaatcatggcctcaatcatcgccctgtcagctattggccttgtcggttgcgatcgcgttgagccgggtaacgttggcatcaaggtgaacaagctgggcgacgacaagggcgtcggggaagttgttggcgttggccgctactggactggctggaataccgaggtttacatcttccccaccttcaagcagatgaagacctacgaagacgccttcaacttccagatgagcgacggaacgacaatcggctaccacattggcgtcgcctacaaggttgatccgaccaaggtgacaaccattttccagacctaccgcaaaggcgttgacgacattaccaacaccgacctgcgccagaaaatcgccgatgcactgaaccgcctggctagccgcatgagcaccgaccgcttcatcgacggcggtaaggccgatctgcttaccaacgcactcaaggagctgcaggacgacatggggccgatcggcattcaggtagtcagcctgtcctgggtggggaaaccagaatacccgccgacagtaatcgacagcatcaacgccaaggtgaccgccaaccagaaaacgctgcagcgtgagcaggaagtgaagcaacgcgaggctgaggcaaacatgctgcgtgccgaagctgatggtcaggctgacgcgaagctgaagctggcggaagccgaagccaaatctatccgcatccgtggcgacgcactgcgccaaaacccggaggtcatgcagttggaggcgatcaacaaatggaacggcacgctgccgcagtacatgaccagtggcgccggcacaccattcatccaggtgaagtaa

SEQ ID NO: 430382 - DNA, 189 bp, Serratia marcescens
gtgagcctttatttccgaattgttctgtcgctggtgattgccgccagcgtttacggcctgtttgtcccggcgctcatatccatgaaagacacgatcgccgttatctccgggttggcattggcagttctgaccccgccatgcctgtacgccatttataagggtctgttctccattaaggataagaaatga

SEQ ID NO: 430383 - DNA, 198 bp, Serratia marcescens
atgaaaaccatgcagcttatcgatgcccaatgccgcatcgagcaggcgcagcagatcctcagtctgtggctggagtcctgcaacaacgataccgaccaggtagagcgcacgatggtctgcgcaatgatcaccctgctggatggcgtgcctgagtcgatccgcaccttcaacaacggcaccgctgcaggagggcaataa

SEQ ID NO: 430384 - DNA, 372 bp, Serratia marcescens
atgactcagtggattaacaatattgctttaaatcgtcggcgtatcgccctcgcctatatcgatttttgccagcgccatttcggcggcaaatggtctgacgtggttatttctaaaaagaaagtggtacgcgttgacctgacccaggaatgcgtcgaggcgctgatgcaggaattcatcgagaacatggttcgcgctgaattcggtatcgccggcggccaggagcagatcgccaagtcctacgacgcgatgctgagcaaagatcgtagccgccttacgccgctcggcaagtccgtgatggaggaggctttcatcgacgctgtggcttacaagctgaactacccgagcagccaactgctgcaggtggtggcgtga

SEQ ID NO: 430385 - DNA, 384 bp, Serratia marcescens
atgcgtaaagattttggaagtatcggcatcgataatgcgtttcagttaaaacaacagccagtttatgttgtgacacgccacggacgcagcaagaaaagttttagccgtgaaacagccattcgtcgcttggctcactttatggttcaaaaaacatttgaccgcgctggagtaccaactcatgaaggcggttatcagaaagaggaaggcggcgtaatccaatttcatcgcggcgaaataacacttggttattggcaagcgcatcatcgctgtgaaaggcgcattcgtaaattactggctcgcaagcgtgagaaggaaaagtggcaacgcgagtacgacgaatgggttagcaagcacgatgatttaatgaaacgccgtccgtattaa

SEQ ID NO: 430386 - DNA, 363 bp, Serratia marcescens
atgttgccagctaacatcaagccccaagagcaagcgcgcgccgcaaagggatcgcttctgcatgacaaagagggaatcctttacaaggagccggatgattttcaggccactgagttccctaacggcgagcccgaaacggctatccagtgcctggctcagaccaccagtcatgttaatcgttacgtaatgcaactgcatgagctgtatttaaagcttctcgctgcgggcgttcgtgaagccgatattcaggttgctggccggtttaactcattactgaacgagttgaatttacttaccggcattaacaaagaccgcgcagaatctctgatgaaaaaagaattatctcaggggggggggggctaa

SEQ ID NO: 430387 - DNA, 297 bp, Serratia marcescens
atgaaacataccatgcccgaagagaaaaaatcaaccaagcctgtattggttgaccgtaaaaagcttcaaagagcgcagcgtttaattaaggatgacctaacctcatggccttggaagctttgcatgcatatggcaaaggaagcttatgggttgaaatgtgatccaccgatgccggatgttggtgagcaaagcggatgctttatttgcacatattcaaataaagaaaccggagaatatgccttcacaaatgaaggacgcatttcaaaaattgaagggttcgaatatgttgccagctaa

SEQ ID NO: 430388 - DNA, 138 bp, Serratia marcescens
atgagtaaagaataccaaagtattaatttaggtcaattaaaaatactaaaatattttacgttgtttggtatcataatgaaaatgaagggaattaagtattatttaggcgagaaaaaaccggacaatgccggtttgtga

SEQ ID NO: 430389 - DNA, 714 bp, Serratia marcescens
atgagctcttcgacttttgctgaacgacttaaaaaggcaatggagtcagctggttatacccaggtagaactagccaatagaatcggcgtaactcaaggcgcaatacaaaagttggtgtccggtaaggcaaaatccaccaggaacattattggcatagctgaagctctaggggttagccctcattggctcagcagtggtgatggtgaaatgaggcatgatgaaagatcaagcataccgccaagacatgaatggcaaaaggtatccccatgggacagcagcacacctcttgatgatgatgaagtagaagtcccgtttcttcgggatattgagctggccgcaggcgatggtagctactgcgaggaagattataacggattcaagttacgcttttctaaagccactctaaggcgcgtcggggccaagaccgatggttcaggtgttctttgcttcccggcaagaggggatagcatggagccaaacatacccgatggaaccactgttgccgtaaatactgacgacaaaaaaatcgttgatggcaaagtatatgccattaacgaaaatggctggaaacgcatcaagttactctatcgcgttggccctgatcgtgtgagcattagaagttacaacaaagaagagcacccagacgaggatcggttgataaccgaggtagaggtcattggccgtgtcttctggtggtctgtcatttcatactaa

SEQ ID NO: 430390 - DNA, 519 bp, Serratia marcescens
atgagcagtgaaggcagcaacaaacaactcgattttctccgcctgttccgtcagggctgcaaacagatccgtggattgctccgtgataaccgcgctgctgctgatttgttcctgtacctcgctgagaacgctgacatgaacagcggcgcggtagcggttgaccaggccgtattagctcatgaactggattgctccgaccgccatgtgcgtagagcgattaaagcgctcgaggatggcggatttgttcgccgtgcaggcgccgccgttttcgctatcaacccggcaatcatttggggcggctacgacaatgcgatgcgctcatcgctctacatgacgatggacaaccggtcagcgaagaaagttcgttacgtattcaacccggcatctgaaaaccttgttcctacttacgtgggggtgacgccggttgaagaggataaaaacgcagaagacaagaagccgaacgggggtactttggcgagcgcttcccgtccggctcttgagggtgatactgatgcttaa

SEQ ID NO: 430391 - DNA, 1506 bp, Serratia marcescens
atgcttaatctgaaacctaaagcaaagcaagttacgggactgcagatgctgagccgtgactggaataactatcgcacattcctgttatccgcaccagttggctacgggaaaaccttcctgtccgcatacctggtggacaagatgatccagcagggcaagcgcacaatgtttgtggcgccatacctgaccctggtgaaacagactgcagctcgttttgtgcagtacggtttgccggaagacgaaatcagctatgtgtggcgcgactatcagccgcacgatccgaagcggctgattcagattgccagcgccgacacactgatccgccgtgaatttccaggcgatatcgatttgttgattatcgatgaggcccacatgaagcgtcgcgcgctgctcgacatcatccgggactcaggtatcaaagttatcgggctgtcaggcacaccgttcgcgtcgtggatgggaaaatattttgagtgttttatcaagcccaccactatgaaggaactgatcagcatcggcgacttgagcaggtatgaattttttgctccaacgaagcctgatatggctggcgttaaaaccggcaacctgtcggcgtttggtaacgactacaacgaagaccaggtagcagaaatcatgtgcggtgctgacctcgtcggcgatgtcgtgaaaaattggctgcagaacggtgaagatcgcccgaccatctgcttttgcgttaacaaatcacacgccaactacatcacgatggagtttctgcgtgccggggtcaatgccgaaatcatggttgcagagacgccggcagaagagcgccagatgaccattcaccgcttcgagcagggcgccacaaagataatcgtcaacgtcggcgtgctggtggcaggattcgacagtgacgttcgttgcatcatctacgcccgcccgacgaaatcagaaatccgctggctgcaatgccttggccgtgggctgcgcactgcgcctggtaaagatcactgcctcatcttcgaccactccggcagtgttcaccgcctgggctatcccgatgacatcgagtatgactacctgatcggcaaaaacgacggcatgaaggccgcgccacaatctgccaagcaggagaaagccgagaaactgccgaaggaatgcccacagtgccattacatgaagcgcgccggcgtctacgtctgccctaagtgtggtttcaaacccttaatgggggaggatgtcgaaaccgacgacagccgtgggctcaagcgtatggggcgcaaggccaaggcctacaacaaaaacgagaagcaggcatggtggagccagatcaaatactaccagcgccagcgcatcctgaaaggcaagccgctttctgatggctgggccgcccataccttcaaagacaagtttggcgaatggccgcgtggcttgagtgattttccaatggaaacgagccctgaggtatggaacttcatcaagtcgaaattcatcgcctatagcaaaacgaacgggagcgcccaatga

SEQ ID NO: 430392 - DNA, 966 bp, Serratia marcescens
atgagaacaacagaggcggtgaaaggccgttgggctgatgtgttcgaattctacggcttaccgccgatcactggtaaaaatcactttaaaggtgaatgccctgtatgtgggcgcaagggccgctatcgctgcgacgacaaggatggcgccggtacatggatttgcgtttgcgggtcaggcgatggctggaagctgctcgaactcactcagaaaaaagacttcgccacgatggccggagaaatcgacgcggtgatcggcaatgaataccagccagataccaagagcacggagcgaccgaaacccagggagagtcaaaaggtcagggaaagcgttatcgctaaatttggctcactggtggccctgcgtggcactggtgccgagctgtatctgcacgggagagggataaacaaactccctgccgaatgggtcaggttcaatgaagccgagaaaacgccctatggcgtcaagcaggctatgtgggcgctggcgacggatgacaaggccaaaccctgctacctgcatcgcacgtttcttgatggcgccaagaaggcgaacataccgacacaaaagcgcatgctctccctgcaggatgagagttatctcgactatgccggatcggtagcaatccgcatgcatcctgtagcgtcaacgctgggtatcgccgaaggcatcgaaacggctctgtcctgtcatcaaatttacaattgcaacacctgggctgttcttaattcgtcgctgatgaagaagtttcgcgcgccggcgggggtgaagcacctgattatttttgcagactgcgacgacaacggtgcagggcaggcggccgcgtttgagtgtggccaccgcaatatcctggcaaaaaacgatgttgagcgcgtcagcatccggtggccggaaaaaggcgacttcaatgacatgttgatgaatggcgccaaagtatatgaatggccgctgaggagggctgcatag

SEQ ID NO: 430393 - DNA, 186 bp, Serratia marcescens
gtgaatttaacccgcgaagacgagcacaccatcgcccaatacatccgcgcagcacatggcggttatacggggccggtggcgttgtggatgaagcgcctggaggaattacacatgcctttcagcaggctggtggttatgacggcgatgaggaaggcgaaacacgaatcgaagagggctgcacaatga

SEQ ID NO: 430394 - DNA, 783 bp, Serratia marcescens
atgaaacttgagtcggcattaaagcatttcagcgcgcaagggttgaccattaccgacgcgccgaatggcacctctgcggatcgtatcactggcactgacgtcatggccgctttggggcttgcggaatcaaaagcccgttttgggatggcggcgttcctgggtaaaacagggattagcagcgaagaccgcgaaagggccgttgcagagctgacccagtacgctatgcgcaaggccccgaagcatgtcgggaaagtcgccggccgccgcatggctcgctgcatgcaaattctggccgcgctggcctacgaagaatacgcgcactctgccggcgccagcgtgacctgtcacgattgtcacggcgaagggctggtggaggttgagcgtgacgtcgttacctaccctggttatatcggtatggatggcgaagagaaaatcccgccgacaacgaagcgccaggtggtgcgcgagttatgccagacctgtaacggcaaggggaaaatccataaacgctgccggaactgcaaggggacgggcaaggcgctcgatcgagtggcaaccaaagccagcggcgcgccggtcatcaaggcctgcgaacggtgtggcggaaaaggcttcagccgcatgccttcatctgtggcctacaaggcgattacagcgctcctccctgagctgacgcaatcatcatggtcacgtaactggaagccgttctatgaggcgctggtggcgaaatgcgacattgaggagggcgtggccgcgtccgtattcaacaaaataacaaagtga

SEQ ID NO: 430395 - DNA, 186 bp, Serratia marcescens
atgatgcattgccctgagtgccaatccgcagcgcacacccggtcgagtcgcatggttaccgagcaaaccaaagaacggtatcaccagtgccgcaacctggaatgcagttgcaccttcgtgacacacgaatcctatgcacgtatcgtggcgaagccgcaaaaagtggctgacgccagtaagcgctaa

SEQ ID NO: 430396 - DNA, 570 bp, Serratia marcescens
atgaaaaacctgcctaatgattattttctggatgccgacgatgagctggtcgattttctagaggcgcagggcgaggcgtgcatcaaggatatttaccagtcgaacgctgtgaataaagagaatgggtacaagctgctcagcattttgattgtgggtattggctcatcgtttttactgcttacgcagaggccgaatatagatttcctcagtgctggtcttgcggtatttatcctgtactggtcactctgcgcgctctacctggtaacgcaggttctaaccgttcacatgcgtgggctggtttatgcctcgccggatcagctttacactcaaaattacaagtctattaatcaacagcattttgattatttcaaaagcaatggatttagcggtgagtgtaatcgcctatcggtgatgaggcggtataggctgcatgcgctgtgcctaaccgccaatgaattagcaagcgacaacaagaaaataagagaaagactgacctgggcaaggatggcgaccatcattaccccggcttgcgctctctttatttccgcgcttacttaccttttttcctga

SEQ ID NO: 430397 - DNA, 261 bp, Serratia marcescens
atgacacgaatgctaatcagagcagccgatggagccgtgcacactggtagcgcagtgtcattcgtcctcggcatcattaattatttctcacagagcgaatggatcattctcggcgtcatcttcggcatgttctgctctgcgtttggtattgccctcggtacttacttccgctgccggcgcgagcggcttctgcgtgattggataaaaaaacgcactgagacgatcgacacggaagagcttgaaatgctggagcgtgagtga

SEQ ID NO: 430398 - DNA, 528 bp, Serratia marcescens
atggggaacaaatcaaaactcagcgctgtaatgttggcgctgatcgccgccggcgcatcggccccggtcatgatgtcgcagtttcaggaagagaaggaaggccagcgcctgactgcataccaggacggtgtcggcatctggacaatctgcggcggtgtcacgatggtcaacggcaagaaggttgcgaagggccagcgtctgagcgctgagcagtgcaagcagattgacgcagccgagcagaaaaaggcgctcgattgggtagaccgcaacgtcaaggtaacgctgaccgaaccgcaaaaagtcggtatcgcctcgttctgcccgtggaacatcggccctggcaagtgcttcacctccaccttttacaggaagctgaacgccggtgaccgcattggcgcatgccgcgaaatccgccgatggatatacgacgctggccgagattgtcgtattcgctcgaacaactgctatgggcagatattgcggcgcgatcaagaggccgagctggcttgctgggggctggataagtaa

SEQ ID NO: 430399 - DNA, 567 bp, Serratia marcescens
atgcaaacaatcacagtaccgttccacggcaatgctctgtatgtcgtcaatcacaatggcgagccatataccccgatgaagcccatcgtaaaaggcatgggtatggactggatggggcaattaaccaagctgagacaacgatttgcctcaaccatagaggaaatccctatggttgctgaagatggcaagcgccgaaaaatggtgtgcctcccactgcgaaagctcgccggttggctacagacaatcagtccgaacaaggtcaagcccgaaatccgcgacaacgtcatccagtaccaagacgagtgcgacgacgtgctctacgactactggacgaaaggcgcggcggtaaatcctcgtaagctgagtgttatggaggagcttaaccaggcttgcgccgacatgaagcgggataagcagatcgccagcgtgttcggtaccggcttgaatgcctggaaggaagttaaacctcagcacgaatcgaaaatcagcgcattggtaggccaaatcaacggtgtaatcgacctctggctggctgatacaggtaaggggaaggtcacgcgaacatga

SEQ ID NO: 430400 - DNA, 543 bp, Serratia marcescens
atgagcgtttcatttggcttcaacctccgcacgacggtgatctgtttactgctagtggcgctgattgttgccggcaggttggcgttttacttccacagcaacgcagtaaaggctggtgagcaggttaagcagttgcagagcgataacaacctacaaactgcgaccattgctacccaagcgcttcactttcagcgtgccaacgaaatcagcaacgtggcgaaccagtacggcatcaacaccgacgcggccacgcaggggaaagaaattgaataccggacgatcctcaagaatcagccgacgtgcgatcttgctgttcccgctgctattgctggtgggctgctcgactacacgcacagtctacgttcccgcgcaatgtcagccgataccatcgtcgctgacgcagccggtgttggcgccactgcctccggcaccctgacatactgccaggctgtactgtggattgatccgctgctggcggcgctcgacaaagcaaataaccaactgctggcgatacgccggctcgaagaagagagtagacgatga

SEQ ID NO: 430401 - DNA, 198 bp, Serratia marcescens
atgagcaaaattgtattgacccttgagcagattaaagagctggcgcgcttcgcagaagatgaaggccagccgtcctacaccattatcaccggccatgttccagcgtttgaggcagaggatggtgagatggttgcggagtacaacggcctgatcgcctactcggattcggaaaagcacagcgttctgcagttggaatga

SEQ ID NO: 430402 - DNA, 609 bp, Serratia marcescens
atgacgctgacagaagaacagaaggcgcttttcgatgccctgacgaagctgcaaaagaaattcgttacctgcctattgaatggcgaccgccaggcggatgcttaccgtaacgcgggagggaaagcgaagggagacggcgtccactcgaaagccgccgtgatggtaagaaatggtaacgtccaagccttcctcaagtccgtgcaatacgaagccatcaacgaggcgatcatgacacgcaccgaagcgctggagcgattgtcgaagatgggccgcacagctctgaccgatatcgcagagttcaaaaactgccagataggcgaggacgaagagggaaaaccggtttatcaagcatcctgggcatttcgcgattcggccttgcaagaccctgaagcgatggcggctgttgccgaactgacgacgggcaaggacggcatcaagttgaagatgcacgacccgaaggcagcgattaagcagctcggcgaaatgatgggctgggaagcgccgaagaaaaccgaactatccggccccggcggtggcgccatcaagaccgagaacaccaacatgtcaactgaagaggcggcagaggtctatcgtaagttgatggggtaa

SEQ ID NO: 430403 - DNA, 1623 bp, Serratia marcescens
atgcctattccgttcccgttcgacttcaaaaacccggattacacccaggtgttcgaatggcggatggagcgcctgcagcgcatcagggctaacccggaaacgctgccagctattcgagagttttaccgcaccaatccggcccagttcatcatcgactggggcatgacgaccgacccccgcaacatcgactacggcctgccggtgacaatcccgtttttgctgttcccaaaacaggaagagtggatccactggattatgacgcgccgggagaacatggagaacggcatcacggaaaagagccgcgagatgggactgagctggacggcgatcgggctggcttgctcgctgtgcctgttcaacaaagaaatggtgattgggttcggctcccgtaaagaggagtacgtagacagcactggcgatccgaaggcgctgttctggaaggcgcgcaaattcgttgaaacgctgccggtggagtttcgcggcagctggagcgaaaaaaaacacgccccctatatgcgcgttgaattccccgatacgggtgccgttatcaaaggcgaggctggcgataacattggacgcggcgaccgcaccacgctctatctggtggacgaggcggcattcttgcagcgccctttgctgatcgacgctgcgctgtcgcagacaacgcgctgccgtatcgatttgagttcggtcaacggcatggctaacccattcgcccagaagcgccacagcgggaaaatcccggtgttcacgttccactggcgcagcgatccacgaaaggacgatgcctggtatcgcaaggaatgcgacaagatcgataacccggtggtggtagcgcaagagctcgacctcaactacagcgcatccgccgagggtgtgcttatcccgtccgactgggtgcaggccgctgtcgatgcacatgtcaagctgggtattcagcctactggtaaacgcctcggcgcaatggacgttgcagacgaagggcgcgataaaaacgccttttcgacccgccacggtttcctgctggagaacgttcgcgagtggtcaggtgtcggcagcgacatctaccagtcggtcgagaaggtattcggattctgcgatgcggacaatatcgatgagtaccgtttcgacgaggacggcttgggggcgggtgttcgcggagacgctcgcgccatcaacgagctacgtaaagctgtccgccggccgatgattatggctaccccatttcgtggaagcggcgcggtattcgatcccgatgatgaggcggtgcgtggcgacaacggccagcaggcgcgactgaacaaagatttctttgccaacgccaaagcacagagctggtggcgtctgcgcaagttgttccaaaacacctaccgcgcggttgtcgaaaaaatgccgtacaaccccgacgaaatcatctccatcagcagcacgatggaaagcaaagacaaactcatcatcgaactttcacagccgacctactcaatcaacggggtgggaaaaatcgttgtggacaaacagcctgacggcaccaaatcgcccaacctggccgactcggtgatgatcagttacgcgccaatgaattcagccctgaatatctgggagctgttagggagacaggcctga

SEQ ID NO: 430404 - DNA, 1467 bp, Serratia marcescens
atggcacgaaataaacccacctcgaaacggacggcacaagccaccgctgacgggtacgagaactttgtcgcccgcgtggggatgcaaacccctaaccagcattcagcatcgacttaccgggcaaacttcaccagtcgcaaccgcatgatgattgagtggtcatatcgctcatcctgggtgattggtgaagccgtagacgccattcctgacgatatgacccgcaaaggtattcgcatcacctcagagattgacgcgaaagaccgtggcgttattgagtcgcaactggacaacatgcagatctgggatgcattgaatgacgtgctgaagtggtcgcggctttatggcggtgcggttggcttcatcatgatcgaggggcaggcgccgtttacgccactgcgcctggaaacgattggcgaaggcaagtttaaggggatcctcccacttgaccgctggatgattaacccggtgcttacacgtcgcattaaggagatggggccagacctcggaaagcccgaattctacgacgttgtgacgaccgccacgggcattccagcctggcgaatacatcacagccgcctgatcagattcgatggtgttacgctgccattccagcagaaaatgaccgaaaacgaatgggggatgtcagttgtagagcgtatctgggacaggctgaccgcattcgatagtgcgacggtaggcgctgcgcaactggtttacaaagcacacctgcgcacctacagcgtggagaagcttcgcgaactgatcgcgcttggcggccccgcgtttgaggcacttctgaaaaatatcgaccttatccgccagttccagagcaatgagggtatgaccctcatggataccaaggataagtttgaaacacaccagtacagcttcagcgggctggatgacgtcatttcacagtttgcagagcagatcagtggcgccgtcggcattccgctggtgcgcctgttcggtcagtcaccgaaaggtttctcaacgggtgacgctgaccttgcgaactactacgaccgcgtcagctccctgcaagagcgccgcctgcgcctgccgcttcggaaggtgctcgacatcatgcaccgctctgagctgggcaaggagcttccggaggacttcacctttgagtttaacccgctgtggcagatgtccgacgttgaccgctcaacagtggcggtgaacaccgtgacggccatcagcactgcgctaaatgacgggctgatgtcgccaaaggctgcgatgacggatttgcgcgaaaactcggacgttacgggtattggtgcatcgatcactgatgaggacatcgataatgcgcagtcgcagtatgaggagcctgaacttgaaaccggccctgcgccggcgttccgaaatccagtatcagaaaagcctactggggatagtcagtcagataaatcagatcgtaactggctcctacgatggttcccaggcaagcgctga

SEQ ID NO: 430405 - DNA, 549 bp, Serratia marcescens
atggtcggccagaaaatgttcctgcaggtggagcgtgaggagtggaaccagtggaaatcggtatcacagcagatttccgaggggcttcgggatgtggtcggcaatacgccgatcggccaggtgacacaggatattgtctaccggcaaatccagttgatgaagtccctgccgctggaagccgccgaccgtgttcgcgaaatccagcagcgcgctatacaggccaccattcacggcgaacgcccagatgcgctgtacgaaatgatcatgcagtccggtgatgtggcggccagtagggcgaagatgattgcccgcacggagatcggacgcgccacgggcgcactgacgcaggcccgtgcgctggcggttggttcagagggttattggtggcgcattgaaggcgctggcacgcgaccatcgcataaaaaaatgcgggataagttcgtgtactggcacaacccgccgacgctggacggaatgaccggtcacgccggttgcctgccgaattgcaaatgctggtctgaggttcacataccagggccgagaaagtga

SEQ ID NO: 430406 - DNA, 1233 bp, Serratia marcescens
atgaaatatttcttcaacacccaactgggcgaaactcgctatcaaatggctgatgggggcttgctttgcaaggacgtgccgatcgcccgaacaggtacgcaagtctactcagccaaagacctgccgaatctgaagccgaacacagcgggagaaatcatcgtcaggcgctcgccagaacaggtattcgatcctgctacgctggcgtcgtttgaagggatgagcatcacggtgctgcacccggaggacgaggaaggcaatgttcgtctgatcaatccgcagaactggaaagagctggcgcatggtcatatccagaacgttcggcgcggtacgggcgaccagtccgatctgatgctggccgacatcatcgtcaaagatgagaacgccatccagttgattgaggaaggtctgcggcaggtgtcatgcggctatgacgcagagtacgaacaaacggcccctggggcagctgaccaggtggatatcacaggaaaccatgtggctcttgttccaaaaggcagagccggaaatcgttgtgcaattggagacagagacacaatggcaactcaaaagaaaagctggctacagcgccttcgtttcgcccacaaaacaggtgacgcggacacgatgaacgaactgctggactctgctccggcagccgtgacagtggatgagggggatttgccaagcggcgtaaacctcaacatcaatctttcacctcagcaaccgctaccgaagaaagatccggagatgggcggtgagcctaccggcgacggcgaggacgatattaaaaccttgctgaaagcggtgctggcaaaactggaagggacgaccaccggcgataatgccgatgaccccgaaggcaaagataaaaaggagcctaccggcgacggcgaggacgacgaagaagaaaccacgattaccggtgattctgcttaccgtgcggaagtcatcgttcccggtatcgacctcagccgcaaggtgaagccaaccgcctttaaacgtgacgtgctggccgctgctgataaagcgctggttcgccaggtggtgggtgacgctgatatcagcaaactgccgaaacagtcggtaaatatggcgtttaacgccatctctgagattgcgaaaggtcgcaacacccgagaaatcacaggtgacgcgcagcgcctgaatcttggcccccaaaacatctccgccctgaacaagcagaacgccgaattctggtctaaccgaaaaggataa

SEQ ID NO: 430407 - DNA, 498 bp, Serratia marcescens
atgacttcatacctgtaccggatgcctgttggcattgccggggctatctctcgcccgcaggatttgaccgtagagccggtaatcctcaaatccgctaacgccttcccggcttatggcctggcggggaaaatcgacgcagacggcttctttgtgccgctggctgacggtgacactgcggacaaagtgaaaggcatctatgtgcggccttacccaaccacgtcgcaacctgacatggttcgccaggtaggcaccgacaagaacttccccggcgatgcaatgaagcgtggctacatgacggttaacgtgggctccgatgctagcaccatcaaaaagggcgcgccggtctacatcgtcgtttcccctgacgcttctatcgatgttcccctgggcggtttcatggcgacgctggttgccgacaaaaccgttcttctgcctaacgcagaattcactggcgccggcgatgccgacggcaacgctgaaatctcctggaagatttaa

SEQ ID NO: 430408 - DNA, 942 bp, Serratia marcescens
atgattacttttgatcaggcaaccgttgatagctccggtgcgtttctcatcggcgagctggaacgcctcgaccaaacgctgaacttgccgctggtgggctatacctggagccgtgatattcaactgcgcgaagatgtgtcgattgctgatgacatctccagctggacaaacaccagtttcggcgcagccggtactggtgcaaacccgaacggaaaaaactggatcggtaaagactccaccgccattgcgggtgtgaacgtcgatatcggtaaagacggcaacccactgaacctgtggggcatggagcttggctggacagttgttgaactggcggcagcgcagcaggtaggccgtccgatcgatagccagaaatatgagggcatgcagctcaagtggcagatggacaacgatgagcaggtttacatcggcgacgactctctggggctgaagggattgaccaacctggtcggcgttacgctgaacaacgcggcgaagacctgggcggcatccaccaatgacgaaattctggatagcgtgaacagcattttgtcgaatgcctgggcagcgtctggctattccgttgtgccttctgacctgcgtattccgcctgagcagtattctttgctggcgagccgcaaggtttccgaggcaggcaacatgtcactgctgagctatctctcggttaacaccattgcatatcatcagaacggcgtgccactggagatcaaggccgtcaaatggctgaagaaacgcggtgttggtggcaaggatcgcatggtggcttacaccaacgacaagaaatacgtccgctatccgctggttcctctgcagagcgtgcctattcagtatcgcggcctgtaccagatcgccacttactacgccaagctgggtgcggttgagccggtgtacaaagaaaccctgtcctacgtggacggcatctga

SEQ ID NO: 430409 - DNA, 399 bp, Serratia marcescens
atgacgaaagaaaagctggttacgatccacgtgcacaccccattcaaactcactcacgcggataactcggtgcaggagttcggcaaggggcgtcacaacgttcccgagtctgtggccgctcactggtttgtcgaagcgcacaccgaagctttgggcgatttcaccccgccaaatatcgacgaagccggcgcgcaacgcattgctgagctggaaggcaaggttaccgaactgcagcggcttctggagattgaaaaggacaaggtggtagagcaaaccgaacagctgcaggctgctgccggcggtctggttgagcgcaatgaacaaatcactgcacttaacgcgcaggtagcggatctgaccgcacgactggagaaatccaatggagcagccaagaaataa

SEQ ID NO: 430410 - DNA, 414 bp, Serratia marcescens
atggagcagccaagaaataagtcactgcccacgtctgcagactttcgccgcgacttcccgcaattcactgatgccgtcacctacccagaagcgcagattcagtttcgcctgaacctggctgacatcctgctgagcgagaaagtaactggcgccaaaatattcccctatctggtggagctatatgtggcccattacatggcgctctttgctcaggatcagcggtctgcagcggccggcggcgcgggaggtgcatccagcggtgtccagacatcaaaatcggttgataaggtcagcgtgagctatgacgcaagcgcgacgcttaaccctgatgctggattctggaataacacgcgctacggtgcggagttctggcaactgatcacgatgttcggggcaggcggccggcagctatga

SEQ ID NO: 430411 - DNA, 507 bp, Serratia marcescens
atgaaaagtggactcaaggtcaggaaggataacgccgactcggtgctgtcgtctttgcgctcgctatcaaaaatggatgtgctggtgggaattccagaggctaacgcaacgcgtgaagatggcgagagcctgaataacgcggagatcggctatctgcaatctaccggcgccacggtgcagcttggcggccaaaccgtcacgctaccaccgcgcccgtttctggatatgggtatcgaggacaccaagccgcgaaccactgagcatctgaaggccgcggccgtggctgcgctgaacggcaaaacggaggcggcgcagcgggagcttgaaagcgcagggcagattgcgcgggatggcgccaaggcggtcattggtgccggtgacaggcttcaccctctctccgagatgacgaaggctaaccggcgcgccaagggcattcccggtgacaagccgctctatgcgcatggctacctgctgcgctcaatcacttacgtggtaaggagtaaataa

SEQ ID NO: 430412 - DNA, 387 bp, Serratia marcescens
atgccgcttctcgacgtgaccgaggtgctgctggatcctgattttgtcgatacaacgttggtttgccaccggcagattcaagagcgtgacgacgacaacttcacgaccaacactcagcaggatgttcctttctctggtgtggtgaccgttgaccgctcactggaagcgcgccgcatggccgccggccagaacatcaacggcgccattctcatcgtgacgcaatttcggctcacacagggccagcctggccttgatgcggatgtcgtgacctatcgtggcaggaagtaccgcgtgacgtttgtagacccgtacacggcgtatggcgcggggttcgttcaggcacattgtgagctgatggagtttgacggaggatcacccgttgagtaa

SEQ ID NO: 430413 - DNA, 543 bp, Serratia marcescens
ttgagtaacgacagcacagcgcccggatacctgacaccggtcagtgatgggccaacctacgacgaagcgctggaacgccaggttagtcggtggatccgtggtgtcaccggtatggacaaagactacgtctatccgcgctggacagacccgcaaccgcagataccgaaaaacggcactacctggtgcgccttcggtattaccggcgtacaggaagacgccaaccccgcgtatatccagggcgctgaaaacgccgaacaatggtcgcacgaaaccatcgatattctggtgtgcttctatggcccgcagggaatgacggtagcaacccgtttccgtgatggcctgtttgtctcgcagaacaatgacgagctgaaaaacagcgatctgaccctgctcgactgtgggcggatattcaaccttccagaactcatcaacaaccagtgggtgcgccggtatgacatcgccgtgcgcctgcgtcgcaaagtgatccgcgagtacggcatcaagtcgctggtggaagcaccggttcaattcttcggagaataa

SEQ ID NO: 430414 - DNA, 1482 bp, Serratia marcescens
atgtcacagggcttacctgtatcgaacatcgtcaatgtgacggtgaatatggcgctgcgcgctgcacaggggcgcaacttcggcgcgctgctgatcgtcggtggctctgatgtcattgacggcagtcagcgtatgcgcagctattcgggcattaccgacgtcggcgcggatttcggcatggaggcgccggagtacaaggctgctaacctgtatttccagcagacgccgcagccacgcacgctgtacatcggtcgctggattaaagcagaccaggcggcgctgttgcgttgtgccattctgactccggcgcagcaggcgatcagcacctgggcttcggtcaccgatggcgcgatgaaaatcaccatcgacggcaccaacaagacgatcaccgctgtggacttctcggcagaaaccaacctgaacggcgtggccgcgcggatcgctgagaagctgtccacggctaacgtgacgtgggatgcagtgaacagccgattcatcattacctcaaaatcgaccggcgaagcgtcggcggtggggtatggttcggccaacactaccggcacggacatctcggcaatgatgggggcggtgcagaatgccggcgcactggctatcccgcgcgcagctgctgaaaatattcagtcctgcatctacaagctggccgacatgtctaccggctggtatggccttcagatcgccgacacatcgctgagcgatgacgacgtgatcagcgtggcagcctttatccagtccgatgacgtttctcgcatcttcggttacaccacgcaaaacactggcgtgctggatctggacaacgagaacgatatcgccagcaagctgaaaaacgccaagtacgggcgcactttcattcagtattccagcgcgagcccgtatgcctcggcgtccatcttcgggcgtgcgtttaccgtgaatttcctcggtaacaacaccacgatcacgctgaaattcaagcagcagcctggcattgcggcggaaactttgacccagacgcaggccaagacgctgacggcgaaaaactgcaacgtgttcgtcaactacgacaatgacacggcgatcattcaggaaggcctgatgtgcaacggcgatttcttcgacgagcgtcacggcctggactggctgcagaactacgtgcagaacaacctctataacgtgctctacaccagcacaaccaaagtgccacagaccgatccgggcatcacgcgcttgctgaccagcgtcaacggctcgcttgagcagggcgttactaacggcctgatggcgccgggtgtatggaatggcgacccaatcggcaacctggctaccggtgacacgctcacaacaggttattacacctacgcgccgcctatcgccagccaggcgcaggcagaccgagaggcacgcaaggcaccggtgatccagtgcgcaattaagctggccggcgctgttcatttcgccgacgtcatcatcaacgtaaatcgataa

SEQ ID NO: 430415 - DNA, 441 bp, Serratia marcescens
atgtctacttacagctttttggattattccgcctctattgtcggccccggtggtgcgttcgatctgggttatggctcgggcaacgccgaggaaggcatgaccgtcacaatggttgaagcgaagaacaccatgaccatcggcgccgacggatctgtgatgcacagcctacacgctggtaaaggtggcacgatcaccgtgacgttgctcaagaccgcaccgaccaatgccaagctgagcgcgatgtataacgcgcagtcgctgtcgtccgcctcatggggcaacaacgtgatcgtaatgcgtaacagcgccagcaatgacgtttgcacagcgcgctcggttgctttccagaaaatccccgactggcagaacgccaaagacggcgggactgtgtcctgggtatttgacgccggcttggtcgatcaactgctcggcaccttctaa

SEQ ID NO: 430416 - DNA, 444 bp, Serratia marcescens
atggaatttgaaattaagggccagcagtacagcgcggccaaacttgacgcgttcgcacaacaggatgtggctatcgcgttggcgccggttttatccggccttatccctttgctgaaagacgtcatggccggtaatgggacgtcgctgcaggaggataaaaaccgcctgtttgacgagatcattccgttggtggtgaaagccattggccaactgagccgtgaggggcgcgcggaaattaaccatgcgtgcctgtctgttgtaacccggcaacagggtaaggcgtggtcaaaaatctacgagccaagtcagcgcgtgatgatgttcgacgacatcaacggactggatctggtgaaaatcgtcggcaacgtggtgcgggactccctcggtgatttttttcccgcactccccgtgagcgacagcaacgtggccctgcaatcagtttag

SEQ ID NO: 430417 - DNA, 2010 bp, Serratia marcescens
atgaacgctgaaaccatcaaggacttcctgatctcgctggggttcgacatcgacgaggccggcggccgcaagttcgaatcggtggtttccggcgtcacgatgaatgcaatcaagatgggcgctgcagtcgaagcggccgcgctgaccgtcgtcggtttcacgaccaagatcgccagtggcctcgaccgtctttattggcaatctcagcgcaccggcgctacggcgaacaatatcagggctattgggtatgcattcagccaggccggcggcagcgttgaggggttcaatggcacgctggacaatatggcccgcttcttgcgttcaacgcctggcgcagaagggttcttgcgcaacctgggcattcagacgcgtgacgcggctggcaatctgcgtgacactgcccaactggtgacgctagtcggcgacaagctggcgaaaatgccttactaccgcgccaaccagtacgcgcagatcctcggcattgacgaaagcacgttgctggcaatgcggcgcggtgtgaagggattcacttctgattatcagagcatgctgcaggcgacagggttcgattcgcagaaagcggcggagcagtcgaacaagttcatgacccaaatgcgcgggctggcgaatctgttcggcatcatgcgcgacaaaatcggcggtaaccttgccggcggactggctggtaatctcgaaagcttccgcaaaaatattctcctcaatttccccaaaattgaggggacgatcaccgctgtgttgaaaaaggtgctttcgctggccgatagcatcatgacgctggtttatcggggcgtgcagggcgccggcgacctcatgaggtggtgggagcggctggatgatacaaccaaggggctgattaaggtgctgggcggcctgctcctggcctggcgcatgctgaataacgcgttcctcacttccccgatcggcatggtcacggcgctaattgctgcgctggtggcgctctatgacgattatcaggtctggaaagaaggcggcgacagcctgatcaactgggggaaatggaagcctgaaatcgatgccgcgatgaaggggataaaagagcttcgggattccatattcagcgtcgggcaggaaatcgccaagctactgaacatagacttgaaaagctggtcgttgaaaggtgacattgccgacttaacgaagcaattcggcgagttcggcaagatgatgacgatgatcggcgatctcatcaacgcgctgaaagacggaaactggagtgaggtcggcaggcttggcaaggcgttgattagccaggggcgggaaaaccccgatgcgctgcctgctgtcaccgacagtgcgaacagcgccgccgattgggtgaaggacaaaacaggcttcgacccgcgcagcgttgggcagtggatacgcggtcagttctcagggactaacgagccgcgcggtatccgcaacaacaatcccggcaacctgaactacgtcggccagaacggcgcgacgctggaagatcacgccacaccccgatttgctcgcttcaattccgcttttgaagggttcgctgcgctgggtaggcagatcaaggcgtactacaacggcacgtcaaaagctgcagggtatcagaagctgcaatctgtcgaggacatcatcagccgctttgcgcctgccagcgagaacaacacccaggcctatatcaacaagctgagcaaaatgctcggcgttggtcggggtgactcgctgaatattcaggatccgaaggtactggcaacgctgatgaatggcatcacgcagattgagaacggcaaaaacccatacgcccctgagatggtactgaaagccgcacaatcaacgctgacgacgaacgataaccgtaccagcaataccagcagcaataacccggtatacaacatcacagtgcatggcggcggggatccacacgaaacggcgcgccttaccggtgacgcggtagaaggcgtttaccgccggcagacacgtaacatgcaaacgcaggtgggctga

SEQ ID NO: 430418 - DNA, 597 bp, Serratia marcescens
atggatattttatctgtgctgttctcccagcagcggcgccgcatcggcatcatcgtgccgagcgtggcaatcagcgagaaacacatggacgcaacggaaatcaccgagcaccccgttgagcttggcgcaccgacaagcgaccatgcgtatgatcgccccgctgaggtgacgatggaactggggttttccagcggcggatcgctgatagacggaatcgacacgaccgagatttttaacgtcagtaccggtttatcgcttggcaccagcccggcggacgtctatcagcaactgctggagctgaaaaaaaacaaaaagccgtttgccgtgacgaccggtaagcgtcagtaccagaacatgatgatccgcgctatcgaggtgctgaccgacaaaaccagcgaaaacgtgctgatgacgacgctcaccctgcgcgagctcatcatcaccgaaacgcagaaagtgacgaccacgccggcggaaaacatgcaatcgccccaggacaccggcggcgtgagcaacactgggctgaaaaacccgaccacaccggaaaagcagcagagcattttaaagtctgcgggaggcttccttggcattggttga

SEQ ID NO: 430419 - DNA, 306 bp, Serratia marcescens
ttggcattggttgaaatccccttgacgccggtatcccagcaattcgctatccagctggctggcgtgcagtaccagcttacgctgatgtggcgcgacgtagctggatgggtgctggacattgccagcaacgacaagacgccgattatccaagggatcccgctggtggcaggtgctgacctgctggctcagtatcgttatctggggattggcggtcagttgttcgtgatgtccgatcccgccgtgctggcgccgccgacgcagaccaatctgggcattgagtcccatctctattttctgaccaactga

SEQ ID NO: 430420 - DNA, 945 bp, Serratia marcescens
atgaccactaactggatgcgaaagtgcagcctgatcgtggcgaacgatgccggggaagggctggaattatccggcctgaaaatcagcttcaatatcagcagacccgacatcagttaccccgccacggcgatgttcaaaatttacaacctaagccggaacaccaacagccggatcaggcagaacgagttcacgcagataaagtttgttgccggctaccaggataacttcggcctgattttttccgggcaaatccagtattcctacagcgggcgagaaaacccgaccgatacctacgtggtgatccaggcagccgacagtgaccaggcgcataactttgccgtgatgaacaccactctggcggccgggtacacgcagcaggacgttcacaccgcgctgatgaagccgatcggggtttatgacattgtcgccggtgctacgccggagtttgccaccaccaaggcgccacgcggtaaaccgatgttcggcatgcaccgggatgaagtttccagcctggcggcgcagtgtaaggcgacatggcgctatgagaacgggcgcctgcagatggtgccggaaaacgcctatcttgccgatgctatcgtgctgaacgcgcagacgggcctgatcggcatgcccgagcaaaccattaacggcggtatcaacgtgaaatgcctgattaacccgaatatccaactcgacacgctgatccgcctcgacaacaaatcgattaaccaggtcggcctgtccagccaagagatagccacaggcagcaccgcgggtgcctccgtacaacagccggcagtgctggacatggacggcgactatatcgtgaagaacatcgcttattacggcgacacgcgcggcaatgcctggtatcaggatatgatctgtattgccaagggcggcgcggggctgctgaaccaatccactatccgggcaggagcataa

SEQ ID NO: 430421 - DNA, 750 bp, Serratia marcescens
gtggtaacgaacaatgaacgccaggactcccccgaactggtgctgaaagccgtggccgattcgctcagcaccagcctacgggttgcaatgcctggcatcatccagtctttcgacgctggtgcgataaccgccacgatccaaccggccgtaaaagcttctgtgcggcaatctgacggctccttggcatcggtggcgctgccgctgctggtggatgttcctgtcgtgttcccgcgcggtggaggcgtcacgctgacgtttccagtggctgctggtgatgagtgccttgtcgtgttcgccgaccgctgcattgattactggtggcagaacggcggagtgcaggaacccgtagaccagcgacagcaccatcttgcagatgctttcgctctggtaggcccacagtcgcaagcgaagaaaatcagcggcatcagtaccaccaccgcacagttccgtagtgacgatggttcgacctatctggaaattgaccctgctacgaaaaaaatgaagattgttgcgcctggcggcctggaggttatcactccgcaggccgatttctctgaatcggtcaccatcaaagggctgctgagttggatgggtggcgtggtgggcagtatcgccagtggcaccgcagccaagataacgggcatggtggagtttgtcggagaggtattcgccaatggcaagcgtattgatgataagcacaagcatggcggtgtagaacgcgggggcggtcaaaccgatgaggtgagttga

SEQ ID NO: 430422 - DNA, 354 bp, Serratia marcescens
atgcgataccgtaaagaagacaagaacggcgattatactttcggccagggtgataacacctttttggagaacactccggaggcggtcgcacaggcggtgaaaacgcgctttgaactgtggacgggcgaatggtttctcgatgtgaccgacggcacaccgtatcgcgagacaatactcggcaagcacaaatcagccgcctacaacatggctgtgcgcgagcggatcctcggcacgcagggcgtgaccgaaatcctcgaattcaccacggaatataacccagatacgcgccgcgtgacgttcaccgcgaccatcaacacgctgtacggcgaaacgactgtaaccagcgaggcataa

SEQ ID NO: 430423 - DNA, 1188 bp, Serratia marcescens
atgctcaatctcgatacgttagggcttgcggccaaggtgaccgcgagcgggatcagcgcgcctgattatcagaccatactcaacacgctgaccggctatttccaacagatttacggtgacgacgtctatctggaaccagacagtaaagacggccagatgctggctatttatgcgctgggaattcatgacttgaacaacatggcgatcgccgtctataactcattcagcccggcaacggcgcagggccgcggtttggcctccaacgtgaaaattaacggcatcgcggtaacgccggcgtcgcgctccaccgcagacgtgcggatcgtgggacaagttggcacgctaatcaccaacggcacagtgcgtgatagcaacggcatcacctggtcattgccagctaatgttgtgatcggtattgatggctcggtcaccgtgaccgcgacatgccagattgacggcgccgtcgtggcgccagcaggtagtattaccgagatcggcaccccgacacgtggctggcagtcggtaaccaacccggcggcagcaacagctgggcgaaaagtggagacggatgcggaactgcgccagcgccagtcgaaatccgtggctatcccgtcgctgacggtactggatggcattatgggcgccgttgcgacgctggacggcgtagagcggtatcgtggctatgagaacgacaccagcgtagaagatgccaacggcttacctccgcacagcatttcgcttgtggttgccggcggtgacgcggcggcgatcgctaaaaccatcgccaccaagaaaacgccaggcggcggcacttacggcacgaccacgatcgacgttaccgataaatacggcattgtgcatccgatcagcttcttccgcccgaccagcgttgaaatttacgcgcgcgtagagattaaagcgctgcaaggctacacgtcggcggtcggcgaggaaatcagaacggctgtagcggcatacatcaacgaaattgagatcggtgatccggtatacctgacgcgtctgttccttcctgccaacctaaacggcagcgcagacagcgcaacattcgacataaccgacctgcagatcggcacttcgccgggtagcctggcgccggcaaacgtcattatcggctttaatgcggcggctgcctgttcgccggataatatcgtagtggtggtggtatga

SEQ ID NO: 430424 - DNA, 672 bp, Serratia marcescens
atgagtgaaacgaaataccaaaagctcatcacgtcctatcacaagcacaagccgaaattttacgaccatatctccctcattacccagcccctgatcgacgtgcagaacgccacagcgaagctgattgacgatttcgacctggatactgcaataggtgtgcaactggatgcagtcggcttatgggtgggtatagggcgaaaaattgcgacgccaatcaccggcgtttacttctcgcttgatgacgatgaattggggtttgatgctggcatttggcgcgggcgctatgacgccggcggatttaccgatctggacgatgacacctaccgaaccatcatccgagcgaaaatagcggccaaccactgggacggcacaaccgagacgctcagcgacgtctaccagattattttcccagacggaaaaacgaagattttcgccgtcgataacttcgacatgacgatgtcggtttacatcaccggcgaccgcattacaccggtcatgaaggcggttatcgagctgggctatctggacattaaaccgtcaaccgtccgcatcaagaattacaccattaccacagagtcagggccgctgttcggcttcgatatcgataatgaattcatctcaggcctcgataaaggcgcctggggaacactgctgggagcaaccaatgtctaa

SEQ ID NO: 430425 - DNA, 861 bp, Serratia marcescens
atgtctaagaatgagtttttacccttcggtacggcagcaaatgccaacgttttacccaatgctgactaccttgcgctgcccgcgcgcgcctctggcttcagttctggcgtggcaaagtcagaggagctaaatactgtatggcgacaggcgtcagtgatcgccagcgccatcgcgcaattcatcgctgacagcagcggaaatgacgtgcttgatgatggcgatttacagactctgcaaaacaacctgaaactggcattgaataaacaggcgacgggcaggctattaggaatcaaaactttctcggataatggctcatatagcccgacacctggcacaaagaaaattctggttaaagtgtggggcggtggtggtggtggtggcaacaccgatgttgctggcgcaggcggcccttctggttctggcggcgggtatgccgaaggactctttgaagtcccgacaagttctgtcagcgtaactgttggaactggaggtgctgaggtggctgccaatacggcagccagtggaggcgatggaggggcgagttcatttggttccctgatcaactgcggtggcggaactggagggactacagcatcaaacacaattcccggtggcagtgccactggtggtaacgtaatgaatagcccaggtcaaggtggtcaaggtggagtcgctggcctgggtgggactggtggtggttcgtttggttcgtttggcgggctgccgcacaactcatcaaatggagataatggcggttttcctggaggtggcggggctggtggaaccaagtcctcgtcaacgaaatattttgcctcgggccgtggtgcacccggttatgttatcataactgaatatgcataa

SEQ ID NO: 430426 - DNA, 951 bp, Serratia marcescens
atgactattaatttaaagcttacgttactaaccttttcattttttctctcttcttgtaatggctctgtcggcaatgacgatatcccgaaagttaaaggctcggtgtacaataatgagataggtaatttatgttggcctacccagctaactaaagaaggtggaaggcttataataactgactataagaacaatagattccttattaatgacggcacctcatggaaaagctcatctataggaatacatggtgctcactctctggccatggatagtaatggtaattttgttattgatgatacagaaaacaacagaataatcataacaaaacacatagataaaccatctagtgaagaatacatttattcagtaaacggtaaggctctcaacagacctcatgcggttgaaatttctgaaaatggttatatctatgtcatagactctttgcgactaattagaataagtagtgactataaaaaaattgatgagctttggtttaaggctggagatctagggtacgctcggtcattaaaaataattgatggcatactttatgtaataaattccagcagtggtaacttaataaaaatagaagacttcgacaaaggtgattataaaatcatcagcacatcaacccataaaataaatgacggagccggttcatatgaacgtacaggccccatcataaatgatgttgaaaaattcaacggttggttttatgccagtaattactttacttcatcatgggcgaaaggtactgatgcagagaaaaacaaactcatcaggtggaaaacttgggatgatttcgaaaatggaaacttccaagatttcagccacctactcccaagcgggcagttgccatactttatgaaaaatattaatggtgagttacttataactacattcaaccacgaaaatccatgtcataacgaaagtgcgattgttatcaaatga

SEQ ID NO: 430427 - DNA, 1977 bp, Serratia marcescens
atgtcatctgaagggctgccagttgatggcgtcgttggcacagacattgtgctgggatcccgcagcacgcaacaagcaacagacgaagccaagagcagcttgtctgcggacagcgctgctcagtcggctgatgcagcgtttaagtttagccgccaggcaaaaggggctgtatctgacgcagagggcttcgcagatagggcagaagcagcagccggtattgctttatcaggctctgatgcctatacgaacgcctcggaagcgcagcaggcgatagattcaggaaaagagacacgggattattttgccgtgtggtctaacaattatttttattgggtggataaatatttaaatgataatggtatcgccaagccaaccggtgagtcattatttgctgatggctttatcaacttactaaatgattttaatgtttcggttgggctcgggttgtcagggcaatggaaggcaaacgaaaacccattgaagacggttcttgtcgctgattccgctgaccgtgaaatcatttacagcgaccatgaagaaaaagcgctggtggcatacggtaaaaaattagcagaccagacgtcagtagataaccttggttctcagacctgggcatatcacggggcggataatgcaaaaattgtattactctctgacctaagtggccgtgatgtggtttatgccgacacgaatacgaaaacattatttgcattcggtcgagaggtcgggactgaagctgttaagccgtacaccccgccatcattcctaccagagctactcgatgagagaaattttgggcagagcctaagcatttatcttttgggttcgccaggtattacaacgccgactaacaacacgatcatgttcaacaccggcgtcgtgacctaccaaaaaaaccccgcgtcgtttgctgaattgccgacgccaacgactaatcagtatcagcagagccaggttcacgactttcagcaaaaagtcccggatgccagcaactgcaagtttttactggcatgctcaggtgtctccggtgcgccaatgtcagagattgagcctgggactatggcgtacatacagctcattatgacaatggagaccgcaaaatacctggcagataacgatggtatgcagtatggaatgataggcttcaacttccagcatggcgaggcggatgcctatcaaggcacagggtatgcttactaccggccgaaaatggcggtgatgcaatcgacgacgaatgggcacgcaaagcgtatatctaagctgccgcacgatgtgccgatgtttatctatcagatggcgtcgcacggtcgttataaagggctcgtaaatccgagttatgagatacctttagcccagcttgatgaggcgctcgaaaatcctctgattcaactggctacgccgatgtatatcttcgagtatgcagatggtgttcacctgaccgccgacggttatcggcaccgtgatcttttcttctcgaaagctcgtcgctattggttccagaacggcaagccgtggaaacctatgcatatgcagcacgtgtcccgctgcggcaccagcacgcttgtaggtgacgtgttcgtgccgaaaaaagggaagatgcagttcagcacttccacggtgagcgcagcaactgatggcatgtacggcctggagttgtggtcagaaagtcaatctggtgtgttgacgcggttacctattacagaagtgtcaacactgggtgatgccaagttgaaagtccggtcaggcgtcaatttcggtataaacgacaaaatctatctggcatatgcattcacgccagaaaaccaaggtgattacgatgggaatggccgttacccaagctggaatgctggccctgtaaccggcgtgcgcggaaatatttgcgatacagatgatgaaatttccgacctggtagatctgcatggcaatccctatgacctgcgcaactatatgtgtatttttaaaaaagaggctgtctaa

SEQ ID NO: 430428 - DNA, 741 bp, Serratia marcescens
atgagctatctatttcagcgattatccttcgaagttccgtttgataacgcaacgtatatggatccggaggatatcagtcctgtcatcccattgcagattaatccgcaaccggggtttattaactggttattcaaaagcaacgcatcgagcttaaccgactggactggcagtcagaccttgacatatcccgcaggcattcagttgagctttacagataatagcgtaatcattccagccagtacgggtttcaatggtttgtctacggcctacacagactcaaactctcagactctggcggcagtaattaaacataccggtgaagcgtcgcggatactgttgggggcaatatcgactacggttggagaatgcatttcagtcagtggaactggagttattagccatctatatagaaataatgcaggcgctgtaattgcgcacccaatccccgtacctgaaggattgaaagtgggtgactatattttcatcgcttatagtcgatctggttcgactctcaacgcaatgatcggcggcgcttcatcttcgctggtactgaatgatgatgaaaaaaaacctgctgattacaatgttggtgtgggaaacactgcgttgagtactgcagggttttcaaaacagctcgaggtcgttgagttcctctacagagcagcccctacagcggatctgcagagcatctatgctggttccaaactgcgatgcctcgcgagagggttgcaaataaagtag

SEQ ID NO: 430429 - DNA, 264 bp, Serratia marcescens
atgaaatctcaagacgaaattatcggcatgcggcaactaaccaactttcaggcagaccatagcgcctttggcggtttcgttctgctgcgttcatccttcgtggatacgatgtcatatgtgtgcgctgacaaggccaccgcctttgacgatcaggacgtgatgattcggctggacgttgccaaggcgctgatccgagagctgcagaagcgcgttgattacatcgaagccggcatcgaaaacaatgccgtgcacctggttgattaa

SEQ ID NO: 430430 - DNA, 1098 bp, Serratia marcescens
atggcatactatagcatagaaaaacgtccgcgcgctgatggtacaacgcgctaccgctgcactgtgggcgtgaagcaaggcgggaaatacatctaccgcgagagcaaaacattcgggcgccaccagctcgctaaaacgtggggtgccaaccgggtgacccagatagaggctgatggggtgccgggtgacaatgggtcaggcgatctgactgttggtgaccttctcagaaggtacatgaacgatccagcgctgggaggaaaggttgggcgcagcaagggttatatactcaacatgcttgccgactgtgatatcgccaatattaagctgcttgatttgcaagaccatcacgttattgagcattgccgcgaccgcaactcggccggtgctggcccagcaacagtagctcaagacctgagttacctttcgtccgttctctcaacagcaaaacctatcttcggcttagattacactcgcaacccagcgaaagatgcacgggctacggctttaaaaatggggttgatagggaaatcacagcggagaaaccgcaggccagccagcgaagagctaaatcgccttgtcgctggtttgagagagcgcgcaggtaagcgccaagcgattataccctacgaagatattctcaatttttcgatactgtcatgcatgaggataggtgaagtctgccgcataaggtgggaagacgtgaatgaacagcagcgggctgtgatggtcagagataggaaggatccgagaaagaaagccggcaatcatatgatggtgccgctactcggcgaggcctgggatattgttcagcgccagccgaaaaaatccgaactgatcttcccatacaagccacagtccgttagttcaggattccagcgcgtcagagaccgattaggcatagaggacttacgctatcacgatatgcgtcgtgaggccgcaagcagactgtttgaggcgggatttagtatagaagaggttgcccaggtcaccggccatcgaaacttaaatctgctttggcaggtttacaccgagctctacccgaaatcgctgcatgagaagttcgagcagttgaagaaatcgaagttgaccgaacaatga

SEQ ID NO: 430431 - DNA, 879 bp, Serratia marcescens
atgcacggtatacagcgaatcctgcgtgctgcgctggttgtcgaacagctggtactccgccttctctttagcctgttcgccacgatcccaaccctccggtacgtcaaaactgacgccgccgctgaacagggtggtcagcgaccccatctccacccgcatgccctgcgccgacatgtcgaacgccacgccgctgtctttccagaagcgcacgttggtggtgaccaactgatcgtaaggcgcggtaatgaacagctgatagcgcatggcgcgcgttttaggatcgaaatagctggtttccaccgagccgacgcggtaaccgcggaacagcaccggatcgccggcgttgagctggcccgatttttcgctgtccagcacgatgcgcagccctttggcatccggagaggccagcggcggcgcgtcgagcagctgatagttgtctttgccgtctttgcccttgttgcccggctgcagttcgatataggcgccggagagcagcgtgcccagcccggagacgccttcacggccgatctgcggcttcaccacccagaaggcggagtcctggcgcagcaatttctccatgccggaattaaggcgcgcctgcaccatcaccttgctcagatcctcgctcagcgtgacggtttccaccacgccgacgtccacgctgcggcttttgattttggttttacccgcttccagcccttccgccgtcgtggtgaccagcgtcactaccggcccctgatggctgaagtggtaaaacaggatccaggcgccgatcagcgcggtcacgatgggaatgatccacaccggcgaccagcgcttgatcttctcgacgtccgcgacgctatgattattttccgtcaccttgcggctccttgttga

SEQ ID NO: 430432 - DNA, 1317 bp, Serratia marcescens
atggtgtgttcccacaacaatcatcagcagcatagtcattccgcaccttcggcggagcaccaggataacctgatgctgtgcccgcagtgcgacatgctggtggcgctgccgccgctggcctatggcagcaaagcggtctgcccgcgctgcaaaaccacgctcagcgcccgctgggacgagccgcgcaagcggccaatcggttacgccctcagcgccctgttcatgctggtgctggccaacattttcccgtttatcaatatgcgcgtcgccggcatcggcaatgaaatccggctgattcaaattccggaagtcatggtggcggaagactacgccagcatggccacgttgtttatggtgttcgtgcagctgatcccggcgttttgcatggtggcgatcattctgctgtgcgccaaagtgcgtttgccgctggggctgaaagagtggatggcccgggtgctgttccagttcaagacctggtgcatggtggaaattttcctcgccggggtgctggtcagcttcgtcaagctgatggcctacggcgatatcggcatcggcagcagcttcgtgccttattgcctgttctgcctgctgcaggtgcgcgccttccagtgcgtggacaggcgttggctgtggcaggacatcgaaccggcgccgcgtctcgatcgcccgctgacggtggggcgcaccggcatgcggcagggcgtgcgctcttgcgcctgctgcacggcgatcctgccggccaatcaggtgcgctgcccgcgctgccacaccaacggctacgtacgtcgccgccacagcctgcagtggacgctggcgctgttggtgacctccgtcatgctgtacattccggccaacctgatgccgatcatggtgaccgaggcgctgggcaacaagatgaactccaccatcatggcgggggtgatcctgctgtggggcgacggctcttatccggtggcgctggtgattttcatcgccagtatcatggtgccgtcgctgaaaatgctggcgatcggctggctgtgctgggatgccaacggcaggaagaaaccgcgcgccgacagcgagcgcatgcatctgatttatgaagtggtcgaattcgttggccgctggtcaatgatcgacgtgtttgtgatcgccgtattgtcggcgctggtgcgaatggggcagttgatgagcatttaccccgcgacgggcgccgtgctgttcgcgctcgtggtgatcctcaccatgttcgccgccatgacatttgatccccggctgacctgggatcgcgcaagtgaaacaatcaacaaggagccgcaaggtgacggaaaataa

SEQ ID NO: 430433 - DNA, 1116 bp, Serratia marcescens
atgcaaccaatacagcaaaaaacaaaaactcagaacgttaagtatcactttgactcaattgatatcctcaggggctttgccgcggtatctgtcgttgtttatcatgtcatagagcattttaactggacctctttccctaccaattggccgtggctgtggttccgctttggctggatgggggttgatatgtttttcgttatttccggttttgttatcgctatgtccgcctttaatcaactggatagaagcggaaaagataaattttttgtcccttttatgaagcgtcgtctcaatagaatcatacctcttcactatttgacgctggttgtttttgttgtttttatatctccctatcttctctttaatcattttgcaataaatctagcttctcatttactatttatacataactttagttatgatttgcacggtgcaattaatggtagcaactggtcgctcggcgttgagatgcaattttatatacttattgcgctcaccgcacattggttaaagcatgttaaatggtgggtgttgttactttgctccttgggcatttcctatgcatggcgcttggctgcagtgtatcttgtcgatatacagcaaccacttggcattttcaaattatttgtcagcgcaactcagcttccaggtatgttagatgaattcgctgtgggtattttacttgccagattgctcacgtctcaatttggccatagattggtttccaacagaaagtactctacagtttctttgatgtgtgcggcagtcgcactcactacaggtgcaatgtgtatatacctgaaatatgcatctttctggaactatcctttgatggttatattcttccggacattactggcggcggcattcggcatgattgtgttgacactatgttcgcttaagattacaccattgctaaaaagaatattgtatccgctttactattgcggaacgatttcttatggcatctatctatggcatctaccgatcttgctttccatcaagaaattggattggttaactcatagccaatcacttgcactcgtattggtgctaacgttgctaatggcatcattatcgtggcacttctttgagaaacatttcatcaagaagtaa

SEQ ID NO: 430434 - DNA, 1257 bp, Serratia marcescens
atgtctgagattcatgtttttactagtgcagcatttaactatattccgaaagtgagaatgctgtttcagtctattcggaaataccaccctgaatggacaattcacctcgccttagccgatgagaaaaggcccgaaattgatcttagcaatgaaccatttgacgaagtcgtctcagtttcggaattagacatcccggattggaaaggttgggcatattgccataccatcgtggaactcgcgacggcgattaagccttttatgctggctcgtttgctgcaattgcctggttgtaaaaaagttatttatcttgatcctgatacggtgatcttttctcgcctcgatgacattttggaggcattggactctgcaaatgtcgtgctgacaccgcaccagacaaaacctgaaacgtctctgtccgccgtgatggataatgagatctgcagtctgaagcatggcgtatataatctaggtttctgcgcggtagcagcaaccgatgttggcctctcttttgcaaaatggtggggagagcgcatttatcatttctgccgtgcagatattccaaacggcctgttcaccgaccaacgctggatcgatctggttcccgccttcttcaacgacgtggcgatcatgcgttccagccgccacaacgtggccacctggaatttaacaacccgcgactttaccgttgacgaaaaaggaaattattttgttgatggtgaaccgttaggcttctatcacttcacaggcttcgacagtggcgctcatcgaatcatggcttctaaaaatgccggggataattctgatgttcacaaactgattgattggtatgacgatcagacaaagaatcttgcgcaggatcctttagcgaaagtggtctgggcttacggcctgcattccgatgggtctgccatttcaaaggcacagcgtctggtttaccgcgaacgtattgatttgcagaaagcttttcctacgccgtttgatgcgaatacctataaccagtggtggctgcagcaaggtccaaaagaataccctgagctattcgataatagcagtaaagatgatgcattgcgccagttcagcacggtgctcacccctggattccgtggcggcaatgcagaatttgataaagatcgttttattggcattgttaaacgttcgctttccaaccctcgcactggcgtcacaatgggcaagaaaggatgggaagtattaaagaacgaaggcattaaaggtattaaacgtcgctttctgaactaa

SEQ ID NO: 430435 - DNA, 1632 bp, Serratia marcescens
atgagcagtgagacgcttcattggtcaattgactcgatggtcaaaagagggacaacggtattcagttatggctggatatttagcaaaaccaagagtattaagcagctcgcattactccaggttgatgaaagtggtatattatctagcattaacattgactatggtaaaaaccgagaggatgtaggggcctatttttctgaattcgagcaagctgctcattcagggtatattgtttatggctcattcagtacatctgtggcacagcatcgcttaaaactgctttgcacctacgaggacggtactacggatagcattgatgtgccagaaagccattatatccacgccgggaatgacaataacgaagcggctataaataaaaaaattgttttaaagcaaatggttgtgctcgtcaaacgtgctttgatgttgcttaaaggtgggaatatttccctgctttataataaaatcaagcgatataagcgccatgaacccactacaggattaaatgtcgcgagcgatatttctaagattttaaatccgaaagaacgagagaaagttatctttttcctggatcatgatctgggcgggggcgctaatcattatagaaacaggctgatacaagataagatcagagatggattctctgcattggttcttgcattcaatattagaacactgtcttataaattgattgtcaaaagtgagcacgccgaggggcattataaaattccggatgaagggtttgtttttgaacttttgaattatgtggaaattcaggagatcgtctataataccggcgtctcatttgtaaatcctgaaaccattccgagtttcttgctcgatcttaagcttaaaaccaatgctacactgacgacattggctcacgatcttttccctatttgcccttcgcattttctgatcgatgacaaaggaaagtattgtgatattcctgatcctcaagtttgccgttcatgcttaaaaaataacacgtacggatttacaacattatttgagtccggtgatattaatgagtggcgcgatcagtggggcgggttgattatcgcctcagataagtttattactttttctcaaaatacgttggacatttatcggcgtgtctatcatcaaatacagcctgaaaaaacggtggtcgctccgcatgttgtgagctatatgcctcgaaaggcagaagttcaacagaaagagagattacgcattggagtcgtagggcaaattggacatcacaaaggggctgagtttgttaaagagttagccctcgaaataaaaaaattgggttgtccggtggatattgtgattatcggcgctattgaagcctcatgtccatcagatattgtgactcagacaggtccttataagcagaatgagttgccagatttactcgaagataaaggtgtgaatgttattttattcccttcgatctggcctgaaacgttttcctatgtcgtacaggaaatggttgaacttggttatcccgtcgcttgctttaatctgggagcgcctgctgaacgacttaagaattatccaaacggtttgattttgtcctcaatgtctgctggcaacgtcttgcaagagttgataaaattccaccgaaaaatttatacaatccagtga

SEQ ID NO: 430436 - DNA, 1902 bp, Serratia marcescens
atgcttttagataaaaatatttatgcttttcgtgaaaacacgggcatttgggcaaagccagattatgcgggtatcccctatagtgatggggaaacgcaggaaaatttattattgagtatcattcaaaatactcaagatcgaagtgtatcttccgctgagctcaaagctcaatgcacagattgggtaacgacctaccatttttctagcttgcgttcaaatttgttacggccgctaaaatccatcctgcagccaggtgctaagattttggaaatcggtgcagggtgcggagccatcacgcggtttttaggcgaaatgggatgcgaggtagtcgcattagagggaagcttgcgacgcgccgcgatcgccagaaccaggactgcaggcctggacaatgttaccgtagtcagcgaaagatttgatgatttcgagagtaatgtgctctttgatgtgattactttgattggcgtgctcgaatattctaacctattcagtcaaggtgaagacagtgcagtgagcatgcttgaaaaaattaaaaagcgccttagaccaggcgggaagttgatcattgcgattgagaaccagcttggcttgaaatatttctccggtgcgcgagaagatcacctgggccaggcgatgtatggtattgaagggcgctatacgaaagaacaggcagaaactttcgggcaccatatcctgaagcagaagctcgtaagcgttggtttgcagactatagaaacgttgctcccgttccctgattataaactgcccgtttccgttgtgacgtctaacggtgccagtgatccaaatttcgattcttctgtttttgctgcgcaatctgtacgtgctgatatgcaactgccggagcaattaaacttcgttctcgagctggcttggccaattattttcaaaaacaatttagcttgcgaactcagcaactctttcttgctggtggcaagtgatgagtcgagtgagcttatcgataaggacttgcttgctattcattatggcagcgagcgctactcgccgttttataaagaaacagtattcagcaaagatgagaatgaggaaattaaggttaaacgccatttgctgagcccaggggtggcgattgaaaatgattttgttgattttaaattagatgggtttgagaaatatattaaaggcgttcctctgcccatagagtttatcaagattgtgacgacgcctgggtgggacattgagcaagttgccggctattttcgctattacatcgaatgtctggaagtgtgtttaaaaggcgaaggaatacattttgaagagtttagccagcacactgttctaccgtcgacttatttggatgcgattccttcaaatatattgatagatgccgagaggcagccacgctactttgaacgagagtggttggcgaaaaaagggattacgctgggtaatctgacattcagagcggcgttgtcgttgcttgggaaaatatccactttcgcgccgccggcgaatgggcgttcattaactcgtggagagtttattaagcaactcttcgaggctttggcattctctgcagatagttcactctttgagcaatatctggttcttgaatcagagttgcaggttttctcatcgggatcggataaacataagcttgatacttggtatcctgagcatgtgttgcctggcttacatgcattggatgaagccgaaagccaggaggctgcgcgcgttgaaaccgaatctgcattggaagaacagcgccgagcctacagcgaattgttgaaatccaaagattatgccgagaaattggcatttgaacgtatggacgagatagaaaagctaaaactagaattaaataatattaagtctggcatcttttggcggatctcaagactattcagaggcaaaaggaattga

SEQ ID NO: 430437 - DNA, 1356 bp, Serratia marcescens
atgtcctctgataacgttgccataagcattaatgacataaaaaaatgcttttatgtctacaataacccacatgacagactcaagcagttcatcttgccaagaataaatcatatgttcggacgtgaacaaaataattattacaaagaattctgggcattgaaaggtgtctccttcgaggttaataaaggggaaactgttggtttgattggtaaaaatggcagcggaaagtcgacattactacaaatcatttgcggtaccttgacaccgaccagcggcgcaataagtacgaaagggcgtattgccgctctattggaactcggttctggctttaacccggagtttaccgggctagagaatatttttctcaatgcggcgatcttgggccttagcaaagaagaaaccgagcgtaagttagatgcaatcgctgcctttgcggatatcggtgagtttatccatcagccggtaaaaacctattccagcggaatggtagtgcgattggccttcgctgttcaggcgcaggtggatccagatatcttgattgtcgatgaggcattggctgtgggagatgctaagtttcaggcaaaatgttttgatcgtctacgccagttaaaagataacggaaccagcattctgttggtgacgcattctggcgaacaaatcgttactcactgcgatcgcgccgtgttattgaacaccggtgaaaaactgtatcagggaacgccgaagattgcagtcaataaatacatggatattctttttggcaagagtcagccaaatgcgcagaatggagtaataacttccgcagctggaagctcggttgaaactcaggcggttacgagtgaaacgcttaatttagaatgcgacaagttcagcgataaaggcaattataataagaatgagtatcgttggggagacggtgcagcgacttggcttgattaccaggtttgtgttggagaacgattgaatccaacgacaatttactcagctgaaaaagtaaagattagatgctcaatgcgttttgaacgggatgttcataatcctattattggttttgccattaagacgaaagaaggtcaaactgtttataacactaactcccatcttttgaataatgagaacaccttaaaacatggggccgctgggagctattccgtagttgaattcgaattttcaaataagttaggtgcaggggattatttcatttctctcggcattgcttcaatgatgagtaacgaagtcattccgcatgatcgaagatatgatgtcattcactttttggtgcccaccgttgattctttttcgggcatcgcagatttagagttgaattttgacattaacccaccttccggtaaataa

SEQ ID NO: 430438 - DNA, 822 bp, Serratia marcescens
atgcaaaattcgtttagctcatcaccgcgggagattgcagcgactttcttccggcaccataaactaatttttaacctgacgaaacgagaagttactgggcgctataaggggtctctgtttggcatcttatggtcttttttcaaccctatcttcatgctcgtcgtctatacattcgtttttagctttatatttaatgcacgctggagtgtagaaagtacatcaaaagctgagtttgcgttagttttgttcgctgggcttattgtgtttaactttttcagtgaatgcgcgattaaagcacctggaacaatactatctaatgtcaactatgttaagaaggtaatatttccgctagagatattaccgatcgtcaatgcaacctccgcattatttcatgcttgcatcagcattatcgtatggctgattttttatcttatagaggttggtttaccacacgccacggtattgttattcccgatatttattctccccttattcatttttgtgctcggtgttggttggttactgtctgcattaggtgtttttttgcgggatgtcgggcaaatgatctctattttcgtgactgccttgatgtttttatctcctatattctatccaataacagcaatcccagagaaatatagatcgctcttgaatattaacccactagctccagcgatttctcagtttagagaaattttttattggggtacagttccttcattgagcgtgtacgttagctatcttgttagttgcgcagtattcgcatggtttgggttcgttgttttccaaaaaacaagaaagggatttgctgatgtcctctga

SEQ ID NO: 430439 - DNA, 885 bp, Serratia marcescens
atgatgaaaattttgatagtgggtagtgcggggcaggttggtaaagaactggttctgcgagcaccaaaaacgtgggaagttttagcactggatcgtcaagcgcttgacatcacttgcatggagcaggtagaaaaagtcgtcaattcatttactccccatgtgattatcaatgccgctgcctatactgccgttgatcgtgcagagatggatagcgatcaggcctacatgataaatcgtgacggtgttgcgaatctagcccgtgcttctcaggcatttaattcaagatttttgcatatatcaacggattatgtatttcagggggagcagaaaaatgcctattgcgaacgggatgaaactggacccacgggcgtttatggtgccagtaagcttgctggcgaaatagcggctgcggaggcctgcccgaaacatatcattttgcgaactgcctgggtatttggtacacatggggccaatttcgtgaagacgatgattcgtctcgcacaggatagaacggaactcaacgttgttggcgaccaatttggtgggccaacctatgcgggcgatattgcggaagctttattactcatcgctgggaaagtttgcgataagagcttctctgcttggggggtctatcactttactggaaccccttataccaattgggcgggatttgctgaccaaatcatgcaacgggcgcatgcgcgcggcattattcctcatctgactaaaatcaatccaattccaagcagtgattacccaacacctgccaagaggccagccaattctatgctcaactgcgaaaaaatccaggacgtctttggcatcgcaccaagcgattggcaggcagcattaaatgacatagtcagttatgccgcgaagggatga

SEQ ID NO: 430440 - DNA, 543 bp, Serratia marcescens
atgaatgttatttctagtaaaattgcaggtgtcaaaacaatcctcccaagagtattcggtgatgcaaggggattctttttagaaacattcgagaaaaaacgttaccaagagatgctcgaaattgacctggattttgttcaggataatcattcacggtcttcgaaaggtgtgttacgagggttacacttccagacgcgcaaccctcaaggcaaattggtccgtgttgtgcgcggcgaggtctttgacgtcgctgtcgatattcgtcccggctcgctgacatttggtcagtgggaaggtgtcattttgtctgaagaaaacaaaacccagttttgggtgccgcctggcttggcgcacggttttgtcgttctgtccgatatcgccgattttgaatacaagtgtactgactattacgatccgtcttcagaaggttgtctgatttggaatgatccgactgtgggagtcgaatggccgattgaggcacctctgctgtctgataaagataaactaggaaaatacctgatggatcttcagcagagcaaataa

SEQ ID NO: 430441 - DNA, 1071 bp, Serratia marcescens
atgcaagtagatgaacgagcgaagaccaccgctggcaataagtcgcctgtccgtctggattatgtcgattcgatacgaggaattgcagcaattagcgttgttattgcacattttctggtgccggtttacggttatgataagttcatattttcccatgtttttgatattgggaaaattggtgttgttttgttttttattatcagcgggtttattattccatctagttttcgacgagaaaacggcggcgtgcaggcgttctttatatcccggttattcagactctatcccgggtactggttttccttgctactctatctaatagtgtcttacagtttggggcaacagttcccactgcaccaaattttagcaaacgtcacgatgttccaaacggctctgcgtgttagggatattgtaggcgtctactggacgttgtttattgaattggtcttttactttatgtgtgtttgcgcctttattctcgggttgcttaataaagtccgattcaactttatcgtttcctttgttatgctgggcattgccatcattttggctatcgccagaagtaaattggatgaggcattccctgtcgctttgccacttgcgttatctttgatgatgtttggcggcatgtggcgttcattcctacttgatggtgatttggtcgcgaggaaattgtcagtttactatattgcggtattcgcctgtatcatacctatcgtgagcttcttttcttatggcagcgaacctggccataccatgcgttacaccattacctattatgtcagtatgcttttattcgttctattgacgactcgcctcagaattcataataaattcatggtgatgatgggggtgattagctactcagtgtaccttatccatccaagtttgttgatcgtttatgagcatttcaccgctgatttctcaagtgctaatcgctacttgctgggggtgatcggtgtactgctaacgttgcctgcgtcctatttggtataccggtttatcgagttaccttcgataaaccttgggcgaagagtgaagtccagtatcataaaagtagtgcctcagtaa

SEQ ID NO: 430442 - DNA, 1347 bp, Serratia marcescens
ttgaaatattcaccaagtgccgagggtaaaaatattggccgctatgccaataaagttaaagcattggcagttgcgggtttgctattgttagggacttaccaaaatgcaaacgcttttgaagtcggggtgaatgttcatttgcggcattatcctaagccaacagataattacctgaccttaatcaaggattatggttttacatcctttcgtgctgggtatttatggggaatggttgagcgaactgctggtgaatttaaagtcgtcggcccgcttatcaaagaggatgatgcattccagcagggtgtatcgaaatatgggttgaattcactgctcatactggcttatggcaatgctgcatataattcgcctgattatccaacgactccggaagctatcgatggcttcgccaattacgcttattggacggcgaagagattcaagggaaaggttaaatactatgagatttggaacgaatggaccgtgggaacggggctgaaaaagaaaaaagccgttccgccaccggatgtctttgccgcgctggtgaagaaaacgtctgcggccattaaacgtgcggatcctgatgccgtcgtgatggccggttctctcaaccctcttgggcagcgcggaattgattggtttgattctttgatgaagttagggattttaaatgatatcgatgcaatatctttgcatccttattcttatcgcaatgagaatatggcgttaaggaatcccgaagataacctcgctgcaattgataagtttgagtcaagagtcaaggcgttttcaaaaagaaccgttcctctctatataacagagatgggtgtgccgacctataatggcccggggggattaagtaactctgccgctgctcagtatattgtcaaatatacgatgatggcaaaggcgcgttcctatattaaaggtgtatggtggtatgatctcattgacgatggtgacaatccaaagataaacgagcatcggtttggtttgcttaatcggcaagaaaaaccgaagccatcagctatagcttatgagaagatagctaaagttgtgcgcgattacagcgtcagtgattataaggagacagcgaatggtgttgtcagtatcgcgttgaaaggtgaaggcaatcaatatgcgatgctgtattggcagaagtccaaaacgccaaaggattcagatcaaccaggtgctttgaaatccttgatgagcagtgtcactggaggaccagcccaacaacccgatgtaaagcctcttgctgaattgactaaccaggcggcggttttacaaggcgatacgccggtactgctgctgtcggataaacctattgtggcgccaactcattga

SEQ ID NO: 430443 - DNA, 1419 bp, Serratia marcescens
atgatagtgaataggcagttatctatgaatggtttccgtcgtgggagtttacatacgaatgcatccctgacatctatgttgcaacgttttagcgacatctttatcgtctttttcgggctttatttatcgtgcttactgtccggcacccgattcgcgttgcaacattgggtcatggtgcttacgtcaattgtgattttccaaatgataggcggtattactgatttctatcgctcttggcgtggcgtccgtgcagggctggaaattcgacttattttgcaaaactggacgataagcctgttgctaacttccggggcagttgctttcgtgaatgattttagcaatgaatacatcgtttacgtccaatggtatctggtcgtttgctgtggtttggtcattactcgcagtactattcgcctgatgttgggttacatgcgtaatctcggattcaacacccgtaatgtggccgtgatggggtcaatgccggtggggatccgtttggccgaaacgttgcgtgatgcccattggatgggattccgcgtattgggcatctatgatgacagtgaagcgccattgaacagcgaggtcgagcgccgcggtaattttgcacagttgatcgaagacgcaaaatgcggaaggatcgatagaatttatattgccatgtcaatggagcaagagcggttaataaaggatatagtttccgaactttcggacacgacctgtacggtaatgcttattcctgacatatttacttttaatattttgcagtctagaactgaagagattaatggtgttcctgttgtctctttgtttgatacgccaatgagcggtgttaatcaggtcattaagcgagtagaggatattattctctccatttttattctcctgttcatttctccagtattgctcctgattgccgccatggtcaagctcaattcccgtggccccgttatttttaaacagcgccgatatggcatggacggaaaagcgatagaggtctggaagtttcgctcgatgaaggtcatggaggacggtgataaggttgttcaggcaaaaaaaggcgatactcgcgtcacgtcggtcggcgccttccttcgccgcacatctttagatgagttgcctcagtttattaatgttttgaaaggggatatgtcaattgtcggtcctcgtcctcatgctgtggcccataatgaacaataccgtaagttaatcaggggctatatgttacgccataaaatgaaacctggtattaccggatgggctcagataaatggctggcggggtgagactgatactctggataaaatggagaagcgggtcgagttcgatcttgactatatccgaaattggagtgtctggcttgatgttaaaattgtttttctgacaatattcaaaggttttgtcagcaaggcggcgtattaa

SEQ ID NO: 430444 - DNA, 1374 bp, Serratia marcescens
atggctcaaactttaacgtgttttaaagcatacgatattcgtggtcggttaggcgaagaattgaatacggatatagcctatcgcattgggcgtgcttatggtgagtttttaaaacctagcgaagtcgtggttggtggagacgtgcgtttaaccagtgaggagctgaagcttgcattggcagatggcctgcgtgatgcgggcgtcgacgtactggatattggattaagcggtaccgaagagatttatttcgccacttttcatttagatatcgatggcggtattgaagtaactgccagccataatccaatggactataacggcatgaagctggtgcgtagtcaggccagaccgatcagtggcgatacggggctacgtgatatacagcgattggctgaagagaataactttgagaaggtggatccttcatcccgcggtaattaccggcaggtatcaatcagcgaagcctatgtggcgcatttacttggttacattgatactgataacctgaaaccgcttaaattggttgttaactccggtaatggcgctgctggccatgttattgacgccatcgaagcgcgcttcaaccaattgaacattcccgttgaattcatcaaagtccaccatcagccggatgggaacttcccaaatggaattcctaaccctttattgcctgagtgccgtgaggatacggctcaggcggtgcgtcaacataaagcggatatggggattgccttcgatggggatttcgaccgctgcttcttgtttgatgaaaatggtggtttcatcgaaggttattatattgtcggattgttagctgccgcattcctggaaaaagaagcaggcgcgaagatcattcacgatccgcgtctgagctggaacaccatcgacgtagtttcggcgagcggcggggtgccggtaatgtccaaaaccggtcacgcttttattaaagagcgcatgagaaaagaagatgcggtatatggcggtgaaatgagtgctcaccactatttccgagagttctcttactgtgacagcggcatgatcccatggttgttggttgccgagctggtttgtctcaaaaatatgacgctaggacaattggttaaagaccgcatgtctgcatatccggcttccggagagattaatagccacttgcaggatccgcaaacggcaattaccagggttcttgagcgttatcagcctgacgcgttgctgcttgaccaaactgatgggatcagcctggagttctcggactggcgctttaaccttcggagctctaatactgaacctgttgtccgtctcaatgttgaatctcgtgccaatccggccttgatgcaacagaaaacagaagagattcttgccttgttgcgcagttaa

SEQ ID NO: 430445 - DNA, 1305 bp, Serratia marcescens
atgctgcaaacgacggtaaaccgtcttgatggcttggaaatttctaaccctctggttatttgcaacgaagaacaccgtttcatcgtagccgaacaactgcgtcagattacgcgcctgtcgcataacatcattctcgagcctgtagggcgtaatactgcacccgccattgcacttgctgctctgcaagcgactgccaacggtgaagatcctttattacttgttttggctgcagatcacgtcattcaagacgaaaaaacattccgcaacgcggtgctccaggctgttcccttcgctcaggatggaaagttagcgaccttcggcatcgtgccaacggggcctgaaacaggctatggttatattcataaaggtgaaagcattgacggttctgcaacttgtcgggtttcgcgttttgttgagaaacctaatttggtaacggctgaggaatatctgcgaagtggagaatatctctggaacagcggtatgtttctgttcaaagcgagccgttatctggaagagttgaataaatatcgaccagatattctcagcgcttgtcgcaagtctctgcaacatacctcaccggatcttgattttgtccgtgttgatcgtgaggcgttcctaacctgcccggacgagtctgttgactatgccgttatggaacagactgcagatgccgttgtcgttcctcttgatgctggctggagtgacgttggttcctggtcagcgttgtgggaaatcagcgaaaaagactcttcgggtaacagtaccttcggtgatgtgttgcagcatggctccacaaataattacatccgcgcggaacacaaactggttgctactgttggcgtagataatctcgtggtcgttgaaaccaaagatgcggtgctgatcgccaataaagataaggttcaagacgttaaggaaattgttaatcatctaaaacgcagcaagcggcctgaaagtaaacaacaccgggaggtttatcgtccctggggtcagcatgatgcgattgcgcagggggatcggttccaggtgcgtaaaatcaccgtcaaacccggcgaaaaattgtctctgcagatgcatcatcatcgctcagagcactgggttgtggtttcaggaacggctaaagtaacaaagggcggggttgttcaatttgttagcgagaatgagtccgtctatattccgcttggtgtggaacactctttagaaaaccctggaaaaatcgcgctgaatttgattgagatccagtcaggttcttatttacatgaagatgacattgtccgattcgatgacagtggaaagtatgattaa

SEQ ID NO: 430446 - DNA, 1158 bp, Serratia marcescens
atgcctgaagaaaaattagatgtaggcgtagttgccgattggctagttacctatgccggcgcagaacgcgtaattaaagagtttatcgatatatatccagatgctactctttattctgtagttgatttcctgtctgatgctgccagacagcaaattcataacaagcatgcagtcactacatttatacaaaatttacctaaggcgaaaaccagctatcagaagtatttgccgctgatgcctttggctatcgagcaactcgatgtttcttctcacaatgttgttttatccagtagtcatgcggtagctaaaggtgtgttgactggccctgaccagttgcatatcagttatgtccactctccaatacgttacgcttgggatttgcagcatcagtacctgcgcgaagctaatctcatgagtgggataaaggggcggttggctaaatggttgttgcataaaatccgcatgtgggattatcgtacagcgaatggtgtcgaccattttatcgccaactctaagtttatcgcacggcgaattaaaaaggtttatggccgagaggctgatgttatttatcctcctgtagacgttgatcgtttcttgcttaacgaaaataaagatgacttctatttcactgcatcgcgtatggttccctataaacggatggaccttatcgttgaggcattcagcaacatgccggataagaaactcatcgtgatcggcgacggctctgaaatggcaaaaattaagtcaaaggccggaaagaacgttgagatacttgggtatcagagtaatgaagtgcttcaggaccatatgtcgcgtgctaaagcctttgtttttgctgcggaagaagacttcggtattacacctgtggaagctcaggcatgtggaacgccggtgattacttttggcaaggggggggcgcttgaaacagtgcgtccgtatggtgtaagtaacccaactggggtgttctttttcgaacaaacggtgccttcactggttgccgccgtgcagcagtttgagagcatccaggatgaaatcagccccgttgactgccgtacacaggcctgcaaattttctgcagaacgcttccggaacgaattgaccacatatatcaatgccaaatggcatgagtttaatgctgctaaaaccattcaatactga

SEQ ID NO: 430447 - DNA, 981 bp, Serratia marcescens
atgaagatagcgtattatccaaaaaatactggcaccaatgattatagtaacaggttcaaagcaatcctctctaacttcggcgaggttagtggggtttctttcaaaagtattattgggaagttagctaagttagatcttgcaagatacgatattatttttattaactggctcgactcggggataattgataagcgagggggtgttcgtcgttttttatttttcaaggcaattttgagagtattgctctttaagattgtggcaaaaaaacttatttatgtacgtcataatttatatcctcacggtaccagaaaagaagatactcatcgtgccaaacgctattctgatttcttaatgaagttctcgggccagggtatcgttcattcacctactgcgataaaaccaggtttagactatgtaccgcacccactgtataaatcggataatgaatttatacacaatcaaatgcggaaaataagtaaagatgattacttcgttttttttggtagaataaataagtataaaagacttgaggagctaatacgcaacttcccttcgaataagaagttggttattgctggaagctatgaagatgagagctatgtcgaatacttacgaaagtccgcgccagagaatgtaactattcaggctggatttatcgacgatgcctctgctgaactcatgatttcctcatctcaaggactaattatctgccatgcggatcccgacatgatcgtcagtggaagctttttctatgcactgtcgatgaaaagccgaattatttgtgttgagaccgaattccttcgctgggcaaacattgagtttggtgatgatgttgtggtttgctttaaagatataaatgaccttcatgataaaataagccgactgcctccagctaaagtatttgacgacgatattgttgaacgtattcagcatcatttcggtgaagtgtcggtgtcagataaagttaaagtattactctag

SEQ ID NO: 430448 - DNA, 792 bp, Serratia marcescens
atgttaaagctaaacttctcaagaaatgacaaattaagatctcgggttttttggtgggagcctaaagatggcattcataatgctggagatcatctggcaaaagtcattgttgagcaaatgctgacgctgaaagataaaggtattattgataagcgtaatgcgaaaaacaagctgctttctattggttctgtcatgcattttgccaataccggagactgtgtgtggggaacgggaatcaatgggaaaatcagccatgatcaactcaagttttccggtctggatgtgcgttctgttcgcggccctttgactcgtgaattactccagaaacgtggtattgaagttcctgaggtttatggcgatcccgctttgctgctaccgacattctttagccgggagcttttgactgatgagtcgttacagcgcgacttgatcattatccctcatatgaatgaggattttaagaagtacgacaaatactccgcagctctctgttcacctcgtcaaggggcagtcgcattcaccaaagctattgttaacagcaaatatgtcatttccagctcattacatggtgttattattgctgaggcctatggcataccggcaattttcctggatggcaacagtggcgaatccaagtttaaatatgatgattattattttggaacgggcagggaagaataccctatcgcctcaaccattgaggaggctatgtcgatgacaccggctaagccaattgatatgccgacagtttcaagtcgtatcttcaaagcgttcccttacgatttgtggtga

SEQ ID NO: 430449 - DNA, 1302 bp, Serratia marcescens
atgagtaatcttgtaaagaatatattctatttggttacagaaaagttcgcgactacatttattcttttattgtctaatgtcattgttatccgttatcttggcgtcgaagactttggtaaattagcgatcttccaactctattatttattggctgttactgtatccgaattcggtatacgcagggtttattcttcgctgaagtccccaagtcgcgaagccttgatttttaaccaggcttttaatataaaactggctagttctatctttttcctgatagtggctttcttgtatttatatattagtaactatgacataaaattttacgctctgttgctggcatttgtcgcatcacccttcgagatatttacctatcacttcgaagctaatttaaaaaatgtcacattggtaaaaattagagtctctgtatctctgctgatggcattgttacggatactattgtgtttcaccggtgaaaataatcttttttatattatgctgacatacgcggtcagcaatcttattattaacattctctgtgtattcgccacgcgaaatcacaaaatgaaaatcacgagggtaagaagtcgactttatcgttctacaataagaaagcatttattcagtcgttcgttgttcttttggatatcggtcgttatcgttcagcttaatatgcgaaccgaccaatttatgctgtcgttgcttgcgggcactgccagcgtagggatttatgccggtgcttacaagctggtcgagcagttgctgacgatcccatcactattggccggggtgtttttgccctatatcagcaagagccaatctttagataaagaaaagtatcttgaaaagctttatctgtatgggctacttgtgagtattccgatcagtttatcgttggcacttatttctccttggctgattccatttttacttggcaaagctttcacggcatcggcccctgtctttgctgttttgatgttgtcattaccgatactcgttatcgttaaccttagcgggttatattacagtatatttaaacttgaacgctttgcgattatacgaaatgcttttggcttgttgctgagtattggtcttaactattttttgattaaacattatggggcaactggtgcggcagtttccgttcttatcagctatagctgcgtcgcatttttcattgagtggctggttccaaaaacccgtcaaaatgcaagtattaaacttaaggtcttaatggatcttttaaaattaaatacctatcaggaattaattgttaatgttaaagctaaacttctcaagaaatga

SEQ ID NO: 430450 - DNA, 1059 bp, Serratia marcescens
atgatttttgtgaatgcaaggtttcttactcaggatttaaccggtgtacaacgcttcgcggagcagattagcatggcgctgcaaacgttgagacgtgatgttgtttttgtttctccgggtgatattaaaaataaaaaaattgccgacttgctcaatgtgaaagtggttggaaaaaattctgggcatcactgggagcagcgtgaccttcctgctttcttgaaaaggaacgataatcctttgttgattaacctggggaataccgctccactttggtataaaaataaaattgtcacgcatcatgatgttacatataagaaatttccggagagttactctaggaaatttcgcttgatgtataacttgctcatccctgtgatgttgagaaacagtcgagcactattgactgtcagtgagttctctaagaaagagattacggcagcttatcgttataacccggaaaaaacctttgtaatttataatgcggtgtccgatatctttaaacctgcgagttcagacataaaacgtgatgaagagaagttcttgctggccgtttcatcacctaactatcataagaactttcatggcttgctggcggcattttccagtgtgtcgaaacactcgaatgttaaattgaagataattggtggtgctaataaaaactttgcaggaatgaatttttcctataaaaatgaaaatgatatgaaaaacgtcgaatttcttggacgtgtcactgatgatgaacttgtaagcatataccaaaaggctctggcttttattttcccttcattttacgaaggatttggtattccaccattagaagcgcaggcatgcggttgccccgtggtttcgtcaaatcaggcatcgttgcccgaagttttggcagacagcgcaatgtattttgatccttacaataatcaagatatggttaatgcgttagaaaatgttattcagaatggtgaaatgcgagaggggttgaaaaacaaaggatataaaaacgttctcaattactcttgggtagagtctgccaagaagttagacagcatcatcaataaattataa

SEQ ID NO: 430451 - DNA, 1335 bp, Serratia marcescens
atgagattttcatcaaaaaaagtcgctgattattttgtgataacatacctgatggttctttctgtcagtggtgttttgaacatcattgcacataatacaactcggttcctattaatatataaagatatttactctttaattctccctgcttttctgcttttgtacgttattgccagtcaggccaaggtaggtccaggcttccgcaactatgtgctgctttttattgggatggtgctgctttcccttagctatgtattggtgtccgtacttaataataatttcaagattggcaacgtcgtcacgcagtttcgctttgaactattcacctattcatcactattagttggtgcattacttgtttgccttgaacgcgatcatcgtatgcaactgctgatgcgaatcataaagatttatatcatagtcacagttattaactctatattcgccattcttgagagtgtattttcaagtttactttatgctgtggcaggtgttaaccctgggttgcaatttactcaagtaggtaaagataacgggcttatccttcgttctgctagcggattttttagggcgataggtctctttagcggaccatttaccctggcagagtttttgttctttggcctaatattaagccctttcgtcagtaataaacacagatttaaatatattgtaattgttacagcggggattgtctgctcgacgtcaaagacggcaatgattatggcggcaatttactttggttacctgtttcttcgccgattcttaccgctgaaattgagcttagcggccgtggtgtcggtttgcattgcattgctgatgttcttctatatcactatgacagatttggggatatataaatccctatactccagtgataataactatgctgagcaaagtatcttggcacgaattttactgattgaagaggttagaaacagcgacacctattcgatcttcacaggtgcgggatatggcgttaatggtaacgcggctaccggggatgatgcggcaattccattggatagtatttacatcttcttactttcaaactacggaggcctggggatatttatcttcctgtcggcatcatcaataattttactcagactatataataaagtttgtcgcggttactttttccccggggttttcctttattggataatttcaatttcaattaactttgtctataacaatccaatcacgaactatccaggttacattttctcaattattatttccgcgttactgttatcgttcagacaggacgaattttataaagtggccgatgccgaacaagtccaggctccgatgaaaaagcctcgattttaa

SEQ ID NO: 430452 - DNA, 1137 bp, Serratia marcescens
atgaatatattaattgttaatacattatatgcaccttttaaagttggcggcgcggaagtgtcggtccaacttttagcggaagagctggtttccaagggtgacagagtacgcgttgtttgtctccatgatgagaaaattaggaggcaaactgaattaaatggcgtagaagttgtttatcttccccttaaaaatttatattggcctttcaataacaagcagaaaaacaaagtaaaaaagatactctggcatttgattgataatttcaatccaatgatgaatcgactttttgagaaagagctggatgatttttcacctgatgtggttcatactaataacatcagtgggttttccgtcgctatttgggatagcgtaaaaaagaaaaatatcaagcttgtacataccactcgtgattattatttgttccatcacaactgtacattatttaaagatggcaacaatcttgatgccggctctgcaaagataaaattaacttcgttggttaaaaaatataaaagcaaaaatgtagataattttatcggcatcagtaaatatatttctgcattacatagcgataatgggttcgcaaaaaaatccgcacaccattatatttacaaccccatcaaagaaatgcttgttgatgatgtagtctcgccaataattcgcgttggttttattggtcgactaacggcggataaaggttttagcgctttttgtgacaaagcgaaagagatggcgatgccaggtgaaatcgaattctatgcggcaggacgattggccacttcagaggaaggaaatcaactgaaatccaaagcagagaaaagcggtgttcacttgcttggttttgtacccattgagtcatttctggccaacattgatatgatttatttaccgactatgtggaatgaaccttttggtcgtgtcgtcgcagaaacggcttctgctgggaaacacgtctttacttcctatgcgggtggggttgcagaaatagctgagtattttgaaaatatttataagcttaatgaatttactcctgaaaggctaaaagaattaaaaaatgtccacgtgaaaccgctaactgtaaacccttttgatgtaaggcaattagctactgattacaaagagatttatgaaaaataa

SEQ ID NO: 430453 - DNA, 1794 bp, Serratia marcescens
atggggaatgagcctggcaaaattgcattgtcgcggctttcaattcctttgggatggagtgaaaaagacatcgaattggaagttatcgataaaaataacttcgttctgagcgtcgatggcgatgaattccttaaaggaaaaaccggtgagttggccaaacagaaaggcgtaacattactggtcagtgagattgacgctaaaccaggcactgtttttagtgtttctaaacgtagcgacctgatgagtattaacagtgttctcgcttctttaacggtggaagataaagggaaagacaccggcgttctggcgctaacgttgcttggtgaagatcctgaactggtgggcaagactctcgacagcatttcgaaaaactacttgctgcaaaacgttgagcgtaagtcggaagaggcagccaaaagcctggacttcttgaaagaacaattaccacaggtcagatcttctctggacctcgcggaagataaactcaataaattccgtcaagataatgattccgttgacctgtcacttgaagccaaatccatgttggacagcgtcgtttctgtcgagtcgcaattaaacgagttgacattcaaagaggctgaaatttccaagctgtacaccaaagaacacccggcatatcgagctttgatggagaaacgcggcacgctggaaggtgaacgtgaaaagcttaacaagcgtatcagcgtgatgccgaaaacccagcaagaaattttgcgcctcactcgtgatgttgatgcgggcaaagaaatttatacgcaactgctcaataaacagcaggaactgagcatcactaaggccagcaccgtaggtaatgtacgtatcatcgaccccgctgttacccaaccaaagccggttcaaccgcgtaagaccttgattgtactgctctgtgtagttctggggggcatgttctccattggcattgttatgctcaaaactatgctccatcatgggattgagaacctggatgagctggaacaacgtggcattaacgtttatgccagtatcccgctgtcagaatggcaacagaaaaaagatcgtgaggtattgctgcgtagcaaccggaaatcgaacgcacgggctaactctttgctcgccgtggggaatccggctgacttggcaattgaggcggtgcgcagtctgcgtaccagcctgcattttgcaatgatggaagcgaaaaacaatgtgctgatgatttcgggggctagcccaaatatcggtaaaacctttgtcagtatcaacctggctgctgtgattgcgcaagtggggcagcgcgtattggtgattgacgccgatatgcgtaaagggtattcgcacagcttgcttgatactagctggcagaatggtctttcagacatcttgtctggcaagattgacgccaaaagtgcggtacggccaactcagatcggtggtatggactttatccctcgagggcaggttcccccgaacccatcagaattgttgatgcatagccggtttggcgagttagtagagtgggccaacaagaactatgacctggtactcatcgatacgccgccgattcttgccgtgactgacgcagcgatcataggtcaccatgttggaaccgcgctgatgatcgcgcgctttggcatgaatacggtgaaagagattgaggtcagcattcgaaggtttgaccagaatggcatcgaaattaaaggtgttattctcaatgccgtcgagcgtcgagcgagtagctactatggtaattacggttattaccagtacgagtacaaatccagtagcaaagacgcttaa

SEQ ID NO: 430454 - DNA, 1068 bp, Serratia marcescens
atggccttgtgggttgtattagggcatgcgttggctgctttgcctctcatttcgcacaaaatccctccggctatactaaactcgtatgccgtagatgtttttattattctgagcggctttgttattttctttatgattaataataagaaacaaagctacggcgtttatttggctcagcgtttttttagaatattccccgtatatatttttgcgttgacggcctctctcttattaatcaattttgcccaaaacgtcctaatcaactcccctgaatccccctcgacggctcaccgtcttgaactcattgatgcgtttatgcagcaacccgtatggcacagtcttgctcactattcgcttcttcaggggttggttcccggttctgtcttgcaggatgcgccatataccatcatcgggcaagcctggagcgtttcggtagagtggcaattttaccttatcgcgcccttgctttttatcttgataagtggaatacaagagaagaagaacttagttgcattagtcgctatatttgtcatcttgattgctggtgggtttatattatcaggtggctacttgggtaataacttactggccttctgtattggttttatctcattcttttattatcgagatgttcaacctggtttatcaaaagggaagagtcgtgccgtttttgtcgcgacatcgattatcgcggtattgatgttgaaaaaagatgcgattcctatcgttatttggcttattgcctttaacgtggcgatctctaaacatcagtatttctctgattccatattcactcgaattcttgatagtagacctatccttttcttgggccggatctcttactctgtatatatggttcatatgatcgtattgtatttcgttctctatgaggcaaatcaactcgggattgagggctggttgagttacatcgttgtgccaggtgcaaccgtaatcatttcagtcgttctgtcatatatgacatatacgctcatcgaaaaaccgtttattgctttaggtaaacgtctgacagcaagcaaagagcgtcaggcctcatccgcgctgacataa

SEQ ID NO: 430455 - DNA, 888 bp, Serratia marcescens
atgatgtctcagtcacaggtatggttaatcaccggcagttctcgcggcctgggccaacagctggcgcaggcggtgttggccgccgggcatcgtctggtcgccaccgcccgtcagccgcaacagctgcagccgctggtggaacgctacggcgatcgggtcgccacggtcgcgctcgacgtcaccgacgccgccgctgccgaacgcgcggtgcgcacggcgattgaacggttcggtcggcttgatgtgttggtcaacaacgccggctacggcaatatcgcgccggtggaggaagccgatgaggccgattttcgcgcgcagctcgaaaccaacttcttcggcgtgttcaacgtcacccgcgcggcgctgccgatattgcgtcagcaaggcagcggccatatcatccagatcgccaccatcggcgcgcgcctcggcatcgccggcctcagcgcctaccataccgccaaatgggcggtcgaagggttctccgaatcattggccaaagagatggcccccttcggcgtcaaggtgacgatggtcgaacccggcggcttccgcaccgactgggccggcgcctcgatgaccatcgcgccgctcggcgcagcctatcagccgacgctggccccgatgctggccttcctgcagcagcataacggcagccaaaccggcgatccggccaaggcggcgcaggcgatcctacaactggcggcgctggacgctcccccgttacgccttttgctcggcagcgacgcggtgcatatagcagcgcaggtgctggcagaacgccaggcggaggacgccgtcttccgcgctctcagtctcagcaccgaccacgacgacagttcgccggatcacgccgccatcgcggcagtcgtgacaggaaaaccctaa

SEQ ID NO: 430456 - DNA, 1026 bp, Serratia marcescens
ttgaacagcgatcaaatcccggtttccggcgcgctggcggtacacctggcggcgcagggcgtcgatatcacgcagctcggccacctggccgggctgcctgccgggctgttcggcgcgcggcgcgacaagattaaactcaccacgcaacaattcttctctctttggcgcagcctgtcgcagttgactgacgatcccgccttcggcctgcgcctgggcggcgaggtaccgccggaacattatgacattgccttggtcgccgcgttgcattccgccacgctgggggaagcgttgcaaaaggttgcgcgctacaaacggctggtttgcccggaagagctgatgctggaagaaaacagcgacagcatgcgcttgcacacgcgctggaccatgagcgaagcccctgcaccggcgctgctgatcgacgccatgttcgccgccatcacggccctgtgtcgccgcggcaccggtctgcccattcagccgcaggcgattgaattgacccggcggccggacgccgcctcgccgctggcgcactatttcggctgcccggtgaaattcaacgccccgcaggacgtgctggtgtttgaccgcgcgctgatagaccaaccgttcctcacttacaatcaggacatgctggccgtattgctgcctgggctggaagcggaactggccaaatcgcagccggcgcacgatctgcccgcgcaggtgatgacgatcctcggccgcagcatgcgcggccagcgccccagcgtcaacagcgtggccgctgaactctatctcagcccgcgcacgctgcagcgccgcttgcaacaacatggctacagctaccagcagttgttggacaaaacccggcaccgcaccgcctgccgattgttggcggaaaccgaccttgagccgggcgaaatcgcttttgtgctggggtttgaagaactgaattcgttcagccgcgcctttattcagtgggaagcgctgacgcccagccgctggcgtacacagcgcgccgccggccagtgggagaacagagcatga

SEQ ID NO: 430457 - DNA, 567 bp, Serratia marcescens
atggcattttcagtcaactatgacagcagtttcggcagctacagcattcataactatctgaacgagtgggcgtcgtcatttggcgatatcaaccacaccaacggtaacgtcaccgactccaacagcggtggcttctatggcggcagcctgtccggcagccaatatgccgtgaccagcaccgccaacaacatcacctcgttcgtggcgggcgggaatctgacctacaccttattcaatgccccggcgcacaccttgtacggccaattggactccctgtcgttcggcgatggcctgaacggcggcggctccacgccgtacaacatccaggtgcctgacgtcagcttcggcggcctgaacctcagcagcctgcaggcgcagggccacgatggcgtggtgcaccaggtggtgtacggcctgatgtccggcgataccggcgcgctggaaaccgcgctgaacggcatcctcgacgactacggcctgagcgtcaattccaccttcgatcaggtggcggcggcgacggcggtgggcgtgcagcacgccgacagcccggaactgctggcggcctga

SEQ ID NO: 430458 - DNA, 654 bp, Serratia marcescens
atgcatacagagagacaggagcaaacgcgtgttaacgcagctgctgcagctgtgacaacaccacgcagcctgagcattatcagtagctgcgccttgacacaagtggggctgacagagttactgacgccgcatgttgaaaatttcagtgcttacgcttcgcctgcggcatttatacgggggcagagcctaaaggggcattcaggattattactttttcacgtttgtccgcgcaatgtgtcttatctgagaaatatcgttcaactatatcgtcgcctaccctaccatccgaactggcgatctgcattactgatggattcagcgtcaactaatgggcgttatttgacgaaaaatctaggatcgccgattgttttccaccttcatctgccaatcgaaatattactacgcaactttttagcctggatgtatggcgaagagaaacagatagcccgacacggcgtacggccggaatcactgtccgacaaagagcgtcaggtcattttggccacgttgcaaggtattcccatttcttcattggcacgtgagaggggcgttacagccaaaacggtctatacccaacggcgaacagcgctggatagactcggcataaaaaacacccgcgaattgctttgccttaacatactgggtctattgtaa

SEQ ID NO: 430459 - DNA, 711 bp, Serratia marcescens
atgtgcattgatgttgtcgttcctgtttttaatcagctggagaaaacaattctttttgttaattcattgggtaatcaagttagcaacaggcttattattgtcgataatggtagcgacgaagatatgcgaaattatcttggcggcttggatgcgacgttgattaccaatgaaattaatctgggctataccaagggaatgaatcaagggttattacaggtgaaaagtgagtatgtgctttttgccaataacgatgtgattttgcctgccaatgtactgcagcgcctgctcgcgcatttagaaaactatgacattgtcgcgccgctaacgaataaggcctctgggacccctgaggccattacgccattgcttattgacttcgatcctctgactggcgatatcgagccattttccgaagcgctctacgaaaaaaacaaaatgcgttcgatgccagtccccagcgcctatggccactgtttattgatgaagcgagatgtgctcgaaaaggtggggctgctggatgagtctttcgaatcaggctaccacaccgatgacgatttttgccgtcgagcgattgatatgaatttaaaaataggtctggcgcttgactgttttgttttccatttttgtcattccacattccgctctttaggtattgattctaaagatgaaattgaaaagtcaatgcgcctattcaaggataagttcaaatga

SEQ ID NO: 430460 - DNA, 654 bp, Serratia marcescens
atgatatttatcgaaggattgccgtgcgcggggaaaagcttattggtgaatgcgctggcggcgcagggaacaagcgtctgctttgagttggggaaggtgttgagcagggcagattttccaggtaacggtctttctttggcagaggttgaaaaaatcaacgattggtttatcgctaaagaatgtgaacgcatgcggggaaaggcgcattactttgatcgttcctatttcacccatctttgttacgcctatgcctacggtagatttatgtcgctcgatattttttcagtaacggtgaaaaggtatgcagaaaaaatccctgatggcggtttacccctgccgtgggggattgtttatgtcgatatagaaagcaaagagtcgattgccagacaagaaaacaagataaccacgcgcgtttctcgcggcctgccggcattttggcgaaacgaacagtttttgaatgatacccgctatgcctatcaaaacctgttttcttcttgttttgacattcctgttatttctatagatgcgaggctcagtacgcaggcaaaattgaatcaattgaatgagtggatgccaggcgtggtggagcggcatggcgcagccattgatttcaatgcgtttataggaaaaaacctcagggatggaaccagatga

SEQ ID NO: 430461 - DNA, 1245 bp, Serratia marcescens
atgatgatggtctattttttttcttttgctctgatttttctcttttttgttgtcaatgtgtcacagtatatcaatatcagtaagagtcggagatttattaaaaaagagatgcaggttgcgttaacgggcgagaggcgaaatcgtctgattgttttaattccggttatggatgagcataaaataattaatgaaacgattacgtattttaatcgtattctttcatctcatccagacagtcttttagtctttgtgacaacccaaaaagaaggctgtgcggagaagaataaaacctatcagaaaatacttccttatttatctgagaaaacgttaatcattcattaccccttcctttcaggaaataaagctcatcagctcaactatgcggttgagttgttgggacgtatgcaaaaaatggatggggggccaacctactatggcgtgtttgatgcagattctcggccggatcctcgaggacttgactatgttgctcagagtctcgaggaagaaaaggtatatcaaatgccgccggtgtattcgaccaattttgatgaactttctctttttggcaaagcgtccgccatttttcaaacccgctggatgatgagctacgagttaccgactctgttgaaaaatcaccagatgcaaaaagcgacgcacttatcttattgcattgggcatggattatttatacggcagcagtattttgaggagaatctctttccggttgaaaccgtaacggaagatcttctgttcggttatcgggcggttatgcacagtgtatacgccaagcctgtgccttattttgactattgctcttccgtgagccgattttctgccggtgtgcgacagtcagcgcgttggcacgcaggggatctttcctcattgatgctgttgatgggagaaaaaagcaacggcagcgcgaatcgttatcgttgcttgaaaatgaagcgtatgttcaccatgttacagtggcctctgggaccggttttcacgatcgccgttttgtgtgtactgttcgcattgcaatgctggccgggcgttatagctatgttgatccttataggcagctatgtattcctattgcactccccggtaattcaatattttttcccccgcagaggggggctgctctcactttatggcgcgcttttagtaaagagcgctgcgaattgccttggggcgctttatagttattttcttaggttgaatccgaaagtggatttatggtttaaaacccctcgttaa

SEQ ID NO: 430462 - DNA, 1698 bp, Serratia marcescens
atgatgcttgttgtcattctggctttgtcctctgcactgagtgatatattaattccggtatttgccgccgattttgtcaatgttctgacgcagggagggagcccattcctgtctttttttatgatgatggggttgggagccgccggtgctctgcttcgtcaatgcctgaacttaaatattgcttcattgacgttgacgatgatgagcctggccggtgctcgtgcttttaaacaaatacaatccttgacggcagattggcacgccaatgggtttgccggctcgaccgtgcggcaaattacccgcgggatgtgggctttggtcgcgtttaatgaaactctgttggcaggtctgttgcctatcggggccatgctgatcggtagcacggtatccgtgtggttgcactggccaatggccggcggcgttttcggtattggggggatattgttcagtatcgtggccgtgctgttgaccgttctgtatgttgcgccagcagcccgcactggcaatgcatgggatagccgcattggtggagctttagccgacgcactgacctgcaattcggtcgtaaaagctttcggcgcggaagttcgggaagaagagcggctggctaggatcctggccgcctggcgtcgtcatacctcatgggcctggatgcgcagcaacgttaatggcggcgtgcaggaaataatgctggttgcactgcaaactctggtattgggggtgctgctgttgctctggcggcgtggagtaatcaacgtcggtgatatcacgtttatgttaacgacgttatttatgctgcagggttatctgcgccgcatcggaagcaatttccgccacctccagcgagcgatgaatgaattggaagcgatggtagcgtttaaacgccttcccgccgaagggcgcgcggatgataaggggaatgcggtgacgatcagccgcggcgaaatctgtttttctgatgtcgacttcagctacagcggctctggcgttccacagctttatcagaagatgaatgtcaggatcaaagccggggaacgggttgggttggtgggctattccggttcgggaaaatcaacgttcgtcaggctgattcagcgtctttatgacgttcaaggtggaaagatcaccattgatgggcaagatatcactcgaatgcagcttgcctccctgcgccgccaaatcgcgacggttccacaagaacccttgttgttccatcgttctctgtccgaaaacatcgcttacgccaaacctgatgcaacgcaggacgagattgagcgggcagcgaaattggctgggatccacacgctgattagccgattgccggaaggatacgacacgctggtgggcgagcggggagtcaagctgtcaggaggggagcgtcaacgtgtggcgatcgcgcgcgcttttttagtggatatgccgatattgatcctcgatgaggcgacttccagtctggacaatgaaagcgaggcgcacattcaacgctcgatgaatgagttgatgaacaaccgaacgacattggtgatagcgcatcggctgtctacattgcgtcgaatggataggatcctcgtttttagccatgggcgcattgtagaacaaggctcacatgatgatcttattgcaattgagcgtggcgtatatagaaagctatttgagcgacaacagatgacggagaaaaatacgcattccccaagttaa

SEQ ID NO: 430463 - DNA, 1491 bp, Serratia marcescens
atgagagtagtaaccacatgcagtgaaatagaaaacggattggcggtgactcagttcgaatatcagcagttaaaacgcttggcgctggcgataatggataaggtttcaacctcatggccggtcgtttttatcggcgtgggacgctctccgacgccattgatggcatttctcgagtgttatttaggaaaagcgtatgtaattaacttgccgctgagtggctttcgtcataattacctcaaggagaatgtttctctgctaagagaaccgttgaacgatgatcagaacaaagcactactgcttcactttcaacgctttattccaattgaaaaggtgcgcaatagccacgtggttgtgatcgactttatcgactctggggcttctttagtggctgccacccattatattcggcattatcttcgccgatacgacgataccgataacattagcgctgtatcgctgcgcgcagtggcgctgcctgaatgttttcgttctgccatgcagacggtggaactggattatgcagatttccctattcacgctgagactgaagcatgctccgaacaacattttaagttaggccgcggcaattattatgacgctatctcaccggtaaaaggggcatttaagatatcagaagggcacctcacggagatgttggtcgagaataatacggcatatcgggactatatgcggcaacttgccgagcatatgttccgggatggtgatatcgaggatccgattcgagggcctgtgcaaaccgtgatggacggtatgcgaagcgttaataagaattgccattcccggggggatgctagggcattgcatcgtcaatacaacactttcccctcgcatgtgagctgccagttaaaggaaagcatagtcaactattcttacgtgaccggtgagacgttggagagcgtagtgttgcgaaaggatgaacgcgcaccattattgctgacacaactcgccagaacgcttgggcagctgcattggaatcatgaactgataattaaaaattatgagagaatctgttcggagagagtaaaggaaaacactttccatatcaatgatatcacatatggttatttttcccagattcatggcgatgcgcacttgagaaatatgctggtgacgccggagtataaattagtctttatcgacaggatgcggcagtgtggtgatatcttgtacgattttccctttattctctcattgctttgtttggagttgaggcggcgggatggctatttttattcattggtgagcgtgttctttcaatgttatgagaactatgttgatgataaggttaatttctatcgtgcgtttatggttaactttataaattacgccaaaatagcgcgtgaaacttataataacgccgtgcctccttttaaagaatggaaatcggcgcaggagttggtggaggcgacaaaagactatggtgatttcaagacatttttaatctcatacttcggtcatgaaaaaacgtga

SEQ ID NO: 430464 - DNA, 756 bp, Serratia marcescens
atgatgcgtaagtgcttcagtactgcagtttgttgttttatttttctggggggcgcgcaggcgtccgaaatgacgaaagacggcgagccgttttcttttctgacccgcggccaattgccggacagcctgtcgattcttccttctcccccgcgcaatgacagcgtggcctttcttttggataaagccgcatacgaacaaggccgcagccaagcggggagtgacagatggttgcaggctattaatgatgcgaatttatctgacgaaaatattggaaagccgttttctcaggcgctgggcgttgatatttctgaagacaaaacaccggccacctatacgctgttaaaaaaaattcgtaccgatgctgggcgatttgcaacggcttcggcaaagcgatattacatgcggccaagaccgttcatgtttttcaatacgcatacctgcacgccccaggatgaggggaagttgcgcatgaacggttcttatccatccgggcacacgacgttggggtggaccatggcgctggcgctggcggaaatcaggccggaacggcagaataaattattacagcgtggctatgagtacggccaaagccgagtaatatgcggagcacattggcagagtgacgtcgatgccgggcgtattttgggcgcagcggtttttgcccgcctgcatgctgatgagcagtttgttgcggcgctgaataaagcgaaaaaagaaatccacaatcaggctgggcatctgcaggggacggaataa

SEQ ID NO: 430465 - DNA, 2757 bp, Serratia marcescens
atgagaatgcattcgtcattagtttttaggctaacgatattcttatcgttgagcttgatgctaatatggttggtttcagtcttgacgaccgtgttcttttcattaagccacgcggataggcatgttattgacgaactttctcatttggcgtcactgcgtgttgagctaagcaaccatcgctttgaaggtgcggaaagagacgcgcaagatctggcaagacgttatgatagtttctgcaagaaacaggagctgaataatatatcgggaaaaagtgatagtcgatacttgccgataaatagtaaggcctgccatctcaatcatgcgattcatcgtgataattggtttatccaggcatacgggtctgcaggtcaaacctactatttggacagttttctcctcaaacctgctcaggggatttctctttacccgccagagaaaattactgacgattacttttctcaacgtcgattggggttatcgcagttccaaacgtatccgcatcacgataatatctattggggaaatccggagtatctttctggcagtggctggagcatttcggtagcggcgggcgataaagccggcggcctgataggttatgccatcaggttggatgacctattatcctatgggcatacggtgacagattttgacgttaatatttggttggatcgccaccaacaaccgttacctttttttcgcggaaaacttccggcggcggaagaggaaatcattttcaactcgttgaaaaaaataaaattacgtgatggttggcagcggatcccgggttacagggtattgcgcattcagctcaaaggcccgggctggcagcaagtggttctttaccccgatcgtggaatattggaagaggcggctgaacaggcaaaagcgcagttgccttttgccttgggcattttattgttgataactctggcacttttttggatgctgcgccgttatttggcacagccactgtggcaattcgttgacgttatttgccaaaccagcgccgagaatttttatcctcgtcttctcgaacacagacgagatgaactggggcaaatcgccatcgcttataatcggctgctggacaagttgaatcagcaatacgctactctggaaaaaaaggtggtggaaagaacgcgtgcgctgaaagaggcgaaacgtaaggctgagttggcgaataaaaggaaaagccgtcatttaaccgcaatcagccatgagttgcgtacaccgctcaatggaactttaggggcactggagctgctgagaaccggtgatatggatcaacaacagcagtggcttgcagataccgcacatcagtgcacgctgtctttaattgagattattaatcagttgctcgatttttctcgcattgaagcggggcaaatagaactgcaatccgcctcctgccaacttctaccgctactcgatcaggcgatgatgacgatacagggggctgctcagagcaaagggttggtgctgtcagtccatttggcggccaacgtgccgcaccatctttgtctggatgcgctgagggtgcggcaaattctggtgaatttgctcggtaacgcctgcaagttcaccgaccagggccatattaccatgcaggtagagcgcgttggcaagacgctggttttcaacgtggaagatagcggccgcggagtctctgaggaacatctagcctccgtattcatgcctttttaccaggcgcagacgcatgctcaggggacaggattagggcttacgatcgccgccacgctcgccaaaatgatgggaggccggttggacttcagcagcattttaggccgtggcagccgggtggcgttccatatgccgctggggcagttcagcgagcccgagccgctgtgcggcgttgttggagctccggcgatgctgcatccccaattgctgtcttgggggatatcatgcttgacgcaagaccctgccgaaggggggctcaataccgacctggcatttttgccagggcgtctgcatgaagcggtgaaatgcctattggccgacagcgttctgcaaagccggaaccagctcccccttcaaccctggcgcttgcgcgtgttgttggtggacgatacggccactaaccgcgatatcatcagcgtcatgcttgcacgcttggggcaagaggttcatcaagctgaaaacgccaggcaagcgttgcaattaggtcgtgaacatcgctttgacgtggtgttgatggatctgcagatgccggactgcgatggactgacgttggcacggtcatggcgggatgatgcacaggggcaggacggcggttgcatgattgtggctttgtcggcgcataccggcgcggaggaaaaaaggcgcgcaattcgggctggtatgaacgactacttggcaaaaccggtcacgctcagccagctttctcaactgcttgaactggttgccgaatatcaaataagtcgcgatattagtattataaatcaattggatactggcaagcccattttggcgatggacgacgggctgataggtggcaccgtcacttgcgaattacgcagacttctggtggaagccgagcaaacctgtggccgaaagacggattttgcgaagacggtgcacacgatcaaagggatatgcggccaagccgggttgtcgcaggctatgccgttgatcgttgaattagaacgtcaaattcttgcgaaggagacgccgcagcaagaacgattggtatctctgctccgattgattcgcactcaactcaacattgattga

SEQ ID NO: 430466 - DNA, 639 bp, Serratia marcescens
atgaacgcttatcgtgtgttgatcgttgacgatcatcagttgattattcatggtgtgcgcacgctgctttcggcgtatccgcgttatcagatagtggggcatatcgaaaatggcctgtcggtttatgcggcctgcaatgagtttatgccggacatcgtggttctggatttggggttgccggggctggggggactggaggtcatcgaacaactttgccagcgctggccaaagctgcgcatattagtgcttacggcaatgcaggacgaaataacggccagccgggcgatacgcgccggggcgatgggatatgtgttaaagaccagttctcaaatggtgttgctgagcgcgattaccaacgtggcagcccgcaagtgttatttggatcctgatttggatccccgcgtcattgctcaattaagcaatgaggaagacagcggcgctttgcttacgcgaagagaacgtcaggtgttgcaacttatcagcgagggtaatgcaaatcgcaacattgctgaattgttgaatatcagcattaaaactgtcgaaactcatcgtcttaacaccatgcgtaaactcaatgcacacaaggtaactgaattgttgcagtcggcccggcgattggggctgctgaacgctgtgtag

SEQ ID NO: 430467 - DNA, 813 bp, Serratia marcescens
atgatgaccgccgctcagctggtactggtactcggtctggataaatccagcgtcagtcggatggtcggtaaactgatgcgggcaggattgctgattgaaaccgccggagaagatgacacccgtttgaaaccactctgtctttcagcaaccggcagacagacggtggccaggatccacgcctatgggcggcaacaggttacgacggcgctggcgcatctgcacccattgcagcaacaaaccgttgctcagggactgagcgcctatgccggtgccctgcaaacgcaccgtcttgccaccggacaaactttgcagacgcctttcaccattcgttccggttatcagacaggtatgattggtcgaatcactgaaatgcatgccgagttttactcccgccacgccggtttcggggcgttcttcgagagtcaggtggctgcaggcctcgcggaattcaccggccgtctggacccgccaggtaatcagatttggctggccatgctcaatgaccgtatcgtgggatcggtggccattgatgggcaggctttggggcagaacgctgcccatctgcgttggttcatactggatgaaggatgccgtggaagcggcgtagggcgccaactgctcagtaacgcgatggctttctgcgatcgcttgggtttttcggccgttcatctctggacgttcaagggactggatgccgcacgtcggctgtatgaatcttttggctttgagctgatgcaggaagaaatcggcaatcaatggggaacgatcgtcactgaacagaaatttacccgttcttgtcgcccggggaattag

SEQ ID NO: 430468 - DNA, 1959 bp, Serratia marcescens
atgtcttctaatgcaagggttttccggcatgacatcaatgggcttcgcgcttgggcagtaatcgctgtcgttcttttccattttggcgttcctggctttgttggcggttttgtaggggtggatgtgttttttgtgatctcaggtttcctgatgacgcaaataattgtttctggtatagaaaatggcaacttctccctttggcggttctatctggctcgcgcacgcagaatcattcctgcattgttggctttgagttttaccctactgattctcggttggtttttcctcacctcggtagactacaataccctttcaaagcatgtgctggtcgccgtgctgtttatttccaacgtaaagttttggaaagaatctggttattttgatgccgcatcgcatgaaaagtggttgcttcatacctggtcattatcggttgaatggcaattctatattgcactccccgtcgttttgttggttatgtggcgtttttggaaaacgccaggggtgaaactcaccctgtttggtggttttttgctctcctttgctctcgcctgttatttagccgtcaccttacccagcgccgcgttctttttgttgccgacaagggcgtgggagatgttggcgggtggtgccgtatggtggttgactcggaatagccacttctcgaaaattaaagctcaaatgatggagctggtgggtttcatcctgatcgttgtcgcaatcgtgtttttcacccctaagctagcatggccgggggcctatgcgatggtgccagtggcgggggcgatgctggtgctcgctgcggccagacagggctcaatttttacatcgaactatattgcagagcgagtgggtgtctcatcgtactctatttatctttggcattggcccgtagtggtttttcttgcttacaataatactgcgggagattggcgatgggtgctgggaggactgctgctcagtttggttttaggtgaactttctctgcgttttatcgaaaatccggctcgcaagaaattagctaagcaaagcgattgggggaatgttctcagtatcggttcctgcatggtgattatctgcgccgctactgtcgtcatgtttaagcaccattttatcaatcgcgtaccggaacaaatcgatcttatcgctaatgaaagtctcaattccaaccccaagcacgctgactgtttcgcaacgacgggcacgacctcgccgggatgcatattcggcggcagtgaaattaaggcggtagtcgtcggtgatagccatggtaatgctatggttacagccgtggaagcggcattgccaagcaaagaagatggcgtgttgaatcttacctatgcgggttgtcctacgctttaccgggcaaaaacagtaccaggtgaagctgaggatcatcaggattgttatggctttaatcaatggcaacggaaaaaattggcaagcctggatagttctattcctatcgtgatcataaacagaacttcggtatatgcctttggacggcataatgtcgaagagaaaaggcgtacaccgatcgtctatttttctgagatcagcacgactccgaagcctgaattcctggcggaatttaagtcatctttggttgagtctgcctgtgagttggccgccaaacatcctgttttcatgatgcggcctatgccggaaatgatgtctaatgtccctaaaacgctgtcacgggccatgatgctggggaaggacgcgccgcatatttatctgtcggaagctgactatatgaaacgtcattcgtttgtatggcaagcgcaggacgaagctgcagaaaaatgtggcgtgaaaatcctgaatccattaccgctggtttgtagcggtggaaaatgtgaaagcacatatagcgggcgccctatttattatgatgataatcatgtaagtgaatacgggaataaactgttggtgccgatgttcaaaacgatttttgattga

SEQ ID NO: 430469 - DNA, 693 bp, Serratia marcescens
atggctaaggtaataaaatttgtccctgaagcagcaaagatcgcgaaagataaaatggatgcaattcaacctgcgttatcagcgaaatttgttcaacttatttcatttctatctgactatccaaccaactgttctgttccccgaagtaagagcttgaaggataatataggaggtgaagagcatattgaaagcctggctaataatttttatgaaagtagaaagccgaaggttccttctccacctaaaacttttcctgatgaagtcgtaagtcttgttttaaatattagctttgatatcagagaggaagatttatctcgaattaaatatgaacatgctatttctatgggggcggagaatattgtcggggaattactagagcgttatctggctgaaaagctcgagcctttagggtggatatggtgctcgggtacaagtgttaagtctgtagattttattaagtatgatgaaattactgacagatggcacctccttcaggtcaagaatagaaataacactgagaattcatcaagcagtaaagttcgagataatacagatataaagaaatggtttagaactttttcacaacgtgatgctactaactgggctgctttcccagatgatgtttccactcaaaacttatcggaagacgattttagactattcgtaacgaaatatctaaatagtttaaaatga

SEQ ID NO: 430470 - DNA, 1368 bp, Serratia marcescens
atgaacgacgtgattactgtctcagaagcatcgaaaatcctcggagtaaccccacagcacattagaatcatgtgtaaaaagggtcagttagatgcctatcagtctggccgtacttggcttatacattcgaaaagcgttgaaaaagtatgtctaatcgaaaagaataaagatcaatatacaacgatagacactattggaaataagcccaaagcattaagttttttcagtggggcaatgggacttgatcttggcattgagaaagctggttttgaaacattactggcatgtgaaatagataagtctgcacgcgaaacgattctagctaataaaccgggaatagctcttataggcgatattcgagattacacgccagaaaagatacttgagctagccggcataactaatgaggaagaagtcgatcttattatgggggggcctccctgccaagcattctctactgctggaaaacgtctaggtctagaagatgaaagggggaacgtatttataaagttcttggatatagctttagacattcgtcctaaatatattgtgatagaaaatgttcgtggcctactatccgcaccaatgaagcatcgaccacataatgaacgaggtgacgacttacccccattgaagtcagaagagcaacctggaggggtactcaactatatatataggataatagaaagctcaggctataaaatatcattcaacctatacaattcagccaactttggcgttccgcaaacgagagaacgtgtaattataatttgttgcagagatggagataaagttccttatttggagccaactcatagcgatgataatatctttggtcttcctcgctggttaacttttaaggatgcagtgaaaaatttaaaaaaagaggtacatgaacacatatcattccctgaaaaacggttgaaatattaccgcatcttaaaatcaggtcagtattggaaacacttaccagaaaatttacaaaaagaagctctaggtaaatcttttcacctgggaggagggaaaacgggttttttacggcgtatagattggaacaaaccctcacctacattagtgacccatccagccatgccagcaactgatttagcgcacccagaagaattgcggccactgtcaatacaagaatataaagtcattcagcaatttcctgatgaatggatcataaaaggaaaactacttgataagtataagcaacttggtaatgcagttccagttggcctaggatatgctgtcggaaaaatcatattgaaacatatgcaaggggaagaaattaaactcataccaggctttaaatattcaaggtacaaaaaaacctcagacagagatattttcggggacttaatataa

SEQ ID NO: 430471 - DNA, 759 bp, Serratia marcescens
atggctgccgcaaaactttggactagggaagaattactactcgctttcactctgtatagtcagattccgttcggcaaacttcattcgagaaatcccgaaataatccactatgcaaaattgatcggacgcacgccgtcagcactcgcaatgaagctggttaacttagctagcttggatccgtacatcatcgaatctggtcgcagcggtttgaaaggggcctccaaggccgatcgcgagctgtggaaagaaatgagccaagatatggatttgttcaatcagcaatgccaaacggcaatggaacacttggagaaaccagacgcacctgagtttgatgaagagccaaaagatttcagtggcagagataagttatctacagtcaaaatacgtgtagaccaaaacctgttccgcaagaatgtgttggaagcgtacgaatatcgctgctgcatcaccggattagaagaaccagcattactcgttgctagccatatcctgccttggagccactcaatcgaacaacgccttaaccctagtaacggattgtgcctatccagcctgcatgataaggcttttgaccgtggattgattacgtttaataatgatcttgagttaattctatcaacgcaattgaaaaaaatgacaagcaatttctatcatcataactttaaagcatatgaaggaattaaaatatttacaccgcaaactaaccctccctctataaaatacattcgccaccatagagaaaatatttttattaaataa

SEQ ID NO: 430472 - DNA, 1524 bp, Serratia marcescens
atgaactaccctatttcggtcaggatcgacagccagctgctgcgctggcaggacatcgtggcagtagctcgttatcgcgcgccgctcagcctgtctgacgccgcctggacgcgcatcgacaatgcccaggctatcgtgcaaaagatcgttaccagcgaacagcgcgcctatggtgtcaatactggcctgggcgcattatgcaatcaggcgctgcacggcgaacagctggcgcaactgtcgcgcaatacgctgatgagccacgcctgcggcgtcggcgcaccgctgagcgatgaacagacgcgcgccattatttgctgcgccatcgtcaactatagtcacggtaaatcaggtatccagcgtccgctggtggccatgttgctgggattgctcaacagcggtattacgccccaggtgccggcacagggttcggtcggctatctgacccacatggcgcacgtcggcgtcgccttgctcggcctgggtgaagtcagctaccgcggccgaatagttgacgccgctcaggcattggctgccgagggactgactctgccaccgctgggggcgaaagatggtctgtgcctggtcaatggtacgccctgcatgaccgggctgggctgtctggctctggcggatgccttccgtttaacccggtgggccgacgtgatggcagccatgagctttgaagcgttgcgtgggcaaatcgccgccttcgacgcggagatcttggcactaaagccacatcctggcatgcaattggtgggcgagaacctgcgtgcgctgctgaacggcagtgaggtgatcgccgccagcgaaggcatccgtacccaagatgcgctgagtatccgctcaattccgcaggtgcacggtgcttgccgcgatcaaatcgctcacgccgcgcggcaaattgaggccgagttaaacggcaccagcgacaatccgctgttgctcggtacaccggatgatttccgggtggtgtcgcaagccaacccgcacggcgagtcggtggcgatggccgccgatctgctggcgattgccatcgccgaactgagcggtatctgcgaacggcgcatcgatcgattgataaatccgctggtcagcggcctgccggcattcctggtcagtgaaccgggcgttaactccggcatgatgattgcccagtacgtttcggcttcgctgtgcgccgaaaaccgtcaattggctcaaccttgcgtagtcgataactatgtcacttcggcactgcaggaggatcatctaagcatgggcaccagcgcggcgctgcggctgcggcgttcgctggataactgtaaccaaatcctggccatcgaatacctgctggcggcgcaggcgctcgaatttttgcaaccgcaacgctttggcgaaggcaccgaacgcgcctggcgacaactgcgccagaaggtagcgccttaccaccaagaccgttggctggcgccggatattgccaccgccgccgcgttgcttaacgatgaagcggctctggcggatattgctcccggtctgcgttaa

SEQ ID NO: 430473 - DNA, 858 bp, Serratia marcescens
atgaacaaaatcgaaatccaaaacgtttacaagattttcggccataaaacggcagcggcgctggcgatgagccagcagggcaaaaccaaacaagaagtccaggcagccaccgactgtgtcgtcggggtgcacgatctgtcgatgtcgatcgccgccggtgagatcttcgtgatcatggggctatccggatcgggcaagtctacgctggtgcgccacttcaatcgattgatcgatcccaccagcggccagatcctggtggatggtgaagatatcctgcgttacgacgagcggcagttggagcacttccgccgccacaagatcagcatggtgttccagagctttggcctgctaccgcacaaaaccgtactggacaacgttggctacggcctaaaggtacgcggcgaaaccaaagaagtctaccaggagcgggcgcgtcactggatcgacaccgtcgggctgaaaggctatgaaaaatcctatccacatcagttgtccgggggtatgcgccagcgcgtcggcctggcacgtgcattagcgaccgacaccgacatcatcctgctggatgaggccttcagcgcgctcgatccgctgatccgcgctgaaatgcaggatcagttgttggcgctgcaaaaagagttgcacaaaacgctggtgttcatcactcacgatctggacgaggcggtgcgcatcggcaaccggatcgcgatcctgaaagacggtaagctgatccaagtcggcactccgcaggagatcctcaacaatccagccgatgaatacgtcaatcgtttcgtacaacgccggctggcactggatgaaaacgtgcaaaagccacgcccgatgagcgtggccaatgcctga

SEQ ID NO: 430474 - DNA, 846 bp, Serratia marcescens
atgtttccagaacgctttactttctctatcgccgattggatcaatggctgggtcgatgtgctggtcacccactatggcgacatgttccgcaagatctccgataccctgttatgggcggtgatccaccttgaaagtctgctgcgcgccaccccctggtggcttatgctggcgatagtcgggctgctggcctggcactctacccgtcgctggctgccgacgctggtgattgtcggcctgttattgctggtcggtaccgccggcatgtgggacaaattgatgcaaacactggcgctggtgctggtagccacgctgctggcggtgattatcggtattcctttaggtgtgctcgcagcgcgcaacgatcgggtgcgagcggtaatgatgccgttgatggacgtgatgcaaaccatgccaagcttcgtgtacctcatcccggtattgatgctgttcggtctgggcaaggtacctgcgatcctggcgacggtgatctacgccacgccgccgctgatccgtctgaccgacttggggatccgtcaggtagacaaggaagtgatggagtcggtcaccgccttcggtgccaaccgatggcagaaattgttcggcgtgcagttgccgctggcactgccgagcattatggccggtattaaccaaaccaccatgatgtcgctatcgatggtcgtggtggcctcaatgatcggtgcgcgcggtctgggcgaagacgtgctggtgggcatccagacgctgaacgtcggtctggggttggaagccggcctggcgatcgtcatcttggccgttgttattgatcgcatcactcaagcctatggccgttccgccgttgcgaggtaa

SEQ ID NO: 430475 - DNA, 831 bp, Serratia marcescens
atgctgttgaccgatgtcatgcaatacgtgctgcaaaaaggctacgactgtaaaaccgatgcgctgccaggcaactccatcaccatggaacaagcggtcggcaccaacgacattcaagtattcgccgaagagtggattggccgcagcgaagtgtggaacaaagccgagaaggctggcaaagcggtcagcgtcggtgcccccatcgtcggcgccgaagaaggctggtatgtgccgcgttacgtgattgaaggcgatgccaagcgcaagctgaaaccacaggcaccggatctgaaaagcattcctgacctggctaaatacgtccaagtgtttcgcgatcaggaagaaccgggaaaaggccgcttttacaactgcccggccggttggacttgcgaattggataacaccgccatcctgaagaaattcaacctggacgataagttcaccaacttccgtcccggcaccggtccggccttggataccgccatcttatccagctatcggcgtggcgagccgatcctgttctattactggtcgccgacaccaatcatgggccagcttgatctggtgaagttggaagagcccggagtggacaaaaacattcacatcaaggtcggcatttccagcgtatttaatcaacaggcgcccgagctggtggaagtactggcaaaagtgaacctgccgctcgatctggtgaaccagaatctggcgcgcatgagcaaggaacgcatcagctcgcagaagctggcgctggagttcttcaggcagcaccccgacatctggaaacaatgggtgagcgaagacgcggcgaagaaaattcaggcctccttgtaa

SEQ ID NO: 430476 - DNA, 897 bp, Serratia marcescens
atgcaattgtacgctttacgtgtgttgatgagaccccgcgaccctgatcttttttccaaagggtctgttcaaaaagacattattcatttcgaaaatgccatagtagccactgcgcaaaagttgcatctgacatcatcaacaccatctgttcataagaaaactagttacactttgaagttgagcatagaacccactgaaaacgtcatggctggagtcatatcaaaacagcaaaaaattagagcgcatgataaggattttcgtgagttcgatgttgacaactatccacctatcgtatggatctgggacagggaagagcaagtgttattggtcgagaagaaaaccgcagtattcaaggatgcacatcaagttgctaaagcattcgaggatcttgccaacaacgactacttagctcagttgggacttagagtatttatcgaaccttgccttgaaatggaagatttttggtcggaataccacagacttcagtttatcgacaaagttagtttcacgttgattactccaaacattttcggaagtagtaagcaagccttaactgatgatttgcgaaaactcgagacagataccaatgcaaatgctgtaaccactacatttgaaaacaaagatggcaatttaaaacttaaaagttctcattgggcatctgttcttgtcgactgggtgaaagacggtggtggttcttggttaattaaaggacgaaaaacactcaagtcaaaacccacaactgtatccagtaatcaaacggccaagatagtacttatagaaggtgagatctcagaaattcaactggatggttactcaccgagtgatgtcaaggaaatcatagcgctacatcaaaaaaggtacacgtataaaaatgaagaatctaagcacctggattaa

SEQ ID NO: 430477 - DNA, 1383 bp, Serratia marcescens
atgtcattagctaccgataaaatctcagattatttaaccgattatgaaagaggcgatcgcgagggaagcagcaagccttcatacgccacggaagacgtttcagatctgttgctgaggagccattattccgccaatggcaaaggcgtgactgaccatgcggcaacaataacctactctttccccgtgtataccgacagcgataagccaggatccgcacagcttaccgccgcccaacaggcccaaaccaagctttcattgcagtcctggtcagacgtggccaatatcaccttcaccgaggtcaaaggcaccgatgccaaaagtgctgatataaagtttggtttttataaggcggccagcggaggcaattacacctcctatgaaagtacgcaaaacgacctgaaaagcaccatctggatcagcggcaacaaaggctacgacgcttcgaatccgcagaccaataactatgccagggatacgctgacccacgaaatagggcatgcgctcgggctctcccaccccggaaactatgatgcctccaacgcgacctaccccacctacaccaactcggcgaaatattatgaggacgaccatcaatattctttgatgagctattttagtgaacaaaacaccggcgccgactataaaggcgtatggccctcggggccgcagctggatgatattaccgccattcagaagctgtacggcgcgaacaccaccacgcgcaccggtgataccacctatggtttcaactcgaatacggatcgagactttttgagcgttaaggcgtccacggacaaaatcgtggcggctatctgggatgccggcggcaacgacacgctggatttttcaggctacagccaagatcagcgcatcaacattaacgaaggctcattctcagatgtgggcggattgaaggcgaatatcgccatcgcctatggcgcgcagattgaaaatatcatcggcggcagcggcgccgatatcttagtgggcaacgcactgaacaatacgctcaaaggcggcgcaggcaacgatatcatttacggtgccgacggcgccgatcagctctggggcaatgcaggcgccgacaccttcgtcttcagcgcagccgacgacagccaggccgccgcgccggactggatccgtgatttccaaacggcggtggataaaatcgatctgtcgtggctcaaccagacggttaaggccgaggggggcgagttgcacttcgtcgataatttaagcggctcgctgtatgaagcggcgctgaattatgactcgcagcagaatgtcaccgatctggcgatcaatctctccggccataaccagcctgatttcctggttaaaatcgtggggcaggtcgacgcttccgccgatattctcgtctag

SEQ ID NO: 430478 - DNA, 360 bp, Serratia marcescens
atgtctaaacaatcgagaatcctgaatagtctactcaactgttacaaaaagaccttcacctactcaggccgcgagagccgtgggccttactcaatgctgcttttgtgccagcacgtttggtttctgttttatctcgccgttatcgccagcaaggtgaatgaaatttccattttcgcgcttgcggcgtttttactccccatgctagcagccaatgtgcgccgtttgcatgatgcgggttactccggtggttggtgcctgacatggttctgcttcacaccctatgtaatgctgatcttcgcgctgctccttcccgctaagaacatcaataacccttacgacgatcgcccaaacctggcgtaa

SEQ ID NO: 430479 - DNA, 450 bp, Serratia marcescens
atgaagaaaatgatgctgttcattagtctgatagtcatttatggttttattggttattttctgcacctccctatggcaaagctctacttttccgggaaaacattgtttgtttctgacgttacagcaacggttgttacccagttcaaggttgccgggattttcattttatgcggcgtcatcatcctgacgcagatcgtactgacaaaaaaatcaaaatctcttagacgatatgccgttatctatagcatttgggtgggtatccacttcgtctaccttctcttcatcttgatgcttaagagcaagttcctggaacctcttaacaaaatcccgatggatgcaattgctcttgaacagtttaactttgctggcccggcgcttatttctctggctctaacctgtttgtcgctatggctcgtcaacaagtcgggacaatcagaacgcaatgtctaa

SEQ ID NO: 430480 - DNA, 582 bp, Serratia marcescens
atggacgatattaatgtttacggagaaacaggaatatttatcattaaagaacaaattttcagcaagaatggactcccgtccataggacacttctctccttctgctgtacaaatccagcgctacgtctaccaattgcgtaaggaacaagaggttttttgggaggggcgaaagatcgactatacacagctcggcatttgggaaaaatttaaattactgatgggcaacgacttggtcagtagagacaaacaaggaggtaacaccctctattctctggagttcgccggatttgaaacaagagtaacacctctggatggagcaaaagcacctctccccgactttttagggaaatcctataagattaacgtacccacaccatacatttatggccaagatcctatctcagagatgaagctctatggcaggaaagacgtctcattcattatgagcaacggtggacaatcagcccctactgcaatggcaaaatacaacaagacgaccaagaatctgataatgatccgtactgaactagaaatgaaaaatttgatgttatccttgagcagcgccaaggagctgaaaaaatga

SEQ ID NO: 430481 - DNA, 1023 bp, Serratia marcescens
atgaaaaagatagtttatgccttattcttaatgttgataagcaacgcccccgtctatggtaaaaatacgtcattcacaacagcgtcggccattaatgcgcgtaacacaacacatcaattcctcttaagtgcgaaaaacgcctatgagatttataacctggaaaaactggaaaatgcattatcctcggctcaccagagtgcgccacaacgcttggatgtcctatttagcctgggaaatacctacatactgcaaggagatattcataaggcactagacgtctatgccagaataaatacccaaaccggtggtgatattgatgcgctgacctatctggtgatgtacaaacactatctggggcaaccatttaccaacgaaatatcagccctaaagaaaatcagtgagcaacgggcaaaagatgtgacgaccataatcggtaatatcaacgagcaattagccatgccaatagcggaaaaacttcccgctggctataacaaaaataacccagcactaattatcaccttgggttatgcattaaaagaagatggcaccatggatagcatcttgatcgaccggctggaaaaaaccttagccatggctaaaatgctgcctgaggctaaaattgtcgtaacaggcggcgtgccgaaacatgataaaagcgaaggcatcgaaatgaagcaatggctgattcaccaaggcatagatgaaaaccggataattgccgaaaactacgcgacagataccgtagaaaattttatttattcgcgttacatcatcaaacaagaaaaacgaaataacattgtcatcgtcagttccgcaacccatgtgcgcagatgccatgtcattttacaatccctcgctctggccaaaggggaacattatgatatcactaccgtcgcagcccctgacgcctccgaagaagaaatgaaattcgaagggaaacgcaaactgggtatctatcgtgatgcgctgcgcgcctatggattgtatatgatttctgccgcacctgaattctcgctaaactga

SEQ ID NO: 430482 - DNA, 1371 bp, Serratia marcescens
atgttcacgatgtgcgaaaagtatgtcgatgggaagatggttttaattttatgggtgaacaagtatcaggattatagttcgggcttttggtatgactgggaagatccttataaactgagcatgctggttgggataaaacatgatgaaacagggagagaaagtcagcagctctttcagttatatggatttggcagagataagcgcttcgtcaaggtgataccaacaccaaggtctgggagatatacgtttacgctcaacgcgaccgtacatgctgataaaataggcagcgctaatgatatctatgttcgtttaagtaaggaagtaaacatcgaccctgatggtgctgaaaccttaatgaagctaaatgatgaaatagagaagcataaagatgaaccgtttgcttatatttttgataaagaccatcaaatacccatgcgctcaaacgttgatagatattatgccaataatcaaaatggcgtgttgttggtgattcctgatgtgagaaaacgagtgccgtcattgcttctggatatgaaaaaaaggacgtcgttgcgttgtgagatgaataacaatgcggtaacggatgacgggaggcggcaatcatctgaaatttattatccggttggcgcatgggggcggttagctttccctgacattgtgctaaacgttaattattttgatatcagggcgcaaagaaacggtactacctggctgagtaatgcctgtgcaacgccgcttggtatgtattatgacaatattagcggtggttcaacacagcctgagcaagaaaccagtgattatttccctgggctgcgccattttgttgatgagcataataaagccgcgccggttgacacatttttttgggaaatgaatcaacctggagttccgttgcatattgtaataaataccgatcgtttcagcagagaggctacgaattacgctaataagctaacgaatatgagaggccaatttgtggccttttccggtacctcgttgattccacggcgtgatgatggtccggaagggcagccggataatgggccagcccaaacgacccggattgccctgggttaccataaccagcaggatcgtctttatatttttcacggcggtgcttaccgtgacggcattgaccgtggggatctgaccgcgttgttccgggcattggaggccaaggtagcgatagaactggacggcggcggctccgccgccttagtgattaaggacggcgcggcgaaatgggggggcggcgagttacccaagagcagttgttctaactctggcgcctggtgttcgccgataaaacaacctgacggcaatgcccgccctgtaccttcctggttgggaattgagctgagccagccctga

SEQ ID NO: 430483 - DNA, 5496 bp, Serratia marcescens
atgaaatatcaaacaacgtgccgtgatagggatatcgctatcgtgggaatgtctgcgcgcttcccgggtgcagaagataaggcaatgttctggaaaaatctgctagatggtgtagaaacgatcagtacgttcactgaagaggagcttagagccagcggcattgaagaggaaatgatcgcctcgtcaaactatattcgtcgcagaggcatcttgggtaatgcgcaatattttgacgccaatttcttcgatatcacacctcgtgatgcggaaattatggatcctcaacatcgggtatttttggaatgcagctggcatgcatttgaagatgcgggttatgtacccagtacctatcccggtaaagtcggcgtctttggcggaaccggtactgcgtggcatttgaataaagtcaatacgcatcctgatgtgcaaaagtacgtgagcggtgcttcagtggtgaccaataacgataaggattatgttaccaccagggtgtcgtacaagctgaatttaaaagggcccagcgttaatgtgcaaacggcgtgttctaccgcgatggtcgccgtggtgatgggtattaatagtctgttgaatggggaaagcgatctgatagtcgccggtggcgtttccctcgatacccctgaacgccgtggctaccaatacatgcaaggcggaatggagtccgcggatgggcgttgttatgcttttgattctcgtgccaatggcaccgtattcagtcgcggagccggcgttgtcatattgaagcgcttgagtgacgcattgcgtgatggcgaccatatctatgcggtattgaaaggcggggcgattaataatgacggcaatctgaaggcgggctataccgcgccaagtatcgaaggccagatttcggtggcgaaacaggcgttcgacaacgcgcaggttcatccggataccatcagtttcgtcgaggcgcatggcaccgcgactgcgctgggggatcctatcgagttcacttcgctcagccagacgttcagtgaatttaccgacagaaaacaatattgccggctgggttcggtaaaaacgaatatcgggcatacggatgctgcttccggcatggcgagcttaattaaggcgtcattggcattggagaaaggggaccttcctgcttcactgcattatatttcgccaaatcccaatattgcatttgaaaccagcccgtttgtgatgaataccgaattgagcaaactggcgagttctgacgaaccgcatcgtgcattggtgaattcgtttggcgtaggggggacgaacgcctgtgtcattcttgaggctccgccgcgaacggagccaagcactcgccatgatggcttggttatgttgccattctcggcgaagagccgaactgcgttggaagcgatgaaacaacgtatgcacgatttcttgtttgaaaacaaggacgtcaatcttggcgatgtcgcctacacgctacaggtgggccgccagccgtttgcgcacagcacggtcgtcgtagggcaggatcgtgaaacgttactggagaaattgaaccagccgtccgccaatatttcaacgttgacgaaaggcgataaggccgtggtgtttatgttccccggccagggcaaccaatacatcaatatggcccgtgagctgtacgccacttacccgaaattccgcgaagtgatggatcgctgctgtcgctatttggacccgatcttgggcgtaaatttattgtcgataattttccaaggcgacgaaggattaagaaaaaaccgtattaatgaaacccagtttacgcagcctgcgctatttattgtcgaatacagtctggcgcaattatggatgtcgtgggggatcaaacccgatgccatgataggccacagcgttggcgaatatgtcgcagcgtgtattgccggcgtgttctccctggaagatgcgctgcgcgcggtggcgttacgcggcaaactggtacaagcgctgccggctggcgcaatgcttgccgtgctgatggatgaagagtcgctgcgtcagcggttacagggcgacaaattggagattgccgccgtcaattacccggggctctgcgtggtcgccggcgatttggatgagattgaggtattccaacggcagcttgaagacaacaatgtgttttgcaagcatctggatacctcccatggcttccattcatacatgatggaaccggcattgccagcttttaaagaggtcatcgacggcattgaattgcacgccccaaaaatcccattcgtctctacggtgagtggcgattggataaccgatgcgctagccactgacagcgattattgggttagacatgtgcgcaatccagtgctgttctctcacgcattcaaaacgttgatgtctgaagaacatcagcattatatcttcctggaagtggggccaggccgttctcttgaatcggccgcgaagcagcatttcaaggcggatgaaagcgcgttgatttactcttcgctgcctaccgcgaaggatgtggaattgacgggagaatatttacttacctcgctgggatgcctgtgggccagcggtgtaacaatctcctgggctcaattttacggtgatgaacatcgccgccggttgccattgccgggctatcctttcgaacgtaaggaattcaagctgccggcgctgaagcgaggagccgaaggaggacagagcgccagttccgtcagcgccctcaaacgcaaaaaagcggatattggcgaatggtttcacatgccggcctggaaacgcaccattcccgccaggttcatggcaggtagccgcatcgatccagactcggaatgttggctgctgttcgtggacgccatggttatcgccgaacatattcaaaggcaactggcggaaagcgcacagcgcgtattgaccgtctggcgcggcactcactatgaggaggatgcggcgaacgggtgttacgttatcgatccctccaaacgcgaagactacgttcgcctgctgaaaagtgtgaagaacctggcgctgcgtcccactcgcatcattaatatgtggaacctttctgccgataacggcgcaccgcagtgccatggtgatggctatgcgctgcaggtcgacgcattttacagccctctttatttgcagcaggcattggtcagtgaaaacctgctggaaaacctgcacctcttgtttgtgaccaacaatattttcaatgtgacggaggaacggctgtattcaccgcaaaaagcgttggtcgttgggcctgcgcgcgtcttttatcacgagtatcccgaagtgcggtgccacgttgtggatgtggatttattcggctacacggcgccccatgatttagcacagcaattgattgacgaaagccatatcgatacgcatggcaatctggtggcttatcgcgggcgcaaccggtgggaggaagattatcaggccgttcatctgaagcaagatgatacgggaattgctgcggagctgaaggatgagggtgtctacctcattaccggtggtttgggcggactgggcatgttggttgcgggccatgtgtcagaggtcagcaatgcgactttgatcctgacttatcgcactgagctgccgccgcgcgatcaatggcaagcgtggctgcagcagcattcggtggacgattcggtgagtgagaaaatcgcgggggttttacggctggaagaacgtggaaacaccgtgcatcttgcacaggttgatgtctgcgattatgccggtatgcgcgatgtgctggccgggtttacccgcatagatggcgttttccataccgcggggattgccggcggcggaattattccgctgaaaaatgacgccgattgtgctggcgtgttgaatcccaaagtgaacggcagtttgattttggacgagctgcttaaagataaacagcctgatttcttcattcttttctcttcgatcacttcgattgtcggcgatgaggcgcgcatcgattattgcgcgggcaatgcgtttatggacgctttcgcccattaccgcaaccagcaacgttctgggcatacggtttctctcaactggggtaagtggggggatatcggtatggcggtgcgttggagcaatcatctgattgagcaaaaaaatagtaaatccgcacagtttgaagaagtagagggcgatttgttgacgttgattggccgtgagggaatgcaagagcgttatcgggtcaacctggcggtgcaaaaagactgggtcattgatgagcatcgcttgacgcatcagccgtcattggtcggcgcgacgatattatcgatgctgtacgaatggatgagccattttaaacctcaagagagattgcaggttaagaatctgctgttgacgcaacccgtcatttatcatcatgcctggccgcgcaacatgcagttgctggtcaccgcagagagtcatggttacaagtttagcctgcgaagcagaggcctgttggatctggcctggcaggagcatgcgctgggtttagtcagctcaaaagtggctgagtcagaggatgaaccggcatcgcttgagtctcttcgccagcgctgtacgaaagcattggcgtacgagccgctggagtgcgagctgggcaacgccaatactggcgatgtcttcctttcgctgagcccgcggtgggacaaccaccaagacattttgcaaggggaaaacgaatggttgatgcataaagttatcggttccgatttccatgacgattttgcgcgctatccattccacccggcgatgatcgacgccacggcgatccgctgcctgacttatatcacccaggaaaacttcctgccgatcagttacggcaaaataacctaccacgcgccgctggaaacggattgctatgcgcacctcaaactgaaggggccgtatcagcatacggacaatgccattacgatggatattgtcttcctgtcacatgccggcgtgccgttattgacgttggaaaattacactctgattaaaatgacccaagtcaatcaggtggtggagtcggacgagaaggcggcgcccgcggcggtgaaagtcaatcttgcggacaaggatattttgttcaatgaagggctcgatgcgctgaaacgccagctggcgcatttggaatttgaacaattggttattgtcaccagcgaccttgggcaactgatcgatgagtctatcccggctcaaaatgaaaccttattggagaatgaggaggaaaaagccgctgatggccatgtgcggcccgcgttgtctgtggaatatatggcgcccgaaaacgacatcgagaaggaaatcgtcaaagtttggcagtccatcctcggtatttctgggattggcgtgaacgataatttcactgaactcggcggtaattcactgttggcggttcaggttgtgtcgacggtatcaggtatttttgaaattgatattcgcgtcgatctgttttaccaggagcagaccgttaaaggattgtcaaaactgatccttgctgagttggaagtattgctgcaaggcgaataa

SEQ ID NO: 430484 - DNA, 273 bp, Serratia marcescens
atggttgatataaaaagcaagatgagttctgatatagaagcgcaaatcatttctgtatggagaacgattttaaaaaacaaggagctgtcaacgaaagataatttctttgacgctggaggtaattcgttattgatgtctaaagtacacagggaaataaaagataagttttccacgcccattaccattatggatttattccaatacccaaccgtacagatgctaagtcaacgcattgcagagaaaaatgctgagctattaggaaaaaacaaataa

SEQ ID NO: 430485 - DNA, 789 bp, Serratia marcescens
atgagatacataattaataataatattaaatatcatgaagatagatcggagctgatctcgttacatgacgacattccgccgattgcgctgacggccacgctgaaccgcctgctttccgccctggtacgcaacaataacctggtgctttcccgcgatacgttgctgacacaggtgtgggaggcgcacggccaggtggcctccggcaacaacctcaacaacaccatctcgattctgcgcaaagcgttctcttcgctcggtgaggaagagatcatcgtcaccctgccgaggcagggtttcatgtttaccgcccgcgagctgaagacgacagatagacaggcggaggcgctgatggtgcagaacgcggcgctcgtcggcgaggccgcgcctgctgcagagcctacggctcgactgacgcgcttcaaacgtattgggctgagcgggttgctgctgttggccgcaggaagcgggatctgggcctggcaagacagcggctatgcgccgctcagcgcgatggcggtgggcaacattggcagttgtgaggtcaagttcgtcacttcataccacaagcctgggccgggtgaggtcgatctgagccgtttgcaagcgcttttggcgcagaaaaatatcccctgcaatgtgccggcgacagtgttgtattacgacagcaaattcattttgccgaatgccgctgggcggttccgatcgtcctacttttattattgcccacaggcaaagatgaaggttggggaagcacagtgcgagaatttccatgaaaaccagagtttgtag

SEQ ID NO: 430486 - DNA, 495 bp, Serratia marcescens
atgaaaaccagagtttgtaggcggatttggcagtatcggttagcactgttaagtgcggtgaccatactgattttcgctatagccgggtataggctgtttgttaaaccgcagataccggaatgccgtgcggtggtacagataacgaacacgatgccgaatgaagtctggaaacgcttgctgctggtcagtatcgtgccggacggcccacgcaaagccactgtgttgcttaacggcagtttttatcaaggggatacgcgttacgatatcagccgggctgtggcgttatcgtatcaacgacaggggagtaactatgtattgcgtgttgacgaaaacatcagaaagtcggcagatacggtgacgaaagatgagatgaatcggcggctgcccgcggtgggggcgttgtatcatttgcgtatcgagcaggttgatcgttaccactatctggtgagcaacaattattcaccgtggtttgtttgcgcgaccaaagaggaataa

SEQ ID NO: 430487 - DNA, 756 bp, Serratia marcescens
atgattttcatcataaatgacatcgtcctttacaatgaggaggacggcacgttggcgcatatcgataacgccagtaataaaatagctttacttaaacccagcgccagactgctatcgttatttattcgcaataataacaagctgttgctgcgcgagagattgcttaatgaagtttgggttgaacacggtctgaaagcctcgaacaacaaccttaataattatgtttccggcttacgcaagtctttggcgcaatgcggtacagaagagattatcgtgacttacccgcgccaggggtttaaattcaacgccattagcattcacgagacagatgaaaagaaggatgaatataaaaaagaacatgagaatatgttggaaaccaccactatcccgccgccggggaataaacagccgggtatacggcgttcgctgcagagattaattatgatcatggcggcctgcctggtgccttttgctgccatcgtgctgtatcaaaacagcacgcgcattaatgtttatcctctgggaagctacgggaattgccagatttacagcatgacgttaggcagcggcgatttaggccaaatcaaacgggtcatacaacgcgccggcttcagttgccaaacgcgcgccgacgtttattactacgataatatccgcaatgagggcgcggaaaacaatgaacaatgggtgacgtactgtcctcgagccggtaacagcccctgcatcaacaattatatcgataacaagcagccttga

SEQ ID NO: 430488 - DNA, 534 bp, Serratia marcescens
atgaaactgaacaaaatcatgctggctgcggccatggtatttggtgtggcttctctggcaaacgcggccgatcagggtcacggcaaagtgaccttcagcggctctattatcgatgcaccttgctctatcaccccggaatccatggatcagactgtagagctgggcgctatctccaacgtggcgctgaaaggcggcggtaaatctgctccgaaaaacttccaggttaagctggataactgtgtcattgaggaaggtggaaagaattcggtaaaattgaccttctctggcgcggcttccgacgctaaccctgagctgctggcactgtcaggcgatgctaaaggggcaggtatcgctattaccgatagcgctggtaaaccgatcaagctgggtacggctacaactgcacaaagtctgggcaatggcaacaataccctgagtttcagcgcttatctgcagggcagcactgcttccggcgcaactatcgtaccgggtgaattccagtccgttgccgactttaccctggcttaccagtaa

SEQ ID NO: 430489 - DNA, 543 bp, Serratia marcescens
atggattgtcgaataaataacgtaagggcgttttgcctattttgggtgtcgtttggttttgtttcgcaggctatttctgcttcgcacggcgaagggcgcctcaatatgcaaggcgctattatcgataccgcttgcgccatcgccacggaaagccgggaacaaattatcgacatgaaaaatacggcgctggcggatattgaacgcggcgggggcggtaaaagtgtgccgttcagcattgagctggtgaactgcgtgcttgaacgtgccgataaaaaactgccggactggaaacaatttcaaattacctttgacggccacgccgatggcgaggcgtttggtattaacggtgatatctccggcgtggcgttaaaaattgctgatgccgacgggaatattgcccttccgggcaggccgttgccgccaatggacattgttcccggtgactatcggctgaattttactctggcactgatcgccaataaccggccgcttaaagcagggagttatttttcctcggtgcgtttcaaaatggattattactga

SEQ ID NO: 430490 - DNA, 657 bp, Serratia marcescens
atggcaaggacaaacgtcaaagcgcgtgaatggacgtatgcgctgagcgaactgcgctattacgccgtgctgggcgggctggtgctgatggcgccgctcagtctgacggcgctgctgtggctactgccggcggccaacgccgttgacaactgggatgtggagggcgccaacggcgtgctctatatcagtggggcactgacggagagcgcctgccggctggagatggacagcgcgcggcaggatatcagtctgggtgaggtaacgaccggccggctggcgcagccgggcgatcgcggtacaccggtggcgttccagctgcggctgtgcgactgcctgcgcggcccgacggcgagccgggatgaacgcaccggggcgctgctctgggcacatgaccagccggcggtgcgggtggcctttaatgccccggccaacgccaataatgcgcagcttgtaaaggtgcagggggccagcggtatggggctgcgcctgctggatgcgcatggccgggacgtgcggctgggcagccgcggcgcgccgttgtggctaacgccgggcaacagcgttctgagttatagcatcactcctgagcgcaccgtggcgccgctgagagccggtgcgtatcgggcgatggtggattttgctctgagttatgactga

SEQ ID NO: 430491 - DNA, 492 bp, Serratia marcescens
atgaaaagtaaaaaaggcaaagtatggctggtgctcaccttattggcttcggtgacttcaatggcgcaggcggcggtgagcatcgtgacggtcagtgtgacggtagtggcaccgttgccttgtaccctcaacggtggcaaaccgatcgaggttaacttcggcgatgaggttatgactacacgcatcgacggcgataattaccgtcagccggtgggctatgggttgagctgtaacgggccctggaaaaatgccatgcggctgcagctctccggcgccgctgcaggtttcgatgggacgctgttgaaaaccagtgtgaatggtttaggtattgaactgcagagggacggtgtacgtataccgcttaacgcttggcaaaacttcacttatcccagcatgccgaagctggaagcggtgccggtgaagcagagcggggccaccctgccgactggggaatttaccgcctccgctacgctgcgggtcgattatcaatga

SEQ ID NO: 430492 - DNA, 498 bp, Serratia marcescens
atgcagtctggtccgatagctatgttgttactgagcgccttgaccttattccacatgccactgtgggcggttgttgagaccgatatgcagtttcgtggttttcttcgtgcgccgcccccctgtagcatcaatgatggggggatggtagatgttgatttcggcctacgggttggcgttaataaaatagacgggaataactatcgtcaggcagtgaattatcgtattcggtgtgaggcgccggatgctgtaccttgggagacggtgctgacattaaagggggctgctgccggattcgacaaggcggcggtgctaaccgataacgtcaacctgggtatccgggtttatcagaacggtgtgccctttccccctaacagcggcatcaagatcgatcccggcaacccgccgctgctggaagctgttcctgtcgctaagcctggggaaaagttaaaagagggggcttttctggccacggcgacactacaggtggagtaccaatga

SEQ ID NO: 430493 - DNA, 534 bp, Serratia marcescens
atgaggaaacggacgatagcaaagaacatcatcgccgggctgctgttagggtggggagcattgttgccggcgtgggctgcggacaacatgacatttagaggcgcactggtggcggaaccctgtgtgatcccgcctggccaggagacggtggtgctcaattttggcagcatagtggacaagtatctttatcagaatctgcgttcaccgggcgtacagttcgaaattatcctggctgagtgcgatctcagcgtgggcaaaacggtgcgaatgacgctgaacggaacagagagtttggctttgcctggcttgttggcaccggctggccaagctggcggtatcggcatcggcttggaaacgctggaaggtcaaacggtggccattaaccactccggtgagaagctcacgctggcggagggcaccaacggtattcgcctgttggcctatgtgcgcggtgagccggaagcgattgcgaatagaactatcggtcacggtgcttttagtgcggtagccacttttaacctggaatatgagtga

SEQ ID NO: 430494 - DNA, 810 bp, Serratia marcescens
atggctaaaaaaatactgatggctatttttatgatttttagtttagaaagtgccaacgcagaaatatatttccaggtgacaaagaaagaaggggggctattatggggggcgttttactatgagatgcttgactggacaacggatgatgataaaccgaacccctgttataataatataaaatgtacaatgatgattaccagctcatataatgcaataggtcagcggagtgacactgatggctattgggaggcttcaaaagtttcatgggttgcaagttcacggacgatgggtgaacttggcgagaattttaaaagaaacgtgggcctgccgagaaccggggcgtttgcctataaccggtatcttatcgttggtggggcgtgcgtagggttgttctatgcgagtagtcctggcgagtcgataaagcgtatgcctggttcaatatgtgcaaaccctcctgaagggaatgtttcttgtgatattgtgacgccgagccttacgctaaatcatggtgtaattaatattggtgaggtggagggtaatacggtttctgagtctttgaacattacctgtaataaaagaacaaacattcaattatttattagtgaagggatgaatgggttagcgttgaatgaagctggaaccttaaggacaaaccttagaattaatggtcagccggctggtccgggggtcgatcttgttattgagccaacaggtagagtggttcaggtgagttcaacattaaaatctgttggtgacatatcaccgggggttttcaacgctagcgccgtagcggttttatcaatactctag

SEQ ID NO: 430495 - DNA, 546 bp, Serratia marcescens
atgaaaaagcttaatttccttatagatgacgaaaatcgctattacgcggccggtttacagtacagtattattgagtatgcccaggttaatcagaaaaaggtgtctttcttaaagccggaagaggcggagcgtgccgatgtagtgatcgccacttcgggacgacgtgcgcagcgttggcgccgtgcaggccagcccgttccggctcaggttgtgacgattaaggaaagaaagttcacggcctcagacgaaatgtcatacgtactttatcgcgcggggcggcaaaatgagcttttccggctattggcttgtttattttccagggacggcatccgttccaatgtggcgaccttgacactcaccgatcgtgaacggcaggtggtcggccatttgcgtcgtggtgtggggcaatcccaggttgccagaataatgggggtaagtgtaaaaacggtgcatagccataaacgatctgttatggataagttattaatgacgcggcagcatgattttatttactggttgctttctcatgagggagaatattcctaa

SEQ ID NO: 430496 - DNA, 1113 bp, Serratia marcescens
atgcagcatgtcactttgttaaacaataatttagaaacaataaaaaatcgtattgaagagataaagctcaaaaatgatgaaatcaaaaaaggatttatagaacaaggaattaatcaagatatctcatcgttactgagcaagcttagtgagtatcaagaaaatatcgataaagctaaatcaaaaatcaatgaaatagttgaaaacaagtctcgatacttcacttatgttaaagagcgaagcgaatatgctataaaatataaagattttatagaaggacaagcatcggaaatccagaggttatatgattccctccatattaataatgatagttggaatgaagaacaaaatcatatcgtcaaagatatactttcagatattaatataagcggcaaagttatttttgataacgaaaaattttataatggattggaagaatgtattaacaggggtaaattcagagcgtccaacgaaaaaagcacaaagcaaaaattaattgaaacattcaatgttagaacctatgacgatttctttaagttagttaacaatgagaaagtaatcaactctgatggtggtagcgaattaatttcaattgaagattttttttggaagagtgaatatttcaatcaaggtggacgctacgaattaatgcattacctattttccccagaaagaatgaagggatacttgtatgtcaacgccgagtttacatataaaggaaaaacagttgataaactatctgtaggacaacgcggtactttttacgtgagtttaaagcttgcaacagatccgtttggtagtccatttgtattcgatcaacctgaagatgaccttgataatagttttatcatgaaacagcttgtgcctttattcaaaaaaataaaaaaatacagacaagttataatagttacacataatgcaaacttagttattaattctgattcagaacaggtgattgttgcgaattatgacggcagtatcattagctatgaggtcggagctattgaagatggcgatattaaacttcaagatgggataaggcatcatatatgttctattcttgaaggaggacatgttgcattctcagttcgtgaaaaaaaatatggcattcaatag

SEQ ID NO: 430497 - DNA, 2334 bp, Serratia marcescens
atgagcgcccacttcgtttcccagaccgtacgcaccgccaccggccactggtcggtgatactcccggccctcggcattgccttgcagccgaacggcaagccgcagccgtgcccgacctgcggcggtaaagaccgcttccgtttcgacaaccaggacggccgtggcacctggttctgcaatcagtgtggggccggtgacggcctcaacctggtggaaaaggccctgtcactgtctgccagggccgccgccgaacaggtggccgccgtgatggggagtaacaccaacgctttgccaccggccgctgaggccggtcattcaccacaagacaaagccgaggcccagcgcaaggccgcgcgacaggcacaggctctggtggctgccgcgcaacctcagaccgacaatgcctacctgagcgccaaaggctggccggaggcagaaaccctgaccctacacggccagtcgctgcgcgtcggcggtatcaccttccaacccggtgacctgctgttgccgctgcataatgccgggggagaagtggttaacgtacagctgattaacgccgccggtgacaagcgcatgctggcaggcggacaggtgaaagccgcctgccacaccctctgcggcccggacaacgcggttatctggctcaccgaaggttatgccaccggcctcaccgtgcaccgcctgaccggtgagacggtgtgcgtggcactcagcgccaacaacctggcggcggtggcggagcagctgcgcagccactacccggatgcacggttgctgctggcggccgataatgaccgcagcggcaccggacagacccgcgccgccgaggcggccacacgcaccggcggtatcccggcgctgccgcccacggagggcgactggaacgacgtctactgtaatcaggggattgaggccacgcgcgcgcagctccaggcgttcagccagccgacgcggccgagcccgttcgacacgctaagtgatgctgacctgaaagccatgagcgccagcgagaaggccgagctgttggccgagcactacggcaacaccctggcggtgccgccggtgggggaagagctgtgccgctatacgcgcggcgcctggcaggtgctgccacaccggcaactgagccgggagattgccgcattgttccagaaggtgcgcgcaccgttctccgccgccggtatcaacagcattttggataccctcaaactgatggtgccgcagatgggcgagcctgcccgccggttgataggctttcgtaacggggtgtttgataccgtcagcggccaattcggcgcccaccgacaagcgcactggctgcgcaccgtcaacagcgtggactacacgccgccgcgtgccggtgagaacctggctgaccatgcaccgcacttctggcactggctgacgcgggccgccgggggcaatcacgataaacaggagcgcattctcgcggcactctttatggtgctggccaaccgctacgactggcagctgttcctcgaagtgaccggccccggcggcagcggcaagagcgtgatggcggccatcgcccggctgttggccggtgccgataacaccacctcagccaccatcgataacctggagtcggcgcgcgaacgcgccagcgtggtcggctactcgctgattatcctgcctgaccaggaaaagtggagcggtgacggagcgggtatcaaggccatcaccggcggcgatgcggtcgccatcgacccgaaataccgcgatgcctacgcggcgcacatcccggcggtgattttggcggtgaacaacaacccgatgcagttcagcgaccgcagcggcggcatctcgcgccgccgggtgatcctgccgttcccggaagctatcgcacccgaagagcgcgacccgttgctattggcgaagatcaccgaagagctggccgtgattgtgcgtcacctgatgcaacgcttcgccaacccgaatgacgcccgcgtactgcttcaggcgcagcagagttcggcggaagccctggaaatcaaacggcatgccgatccgctggttgatttttgtggttacctgacggtgctgggcaccccggaagggatgatgatcggcaatgccaacatcaccccgccgaatccgcgccgctacctgtatcacgcctacctgtcgtttatggcggcacggggttatcagcacgtgatgaacctgacggcgttcggccaggcagtgccgcagacgctgaaagagtatgagcatacgctgctcaaacgccgcaccaagcagggaatacagaccaacctgatattgagtgacgagtgcgaagcggactggctgcctaagtgcggggcggtgtga

SEQ ID NO: 430498 - DNA, 336 bp, Serratia marcescens
atgaacactgcatcctgtttaccgattgaagtccgtaccgccgttttccgccgcgccgtggcgcaagcctatctggacacctgcgccttttaccgggtgagcctgggttacacgctggacgagctgcagatgacgattgccctgcgtctggaagggcattttgtgcgtcagtacggtgcggaggatggcatggacatggcgtgcacgatgttgagcgacatggtgcagccggacgttctggtggccgcaccgcgcctgaccgcgctggggcaaaagatgatggacgagctgtgctgcgagcgcctctcggcggcacagcacgctaccgtacactga

SEQ ID NO: 430499 - DNA, 192 bp, Serratia marcescens
atggctacgaccctcaccccgactcacccgacattctgctttctgtttgcggccgtgcgccgttctgcgctgaccgcttcaccgcgtatggtgcgcaccgtggcggataccgaacgcaacgcccgccgcgtgctggcccgtgattatgtgttgtcctttgccggtcgtctgccggttaaggcggcagcatga

SEQ ID NO: 430500 - DNA, 213 bp, Serratia marcescens
atgcagttaaccctcggtcgacactgttttaccctgagcggcaacgacgccttgtttgtggccgaagccatcttgttgcagcgcaagcacccggatatcgttttacctgagcaccgcagtgaaaaacacggtgtgatttgccttacgaaccggaaggcagagttgcgtcgtatctgtgctgacgaagtggttgatcacaatgcgatcgattga

SEQ ID NO: 430501 - DNA, 726 bp, Serratia marcescens
atgagcaccaccgccttaccgaaatacatcaccgataaactgcaagccctgcgtgacgctcgcgccgcccacgacaaaaactatcaggcgttgaccgacgtcgtaaccggtattgcccgctgccaccaacagaagaaagacaccgaagtgcagagccaggaggcagaaagccagtggcgccccctgtttcgtaaactgcgcggagaaatgacgccggaaccgcaagcgcaacaccacagccggatttccaagcgggagctggcgaaagagttcgacggactgattgaggagatggagctggacaaaatgcagcttcacctcaactgcggcggcacagccccgaaggtggtgagcgcgcacaaagacgccctcacgacctttgcagctcacgcgatgcatcaggccgtggatgcgctgagcaaggcgctaatcagccctgacgttatcaaggcgtgtgcactggcttcacgggcttacggtgtctatgcggacaatccgatgaggatgattgagctacaggtacagggcgcacttcaaggccgcattcgcgctaccatggctacgcaaaatatcgaccacccggtgcttaatgagattggcctgacgataccggaagaaaccggcgtattgcgggagcgacaaagatgcccaatgcgccagatgcgtggggcaagagaactggcggaaaaacgccgtctgctgcaagaaaaaggagccaaatcatga

SEQ ID NO: 430502 - DNA, 162 bp, Serratia marcescens
gtggtggacagcgtgccggtgtcgcgtgacggcatggtgctgaaggcgggggcggaagtggcggtgaacgagaacgccacgctgtcgctgggctacggcgggctgctgtcgcagaaccaccaggacaacagcgtcaacgccggtttcacctggcgcttctaa

SEQ ID NO: 430503 - DNA, 354 bp, Serratia marcescens; identical to SEQ ID NO: 424029

SEQ ID NO: 430504 - DNA, 423 bp, Serratia marcescens
atgccgaccaccagcggcggtctggcgcagatccagcagaaactgatgcagacgttggataagattaattcgatgccgatcaatccgatgatcaacgaagcgaccaagacgctggcggaaagtcagaaaaccatgaagtcgacgcagcagaccatgaagtcgctgaacgacatcatcgccagcaaagagatgcaggcgctgccgcaggacatgcagaaaaccctgctggagctgaaccgcagcatgaaagggttccagcctggttcgccggcttacaacaagatggtgggcgatatgcagcgcctcgaccaggtgttgcgtgagctgcaaccggtgctgcgcaccctgaatgagaagagcaacgcgctggtgtttgaagccgccggcagcactgaccctcagccgaagaaggccacgaaatga

SEQ ID NO: 430505 - DNA, 156 bp, Serratia marcescens
atgcaccaggtcttggactggaacagcacccgggccatccactctttgaggcccagcggcaagcgcaccctggcgcacagcaggatgatcgccaccatgcaaaacgccgggatcagctgcacgaacaccataaacagcgtggccatgctggcgtag

SEQ ID NO: 430506 - DNA, 1311 bp, Serratia marcescens
atggaaatcgaagaatttactgacacatattcagacgacattatttatttaagagaagcaagagaggcacttctgacacaccctcttcgttcagaaatgcctaattattgcaatgcgtccctgagtaggatatatgcaattgtaatgattggcagcattgagtcaatgctggaaagatggcttgaccgtgataaccttgaaatactaagcgtttattttaagccgaaagtaaccaatgccgttcgcattaacggattatgttcgtcttttacctcgaaaggcatcaatgttaataaagacgtatttgatgattatttggcgataaaatacatacgtaatgcgatagtacatgccagctgggagaaacaatccggtggtctgaaacaagatgaaatagactggattcatagtcgtggattccccactgatacccgcaaactcaattcaacgcactggcagcgatttgaatgggttaatgaaaacatgatgctctacattgcactttcaggattggcaaaagctccacctgctcatcatgcgggtacagtaggtattgatatcaagccgttgccagataccagtggtatcatcaactggtcagactggcccagactctactggtcgaatcttgaacgcatctctgagtcattaaacacaagcatagaacaagggattagccaaaatgaaagtaattggtcagaaaaactcgcgggctcagatttcaacaaattaacatccttgcaaaaaagtcgtcatctcattctgtctgcttttgcttcagttaaaaatggggagagtatagtacagaatacactcgagatttcagaaaatgtatccatgtgctggaaccaatttgttgcccattgcccggaatttagaagtttagaaaagttagaagtcaggtctgcaataagcactctttttatcatgcatgaaaacaatattcatcctataaatcatattttcccggaaattaaggaggacgccccattcaaggtacatgaagatttggtttcagtgtgttttgaaaaaacagatctactcacaattactgatattgccaaagcttataagctgggaagaatggcatatcgtgtaatgccaaacattatgccgctaaaattgttttcttatttaataccaatttgttcccctgaaagaattcaggagtggcataatcaatcaaattatatttctgatatttataaattaaatcgtctctggtatacttccattgaggggcgtcagttgaatcttgatgcaattgattattatcaagatttaattaaagaattcagcaaaacaaaataa

SEQ ID NO: 430507 - DNA, 894 bp, Serratia marcescens
atgcttaaaacctggaatgatttagaaagttatacccaatatgtctactcgaccttgcttaacccacgagataatggagtggaagttagtcgtaacgttatccttaagggattaaaaggtgaatatcaaattgatgtatattaccaatttgaaaatgcaggttttatacatcgtgtagcgatagagtgtaaatatcacaatcgcccgcttgatcgcgatactattatgccattttgcaacaaaatcacagatattgggaatattatcggggtaatagtcagtaagtctggttaccaaagtggcgcacaagaatacgcagaaaaacatggcattactttactgacaactgatgatttaccaaaatttaacatattggttgccgattacttgataaattcaactttacctacaaaagactggatcggcgagcctttttggattttgatggaaagagaggaagataatgtttcaggttcatactacaagtttgcacaaaaacataacggaagagatgtaataccattattcttttcaaagcgtgaagcaattgactttctaaatgaatctgagcagtcactgcattttgcaataagaggtgttccacaacattatttgaaacggttgatagcaataacagagcggttaaaacctttattcttcttaatgcttcctgctttgaatgaagaacaagccaaaggtttattaattgaaccaactgaattaatgaaaagatatctactatcagaaatatcacctgaagaatatcaagagttttacgttaaaaggaagtcgcgttacaagaatgagcttactctttttaaaatattaaaagcaatgaaaggtaaaattggtgcagaattggctgaaaaaattttaaaaaataaaaaaacgtaa

SEQ ID NO: 430508 - DNA, 753 bp, Serratia marcescens
atggatagagcccaacaacttatcgtgttccaatcccaaacaaaaaacgttaaagaattggatcgcgcttggcgtattgctaagattagtttgaatcttgctttaaaaaatgatcgagatactgaggcaagaatccatacgaaaactctttcgctaatttattccgcctggactgaagcattattctcaaaattaattcacacaccttatggttttgaattaagcgaaatagagaatataaaaaacataaaaggaatggaagctaaatggcgtagatgcttaaaactagctaaggctaaagttttattagcaccaacattcaattctgttcaattatcttctgctgagatttatattaaacaattaatcattgactatgtgaaaacgccaagcacactcaggaataggattgctcatgggcaatgggttgtcgcttttcagggtgatagtgtgacagatataagttctgacttgacgctagccattgaagagttaaatgtcgtcgatctagataatttaaaaatgggttttaaagggttagctgatattatagaagctatgattgagtcaccaaacaatgcttttgtgaaagactatactaaagttgaatccgatttgaaaagtaacttatcaagacgtagtggatacacattggcagggcatattcagagtttaaaaaagaaatatacttatcgacttttaaaaccgatacggctagcaaattgtatttgtgctattcaagatgatggctaa

SEQ ID NO: 430509 - DNA, 1611 bp, Serratia marcescens
atggctgaacagacggaaaacaaggcggcggcgggcggcttcgcgccgctgaaaattccattatttgcggtgctgtggggcgccacggtgctcggcaacgtcggcagttttatgcgcgacgtcgccagctcgtggctgatcaccgacctgtcgagcaacccttcggcggtggcgttgatgcaaaccgccgccacgctgccggtgttcctgctggccatcccggccggggtgctgtcggacattctcgatcggcgacgctttctgatcttcgtgcaaattctgctggcctgcgtcagcggcagcctgttgctgctgtcgcagaccggcgcgctgacggtggaatacctgctggcgctgaccttcgtcggcggtatcggcgcggcgctgatggggccgacctggcaggcgatcgtgccggagctggtgccgcgcgccgagctgaaaaacgccgtggcgctgaactcgctgggcatcaacatcgcccgctccatcggcccggcggccggcggtttgctgctggccagcttcggtgccggcgcggcctacggcgcggacgtgatgagctatgtgctggtgatcgcggcgctgctgtggtggaagcggccgaaggttgaggacagcggcctgtcggaacacttcttcggcgccttccgcgccgggctgcgctatgcccgttccagccgcgagctgcacgtggtgctgctgcgggcggcggtgttcttcgccttctccagctcggtttgggcgctgctgccgctggtggcgcgccgcatgctgggcggcagcgccggtttttacggcgtcctgctgggggcggtgggcgccggggcgatccttggggctattgtgctgccgcgcctgcgccagcggctgaacgccgacgggctggtgttgctggcggcggtgctgacggcggcggtaatggcggccctgtcgctggcgccgccgcagtggttggcggtggtgctgctgctggtgctgggcgccggctggattattgcgctgaccacgctcaacggcgcggcgcagggcgtgctgcctaactgggtgcgcggccgcggcctggccatctatctgatggtgttcaacggcgcgatggcggcgggcagcctgttgtgggggctggtggcgcaggagctgggcgtggccgccacgctgctggtcggcggcgtcggcctgttggcggcggggctgctgttccaccgcctgcgtctgccgaccggcgaggccgatctgcagccgtcgaaccattggccggagccgttggttaacacgccggtcgagaacgatcgcggcccggtgatgattcaggtggagtaccgcattcgcgagcaggatcggccgcagttcttgcgcacgctgctgatgctggagcgggcgcgtcgccgcgatggcgcttacgcctggggcatcaccgagcacaccggcgatccggaatgcatcatggagtggttcctggtggaatcctgggcggagcatctgcggcagcaccagcgggtatcgcacgccgacgccgatctgcagcaggaggcgctgcgcttccatatcggccctgagaaaccggtggtgcatcacttcctgtcgctcgaccggcgtcaggtgaagcattaa

SEQ ID NO: 430510 - DNA, 825 bp, Serratia marcescens
atgggcgatgtatcaattattactaatgctcttgggcgttttgccaacaatatgcgactctatggggaagcatttttaagataccgagaattggtagcaatcgaccgtgaagaggctatccacaacctagatcgagcatttgagcaaaatcttgagggttttcatacgttatatgatgtatcacaagcgatatttgacttccatgagcatcctgagactagcctcttaatttcaattcgaaatgctcttcatcaccgtgatcatcctctattccatagccttctccagactatttggttggatgggaaacctgagcgtctacttggggctgaatatttaattgctaggcatcgaacgacaggtggcaatcctccgttgatgatgcatttgataaagttagaagatgtttatagtcgcttagatccacgcagcgaatcggactacttaaacccaatgggtaaagcaaatgctttatccagattcgtctctctggaaaatggcttggcctttgaaaaagtgtggaaaaaaacgaaagtagatcgacaccccacaaagcaagtgtatttggacttgttgccgatattcaattctgctgtttctagagtttttactgcattggataatgctggagtgttatttcaagggtttgatgcaaatgcttataaatccgtatttattgaagaattaaaaactgatcttcagcattttgatttttttggtcttagaataaatgcgctacagattgagttgggtccaaaatttacaatccaagaagcttctatccgacgaggttgtacctatcaagggatgatggtagacgaatag

SEQ ID NO: 430511 - DNA, 1371 bp, Serratia marcescens
atggaacattgtcattgcgagacgctcgaagaactcaaaatagttattaaacaatatgggccaggagttctctacagaggacaaactcaacgttacctatcttcagatggctcgccctcaatgcccacgtcatttcagcgtcaagggtgcgtacccgatttgatgattatgtggacctattatgcaaagagagccttgcaacacttagtacgcggttggaatgataccggcgataatgcaaccaaccaagcaatccttcagcattatgggtttcgttcctttttccttgatgttagtggcgatccgcgtgttgctgcttggtttgcatgtaataaatttgattctaagtatgtggtcaatttggtagaggattgctttgaagatccagtttggttgcgtactctaaatgcttgtttcgctccatccgaagatattggccacatttatttaataagccagaagttactacgacaatacaatcttcaggctgttcatctatccgaaattgcgacagatcatggcgctccaagatatgtacgacaggatgcgtacatggtggggcctttaattcgtgaagggttagatggagactgtattatttgtcatatcagcgctccagcagaggttctgcgtaaatatgcggagggatatagtgttggctggctatttccagaaccatgtgaggatcctgtttatcgcgaacttttggcaatgccatgggtgaagatgcgacacctttcggatgaaggtcttgaggcgttcaagaggtcattggagttacctgagtattcctgtcaccttcaaaagcgcatgccttctagaagtgcaatgtatagacccttttggactagggaccttccgcctccggacggtttggccattatctcttcacaaatagttcagattctatgtgaaagcgctctgtatcatggtgtaagtgacccttgttttgttcttcctgaaatcaacaagctattagaaaagtataatgagatatcaattgaacttgatggacttgtttaccatggtatggacacaagatatgggaagggcgttggaatagtaaaaatgcctgaaaatattgtatgtctatttgaatatggtatcgatcatccagggttgcgtatcatgagtattggtcgcttctgtgggatgcactatcgaatcgatagtaacggctgttgggaacgtgttattcatgaggaagactgcaagtgtggttcagaacatattgacaatatatccttacttggccgggttgatgtttccttgaggaacaagttactagaagataccggttcagatttatatgttcagaaaggtattgacccgacctctgacaaattggctacttggggggaaccttactag

SEQ ID NO: 430512 - DNA, 447 bp, Serratia marcescens
atgagtgacgtaacaacgcaagacattgatgatgcactggagcgggcccaagcgttgaaagaaaccgctgaggagttcattgatatcgctgacggtatcaacaatgccgcacgtatcagactggaggatgagcgtgatatcgacatcgatagcacgcgtacgatacctcttgatgacatcccgctgggtgaggaagcgttacgcgtgaaagaggatacgcccggcgttgataccgcaatccagacactggaagacttggccgaaggcaaaattcctgctactgaagtaagtgaaaaattccaaggggcgatggaagacctagacactctcgattgcacgcttcaagatgttggtgctgaagatgtcatcaaggcctctcagtcgtctgacgacgacttctatggtgatcaggatgacgaaacatatgatgacgaggagtatgattaa

SEQ ID NO: 430513 - DNA, 1623 bp, Serratia marcescens
atgcacctatccgaacacaataaaaacatgtttataacgtttctttctggcgccgcgacgcctttcccatacatatatgatgcagtcagtgaacagttgctcctgctcattctcaaagcccggcaactaaatgaagatcctgagtacagcaaatggtttgctgagcagcatcaggtactcacaatgctgcaagcccagagtgaaaaaattaaaaaaatttattcacagaatagcttggcgcttagttttaaggagtccaagcaagacagcctcatagatgcacttatattcatgtgtcaaatttatacaggttttgatgagggcaaagtcagccttaagacatggggagatatgaaccgacagccatcagagcagggatttcgctatgcggagcaaaacaaactctgggaagagtttattcatgatgatatgtttgccatcctgacagaggggccgacacattgcccgccaattcctcctcaggcaagaaaaggctactgccatcaggatctttccattgcgcactcatgcagcaacgagcttctttcccgattaaataatttccacaagatagattcgctaccgatactcgctgatgcaatttacaacttaattactttctttcgtcatgcgaggacggctgttcccgactgcctgtccgaatttgaaaaagtgcacagagacctcctggtaggtgaaaatcgtgaaagcaatgttttcaaaaatattatcaaattaatcaacgatgaagggcgtaatcggttcattgaaaggatagcggaacagtgcgaatctcagcacgccgagtatttgttcggccagtttttaggcatctatgcctcggagatcgcacagtggattgctgagcttcagatttattttaaagatgagcaaccaacgccattttcctggaaattcacaacagttgcggctgatgcccgcgtctatgccgaagaggaagagcagaaaccgaccgtggcatgggagagcgactattgccagatttcaattaagcgagaaaccctcctgaaactcatccagaccaatgccttgcatgatgcagccgactcattggctgactgcctcttgcgtatttatggtaagcctgccgaagttatgttcagagagaagggtatagctccgccaatctccgataccgaactttacgtctataattcaaacagctaccattttaacaacactcttcatggcaattatcagaagatcataggtattttgcagtcttttgaaaaatggcatgaaaataataaagtgcttctgatcagccacaaaaaaaaacgtattgaacgtgttgatgtacaagtccgtctggctgggttgagatgctatgaccttaaaatgggcatccctagcggcaatagattgaaagtaaaagacggtgtttatgatctggtaaaacatgacaccagtattcgctttgaaaactccatcagtgatgtctcacttcagcggtaccattctcaagtaaaaaaaatcatcaataaggacatagatgatttgattctgagccaacaaaacaataattctcaaatcccattcagtggcgcgcatcacgctataaagcctctatggagcaagtgtggaattcttgagggagaatga

SEQ ID NO: 430514 - DNA, 3120 bp, Serratia marcescens
atgtttggaaaactcctcacaagtgtctcatggcaggtcagggctgagttgcgccgtagcctgaagtcgaatcgggattacaaaaaactcagctggaacccgatagaaagaattctggtttcctgctccacctattacatccgagctatgctttttctttggttcactgcagttggtgctgttggcgtggtggaatactttcgccctgtattgcaaccgttcgctcttcagcattttaaggatattaccctactttcaggatggatgtctaatttactgggtagccagttgactattatcgctattgtttttccactggtcgtgggtcttataagtgttctgtttcaaaagaaatcagcaagaatccatatccagtccgcgtatcaactccactccgggtatatgttttctggcctgagtggactgtcacttgccgcatttattgtgttagccggcatgacgttatcaattggtgacagatatcttaatacagctttcgctattacagcttttgtgtggatgcttttcaatatttttctgtctatctggttctttgtctccagtctgaatgttctggatgagaacaagcgcgatcgtcttatgaataagtattttttgtcacagatagtggatgactatattcaaaaagcacttattatggcatggctgcgctatccgggatctaacatcggcgagagttatctcggtagtattaaaatacttccttactcaatatctgaaaaggaggaaatgaaccattttaaatttgatatcagtaaaaacgatgttgttatagatatctatacaaggccacttttattcctgctgaggagactaaaagcggtagatggacaggatgcagaaattatcattttgccttcttttggtgttcattctggtgaactgactttattgtcatcgaaaggtgtcatgcctgtttcaggattatggcggtggttatgccggcgttgcattgtgaccgggcattccgagaacaaaagggatctggatgatattaccttcgatttctttggtgaggcatacgatgcacttaacgataaaaacattagcatcttcaggacaggtgttaaacgattaacggacacctatatctctattaaacgaagctacaattacgggggtgacagaaactatctggatgaagtaaaagaatcggggtttagccatacattcagtgattcattccattatgaattgaggaaattttttcgtgaaaccgtaaaatccacagaatattcaggcgagtatttccgtgagtctatggctattccattacatgtgtacagaaaaacacagagtagtcgttttaccgatttcagacaatttttactttcgcttttcaggggatggcatgtgttaaacgagtggaaagcgggactgggggtcaccctctcggccagccaggagcagactcatcagacgcttatccgcaattttatcggcctgtgggaggggtggagtatgggcacgatcattggcaaacccggtagtgcagattctaccgatcgtctgatgtatcatctgcataacaccgcaaggttgcttatcccgtcagtggttgccgataatgcttcttccgtgcaatatgctcatgacgttctctgtctctggtttaaccagagccgtttttcacgacactgggaggaagagtaccgctggcacagtttcttcctgactccagattatctgtctctggatgaaacagattcgcagtgggatatgttactcaggggaagcccatataaaaaggatgcggccttatccattatatttgcaaatgccttatctgatttacgcctgttaatggcaggctatctcattgcgcatttcgaaccgcaaaaaaatatagacttatccgatcttgttaatcatctcattatgtctgaattatatgaagaaagagacactcatgatacgctgacgcctgcattcagacgttctgtcgatatcattgatatgattctgagaattgagcactataatcttcatacgaatacaaactggtacagtggtttatcagaaactattgaggttatgaactcttataatgagaggccttacattcccgggagggtgtatacaggagtaaatgaggacataaggagcctctacggagcgttttccttgctggctataaagctcgccagacctgctgaacaggttacccagcgtgttaatgaagccctggcgggagggttgttttcctatttcagtaaagtccgaataatttctattcttgaaaggctgaagcgggacccctcatcctcttatgaaagctatctcatttcagaagcggattatgcaacgaatgtgattttctttaatgatgtgctggataaatatattgaagttttcagccgtagcaaattggcagatatcgttactgccgaagtagatcttgagcgtctcagaaataccgacaatcgtctgacaaatgaacttccaggggcattgtctgaagatactctactcaatcacttcacattttctcaaaattcagaatgtgatcgtgactggctggtgggatacattcctgttggtgtttccaaagatgatgtcgctagagaacttaattggaatgagtacggagatttcccctcggtatcagtagtgaagaaaaacattctccagagactgcattatttactgtggcaatcacaggctaaattaacgatggaggtcaaaaaaatcgaaacgctgttaatggaagtcgcgcaacggtctgctgatcagaataattacattctagtgatctatggttcccgctttagcgaagaactgagggaactggtctatcagccggaaaggcatgacgcgtttagcatacatgttgatgtgacagccagaggtatccgctctctgcccttcaggatcaataactgtcttatttaccttggcctcaattccgaacaggaattttcgcttatggtcagtgctgaatcctttggtgaactcaggctgttcaggtatccggatggtaccctttttaacaccttctaccgcagtagcgacgatccacttgaaggtgtgatgaaaacgctctgggaaatggagatggaaatcactggtccactagtggcgcggtttgaacatagctga

SEQ ID NO: 430515 - DNA, 1434 bp, Serratia marcescens
ttgaacctgtatgccgcactgcgtcagcgcgtggaaaatacgcgctggtacgccaaacggaaaagctaccgcgtgctgttctggcgcgagatcacgccactggcggtgcccatctttctggagaacgcctgtgtcctgctgatgggggtgctgagcacctttctggtgagctggctcggcaaagaggcgatggccggagtggggctggcggacagtttcaacatggtgatcatcgcctttttcgccgcggtggatctcggcaccaccgtggtggtggccttcagcctcggcaagcgcgatcgccggcgggcgcgggcggcggcgcgtcagtcgctggtgctgatgatcggcgtggcgctgctgttggcggcgggcattcacctggcgggtgagcctatcattgatgtgatcgccggcgcggcctcgccggaggtgaaagcgctggcgctctcttacctgcaaactacggtgtggagctacccggcggcggcgattgcgttgatcggcagcggcgccctgcgcggcgcgggcaacaccaagatcccgctgcttatcaatggcggcatgaatatcctcaatatcatcatcagcagcatcctgatttacggcatgctgggctggcatggcctggggttcgtcggcgccgggctggggctgacgatttcccgctatatcggcgccatcgccatcctctacgtgctggcgatcggctttaatccggcgctgcacatcacgttgaaaagctatttcacgccgctcaaaatgagcatcctgtgggaagtgctggggatcggcattcccgccagcgtcgagtcggtactgtttaacggcggcaagctgttgacgcagatgtttgtcgccggcatgggcaccaacgtgatcgccggcaactttatcgctttctccatcgcttcgttgatcaacctgccgggcaacgcgttgggatcggcctcgaccattatcgtcggccggcggctcggcaaaggcgagatcggccaggcggagcggcagctgcgccatattttctggctgtcgacccttgggctgaccgccatcgcctggggcaccgcgccgctggccggggtgttcgccgcgttttatacctcgcaggatgatgtgaaaacggtggtgaaaaccctgatctggctcaacgccgcctttatgccgatctgggccgcttcctgggtcttgcccgccgggttgaaaggcgcgcgcgacgcccgcttcgccatgtgggtgacgatgctcggcatgtgggggtgccgcgtggtggccggctacgcgttgggcatcgaactgggcatgggcgtggtgggcgtctggttggggatgttcctcgattgggcggtgcgcggcgccttattctactggcgcatggtcagcgggcgctggctgtggaaatatccgcgggccaggcgctcggacgccgggtga

SEQ ID NO: 430516 - DNA, 204 bp, Serratia marcescens
atgttcctcctgggcgtcatcatggccgatcaggtgtatcagtacggcttgcgtctggcggtgctggccgataaagggcgacgtggctggcgatgccggcgcgaacgtcaggccggcgcgtcgcgttttcaccgccgcttgcagaatcttctttcgatgcttccgagtatggtcgaccatgcgcctccgaatagggccgcctga

SEQ ID NO: 430517 - DNA, 705 bp, Serratia marcescens
gtgagacaaaatcaatatgggcagccgataggcgatgccctccctcattggcagccggcaggcatgcccgggcaagcgttactgtcagggcggttttgccgcctggaaccactgaacctcgaacgctggggcgacgagctttatcgggcttatcaaaccgccgaggacgaccgcgactggacctatctgttttgggcgcggccgcagacgcgcgaggattttcagcattacctgcaggccctggcgtccagcgccgacaggcgcacgatggtggtgatcgatcaggcgaacgggcgcgcggtaggaacctgcgcttttttgcgcatcgatcccgccaacggtgcggctgaactgggcaccatcaactggtccccgctgatgaagcgcagtgcgctcggcagcgaggccattttcctgatgctgcgccatttgtttgacgatctgggttaccggcgctgcgaatggaaatgcgatagcctcaatctgccttcgcgtcaggccgccgagcgttttggctttcgctatgagggcacgttccgtcaggcggtcgtcgtcaaaggacgcacgcgcgacaccgactggctgtcgatcatcgatggagaatggccggcgctgcgctcggcgtttgccgcctggctgtcgccggataacatcggcgacgacgggcggcaagaacggcgtttgcaggccttccagcccgggtga

SEQ ID NO: 430518 - DNA, 894 bp, Serratia marcescens
atgaaacaacgattttccccgctcgcgctggcgctgctcatcagttttcccgccgatgccttactgctcgtgcaatttgaactcgaccctgccacgctgcatatcgccgcaggcccggtgccgatcaatctggcgaagcctgcgcagcaggtaacggatcttaccgcaacgccacgacgcgccagctggcgatggccgcaacgcgcaatcaacgtcagcgcccgtctggaaggcggcgatctgcgcctgagcttcagcagcgatcggccgcaaaccctgaactggtatcatatgccgcagggggaaacgctgctgttgccgatcggcgaaggcagccgcatcccgctggacaacgcggtctggcgtcattacctgacgacggaaatgacgccgctggataccaactgggatctgaaactgccgctgtggagcctgcaacaccagggtaaggtctacagctggctgatgttgacgccgttcagtaaccagatagccttcgccaccgcgcaggaaaagctggcgatgcgcgccagccaccaattcaatcgcttcaatcaacaacaggcattcgaggtgctgctgcacgtcggcaacgccccgctgtccggcgcccgccgttaccgcgactatctgcaacaaaacggccggttcagcagcctgcgcgagaagatcaagcaggcgcccgaaggcgaaaagctgatcggcgctacccatatctatctgtggggcgaccaattgctggcggcggaagatgtcaaggattggccgggattactgcactacttcgcctctcccgccgccgaagcgctgcggcagaagatggacgccgagagcagaagcttgctgctgcggctggcgggaaaacgccggagggctggcaacaacagcccctga

SEQ ID NO: 430519 - DNA, 1494 bp, Serratia marcescens
gtggcgcagctaaaccgggataccgaacatgccaacgatggcagcatcagcccgatattcaacaaggagaaggagcagaaccggctgaagcaggcgcagttgattggggagattggcggccaggcaatggacgtcatccgcacgcagggtgagattgccgggctgaaggcgcagaaagacccggcggcgctggcgcaggccagggagcagcttgagaagagcgggaaacagacgaacgatgcggcggtgatgaagcaggcgtacgacaacgcgatgcggcaatacggcactggcagcgacctgcagaaggcggcgcaggcggtgacgggcgcgttgacggcgctggcgggcaataacctggcgggcgcgctggcgagtggtgcctcgccgtacctggcgacggaaatcaagaaactgaccaccaatccgcggacaggtgaagtcgacgttgcggccaatgcgatggcgcatgcagtgctgggcgcagtgactgcgcagatgaacaaccagtcagctgcggcaggcgggttgggcgcgggcggcggtgaactggcggcgcgctacattgccgggcagctgttcccgggcaaaacggcgcagcagctgagcgaaagcgagaagcagcaggtgagcacgctgagccagctggccgcagggcttgcaggcggcctggcgacgggggatactgcgggagcggtgaccgacggtcaggctgggaagaatgcggttgagaataactatctgagcagcaaacagatagataactggtctgctgaaatgaagtcctgccaggccagcggcggtgactgcagcggcgttatcaagaagtatgaggagctgagtaccgcccagcagaagcagctcatcagcgactgcgccagcaatccggaaagctgtcagcagaaatacggtgacgtgctgaccgacagtctggcagtgaagcaggcaatagatcgtgccctgggtgaagatatcccgatcaagatggtttacgatctgacggcgacgtttgcgcagcagatgcaggctgaaggtgttgttgccactcagaaagtatcggaagcactccagaaagagtacggtctggatgaggttcaggcgggtattgtagcgagcgctgctgcatcagcgtttgggggaattagtaaggctaagggaagcactcagcctaaaatcgaacaaattcttaaaccagagaaaaactgggaaaatgctcgaaacaaggcactggatcttgtaggtaatttaggtgcaaattctaaaccagttattgggcgtttagaagtaagtgccgggaacggaaaggttattggacgacaatctagtgatggcaaagtgggttggcgtgttgattatgatcctgaaaaaggtacgcatatcaatatatgggattactctcagggtaaagggccaggaaaagcagtgaaacaagtcataccttttgaaggtaatgagaaatcttttgaaactacattgaagcagctaaacaggtag

SEQ ID NO: 430520 - DNA, 531 bp, Serratia marcescens
atgcctggcaaacgctgcttcgaggatacgtggcacttgttcgagaccgatctgttcgctcgcccaggtcactcgcctctcacggttctgctggcgtacggagatctcttggtcgatcgactgccccacctcactctgccgtgtcgagttctctcgcgggccgatgtacacgcagctttcgaactgcgccacctgcaacttccaacaacgcgctggcaccctcaccgagaaacggtcccagatcgtctccagcacgtaatcctcatgacctttgcgctgaaccaccgcaacccgtgcagcctgatcgctcacccccttgcggagaacttcgccgtctggcaactgccactggtaaggcacctcgaccatgcgtgtatccagctgcagataaggttcgtcggcagctatagcgccccccgcacccgacagcagcaacatgtatccccagcctctgcaacacatatagtgctgccagcccctataattctttttcacaaaagctccctcattgagaaatgttatcaactgtaa

SEQ ID NO: 430521 - DNA, 663 bp, Serratia marcescens
atgtatacgctgacgccgcaaggcctctggaatcagcaccagtggaatgcgaagctgcgacgtgtcgtcagcgacgtgttagaacagactcggccatggagttacagcccggccgtccatttcggcgacggcttgttctgggccaccgatcgcgacggctatggcatagacccggatacggcccgcgtcagcggcagcattaagacctcaaccgccaaactatttttcggcagccacatgggcggttgggcgctggccccctcatctggtgcagaagacagccaggtattccgtgtcatcgatccggctaccggccagcttcgcttcgacgtggcgacacctgctgcctactacacatccagcgtagcccgcagcgcgcatggtcgtttgctggcgatcggcggtggaagcggcgacaaggcggtggtgacggtgattgacatgaaaaaaggacaagcggtactcaatttgcgagtgtccgagaaccacagcgtcagcgccatggcgttctcatggaaaggcgacaagctctggatctactctagcggtgtggggggcaacgaattcactatttgggatgtgcctgcgaatctggtcgacggtaccgacagtaacaacattcctgatcagctgcgctgcggctcgtcgatagagtgcaattga

SEQ ID NO: 430522 - DNA, 1179 bp, Serratia marcescens
atgaactgcgtcggaaaggacaacaagaagatagcgccgcagaaagaaacaggtggcctgttactgaagggcaaaaaccggggagatgacggcaacaagacgaccttatctcttgccgggaagcatctcgatgattcaattcagagtccaataagcgaagaaaaaatctcctatgcctatcgggaatggatatgcctgcgctgcgctgaggctcgcggtttatgcgcatgggtcacctgcgtggtcggcctggtgtttacgctggcagcagctaatgccactgctgataccagcgatgcccggatattaatgcagccgaagcctggcgccgactacattctgggccactactacctgattccgcacccttttatagcggtaaaagaccgtatggagcagggcttcgccaccgagcctgggctgcgtggtttccagctgcgcgatgacaccgcagccttgttggatatggagttctactgggtgcgcgtcggcgctcgtcatcttgcagcgctgcgcgaagccttggccactgcggccgtcaagcaggcgacacctgtgctggagcaagcgcttaaggccggtgtgattgcgcgtgaagaacataccgcctttctcgaggcgatctcatcgcagcaggcttattatgccaaagatacgctcaagactgtgcctttcgtggcgcaatccatcgcgcgctggtccttccatcgtctacaaggtaaatcgcgagcgcaacagatcgattacggcactgtcatggatctttcgttgctggtggatacgccgccattgacgctggtctggtacggtggcaccgccaccaagaacacgcgcaagttttcgctaatgagctgcatgaccggagtaacctgtttcccagatccacatatcgagcagaacacccgcaccgtcgaacacctagaccctgtgttgaagcgttatgtggacggcgtcgcctcgcgcatgcaagccctggcacctgcttgcactgccggacggcagcctgctggcctcgggcgcttccgcgtacctctatgtaccacacggcgatggcgtgcagaggcaggctgtcgacggtttgaacggcacgagcggcctgaaaatcagtctggatggccaggtctgggggctggccagggacgaggacggctcgccccgcctgctggcctggcggcctga

SEQ ID NO: 430523 - DNA, 267 bp, Serratia marcescens
gtggtgagttttttaaaatcgcaaggttgggattatattactgcaacgcacgatgttaacaaccctggcagtggtaaagtgatgcaaaaaatagggatgagctacaaatatacttttaaagaacagtggcaaccgaaagatattttggtctcatttagaatgtaccaactcaatttcgatggcaaagagcaaacttatgatgaatattggaataaatacgatgatcactttatcgaaccgcccgaaaatttcttaattaaaccctga

SEQ ID NO: 430524 - DNA, 456 bp, Serratia marcescens
atgctcagtcaggcgctgatcgagcgggacggcgcgggccgggtgacgtgcgaagtgcagcgcctgttcaaagccccgccagcctgcggcactgctgcgcgggccgatgcagagattgaattcgagcaccgcatccaccaccggctcgatgcgctgggcaaccgcattgccagccagttgcaggggctgggcgaagtcggctacctgcgctatggctcgggccacctgcacggcctcctgtgggaggacgacagcctcgtggacttcgagcgcgatgcgctgcaccgcgaaaccagacgtctgtggaaccaggatgccagcatggcaagcatgcagctcacccggcagctcgaatgggacgaggccgggcggctacgtgcttgtcggcagtggcgcaagcagaacacaggaggatacttgagcgcacaaatgaaggcagacaggcagctaagctga

SEQ ID NO: 430525 - DNA, 1260 bp, Serratia marcescens
atgattgaacgagtagacgtctactacgatggctggggggagcactggctgtggggggcaatggtttctacaacggccatcacgggacgcccgttggttgtctttgaatacagcgatgaagcgaagaatagaggcttggagctgtcgtcgtacaccctccctttgaatgggccaaagttgcgcagagactttccgccccaccagttgggactgccaggccccatctatgactcgctgcctgatggctggggcatgctgctgatggatcgtttgttcaagcgccgtggtctcaatgcagcgcgaatcgggccgctggaacgtcttgcttacattgggggcaacgcgatgggagccatgtcgtttgaacccgtggcgcctgagctccaggagcagcagggacatatctctctcgatctgctcgcagccgaagtgcaggatgtcctcaacggtgaggggggcgcattcctggaacacctgttgcaggtgggcggttctccgcagggggccagacctaaagccttggtctatcgtgatcgcaatacgggcggtttttctacagctgccatgcctggctcggaagcctggctgatcaagtttcccgccagggaagaacaccctgaggtgtgtgccgttgagatggtctatgccgagtgtttgcgccagtgcggcattcagacaccggacacgttgtattttgatttgcccaatggaatggcggcattcgcttccagacggtttgaccgacagagcgaactgcgcgttcccatgcaaagcctcgccgcgtttaccggcgccaactacagaagcccgggggttttggattatgtgaatttcttacgcgccactcgcatgtgcaccaacgatgtgcgcgaaatggggcgggcattcgaacgggccgttttcaatgtcgtgttcaataatcgagatgatcatcccaagaactttgcctacgtcatgctgccgtccggcgaatggaagttggcgcccgcctacgacgtgaccttctgcgaaggacccggtggttaccaccaaatggatgtgatgggcgaagcgcttgagataggccgggcggcattgcttggccttgcaggggaagcggaggtttccgcacacgttgcgggcgacatgatcgacagaatgtgtgatgtggccagtcagtttgcgagcatcgccaggagcggctatgagggtgtcatcaccgaagacaccctaagatatatccagcgtcgaattgacgagaatatcgctctgttacgctaa

SEQ ID NO: 430526 - DNA, 318 bp, Serratia marcescens
atgttggatttaagctttagcaaacccagtgaaatcgtcaaactgctgtgcgagcgtcttcgcacggagcggctggcgttgcagatgactcaaaccgatgtggccgcgcgcgccggcgtcggcgccaataccgtgtccaacctggaggccgggcgtaatgtgagcctggagagcgtggttcgcgtggccatggttcttgggcgaagcaaggaacttgaaggattgttcctgccgaaactggacagcctggaggacatcattcgctatgagaatagcgctaaacgtcagcgttccaagaggaaatcgaaaaatgattga

SEQ ID NO: 430527 - DNA, 1737 bp, Serratia marcescens
atgacgacctggcgccagcgctttcaacgcgcgccaatgcgcgtccaagaacccagagagacagatgcctggagcaggcatgttcgaacgctggacgcggcggggatccccgaacctggcaatacaggatcatgcccgcacgctacgttaaatgacgaacaggcgctctacgacgtcgccccatcgtttgtcgacatactgccctgggtcgaatacctgcctcagtcgcagagcctgctgcttgaggacggcgtctccgtagcggcattcttcgagctcgtcccggtgggcaccgaggggcgcgaactgcactggctcgcacaggtgcgcgacagtctcgaaaacgcgctgcaggacagtttcgacgagctcgacgaaaacccctgggtggtgcaactttatgcgcaggatgagaccgactgggacagctatctggagacgctgcacggctacatccagccacgtgcgcgagacacggcctttagcaatttctacgaacgcttcttcgcccaccatttgcgcgcgatcgccgccccgggtgggctgtttgaggacaccacggtcacgcgcctgccctggcgtgggcagcagcgacgcgtgcgaatggtggtctatcgccgcacctccgcaaccccggagcggcgcgggcaatcccccgaacacgccctgacagtcatctgcgatcggctgctgggcgggctgaccaacgccggtgtgcgtgcgcggcgcctggccgcggccgacgtgcacgactggctgctgcgttggttcaaccccaaccccacgacgcttggtacaacggcggccgaccgggaacgcttctacgccctgactgcgtacccagaagaatctgaacccggtgaaattgagctggccagtggcaccgacttctctcaacgcctgttcttcggccagccgcattccgacatcgagaacggtgtctggcatttcgatggcatgccgcaccgggtcatgccagtggaccggctgcgcatgccacctggcatcggacacctgaccggcgaaacgcgcaagggcggcgacgccatcaatgccctgttcgaccaaatgcccgaggacacggtgatgtgcctgacgatcatcgccacgccgcaggacgtgctcgaggcccacctcaaccacctgagcaagaaagcagtcggtgagacgctggcatccgagcagacccggcaagacgttcacgaagcccgcagcatcatcggcagttcgcacaagctctatcgtggagcactggcgttctacctgcgcgggcgcgacctgagcgaactcgacgcacgcggtctgcagctggcaaacgtcatgctcaacgccggcctgcaaccggtgcgcgaagaagacgaagtcgcgccgctgaacagctacttgcgctggcttccctgcatgttcgacccggccaaggacaagcgccagtggtacacgcaactgatgttcgcccagcacaccgccaacctggcacccgtctggggccgcagccagggcaccggccatccgggtatcacgatgttcaaccgcggtggcggcaccatcactttcgatccgctgaaccggctcgaccggcagatgaacgctcacctgttcctgttcggccctaccggctcgggcaagagtgcaacactcaacaacatcctcaaccaggtcacggccgtttgccacgcccgctccattgcgccccagtcttcggatcacgatacttggctccgacctgtgtccccttag

SEQ ID NO: 430528 - DNA, 228 bp, Serratia marcescens
atggatatcattggcgttagcccaaagcaattaagcagggttgttcgattgcaaactgccttgaagttattgatcaatctggaagaaagtctgactcatatagcgtacgaaagcaattattatgatcaatctcatttcattaaagactttaaggaatttaccggggtaaggccgagtgatttttggggcgaaaaaagcatggcgctatcctctctattttgtaaataa

SEQ ID NO: 430529 - DNA, 228 bp, Serratia marcescens
atgagggaacagacatctggtacggcggtggtcgtcgacgatgtagccgctggcgcgatggccgttgagcagcccacacttacaccggaggcctggaccagtctgctgactatcacggtgctgagtggcccagccagtatcaagggcgtggcgtctgaagtgcggcgctggcgcaagccgggcagcgttaggagcaaccagtctagagaaaatcaaatcattatgtag

SEQ ID NO: 430530 - DNA, 1482 bp, Serratia marcescens
atggcaaaaacatgcatcgtatgtgggcaggccgcaggctccaaagaacacgtctttcccgcggccctcggcggtcggcgggttaattcgggcatttattgccacacgcatgacaacagctactcaggccttgtccacgagattgccgggcaactcgactttctcaatgcgtatctgggcgttgtcccagaccattccagtcagccaaagacggcccttggcgaacacacgctgactggcgagaccgtgtccatctccgccaaggaaatcaagttcacggagccccggatcatctcgcgcaccccggccggtgacggcgaaacactgcaactggcctttcccgatcaccagtcggccaagcagttcatccagaagatcgagggcagcgggcacgatttggcgctcttgtcgaagccgaccgcgcggacatacatcactggtgccgtccgccatcagcgtgcatttggcggcgcatgcggcctgggtgccgttgcgtatgtgacgcagacatttttcgcccaggagttcccggaagtcgcacgttcaggagtgctgtccgatttcatcagctatacgcaagctatcgccaaggtcgcggcgctgggaggctgcaagcaacagcctgaagagcgcgaggcattgatcgaggcgcgtttggcgctgactgctgcgctggcgccattcggagggatcgctccagtttggtgggatttcagtccgccggcagacttgcgcgccaacaagtttgagttcgggcatcgggtgacagtcggtattgacggctccgacggccagatctatggccgtgtggcgttgttttccgctttgaccttctccatgcgattcggcactgcgccgcagggctgcgcaacacgcgaaatgaccgtggacatcgatccgcttgcggcacatccgccacatgatatcgacaagcattcagtgctctccgcgccaggccgagttcatgtgccggaaaacgccaccgcagggcttgcggatgcgctcgccaatggcgcgcaacagcgcgcgtttgcaggcctcctggaacgcctggaagaacatcagcttctcgagctcgcgcacacgatggacaaggcactcgcgctatgctccaccttgccaccgcttgaagcgcgcgaactgattgagcaagaactcgacggacaaccgcagcagatttggcgcctggtcacgtgcgtggtggagggcttgaagcaaaagatggccaaggggaacctgcaggccatcataccgttgctcgatggcctgatcgcccatgacgctcaatcagtgagcggtttgtctcagcaggcagaggtcacactgaccttggccaaagccgcattggccgcacagatggaggaagactgcgcagcaggtttgcttaatgaggcacgcatcgcggagcttatgggcagaggccctggcctccatgtcgtgggccagatggtgctggcgcctgtctgccaggcgattggttag

SEQ ID NO: 430531 - DNA, 1767 bp, Serratia marcescens
atgggcactcagcgccgacagatgttgatggaacatatctggcaacgcacctcactttcccgccagcagtatcaccagctatatcaacgaccactggagcgctatgcagcgctggtacaggaatttccggcttcggagagccaccaccacgcatacccgggcggcatgctggaccatggattggagatagtcgcctatgcgctgaagctgcggcaatcgcgtttgttgcccgttggcaccacgccagaagatcaggctgcacaggcagaagtttggactgcagccatcgcctacgccgcgctgctgcacgacctgggcaagattaccgtggatcttgaggtggagcaggccgatggagcggcctggcacccgtggcatggtccactgaagcagccctatcggtttcgctatcgcgaggagcgcgcgtatcgactgcacagtgctgccacggggctgctctacacgcaggtactggacgcatccatactcgactggctcagcgggcatcacgaagcctggtcctcgctgctgtacgtactggcaggacagtatgagcatgccggcgtgctgggcgaactggtcgtgcaggcggatcaggcttccgtggcacaatcactcggtggcgacccgggcaaggctctggccgcgccaaagcatgcgctgcagcgccagttgctcgaaggtttgcgctatctgctgaaacaggagttcaagctgaaccaggccggtccatcggatggctggctcaccgaggacacactctggctggtaagcaagaccgtctccgacaagcttcgcgcgcacctgctgtcgcagggcatcgacggcatccccagcaacaacactgcgctgttcaccattttgcaggatcacggcatggctctgccgacgacggacggcaaggcgatctggaaagcgacggtgactagcggcaacggctggtcgcacacgttcacgcttctcaagctggcgccgacgctgatctgggacgacgccatgcagcgcccgccaccgtttacaggcactgtcgtcgaggccacgacagatggcgacgataccaacatggtggagatacccgcaacgttcgcggccgatatcccccccaccatgccaccagccacatcggcaccggcgtccagcgatgccatctctgatttgctgaacatttttggcagcacagagcccccggcacctgcaaaagaaacactgcctgatggagcatcgccctcagcacagccctctgctgccaatactgaggccggcgttacacccacggcgcccctcaacacggcctcagcgcctgacgaaccggaagcggcgtcgcctgcagcggcctctttgacgcccctccgccccacgggccccgataccctcccatccggcgaacacttccttgcctggttgggccacgcgatacagagccgcaaactggtgatcaacgacgcgaaggcgttggtacatacagcagccgatacggtgttcctggtaagccccggcatcttccaacgctacgcccaggaacacctgcgcgtagccgcgctcgccaaagaggcgcaactcaatgactggcagtgggtacagaagcaatttgaacgactgcaagctcatcgtaaacagacctcggggctgaacatctggacatgcaacgtgaccggcccgcgcaagtcgcgccggctacacgggtatctgctgagcgagccagccatgctgtttagtgaacagccacctgacaatccttatttggagttggtttacagcattacttaa

SEQ ID NO: 430532 - DNA, 723 bp, Serratia marcescens
atggaaatactcagcagaacgccaagcacaaaggatgtgctagagataattaggatccttcgttccacaccaaataatggtgaatcattcgataaagataaacatttgaatgagtttatcgagaagccatggggctgcgagtacagagtgtattgcgactcgatatttgacgtctggaagctgcatctagatgcccaccagtcgacatcaatgcactgccatatccaaaaagacacggtactgatttgcctgagtggcagtggtgcgacgacatttttggatggcgagagtttcacgctccagccaggaaggagagtctacataaacaaaggcgtttttcatcagacggtcgcatcagaagaaggtattgagcttattgaagtcgaaaacccaagaaataagttcgaccttctcaggctgcaagatagctatggcagacaacacactgcttatgaaaagagttcactaaagcatgacctgctttcaccaatggaagaaataggtcccggcatgcacattagacatcgagatctacaccaacgcacaacattcaaaataaataaactggataaatctcacttatcagaccacgaaaaatccatattcattgcactcgatgttaaacatcacttaagtggaaagatacatatcttggatacggccgatgcctgggcagaaaattaccacgggcaaaaaatccttttaataacaagcaagcaataa

SEQ ID NO: 430533 - DNA, 576 bp, Serratia marcescens
atgcaaaaacgagaaagagcagtcattattactggcccaggttttcaggatcacgacgtggtctattcctattatcgatccaaggaggaaggttacgacgtcgtgatcgcaacgagccaaggggagccggttatcggaaaatatggcatcaccgtgccgatggataagcggtcgcagcccaacatcagtttcgatcaattggccccgcaagactatgacctagtcatccttactggcggtcatgaggcaccggatcgggtccgccaagatgtgagagttaagagctttgtagccgagatggcaaaccaaggccgtgtcgtcgcaggtctacgccacggcccgtggatcatgatttcggctggcgtgctgaaagacaagttggcgtgtgcctatgttggcttgcgggatgacatggtgaattgcggggcaaacgtcatcaatgcagatgtcgtggtcgacggcaacatcattacttgttcctactatgccgagtgcggcaaattcatgaaaggggcgttcgaagcggtacagcgctatagaaacggcgagcacctctcagagcctcgggtggtatag

SEQ ID NO: 430534 - DNA, 291 bp, Serratia marcescens
atgatcttgcagttattcggccaatcgctcccggcttcggccatccacggaagaatgacaagcaaggtggaggtactttctcagataaaaaacgaagctctcgccctgggaatgcgcatggcgtttattgatgacaatatcgaaaacatcattgaagccaaacagctcggcattacctgccactggccagattggggatacaaggctgccgagcatatcgagatggcttcgattaatggcatcgccccgatcacctctgagcatttatttgagattttgagaaaagattaa

SEQ ID NO: 430535 - DNA, 564 bp, Serratia marcescens
atggcaaaagaaattctttgcgggttcggcgtgggtgttgatgcggtcgcgggttggctatcatcctatgggggggaggactcccctagcgatatttcacgcggcatgtttgctggagaggtcggtacgccacgacttttgaacctcttcaagcaattcgaaatccctaccacctggttcatacccgggcactccatcgaaacattccctcgtcaaatggaagccgtggtaaaggctggccatgaaatcggcgtgcacaattatacgcacgagaatccaatctccatgacccccgatcaggaacgcgaagtactcatcagaggaatcgagatggtcaccgaactgagcggcaagaggcctaccggatatgtggccccctggtgggagttctctccggtaacaacggatcttctactggagaatggcatcaagtacgaccattccttgatgcaccacgatcaccaaccctattatgttagaaaaggtgattcctggacgaagattgattataccaagacacccaaagaatggatgacgctaccgctgtcgctgccgcccaggtag

SEQ ID NO: 430536 - DNA, 1656 bp, Serratia marcescens
atgaacattcgttctctgcgcatgcctttcaggtatgcgccggcaagcctttttgtcattgcactcagcctgttatccggcgcccatgccgccgatcagcagccgaaggcaaaacctgataccgcccaggtccaacatgccctgcagggtcttgccatccccttcgaggccaacaatggccagttcgacgagcgcgtggccttcgtgggccgcaccttcgcggggccggtattcgtcacccgtgaggggcagattgtctacagcttgcctgctacggaaacaaaagaaggccggcaagcctggatcctcaccgaaaccctggtggatgccagggcgctgaacccctacggcggcgagcaggctgccacgcaggtcagccgcttcaccggccccaagagctaccaggccgccacctaccgcaacgtgatgttgggccaggcatggccgggcatcgaggtggagttggccgcgcgcggcagcaacgtagaaaaactcttccatgtgaagccccatgccgatgtggatcgcatccaggtcaggctcgctggcgccgaatcattgcgcctgggcgaagccggcgagttgatcgccactaccggccatggcgacatcgcctacacagcaccggtggccttccagcaggtcggtggcaagcgcctcgacgtaccggtgaagtacgtgctcaacgaggcaggcgatggctacagctttgcgctgggcatgtacgaccgcacgcggccgctggtgatcgatccgctgctgcagagtacatacctgggtgggggcgagggggaggacgttatcaatgccatggccatcgacgccaggacgggcgatgtgctggtggctggctatacgagctcaggtgactttcctgggacggccggcggggcgcaggcgcagaccatgggcggcgcctacagcggctttgtggcacggctgtcgggcgacctcaagaccctgctgcaaagtacctacctgaataatcatggttcgggtgccgggaactacttggcttatgcgggtttttatgcgctggccattgacgaggccacgggcaatgtcgtggtaggaggcgtcaccggcggtgccaccggctaccccggcacggctggcggcgccttgcccgaggggggtgacggcgcgtccgcgcgcgtgctgtcccaattgtcgggcgacctcaaaaccctgcggcagagcacctacctgggtagcggatggggtgtttctgacgcagtctctgtactcgcaatcgacccagccaacggcgacatcgtggtgagcggcatgttcgacactgaccctgttccaggcaccgctggcggcgccctgccggaacggccgaatgcttctggcggcgacggctatctggtccgcctgtcgggcgacctcaagacactgcgccagggcacctatatgggcggcatggtgcgggcactggttatcgacccccggtccggcgacgtagtggcaggcggacgggtgtccggtgcggggcttgccggcgccagcgggggggcgcagccagcccctgctaacgattacgacggctatctgagccggctgtcgggcgacctaaagacgctgcgccaaagcacctacctgggcggcagcgacagcggtagcgtcatccattctttgggtgtcttggtataa

SEQ ID NO: 430537 - DNA, 657 bp, Serratia marcescens
atgacacatcgtgtggtgattgttgatgatcatcctttgatgaggatggctatacgtgcagtacttgagcgagagggttatgaggtcgccgctgaatgccacaccggcgcagattgcgttcaggtagttcgtaacctgaaaccggacttgattattttggatttgggaattcccaaattggacgggttctctgtcatggggcggcttcgaaatgcaaaattgcccgcgagtattcttgtcctcacttctagtgacgtccggaactacggagcgcgttgcctgctcgccggagcatctggttttatctgtaaagatgaaaagcaggatgggttggtggatgctgtaaaagccattctgtccggatacacctatttcccgcgcgtagttgtggaattccttgccgaacaaggcgtgggtgccaggcgcatccaggtagaaaatgaatccgcagcggaactgtccagcctaactgatcgtgagatgactatcctgggcttgctggcaaaaggtatgaataatcaggaaattgctgaaattctaatgctcagccataagacgattagcacatacaaagttcgactgatgggaaaactcaatctccgaaacatggtggctcttgtgaagctcgcggagcgcaatggaattgcaaccacgtaa

SEQ ID NO: 430538 - DNA, 1839 bp, Serratia marcescens
atggcactctcagatacagccgtccggcaagcaaagagcaccggcaaggcgtacaccctaggcgatacttgtggtctgtcgttagccgtatcggccgacggtggcaaaagttggcactttcgctacagctggaataacgctcagaagcgactctcgcttgggacatatcccgaagtctctctcaaagaagcccgcagccggcgcgacgaagcgcgcgaattggttgcccgcagcatcaatccccggaagcatcgcaaccaagagcgacacctagccctcctggctgaagagcacaccttcctgaaggtattcgagcagtggtttgagttccgcaagctgagtctgaaggctgggcgccaaagcactcaagcgcagattcaacgaatcttccatcgggacctgctgccaactcttggtccacaatcggtctacgagatcaagcgtgtcgacctccttgaggtgctcgctaagattgagcggcgtggtgcgttgacaacagccgagaaatgcagaacctggctgtatcagatgttccgctatgcgctggtaaaggttcctggcctcgaactgagtccagcgtctgacctggatgttgtcgccgtaccgaagcctcctgtcgttcacaacccattccttcgcatgggtgaattgccagaattgctacagagtctccgccagtacaagggcaaattgcagacccagctcgggattcggctactgatcctgacgggcgtgcggacaggggagcttcgtctggctacgcctgagcagttcgacctcgacaacggactctggattatcccgccggaagtcgtcaaacagttgcaggtggagatgcgcaaggatcgcaagcttcccacggatatccctccctacattgtcccgctttccatgcaggcgcaagaaatcgtgcgctatctgcttgagcagcgtcgtcctgcacagaagcacttgctggctcaccggagtgaactttccgagcggatcagcgagaacacgctgaattcggcgctgcggcgtatgggatatgcccggttgctcactgggcatggaatccgcgcgactttatcaacggcccttaatgagatcggctatcccaaagtgtgggtggatgcccagctttcccacactgaccccgataaggtcagctcttcctacaaccatgccgagtacgtagagcagcgtcgccgcatgatgcaagattgggcagatcgcctcgacatgtgggagcaggggctttctgaagcggctagcatgcacttgaaccttacagtccagtttgactcgatgccgctggtgacgaactcaatggctgtagagccatcgtccagcatgcaatcggtggctcctggtgggctagggggggtactaatcaatcctgttccggctgccgcatctatcaggctgccggccgtgcctgttcaggaagcgcctccggtgccagcagagccagtgctttcccaatttcagcgggagcacgccgagaagctcgagttgtatgaggcatcgcaaaatctgccagtcgttgcgttcgccaagcttgcgggcaagtcccgagaccaggtcaatcgcgacatcaaggctgggcggctgctgacccttgcgatgggtaatcgtgggcagaggatccccgattggcagttggatccgttgtgccgagaactgacatcgctggtgctgtcgaaagctcgtagcgccgatccatggcgtgtctatcatgtattgaacacgccggtggatgaactgggagggaaatgtcccattgaggctgttcatgagtatggagtcgagaagttgctcagtgaagccggaaaggtgttggaagaactgacggcataa

SEQ ID NO: 430539 - DNA, 2061 bp, Serratia marcescens
atggagcgtttgagccgcgggccggaagtgacggcggtggtgcaggtaagcagcatcgcgttgaatccggccgccagcaagcagacgctaatgcgtatcgagcggatcgatggccattggctggcgcctggattgatgtttaccacactatgggccccggaacagcagcggctgtgcgccgggcagcgttggcaattgaaactgcgcttgcggccggtgcacggcaagctcaatgaagggggcttcgacagccaacgttgggcgatcgcacagcgccagccgttgacgggcctggtcaggcaggcccgtttgctggatggcgattgtagcctgcgtcagcgcataatcagccatgcggaaaccaacatcggtgagctgcgttacaaggcggtattgttggcgctggcgtttggggagcgaaccgcgctggaacagcctttacgcacgctgatgctgaaaaccggcattgcgcacttaatggccatttcagggcttcatgtggcgatggtcgccattttgttctgggctgcgctgcgggcgctgcagttttttcttccctcccatctgattggctatcgttttcccctggtcgcgggctgggtggcgacgctgatctatgtctggttggtgggcgcccagccgccggcggtgcgtaccgtgttggccatgacattgtggatgttgctgcgcctgcgcggcgttcattgttcttcctggcaggtgtggctatggtgtatcgggctgattttgctgtgcgatccgctggcggtattgtcagacagtttctggctgtcggtgctggcggtaggttgcctgattttttggtttgaatgggcgccgctcggtgagcgattccggtcggcctggtattgggcgccggtgtgctggctgcatattcagctcggcatgacgctgctgctggtgccgatgcaggccgcgctgtttctgggcctgacgctgacctcgctacccgccaatctgtgggcggtacctattgtctcattggtgacggtgccgctgattttgctggcggtgatatttggcttctttcccccgttaagctacgggctatggtggctggcggacgtaacgctgcactgggtgtttgttccgctgcattacctgcaacgcggttgggtggatctgggggctgcctcgctgctggccagcgcggcggggtggctcatcgtcgtctgttggcgctttcattggtggcggcgttatgcaccggggctggcgacggtagcgatatgctgtgtgctgtggcgggaaaaagagccgggataccgctggcgagtcgatatgctcgatgtcgggcacggcttggcggtggtcattgagcgaaacggcaagggaatactgtacgataccggcgatcgttggccgggcggcagcgccgccgaacggcatattatgccaatgttgaactggcggggaattgaattggaacagatcattatcagccatgatcatctcgatcataccggtggcctgccgacggtgcgacgggcgtttccaggggctacggtacgcagcccgatgcgcggggaggggcacttgccctgcgtcgccggtgagcgctggcgctggcaagggttacaattcgaagtgctgtggccgccgaaaacgcgtaaaaagccgggcaatgacgactcttgcgtgatccgtatcgacgacgggaaacacagcctgctgcttaccggcgacgcggaaaaaaaggcggaggcgcagctgctccgattgcggcgcgatcgcttggcggcgacggtgttgcaggtggggcatcatggcagccgaacctcttccacgccgccgtttctgcgcgcggttaatcctcaggcggcattggcgtcagcatctcgttacaacaaatggcgtttgccggcgcgtaaagtggtcgccagataccgggcaaatggcattatatggcgcgatacgacgcgctccggccagttatcggtactttttttcgacaacgattggcaaattaaaggctttcgcgaacaattaatgccccgttggtaccatcagcggtttggcgtagagggtgataatgagtaa

SEQ ID NO: 430540 - DNA, 1569 bp, Serratia marcescens
atgagtgatgataaagcttttcagctaacagcacctgaagttgatagcctacttattttatgtgacgaggctatgcgtgctacgcctgaaaacgttaagcgtttcattgaacctgctccaggagttttggcgcagtcaaaagcaaaacagcacagcataatttttggtcgaagaggatctggtaaatcgtcgcttttgagaaaagttgttgctgatcttactttagatagaagaccgatctcatttgttgatatggaaacatttaaagggcattcatatcctgatgtccttatcagtgttttgataaaaagtttacaagaatttgaaaagtggcttgaaactgcagcgactacgccagcacaacggaccaagttttggcttaagttctggggaagcaaacctgagcgaaaaccttttaacaaggctaagactggtgaattagtcgatgaattaaagagcataataaaagatttgtccgaaaggttggctatgcctgaaatagtagatgttcagcataatagccaaaatgagtcctcgctgtcgggttctgtcaaagctggaatttcttccccaattgcaaaagtagatggtgaggttgctacgggttctaaattaactgttggtgttcaaaaaacctatcagtctcacaaaacagagtatttgcatcaaaatattttaaggttccaacggtttttcacagagcttggcgagttgtcagacggccctgcatatttgattttagatgatctttatcatattaggcgtagtgatcaagccaaggttattgattatttccatcgtatagcgaaaggaaatagcttgtggttaaaaattggcacgataaaacatcgaagtgattggtacattcatactgatcccccaattggtgtgaagttaggagatgatgccaaagagattaatatcgatatatctttagagaagtttttgattcttaaagagtttatgcgtaaaattttgtctaatataatggatgaaacaccgccactaaatgtcaatggtttacttaattccacggcaatagatcgactgattattgcttctggtggcgttacgcgtgattttatcggtatctttgcaaaggcaattaatcaagctagaaatagggggattgaacatcatcgtggtcccaaagtcggtgctgaagatgtaaatttagctactggggagtatggtgaaagtaaaagagaagagtttaaattagacgcaaatgaagacagggttgcgctagaagagtcattccaaaaattagttgatttttgtatcgggaaatctaagtgtaatatattcttgattcccttaagaaaaagcgaaaatgactatgatgcaattgaacagttgatagatttaagattagtgcatctggttcaatcaagggttacgcttaaaaaaggtgctgaaggcaaaatttttcaggcatatatgcttgacacgagtgaatatgttgcttccagaaaggtgcacggttttactataattgatctaaattcaaaatcatttagtgaggacattcgtaaatctaagctcgtttattcaccgttgaaagattaa

SEQ ID NO: 430541 - DNA, 1149 bp, Serratia marcescens
atgaaaagcggcgtaagcctgcccgccggggcgcgagttgccccggatttttcgctgttgctgcaggataacgacatcacgcagaacatccgcaagcggctgatttctctatcgctgacggataaccggggctttgaagccgaccagctcgacatcgagctggacgacagcgacggactgatggcgatgcctcagcgcaatgcggtgctgtcgctggcgctcggctggcaaggctcgccattgacgccaaaaggtcagtttacggtcgatgaggtcgaacaccggggcgcgccggacacgttgactattcgcgcgcgtagtgcggattttcgcggctcgctgaacacccggcgcgatgagtcctaccacgacaccaccctgggcgacattgtgcagaaggtggctgcgcgcaataagctgaaagcctcgctggccgccggtctgggcaccatcaaaatcagccatatcgaccagacgcaggagacggacgcggcatttattacccgacttgcaacgctcaacggcgcggtggcggcggtgaaaaatggcgttctgctgttgttgcgaccggggaacggcgccacggtaggtgggaagccattgccggtgtataccatcacccggcaggatggcgatcagcacagtttcagcattgccgatcgggatgcctacaccggcgtaacggcgagctggctcaatacaaaacagccgaagccgaagaaagtgaagctgcagcgcaagccaaaagagcagcatttgcgcgcgctgcaacacccgaaggcgaaaccgggcagcagtaaaaaaccggggaaaccggtagaggcggcgaaaggtgactatctggtgggggcagacgataacgtgtttgcgatcaccaaaatttacgctaccaaggccgccgcgatgcgggcagcacaggcgaagtgggaaaagcttcagcgcggtgtggctgagttctcactgtcgctcgccatggggcgggctaacatcacgccggaaacgccggtacgcgtcagcgggtttaaagcggtgatcgatacgcaagactggatagtgagcaaagtcacgcacagtctcagcaatagcggctttacgacggctctggagtttgaggttttgctgtcggatgtgatttatgaagtctcgtaa

SEQ ID NO: 430542 - DNA, 219 bp, Serratia marcescens
atgagtattcattaccttaccgatagtgaaacgcagaacttagaaaaggtaggcacggttctgggcagatgtgtcattgatcttcttgttcgcaaaaaaatagtcaacaccgataatattctttctcaaatagtcgcagaaatggaaaaagcatctgataacgatgaattccagttataccgcgacacattggagtttgtaggcacgctttcaaaataa

SEQ ID NO: 430543 - DNA, 693 bp, Serratia marcescens
atggggactgataatttatttcacaagaggaaggccaaaggtagggcggaactatctaggaaagggaaagggaaaagtgtatctgagaagatactaattgtttgtgagggtgggaaaacagaacctaattaccttaaggagatgaagaagcactataaactagaaaccgcaagtgttatagaagtgtgtggggatgagtgcggcagcgatcctagaagtgtcttcaactatgccaagaaaaaaagggatgaagaaatggcaaaatgcgcaccatatgacaaaatattttgcgtaatagataaggacactcatgagaactatgtcgagaccatggattctatttctcgagttcgcccaagtggattgtttgttgctataaactcagttccatgttttgaatattggttgcttttgcattttgaatatacaactaaagcatacggaaatttaccaaagaaatcatctggtaacttagctttaaaggatttaaagaagtatatacctgactatgataaaggttgtcatggaatatttttgaagcttgagaacaggttaaatagggctattgaaaatagtaaaagggctctcggagcggcttctgaaaacaaaactgataatccaagttcaaggatgcatgtactaattgaaaaacttctagagatcaaagctattatagatgataggaagagttag

SEQ ID NO: 430544 - DNA, 1287 bp, Serratia marcescens
atgatcattgagttttctgtgacaaatttccgttcgattgctggaacgcaagttttttcactaaatgctagcaaaattaaagggttggatgagtgcacgtttaaagttgatgctgcaggtcagtttcaactcttaagatctgctgcaatctatggcgcgaatgctgcggggaagtccaacttcatgcgtgcagtgcgtgccatgcatgatatcgttttgaactccgcctcagattcacagagcggtgactctcttcctgtaagtgcattcaaattaaatccggaattggtgaagtcgccctctgaatttgagatcgtttttattattgatggtgttaggtatcaatatggttttagcgcctctcatgaaatgatttatgaggagtggttatttgcctatcctaaaggaagaccgcaaagatggtttgctagggcatggaatgaaagtgaacaggtatatgattgggatatggggaattcgcttcttggggaaaagcaagtgtggcaaaaagcaacaagagctaatgccttgtttctgtcgactgcagtgcagcttaatagttctcaattaaaacctatttttaattggtttagaagaacactgcggatgtctaatgttggtggatggaaccatgactatagtgcatcgttatgtaccggagaaagaaaagaggaaattctcgatttcttaaaggccgctgatattggtatcgatgatgtacatgtaaaaaaagaaaaatttgatgttaataagttacctaaggaattccccgatagtttgaaagaagttgttatggaaagttttaaggatcggaatagatatgaaattagcatgtttcatagagggagtgacgaccaattaattgggtttgactttgatgaggagtccgatggtactaggaaattattctcattctctggaccatggattgattctttaagtaagggatatgttctttttattgatgagcttcatgacaacttgcatccaacactagtcaagttcttagttggtttatttaacaatccaaaaacaaatcctaaaggggctcagctgatctttactactcatgaaacatctattctaaatcaagatgtcttcagaagagatcaagtttggttctgcgagaagggttttgatggggctacaaaaatcttcccgcttacagacttcagcccccgaaaaggacgtgagaaccttgaggtatcatatttagatggccgttatggtgccattccatctatctcggatattaagggtgttaaggatattaatcatggggactga

SEQ ID NO: 430545 - DNA, 231 bp, Serratia marcescens
atgagacaagatttaaacttagccggggcgtttatggaggcgctgaacttcaacgagaacggcaagggccgccgcataagaaccgttgatttcattcacgccgcaaaccggctcggcacacacctaacgcctgaagaggcgaattactacatcaagcaccagtccggccacgtgttcaggctgattgacgagggacgttatcagcacaacacatacctgtttctctgctaa

SEQ ID NO: 430546 - DNA, 189 bp, Serratia marcescens
atgttagatagtgatatcaatactattaaatctttactttccgaattaaatagaatactcgacgacattgaggaaccaattaaaaacagctcacacgctgaagagctgaaagagttacatatggagctgggtgccaagttaaatgaaaaaatgcccgtaacccataaaaccattatcgaatttttctga

SEQ ID NO: 430547 - DNA, 600 bp, Serratia marcescens
atgggatttactttgttttggtggtgtatggaatttaatcagggtgctaaagcagctatcgaaaggatggttgaggcctacggggtcaagacaaaacttgccttatgcgatgcgttaggtgtgacagctagcgcattatctaaccgtcaagtgcgagactctttccctgccgagtatgtactgaaatgtgctttggacacaggggcatccttgcggtggttaacttatggccaaggtgagatgtatgagccaaacgtcattacagcaccatcggcgcttgctgtaccgaccaaaaaactgctaggtcgccagcttcttgacagtgagactctattgctggataagaattttcttcccgtaggcgtaaaaaaaccattagttataatcgatggtaaaattcaatatattgcatctcaaacttatgaagacatttatgatggcacttggcttattgacattgatggaaacataagcatcagagacatagttctaattccggggaatagattaaaaatctccgaccaaaagcactcatttgagtgtaagtttgatgagatacatgcaattgcaagaatactctctgtttgtacaccaatttaa

SEQ ID NO: 430548 - DNA, 1518 bp, Serratia marcescens
atgaagaacacgaattttgatatggattgggactggtcaaaagatataaaaatagttattgacggcgaagaagaaagcctttgcgcagacaaattagagaggagaaaatatgctgaatatctctatttttatcttcgcgaaaaaggaagggagaacaacaccgtaataaacttgaatgcagagtggggtgctggaaaaacattctttatcaaaagaatgtatagttcaattaaagaatcacatccatgtatatatattgatgcatggaaacaggatttttcagatgatgcattccttacactattttcatcaataataaatcaaatagagaaatattctggtgtgctggatgtcagactaataaggtcacttagctcaattggcagatttactaagggagttatccctgccatcttatcgggtttagtgaaagaatatggtggtatagatagcatttcagatatttctaagacagccgctgagttaatgctttctgaacataaagagaaatctgaagcaattgtaaaactaaagaaagaacttaccttctgggggaatttgagcttccaaaaaggatatttatcaccaatatttatatttatagatgagttagataggtgcaggcctagttatgctatatctcttctagaaatagtgaagcacatatttaacattgataaatttgtttttgtaattgcaacagacacaaatcaacttcagcattcaataaaaaatgtttatggtaacgattttggagccaatgactatttaggtcgttttttccatagaagattctcattgaaagcaccagacatacatgaagtaattaaaaatagatttgaagaaatattaaaggatgatttcaaagatctaacaaaaaacataatcccaaagccatcaagcattgaacaattaaccaaaaatatctcagagatatttaatgcattccgcttaaaccttagagactcgataagaaacactgaaagattcattgatctcattcagagcaacagcttcaagaaaaaaatagattacttggcccttatagctctaatgattatgtatgaaaaagataacgatcttttgcaaaaaatattaggaaagagcgtcggaaacactactgtggacaagttgatatatgaaagcacaagtattaaaagccttcctatggcacagcttaatctcactttagattgcagcgcaggcaatatcggaaaagattattatcgttcaggaactcatacaaccaggcataatagcttaaagatttcgaatataagtgtgtatgttaaagattatatgaaacgtttcacatcatttatcacttcactccctctatatagacaggcggttaaagagtcagggcaaaattcgcatttcactttcggagatgtattatccgacatggacaagctaataatgcattacggagtcttattagagttggacagcaatatggaaatttattcaatcgacggatatttaagttttatagagcttgcaacatcttttgaatga

SEQ ID NO: 430549 - DNA, 1035 bp, Serratia marcescens
atggcagttcggaaacaatcatccggtaagtggttatgtgaatgctaccctgcaggccgtgaaggccgcagggtacgtaagcagttcgcaaccaaaggtgaagccttagcgtttgaacgcttcactatggagcaggtagacaataagccgtggttaggcgaagcgatcgatcgccgcaagttgagtgaggttgccaaactttggtacaacctgcacggccaatccctcaccgctggtgaacgtacctacaaaaaactatgccttgtcattgaagccctaggtgatccccccgcgactaccttcaccgctaaagacttcgcgcattatcgtgataaacgtttgtccggtgaaatctacttttccgagaagtggaagaacggtgcagaacccgtaaccgtcaatcttgaacaaagctacctaagcggtatgttcagcgagttggcccggcttggcgaatggaaccaacccaatccgttagagaacatgcgcaagttcaccgtcgcagaaaaggaaatggcgtggctgacgcactcacaaatcactgagttgttagcagcctgcagtagaggcgattctgatttggcgcttgtagtcgaggtgtgtcttagcaccggcgctcgttggcgagaagcggaaaacctcacccggtcacagattacaccacataagatcacattcatccgaaccaaaggcaaaaagaaccgcagtgttccgatcagtaaagcactgtacaagaagttgataacgcggggtgatgatcgtctattcagcgagtgctatttccgctttatggctgcacttgagagtaccagtattcagctacccaagggccaactgacccatgtgttacgccatacctttgcggcgcactttatgatgtctggcggcaacattctggtgttgcaacgcatcctcggccatcatgatatcaaaatgacgatgcgctatgctcaccttgcaccggagcacctcgaaaccgctctgcaattcaatccgctggcgacgatgccaagtggcgacaaagtggcggcatag

SEQ ID NO: 430550 - DNA, 774 bp, Serratia marcescens
atgaaaaaaatcatactcattatcacgatgctagtgtctatgctcatcattcaggggtgcaaacaaggtatggatttacaaccgcaggattattttgaagggacgcagctggacatcgccaacatcatctacgagggtgacaggcaaaagctggataaggttttaccgacggtaagcaaagaaacgttaaatcgaccgggcaaggcggagatgacgttgctattctgggcgataaataacgctatctttgacaagaacacgccagagcggcttaagataattacagatctggttaaggcaggagcagacccactgcagccaaggccggaagggagaagtagtcccgctgaatttgttatgaaagcagataagggaatctggataaaatccatgttagatggggggctatctcctaatgcaaaagataaagtcaacaataagccaattatatttaaaagtattcttgcgaagaacacagagacattagaggtcatgttggattatggcgctgatataaatataagaaattcactgggtgatacgctgctcatcgatgctttagattatcactcctatgaccacgtcattcttctattagaaaaaggcgccgatagcgatataaggggcaactcgggttggacgatgggcaatcaactgcaacggctgattaatagaagtccggacggcagtgaggcgaaagcgtctcttgagcgcatcaaagacgagctaattaagcgtggtgggaaatggccacctctccctgtcagtaaataa

SEQ ID NO: 430551 - DNA, 978 bp, Serratia marcescens
atgacaaagtatggatttctgacttacgaaagtgatctttaccgtaaaagagggtggattaatttaggtgattatgtacaaactcttgccgccaggcagtttctcccttcgtgtgatatcccaattccacgtgatgctataggtagttatcatggggagcctgtgaaggtgataatgaatgcatggtatatggactcaccagaaaatttcccgccatcctgtaacgtttatcccttttataggtctgtgcatatcaatgcttcggttgaaaataaaatattctctgctgaaaccatttatcacctgaagcaacatgctcctataggatgccgggatttctatacggtaaacttgctcgagaagtatggtatacctgcttattactcggggtgtatgactttgacattaggcaaaacatataaacgaaattcctgctcggatgatgtttattttgttgatgttatgtatgacgccctgacaccgtttgaactcatgcggcaacctctgcgcttggccaaacgaattcttaatgggcgtgtggccgagttctatcataagaaaaaggttcttaaggaatgcttcgatgcggagctattaaggaaagccaaagtaataactcaaatagttccctacgttccctatgaagtcggtattgaaatggctcatgattttttaataaaactttcctcggctaagttggttgtcacgtcacgtattcataccgcattgccttgtttagcgatggggacacctgtcatttttatcaatggtggctttaaaaacaagatagataattgccgctttgatggtctgcttgatttttttaatcgaattgatgtcgataacagagggaggggggggcgaaactttggtttgccaagcgataaaataaataatgacacggttatcacgaatggcgataagcatcttgattattcatgttctttggttatggattgtatgaggtttattgattag

SEQ ID NO: 430552 - DNA, 990 bp, Serratia marcescens
atggctgtttcccatctaagtcgatatattaaaaaagatgtaagagtaacgtgctacattccatcgggaaatagtaagctagctgaattattgatagcttcttccatttgttatgagtttcatgatgttcgtcataacaatatggagataattcattcattctttaaccctggtcatattttccgtgctgctggctttcttatttcaataaaagaaaaatttgattttatttttataattcaaggtgatatagagtttggttctgtttttgtcaatgtggggaaaatgctagggataaaaaaaatcattagctatcttccctatactcatagttttagaaaaatggaaagttgggccccctctattaaagactttcttgccaagtttgtatatagaaattgtaactcctttgttaccatctgcgagacgacagctaaagatatcattgccaaaaataaaaatgcttctgttagagttcttgaaaattttgttgccaagccgcgatgttctgaaataagaggtattggatatgaattttcaccttcaaatgaaacattgaaagttatcatggcaggaagggtccttttccgtcaaaaagggcaggatatattattcaatgctttgaaatatatagactttcctattgagttgcaagttttcggtgacggcccagaccttaaacggctcagagaacttgccgctaatctctcgccgaatattaaagttgttttcttggggtggagaaataatgtttgggagaactcgagagatattgatttcattgttgtcccatccagatatgaaggtgttccattaataatgcttgagtctttagcaaggaatataccagttatttcgccagccagagatggaatgattaattatttaacatccgagtcgctttataatactggtagtgcggattttgagtctcgagaattaagtaagaaaatatctgactttttctttaaaagagaaggtgaaaaatga

SEQ ID NO: 430553 - DNA, 981 bp, Serratia marcescens
atgaaaaaaatagttcacctctttgcgattgtttctatttacatggtttcaggtcttggatattcatacgctttttatcctggagtcggagttcaccccaatgaattcaagggtagcgctgaagaacttgttggtttaatgaagaaatatcgaatagagtcgttcagaactgactatccgtggagtaacgtagagattcagaaaggaatattggcgagttcaaacgatactacagacaaagttattagtattgccaaggataatggaattcatccattaattatattagattatggcaatataaattatggtggtggaaaacctctctcatcatcggcgattgaagcctttgtaaattatgcagcatggacagcgagacattttagagagaaggctgatatttttgaagtttggaatgaatggtctcatcgtagtggtcaatctcaagatgcggctagtaatgcttcagcggaggcttattttcaactagttaaagcaacttcgctggctgtgaaaaaagaaaatccgagggcaattgttattgctggcggtttcaatcctctagacaatacagataaaaactggggtataacactcgtaaaattaggcatacttgactatatcgacggaatttctctgcatccttattcttaccagaatagaactgttgcagatcctatgtttaatcttaaaagaattgatctttatcaagacgagttggttaaaattacaggaaaaaaaatcccgttctatattacagaggttggctatcccgcatatgatggtggggctaatctgtctgatgaagaggttgctaagtacgcctacgaatatatgacgttggccagtaaaatggattatgtggtaggtgtttggtggtatgattttatcgatgatggtgttgataagaaaaatagagaatataattttggcatcttgaaaaatgatctttctgagaagatgccaacaggtaaaatgtag

SEQ ID NO: 430554 - DNA, 1071 bp, Serratia marcescens
  misc_feature (471)..(480): n is a, c, g, or t
gtgatatatataaatggacggttccttactcaagaacttacaggtgtccagcgctttgctgaagaaatatcccgccatttacaaaagattcgtgatgatatagtaatcctgagccctcctaacattgaccagtcaagaattgctcagcttgataacattgaaataattggtaaaaacacagggcatatttgggaacaatatgatctccccatttatttaaaagggagaggtggctcgctgctggttaacttaagcaatacagctcctgttttttataagaataagttagtaactcaccatgatataacttataagcggtacccaaacagttattcattaaaattcaagttgctttataactcaatcatacctgttatcttaaaaactagtagggcactaattactgtcagtgatttctctaaaggtgaaatctgcgaagcatataattacgatcctaaaaaaactcatgtnnnnnnnnnngttatatataactcaactagcaatgagttttcccctaaaattaatgatgaaaatcccgggtcgtactttctagccgtgtcctcttcgaattttcacaaaaattttcatgggcttataaaagcctttgagaaaatgtctaatgagcaaggtattcaattaaaaataattggtggttggaataagaacttttccaacccagaattggattcgatactagaaaatggcgattctaaggggatagtttttttaggaagagtgtctgacgaggagttggttaagctttattcaaatgcattggcatttatatttccgtcattttatgaaggttttggtatacctccattagaagctcaggcttgtggttgccctgtagcatcatcaaatagagcatcgttgccagaagttttgtctgatagcgtgctatatttctcgccagatgatgaggccgagataatatgtacaatggagttgctcatcgccagtcagtccataaggaatgacttaattgagcgtggttataaaaatgttaaaagattctcttgggataattcagcagcaaagttaaacgatttaattaaaagcctggagtga

SEQ ID NO: 430555 - DNA, 915 bp, Serratia marcescens
atgaataatgcgctgatttcagtatacatccccacgcataaccgcagtgaaatgcttaaacgggcagtgttttcagttattagacaaacctataaaaatatcgagataataatttgcgacgatggatcatctgataatacagagcaagttgttattgaactgcaagaaaaatataaaaacattcgctatctaaaaaatgacactccaaaaggagcgtgtgctgctcgaaatctaggtatattcgaggcaaaaggtgaatatatcacaggtttggatgatgatgatgaattttccgataatagactcgaagagttacttaactttttttgtttggccaatggaaaatatgcgtttgtttgtagcggtattgaaatgagagagagagaggtcacctcatttggctatacaaaacccagagcagttaacctggatgacttgctaagctcaaatgtagtagggaatcaagtcctgactaaaacgaaatatctgcaagagattggcgggtttgatacgacattccctgcttggcaagattatgattgttgggttcggctctgtaataggtttggtagcgggtatagagtaggtaacgtaagttatatcatgcatatggagcatgagcagcaaaggatttccaccagcagtaaagtgaaaagtggctatgaacgttttatcagtgctcactcagtactgatgaacgcaagacagagaaaatccctctatgtcaactttaagctgggacaaaacgaaaagttttcgtttactgaaataataaaatttacttcttataaaacactccctttagttttcaaagcgtatttaaaaaatcggttgttttttattagaaagttgtacaattatgtacgggcacaacaactatcaaatagacaaaattctttagaagaaaaggactga

SEQ ID NO: 430556 - DNA, 942 bp, Serratia marcescens
atgaaccctaaagttagcattattatagcgagctataatacagacaaatacattgttgagtgtgtgaactctgcgcttgggcaggattacgaaaacactgaagtcatcgttgtcaatgatggatcaactgataccactgaagagttattatccgaacttgctcacaataacgctaaattgaaaattttgacgcaaaaaaaccaggggcagtcagtcgccaggaacaatgggctaacactggctacaggcgagttcgtcatttttctcgatagtgatgataccattgataactcattgatatctaaatgcatctcggcacttaatgcgactaagagcgatattgttttctttaatggcgaaagtttttacgatagtgcagatgatgagcttacggcaggttttgctcctaagtacattagaaatacccgcttgtgtgaagaggcgatggatagccatacttttttcaaaaggtcatggaaattaaataactatacggtaagcccgtgcatgttcatttccagaacgcaacttgtaaaggataatcctttttatccgggaatcgtgcatgaagataatttatttactactaagatccttctatcacagaaatccaaaattatttgtataaacgatattctttacagaagacgtatacgcccgaattcagtcatgacatcaaagaagagcgaacgaaatgcgattggttatttaactgtggcgaaaaaaatgaccgcactgcgctctcaaacggatgatgaattgaacgcttgcttaaatagttttatttctcattgtgttagctcatcactcgatgatgctaaggcctgcttcaaacgtttacctaaagagctgaagaaagagtatctggaagtcatcaaagatattggtttgatgaatgtcaggaaaaaaaccttagccaagtttattttatcttacttttaa

SEQ ID NO: 430557 - DNA, 930 bp, Serratia marcescens
atggcaatcaccttatcacgcggacgttcctttgccatcgcgctggctctgctggccaccggcggcctggcgcaggcggccgactcggtacgcgtcggctccaagatcgataccgaaggttcgctgctcggcaacctcatcgtgcaggtgctggaagccaacggcatcaaaaccaccaacaaactgcagctcggcactaccaaggtactgcgcggcgccattacctccggtgagatcgacatttacccggagtacaccggcaacggcgcgtttttcttctccgatgagaaagatccggcatggaagaacgcccaggctggcttcgagaaggtgaagcagctcgactacgacaaaaacaaaatcgtctggttggacgcggcgccggccaacaatacctggactatcgccattcggcaggacgtggcggacgccaaccatctcaaaacgctggcggatctcggcaagtggatcaacggcgggggcaagttcaagctggcggcctcggcggagtttatcgagcggccggatgcgctgccggcgttccagaacgcctacggtttcaagctgaatcaggatcagctgctgtcattggccggcggcgacacggcggtgaccatcaaggcggcggcggagcagacctccggcgtcaacgcggcgatggcctacggcaccgatggcccggtggcggcgctggggttgcaaacgctggcggacccgaaaggcgtacaacccatctacgcgccggcgccgatcgtgcgcgaagcggcgctgaaagcgcacgccaatctgcctgaactgctgaaaccggtgttcgcctcgctggacgggccgacgctgcaaaagctcaacgcgcagatcgcagtggaaggccaggacgccaaacaggtggcggccgcttacctgaaagagaaaggatttgttaagggataa

SEQ ID NO: 430558 - DNA, 297 bp, Serratia marcescens
atgatggcggacgaggattttgagtccgcgcgcgtgatcgtggcatggctgctgaagcagaatattcccgccggttacaacaagcttggcacgttggtggcggcgacatccggatacgatggtgcatccgaagttggtcaagcgatcatcaaagacctgcgccggcatgcggcgtggcaaggggatccggtggcacagatggaactggcgaacttgctggagaacgagggcgataagatgaatgctacccggttacgcgtatgtgccgttgagcagaacccggatctggaaaggtaa

SEQ ID NO: 430559 - DNA, 417 bp, Serratia marcescens
ttgcaaaataaactcaccatcctcgcgggcatagccaccattatcggcaccctcttcgctggttattctgccttttcatcttcaacggaaacacgcagtcagttcgttaatggcagcgcgaatacgacgattggtagtaatagcggaaatatcaccatcactaacacaccgggtgaaaaggcgcctcagctagtgctgaagcggccgatgcctttaattgctcaacccaatatgggtaacttgttggaacccaccaaacatatttgccagctcatcgccggtacacaggtcgcattgacaggtaaaagcgctgcaatggacatcggcaatgcggaatggaaagaaatctccatcattaccggcgaatgtgccggtcagcgtggctggatcacctcaacggcgctcacctaccaataa

SEQ ID NO: 430560 - DNA, 438 bp, Serratia marcescens
atgaaaatcacgcattcaggctataaaaccggcgtcgccacgctattggcgggaatgttcgcactggcgttaaccgggtgtgccaagagcaccgcccccagccaaatcgatccggtgaataaagaggttgacgatcttttcgccaaccttggcaacccaaaggcgccgggaaaagaggaattacattatctgtctcaggtgcaagcggagatccaacgccattttaaagacgccaaaacctactcaggcagaagttgtacattaagcatcaagctggcgccggatggcctgctgatcagcattcgggctgatcaaggggatccggaactttgccaggccgcgataaaggcaatcgtcaatgcacgtttgcctaaaccgccaacggccgcggtttacgaagcggtcaaaagcagcgtattggaatttcgtccacagtga

SEQ ID NO: 430561 - DNA, 135 bp, Serratia marcescens
atggtatttcagttaagagagggcgacgtggcgacaaaacgcatgggcaacaagctcagtaaaatggtggtggtgctgctgctgatctgcctggcgttgctgctgttgcgttgggcggcgatagcgttcggttaa

SEQ ID NO: 430562 - DNA, 1275 bp, Serratia marcescens
atgtttcgccaggaagcgatcgagaatcagaaaatgaaatggcgtggcagggcgcttctgctacccggtattcccgtttggggcacgacagggctctgcctgtttttcttcatcgcctttctcaccttcgcgatcgccggtacttatacccggcgggtcaacgtgaccggcgagatcagcacttatccgcgcgccgccaacgtttattccgccgtccaggggatagtggtcaagcaattcgtcaccgaagggcaggtgattgccgctggtgcccccatttaccagatcgacgtcagcaagagtacccgtagcggtgtgatcagcgacaaccagcgccgggatatcgacggccagctggcacgcattgcgcaaatcatcaaccgactggaaagcagcaagcaggccacgcttatcatgctggaacaacagaaggcgcaatacaccgccgcattcacccgttccaccgatatcctcaaacgcgcccaggaagggattcgcatcatgaaggaaaacatggagaactaccggcactatcagaccaaggggctgatcaataaggatcagctcaccaaccaggtggcgctgtattaccagcagcagaacaacctgctgggcctgtccggccagaacgaacagaatgcgctgcagatcaccgcgctggaaagccagatccatatccaggctgccgaattcgacaaccagatttaccagatggagctgcagcgctacgagctgcaaaaggagcggcaaaacatagatgccactggcgatattatcgttcgcgcgctggccggcggccgtatcgattcgctgagcgtcacggttggccaaatggtcaacgtcggcgacagtctgctgcagattatcccgcaaaacatcgatcgctatgccctggtactgtgggtgcccaacgacgctatcccctacatcgtcgccggcgataaggtcaatgtgcgctatgacgcttttccggcggagaaatttggccagtttgccggtacggtggccgtcatctccaaagccccggcctcgccgcaggaaatgctgacctatcagggagcgcccaaagcggcgctgaccgccgccgtgccgtactacaaggtgatcgtcatgccggagaaacaggccattgcctatgacggtaaacgtctgagcctggaaaacggcatgaaagcgcaaagcaccctgtttctggaaaaaaggaagatttatcaatggatgctgtcgccgttctacgacatgaaacacagcgcgacggggccagtcaatgagtag

SEQ ID NO: 430563 - DNA, 3150 bp, Serratia marcescens
gtgttgcagcaggcggccctcggcgtcgtaaccgtagtgcacttcgccgcgcagcgcgtcgctcaccccggccagctcgccgcggccggtgtagcgataagcgcgccacagcacgccgtcttccggccgggtcagtttgtcgtggccgaaggcgctgctctgccagctgcggcggcccatggcgtcgtaacgccgctgctgctgcagcgcgccctggctgcggccggtttcccggtgcaggcgatcgcgggtgaattcgctcaccacctgctggttgaatttaatggcgctggcgtggccggaaccgtaatacagccactgcaggcgatcgccctggggcagcgtcagcgcctgcaggttggccagcgcatcccattggtattgcagttcgccattcacgccctgctcgccgagcagccgcccggcggcgtcatagcgcatctgcacgctgtccggctcgatgcccagcgccgcgccgctcgccgtcggcaggcggttcagctcgcgcagccgccccatggcgtcgaaacggtaatgccattccgcgctggcgttgccgcgccagaccagttgcccggcctcgtcgaagcggaagcgctgttcgcgctgcgtcagctcgcccgcgctgcccggcaggccgacctcacggtgctcttccagcagcccggccgcgccgtagcgataatagtggcgggtgtcgtccgggcgctcttcggtcagcacgcggcccaccgcatcgtagctgaagcggtattcgccgccgttgccgttctccagccgcgtcagccaaccctgcgggctgtagtgatagcgccgggtgcggttgatgcgatcggtgatgctgaccggcagccccagggcgttgtactgccagcgggtctggctgcccagcgcgtcctgatgttcggccagctggccgtgcgcgttccagttaaagcgctcttcgccgccgtccgggtggatcagggtatgcaggcggccgccgttatcccacaggtagcgcgtctgatggccttcggcatcggtctgcgccgtcagttgccccagcgcatcgtaggtataagccgtgacgctgccggaacagtcggtgtagcgcgtcagctggccgcgggcgtcccactccagcttcacttccccgcccagcgcgtcgatcacgctggccggcaggctctcttcgtcatccggatagcggtacagcgtggcattgcccagcgcatcgacataacgcgtcgggcgccccagcgtgtcccagtgctgcgcctcgctgctgccgtccgggtacgcgacggcgaacagccggccgctgttgcgcgaatattgatagcgcgtcacgcggccgagcgggtcggtctccgacaacaggcggccgtaagggtcccattcgctctggcgctgcgcgccgccgggcagcagcacgctgcacagctcgccgcgttggtagataaaaccgtagcggcgctggtcgaaatcggtgtactgcgccacgttgtcgtcgtcatccagccgccactccgcgcgcttgccgtcgccgcgcaccgcgctgcggcgcccgccggcgaagtcatagccgaactcaagggattctccggcgctgttgcgataggccgtcacgcgcggcacgccgtcgatctcttgccattggtattcgttcagcagcccggcggcgtcctggtggctgatcatcaggccgtcgcgccagccaaagcggcgcgttacctcaccggcgcggttgctcaccgtcgtcagttggccctgctcatcgtaaccgtagcgcgccagcgtccgttcgccttcggcggtttgcagcgccacttcgcgcaggcggccctgcgcatagcggcacatcaggcgctgcccggcgctgtccaccagttcgctcagcagcccctcgtcgtcgtaaaacagcgaggtggcgttgccgatggcgtcggtgatcatgctgagccggctcggctgctcgcccgccagcggcgggtagtggaaaatctgttcgccgacgtcaaacagctgccagctgccgtcgtcgttgtgcatcagccagcatttttcggcttcgcaataggttttgtggccgcgcggcaccctggggaaagcgacgaagtcgccggaaggcgcgcgccacaccaggccgtcctgatacggctgcaggctgctctcccagaacaggttccagccgcggcccagcacgccgtcgccggggttaccgctgcgccaatagcgctgccaggcgaccggcaggcgcgatggcagcacgaaatcgagatcgtcttcgccgtcgaggaatttctggccgctgacgatatccaccggccgggcgataatgccgacggcggcggtcgcggtcatcagggtgccggctcggcaggcgatgcgcgccagtttgttgatgccgggcagtttgcccagcagtttgccgagcgcccccagcttgccggcggcgccccccacgccgcccaccaggccggcgaacagcagcgtcaggtcagagaccttgtacagccaatccggcacttcgggcttgatcggcaaggtggtgacggtgccgccgccgataaacacgttgggcgaaccttccatcacctgcgcgtcgcagttggttttgtcccccacgcgcgaggcgggctggccgttgatgctgaccttgtcggagccctgcgccatctgcatgctcgggccgtcgtcgctgcaggccacctggctgttggtggcgagcgcggcgggtttgccgttgatgaagacgttgggggagccggtgacgatattgcctttgggggtcaggctaccggcaccggcgtcggcaatgccgtcgcgcgccgcggtggccgcctccccggtgagataccccaccgccaggctggcgccgatgagcagcacgccgacgccgatacaggaagccgccaggccggcgacgaacagcgcacccgccgccaatgcgcctgcggcggcgatcaggccgccgacaagggtgccggcaatcatgccggccagggcatgggaatgcccgatggtatcgccgacgcgggccgcttcggtcatcgtaagttccttttacgcaaaaagttcatcgttaggccgcccggtagctgttcagcacctgctgcagcagcgcgtcgtcttgcggcgtcagcttgcgcgccatcgccagggtga

SEQ ID NO: 430564 - DNA, 156 bp, Serratia marcescens
atgatgccgaacaaacggagcctgttaaaactggtggttatttgtgccacggtaatatcactggcatggataacccgtagcacgctgtgcgagctgcggatccgaacgggcactacggaggttgcggccattttggcttacgaatccgaacggtaa

SEQ ID NO: 430565 - DNA, 531 bp, Serratia marcescens
atgctaaaaggattttctatgaaaaaagtaatttattacctggcaggtggcctgctcggaagtgctctgctcacggctcatgccagcgatggcaacttgcgtattattgccgatgttgtaaagcctacttgtaatctgcagacaaaaagcttgactgtagggctaggggatcttgatgctactgaactgaataagataaatgcgaccagtgcatgggtgccattcaagtttaaattttcagattgcgttcccagtacttatgtttggtttgaatttgaaggcgaaacaccagattctagctctggtatatttatgctggataattcatctggaggcgccaaaggtttaggtctgcaaatcactcgttatcaaatggatgaactgatcctttatcctaacagaagcgactatgttggtagtgtaagtaatagtggtgaggtaaggttgtttgctcgttacaaaacatacgcaatccccgttacgccaggaaaagctaatgccaccattcagtttagcgtgacttataaataa

SEQ ID NO: 430566 - DNA, 546 bp, Serratia marcescens
atgatgagaaaaatagcactgcccctgacgctgctcggcgccgccatgctggcaccgccgctgcaggcggcggatgggaatattaatgtgaccggccgggtggtggagaatgcttgcgtagtcgatgcgggttctaagaatcaggttctgaatttaggaacgactacctctcatggtgggcataaagaatttaatattgtgttacaggattgcccggcgagtatttcgcaggtacgtgtgaggtttgaagggactgcggcgaatccaaacggttgggattgggaaaaagcggtgttcgcggccaataatagctctgagccgggcgctgccaaaggcgttggttttattatttactattatccagaaacaacccatacgtctacccatctcgctcctaatgaactcagtgaactctttacattgaaagctgggactgtaaatagattagagtttactacttatgcacagacgacagacgcatacgcctctgctcttgagttaggaaaggccattgctgatattcaatttagtattgtttatccataa

SEQ ID NO: 430567 - DNA, 921 bp, Serratia marcescens
atgaaagcgggagtatggatgctcggcctgtgcgggctgtgggcggcgggcggcgcctggggggcggaatgcctgccggccggcaacccggaacggctgctgttcgacattccggcgcagacgctgcaacgcgatctgccggtcggcagcgtggtgtggcagggcacgcgccaggtgcagcagaccgcgtcgctggcaccctgcgcgggggcggaagacgttcggctgaatctgcagggcggcgacagcgggttgaaaagcggcaacagtgcggtctatggcaccacgatcagcggattgggttatgcgctggataccgacgccgccttcagcggcggctggccggcgagcggtacccttgccgccggcaaacggcaaatcagcctgcggctggtggtgaccgggccgctggcctccggcgtgttgacgacggaaacgctggcccgccgcacgctcaacgggctgccggtgctggatatcgccttgcaaaaaccggtcgccatcacccggctggcctgcgagctgcagggtggccgccaccgcacggtggcgttgggcgaggtggcgcgcagtgattttcgcggcgtgggcagcacgcgcggcgagcagccgttcctgctggatctggcctgcgacgccggcgcccaggtcaatattcagttcgacggcctcgccgcagacggcgatgcgcccggagtgctggcgttgacccatcccgaggcgcaggagagcgcgcgcggcgtaggggtgcagctgctctaccacggtgcgccgctggcgctgggcgaacggctgccgctggaaaccgccccacagggcctgcgcagctacccgttcagcgcccgttattaccaaacgcaaccgcagatcgccgccggcgaggccaacgcggtagcgacctttagcctcacctatcaataa

SEQ ID NO: 430568 - DNA, 2529 bp, Serratia marcescens
atgaacagcaaaacagcgcgtcgccaatctgggcggcgcggcgaatatcggctgacgccgttggcctggcaacttgccggcctgctgatgtacagcggcgtggcgcaggcggaataccgttttagctctgctttattgcagataggcaatacgccgcaaaccgaagtggatctggcgttgttctctgatgaggataagcagccgccgggagagtatcgcgttgatctgttcctcaacgaacagcggctggatacccgcacgctggccttttctctgcagccggatgagcagggcaaagagcgtcttcaaccctgcctgcagtgggaggatctgaagggctttggcgtggatctggccgcctttcccgcgctgcagccctccgaggcgtgcatcaacttgccgcaggccattcccagcgccagaacggaactgctgttcgagcaacagcagttgaagctgagcatcccgcaggcggcgttaaaacgccaggcgcgcggctatgtgccgccagagcagtgggacagcggcattccggcgttgctgagcaactataccctgcgcggggcgcacgatcacagccgtcagggcggcggcaatgaaagcagctatttcgtcaatttgcgcaatggcgccaactggggggcctggcggttgcgccacgacggcgtgtggaatcggaacggccagggagagtcgcactggcgcaccctgaacagctatgtacagcgggacatcaccccgctgaacgggctgttgacgctgggcgatgccaccacgccgggcgatatcttcgattcgctaccgctgcgcggcgtacagctggtctcggtggaggagatgtacccggacagcctgcgcggctactcgccggtggtgcgcggcatcgccaaaagcaacgcggaggtgatcattcgccagaacggcgtggtggtcgatcagcgctatgtgccgccgggcgcctttgaaatcagcgatctgtatgcggtctccggcagcggcgatctggatgtcatcatcaaagaaagcgacggtacggaacagcgcctgctggtgccgtttgcttcgctgccggtgctgcagcgcgaagggcggctcagctacggcctggccgccgggcaataccgtgcgcaggacgcgagcgccgatgacgagaagtttatgcagggcacgctgatctacggcctgccgctcggcgccacgctgtatggcggtggccaatgggccaatcgttaccgttcgctggcgctgggcgtggggcaaaacctgggccgcgccggcgcgttgtcgctggatatgacgcaaagctgggcccggcggccggaagaggccgttcagagggacgatcggcagggcaaaatgtggcgtctgcgctatgaaaaaagcttcccgctcaccggcacccagctgagcatggccggttatcgccatgccagtgagggccacaccacgttgcaacaggcgatgcaatcccgcgaaagcacaggcaacagcgctacccgcagccgtaaagaactgtcgctgcagcaggggttggggccgctgccaggctcgctgttcctgagcctggcggaagatcggcgctggggagaacaaggcaagcgccagtccgtcagcctgggctacaacggcagcatcaaaggagtgagttatggccttaactacagccagaaccagagttatcaggcccagaccgatcgcgtcgtggcgctgaatgtcagcattccactgaacctgtgggcacacaacacctgggccggttatggcatcagcaatagcaacaacggcaaaacgttgcagacgctggggctgaatggcaccgcgctggaaggcgacaacctgaactgggggatgaccggcggctatggcaatcagggcgaaggcgaaaatggcaatctgacgctgggttatcgcggcagcaaggcgctgctcggcgccgggctgagccacgacggccagcgccagcggctgaattacgacgttcagggcggggtgttgctgcatgccggcggggtgacgctgtcgcaaccgctcaacgacacggtggcgctggtgcgcgcgccgggtgccggtggggtcagcgtggtgaatcaggtgggggtgaaaaccgatagccgcggctatgcggtggtgccttatctctccgcctatcgccagaatgcgattgcgctggatccaaccaccctggcggacgacgtggaattagggttgaccagccagacggtgatcccgacccgcggcgcggtggtgctggcggattatcaaaccaaggtcggcgtgcggatgatgatgacgctggcgcgcgccgacggccggccggtgccgtttggcgcgatcgccacgctggcgggcgccggcggtgacggcagcatcgtcggcgacggcgggcagctgttcctggccggcatgccggccaacggcatgctgcacgtgcagtggggcaagcagcctgaccagcaatgccaggtcgtctacagcctgccggaaacggccggcccggagatcccagagatagcggccgagtgtcgttaa

SEQ ID NO: 430569 - DNA, 675 bp, Serratia marcescens
atgaaaccagtctatattgcgctttgtgccgcactgttaatcaacagttttcaggccgctgccggtgtggtgatcggcggcacccggctggtgtaccccggcggcaagaaagaagcgaccatcacggtgaaaaatccggacgatattccttatctggtgcaatcgtgggtcaacgccgatctggaaggcaacgtcaaggcgccgttcctggtcacgccgccgctgtttcgtttgaatggcggcaaagagaatacgctgcgggtggtgaaaaccgctcaggcgctgccggaagatcgcgagtcggtattctggttcagcgtcaagaccgtgccgccggaggcggaaggcaagggcaaccatctgcaaatcgcggtgcgcacccgcatcaaactgttctatcgcccggcgtcgctggccggctcgccggaagaagcggcgagcaaagtacgctgggagcgcagcggcaatacgctgaaagcgatcaatgattccccctactacctgagtttctccacggtctcggtcgctggtgaaaagatcaaggagccgcagatggtggcgccgttcgccacgctggcctataccctgccgccttcagccaccggcaaacaggtgagctggcaggtgatcaacgactacggcggcctgagcgcgcagcaccaacaagcgttgtga

SEQ ID NO: 430570 - DNA, 513 bp, Serratia marcescens
atgaaaaagtatctggttacttctgtgttggcgtgtacggcgctctgctcctctgcgtttgcggcagatggcgcgattaacgttactggcaaaattgttgataacgcctgtgtggtgagcccaactctggatgtgcgtctgggagacacggctgcggctgattttgaacacgtgggagattggggttatgcagaagagttcttcttggagcttaaagattgtccggcaaatatcaaggcggctactgtacagctggatggcgaggcagattccaataataaaaatctattccaacttatctctggcggcgccactggtgtagctttagaacttattgcaataagtgggagtggttggggaaaacagccgattgtgcctggtggtacttcggaggaattttcgctgaatgagggtgagaatcgtctgtcttttgcggcacgttacagatcaacagataaagtcaccgccggtgatgctaatgccactatccaattcagtgttttatataattaa

SEQ ID NO: 430571 - DNA, 498 bp, Serratia marcescens
atgaaaaagtatctggtagcttccgcactggcctgtgcggtgatctcttcctcggcgtttgctgccgatggcgtgattaacttcaccggtaaaattatcgataacgcctgcgtggttaacccgacgctgaacgtacagatgggggatgttgccgcagccacatttaaaaatgtgggtgatgagtctgactataaggaatttgctttgcaactgaaagactgtccagccaacctgaaggcggctaaagtgacccttgacggtgccgtggacgacaaagacgctaagttattcaaattgaaagacggcggtgctgccggtctggcattgcgcattaacgggccagacaaagagcacctgttacccggcacagcctcggcggatattcctttgaatgaaggggataattcagtgcctttcttcgtcgcttatcgctctacagataaagtcaccgccggtgatgccaacgccactatccaattcagcgttttgtataactag

SEQ ID NO: 430572 - DNA, 642 bp, Serratia marcescens
atgaaactgaccagccaaagctttaaagaaggagagttcattcccggagagttcgccttcgctgtccccgatgccgccaaccatgtcgctttatcgggaaatcgcaacccccatctcgcctggagtgaagtgcctgcaggcacgcagtctttcgtgatcgtctgccatgatcccgacgtgccaagccgtggtgatgatgtgaatcaagagggtcgggttgtgcccgcgtcgttgccgcgcgttgatttctttcactggctgctgctggatattccggccagtaccgtggaaattgcggcgggttctcaatcggacggcgtaacgccgcgtggcaaagccgggccaagcgccccctcagcctatcgccacggcatcaatgactataccggttggtttgccgccgacgagcagatgaagggggaatactacggttacgatggcccatgcccaccgtggaacgatacgttagttcatcattatattttcacggtttatgcgcttgctacccccggtttggatgtgcaggggcctttgacaggggctaatgtgaatgccgccctggcggaagcgccggtgttagcccaggcgagcctgacgggcctctacagcctgaacccaaacgtagcgccgacggtgaaataa

SEQ ID NO: 430573 - DNA, 879 bp, Serratia marcescens
atgaaccggaacagttcctccaggccaatgaaaaccagacgcgagccagatgcgaagcgtttgccctggtattctccttcgggggctccggtgtcaaggcgccggctatgcggggtgtgtcagccgacattgaaacgccagctgcttacgccgcaattcgtcttccatgaagcgacggtcttgttgatcgtggccggccagctcgatattacaacggcctcacaccacctctctctggagaaccccggcgaactggtcttgatcgcccccaatacccgtgcagatttggtcaaaacaccggtcgacatcgatcggccttttcgctcgctattcctgacgctgtcggcagaattgctggatacctttcaccgaaaccggcaagcttcggcccccattcgctatacagactacgcgtgtaacacgctgcctctgaacgaagatctgtcggcgacgttttatcacgtgattgaaagcgtggaaaaacaggaagtcagcgatattcgcctgcaatatcgcctgttggactttttgagcgcgctgggcgaacgggggcatgttttcacgcatttgccattggatagcgcatcacagcgcctgcgcaccttgatttttgaggctccggaacaaaactggacggcggaaacagcgggaaaaacgttagcgatgagcccggcaacgttgcggcggcgtcttgccgccgaacagacgcgcttcgaagacttgctgatagacgtccgtatgcatcacgccatgatgttggttcaaaccacccgatgggatatgacccgcattgcagaagcttgcggctacaaatccagagcgcgttttagcgaacgctttcaaaagcgttttggttacgcgccttccgccatcagataa

SEQ ID NO: 430574 - DNA, 1848 bp, Serratia marcescens
atgagcacaattaatttcgagcgcgacctgaccattataaattcgatggcaacacttaaaaacacccaaccagaatatgacggtcaacgcataatcttaaccgagtattatcaaggaaagggtaaaggtggcggtgtatttacaggacataccaacgcggtaaatgccattgacgacggtggctattcgacgcttaaagtcaatcaatccccagcagcgtggtatcgtaatgacttaacccagctttctttatacgacgggggatgtgatcttactcttgacgataatggccccctgattcaaaacattgcactgatcagaggtgaacgttccgtaaagattccaagcggctattggaatattaaaacaccggtcgtctttccagccaacagtggaatttccctttacggtgaaagcagttacaacggtcgtgccgtgttcgtctacaacggacaagacttggcagaacagactgatataacagggattataaccatcgacgccgctcagggagaaataacctatagcggtgtcagtttcagaaacttccagctaaggggaaataacaagacgatttgcggactgagtataaaatacgcaagctatgtgcacgcccagaatgtaagcattctttactgtcggggagccggtctttatttagataaggttcaggatagttacttcaaattcgtcgaggttcaaggctgcggcagaacgtcgggagattatgataactacctggacatcactgacttcaataagatgtttcttgcccccattcatttaacatcaacaatgcaaaatgaccactgcaacatgttacgattcgaagattgtcaatgggaagccaatttgataagcccgactatctatgttaacggtggaataggactttggtttaaaaacctacatatggaacatcgaaccggcccgcttcaaaaattgatcggcaacaatcccaatgccagctgtctattatatatgaataattctggcgaagtttacctcaatgaagttcaggcatcagagataaaacacttagtctatagctctggatacggtgttttatatgctacaaatattaatcgaggagggaatattactcacgcagcatcaggcaaaaaattcaatgtgttcatgaatgggtgctggcttcaggatatggacttttcatccagtgtaaaagccatgatcagcaattgccgactagccagtttgacctggcgataccctgcttatccaagtactatttcggacacccacttttccggcaacgttgctctgacagaagatggagccaacccacgtatcgatttggtcgactgccagtatggcagcgtgaaaagcaataccagcaatctacgtttcctcggcgggcgttgctcgggagatttttactatgtctcacgatcgggggctggctcggtcattgacgttgacgttgaaggcaacacgaccatcagcaccagttacggctgttcatatcagcctggaaaatccaactataccgcagtacggatcgccgacggccccaaagagctcggcggcgtaatgcgccccattggttccgaatggttcaatactgctgtggccggtgacgaagaaggtgccatctatagctgggtgaaaacgactaccgggtggcgcccctccagtcgcatcagtcgtttcggcacgagcttatcttccatgacgtttgctcaacttcctgctgcgaatgtttgcaaaggcaccgctattttttgcaccaataccgcagcaaatccatcggcacaggcaatcataagcaacggttcgaattgggtctatttggcaaccccggggacaaaagtcaccgcagcgaattga

SEQ ID NO: 430575 - DNA, 1257 bp, Serratia marcescens
atggcaaaagcaaaactaccaaccggtgtcgagatccgcggaaagcgcttggctatctggttcatgtatcgcgggaaacgctgtcgcgaattgctgagatcttgggaaatcaccccggcaaacatcaagcgcgcttccatgatgcgggcagtcatccagagtgagatccaactggggcagtttgattatgcctcacggttcccaacgtctaagcgtgcggcagaagccaccatcgcttccgggccagttcgcaaggtcgagacattcggccagttagtggatgcctggctggaaaaccgtgaaccagaattggctcgtaatacgatgaaaaaagcccagtcacaaatgaaaaccataaaattcattgtgggaccagatcgggcgctggctgacatcaaccacaacgacattctcggttttagaaatgcgctcctgcatgggcgaaccttttaccaggaaagcctgcgcagcaacaaggacggccgcaccgtgcgcacggtaaacgattatgttggtgcactctgtaccgttttacgttttgcctaccgatcgggctttatccgcgacaaaccctatgaggaggttcgaaaattgaagcgatcgaacacgaaaccggatccgcttctccgtgatgagtacgatcagttggtaatggcgttggatggccagcgccgttttatgtggacaatcgccatttttaccgggctgcgccacggcgagcttgccgcccttgcatgggaggatatcgacctggacaaaggtgaattacgggtgagcagaaatttaacgtccctgggcgaattcgggccgccaaaaacgcaggcaggttttcgcacggtaacgctactcgcgccggcggtggaggcactacgcgcgcagcggctgcttaccggcctgcatcggccaaccgagatcacgtatcatcaccgcgaatacggcagcaccgaacgccaacgcctgcgctttgtgttcgtcccgcgcccatccaaaggcgaacagaggccgcactatggcctgtcgtcgatcggcgctcgctggaattccgctgtgaagcgcgcaggtattcgaccacgtaatccgtaccagacgcgccacacgttcgcttgctggcttttgacggccggagcgaacccgtcatttatcgcggcgcagatgggacacgaaaacgcgcagatggtttacgagatctacggaaaatggattgaacagatgaacggcgatcaggtggcaatgctcaatgacaggctggctatttaa

SEQ ID NO: 430576 - DNA, 186 bp, Serratia marcescens
atgctgacacttatcggcttcctcctgttggtaagcccgtgcggccacgatgcttgcgacgcgctgccggtatcagagcgaatttactcgagcttcgaccagtgcgagcgaatgagggaagcaatccaattgcgccgcccgcgcgctgttctgtactgcgacggcgtttacagcactgaaaaatga

SEQ ID NO: 430577 - DNA, 1119 bp, Serratia marcescens
atgagcaaccaactcgcactgatccagaaagacctggcggaacagctggcaccggcaaaagagattttgccgagccacgtcagctttgaaaaatttaccagcgcagccgccgtggcgctggccaacaataaagacctgtttggcgccgaccgccagagcgtgattaacgccctgtcatcctgcgctaaagacgggctgatccccgatgggcgcgaggcggcccttgtcgtttacaagacgaaaaatgccgatggtcagtggatccctcgagctcagtatttgccgatgatagatggcgttatgaagcgtgcccgccagtcaggagaggtttctatcatcgcagcccgcgcgctgtacgctaacgataaattccgggtatggatggatgaggacggcgaacacgtgttctacgaacccaatctgctcgaccgcggggagatgatcggcgcgttcgcttacgccaagatgcgcagcggcgaactgcaatttgaagtgatgaacctgcaggacattgaaaaggttcgcgcggcgagcaagaacagcgacagcggcccgtgggttaactggttcgagtctatgtccagaaaatcagtcatgcaccgcctgtgccgccggctgccgaataactccgagatcatggaaatgctcgagcacgggcaagagatggtttggcataaggagaaagacgtaacgccggacacccgagtaagcgccggccagctgatcgaggcggctgataaggcgcccgagccagttacagaaaattcatcaccagaaaagattgctgaagatattcgcggcagcatcgacaagatcaccaccactgctcaggcgacagacctccgcgcctcagttgaagacctgaaagcgcagctggggatcacgctgtataccgagctgaaaaacaaaatcgtactgcagcaccaccgccttaacgcgattgccagcctgggtgcatcgatcgatgcggccggcaagaacggcggcactacaagccaggaacgggcagagctgggcgcccttctgcatcgctctgcgcggttcctgagcgctgatgaggttcagcgctatcagcaggcgatcgatgacctatcgccggcgcaggaggcggcatgctga

SEQ ID NO: 430578 - DNA, 3252 bp, Serratia marcescens
atgcaaaatgttgcagcctatctttacagggcaaaacagaaatctgggaaaaaccatctttttacatactttgaggcgaagtctgacgatcacgcggaaacaaaacgtgattttctcttcatggaagctggccactcaaaagccgactacttcgcgccggtgcgcatcgattttccagtcgttgacgagctgcccgcagagggcgaattcagcgaaacattctggcttacctgggcgctggaaagcgacgccggcaaaacctgtgtgccgcgcgacacgctcgatccgtccttggcattcccgaaactgtatccctacatgacaaaacctgcaggtggtgcaggcgcagcagaaaacagcaggaccactgaaaaaacgcaggtggtgcaggagcagcagaaacctgcaggtgaatacttcgcatcgagcctcgacaagcacacagtgatcgccgctgcgtggctttacggcaataactgcctgaagctgaacgacgagcaattggccgcggccaaagcgctcgtgatggacgatgcacagcgctacccgcaaaacgtcattctggcgctgaccagcctcaagcagttcgcacacacctacccagaaatgccgatcacggtaatctcgggcatgaaagccatctggccgccgttcggcaaagtgccggagctgggcaaactgtgccaattcgccaccgaatacctcgacgctacggtagaacagcgcgcgagcgttatctcgaagtggcaaacctcagccggcggcggcaccaagcctgccgaaaccgcacctgaggagccattgcgcaccgaatccggcgcgatcctcacaaacggcgccgagccggcaaccggcacgccgattgactctctgcagatgctggaaaccgtaatcggctgcgcgctgtatccgtctgatttcgacatttccaacccaccgggcgccatcatccgcgcggtcaccgagatgaaaaagcgcaacgacgaggcgctcaaagcatggaatgagcagctcagcgccacgcctggcgttttgcagttatcccgtcaggcgattgttgcactaatccgcggggccgaagaaaacctgcacgttacccccggtgcgctgcgcagctacatcaacgccaatctgatcgaggtcgacgctaaaccggcgcaacagaacgcggaaaccgtgcaacaaattggcgccgaagcacaacaagcggcctcaaatgctggcgaaaaagatgaagtggtcaccgagtttgagactgaacgctgcgcatggcttcgggctgaaatacgtgccgcgctggccggaacgactggcgttatggatgaaagcgacgttgaagaattgaccgcagccgtcggcgaaggcatatcacacagttacatcgcgcggctgctggccaaagagattgaaacgtgcgacccattcaagcagctgatcgcggatgaggtgcaccacctcacctgcgatgtgttggaaaattggcaggataaaaaggatccgcgcgtcgcgtttatcgattcacgtgttgagttttatttgcaggaagcacgccgggcagcagagcagaaatgccgggaagtggcctccgccatcgacggagccgacagcggcgcgctgcagcaggaaaaccaagaacccgcgcgggttgatgcctcaaatgagggcaaaaaaacggaagtcgcgcagcagcaacccggcgaactccgcagcataggtggcgggcattttagctatgacccggccgaaatgttcgctgcatcgccgctggccaagatcgacgccgcgggcaccacaaccggcgatgatgttcgcgaattcctggattcgtcaacggaaacggccggagtgtcaggcaaaacggcggaattgtcaggtgagaacgccgataccgcggcgccagtcgaagtacagaacgaggctgccgcggcagtcgtcgacgcaccgctccgggaagtaccggccgccccggcatacttcgagcctgggcgctatctggatattccgaacgaggtctaccacagcgccaacggcatcagcagcacgatggcaaaggacgcgcggatcagcctgatgtattaccacggccgccacgttatcaaaaccatccagcgcgagcgcaccgatgcgctgacgttcggctcgctggttcacgcgctggcgctcgagcctgaaaagctggacgaggaattcagcgttgagccggtgatccctgagggggcattcacagatacagcatcgatgcgcgcatttatcgaacagcacaacgccaccctgccgaaacagaccgacgccgatacgctgcgcgcagtgatcgagaagcataacggcaccctgacagcaccgtatgcgctgggcggcaacgctgacgagatcggccaattctacatgctgctgccgccggaatttcagagcatcccagaggacgcaaaaatcaccgccacggcgatgaaagcctgcatcaaagagtacaacgccaccctgccggcgccgttgaaaaccaccggcggccgcgacgcactgctggaacagttggcgaccatcgatccggagtttgtcgagaaagagcgtgcgattccggcgccgttgccggtcagcggcagcaaagaggatatggccgcgcgtatcaaaacgattttgccaacggcggtattcgccgacgaagtgatcagcgcctggaaaaatagcaacgaccagcgccagacgatcacgcagacgcagatgaaacacgccaaggcaattcagcgcgccctgttcacccacccatcggccgggaagttgctgcagcacccacaacgcgctgtcgaggtgagctatttcggcatcgatgaagaaaccggcctcgagctgcgcgtacgtcccgaccttgagattgaggccagcggcctgcgtacaggctttgaccttaaaaccgtcagcatgggtaacgtcaagcaaagcgccctgcgcgcccgcctgcaccgtgaaatcgtcgagcgcgattaccacctgagcgcgggcatgtattgcgatgtggcggcgctggatcagttcttctggatcttcgtcaataaggatgagcactaccactggatcgccatcgttgaggcctccactgacctgctcgaactcggccgccttgagtaccgcaaaaccctgcgggatatcaaacaggcgcaggataccggcgtgtggccagaaccgatcacagaagaaatcgtggacgacattaacgactttgaccagcgccgcatggaagcgctgcgcgtagcctaa

SEQ ID NO: 430579 - DNA, 294 bp, Serratia marcescens
atgagcaagactattattttcaaattggcgcaggtcagcaataacgtggcaaaagtgttttcaaatggagaagtcgctggatatatcgcactcccggaaaatgagcaccagaatcaacgccctttcgctatcacccataatggcaaagatattggctacgagcattgcgaagtttgcgcgattgaagctgttgtccgccgcttcgagcgcatcgcggttggggttgaggtgcacctcatcacgcctaaagaaccagtcagctctataaaaatcaacgtggtatcgattcattaa

SEQ ID NO: 430580 - DNA, 195 bp, Serratia marcescens
atgagcaagatcgtcccaaacagcggtaaggctgtcagcctccgcaactcgcgcaccggggcgccgtgggtaggatcattcgattacatccgcggccgctaccggttcgaacctgtcggcaaccttcgggccatcaagcgcccttttgaatccctgcggatcccgccggaattcgagccagctggcacgcactga

SEQ ID NO: 430581 - DNA, 162 bp, Serratia marcescens
atggaaaacaaaactatcgatcagggcaacaacgagacagtaaaaataggtgttttccctaactgcaacggcacttttaccgcgatgacgttcacaaatagccgggattttaaaaccgctgcaggcgcgcaacgctggtttgctcgtcagatggccgactaa

SEQ ID NO: 430582 - DNA, 462 bp, Serratia marcescens
atggaaatcaaacacgagcagatccgcgaagcgctgcgcggatgggccatcgaaacaacccagcgcacggtagccgctgagatcacccgcgcttattttgacctgcagttacaggcgccactgctggcgcagatcgaacgtgccgacggcagcgttgacgatgcagcatggcacaacaacaaacagcagatctttcgctggctggacggcgatagtgtggccgcgcgccgcaagattcaacagctgcaaccggcgatcctcgccgcgctgccagcagagctacgcgcccggctgattgccggaaacagcattgagtatctggcaattcgcgcgctgaaagaacaccaaggggcgatcgccgcggcgctgttgaacgcgttgccgaccgactttgaacgggagtgcgacaaagctgagcgaagcctcaacgagttacggcgcgcctattcaaccctgcattaa

SEQ ID NO: 430583 - DNA, 252 bp, Serratia marcescens
atggccaatttttcaagagcacagattgaaacacagatccgcgcccaactggtgcgcgaaggaattcccgacgacgtggcgcgctcggctgccggccgtggcgccgatcattacctgtcccgaccgaacgcgacgatcgccagcagcatcgccatcgcaaagacgtacgcaaagccgctaaagcgggtgaagggcaagccggccattaagccggcgacggggaatggggtaaagacgtggcggcgtagttaa

SEQ ID NO: 430584 - DNA, 1119 bp, Serratia marcescens
atgagcaatattaactcgaaggctacagccatgccaaaacctttggctaagagtaaggctaataacgagccttacagaaaggtgaagatcactatgtgggatgacccgaaattccgggcgttgtccccgttgccacctagcgggcagagtttgtttatttacctgctcacaggcccgttcacggggattattcctgggttattcaaggccgggcgcgcggctttggctgaggaattgggctgggatgttgaagccttcgacttagccttaggcgaagccttatcccttgggatggtcaaagccgacatccaagcccgagttttttggctgcccaacgccgccaaacataacccgccaacgtcggtaaacgtcatcaaatcgtgggtgagggcgttcgaattactgcccgaatgtgacctcaaatatgaggcgttggaatccctgaaagccgcatcgcacggcgtttcacaggctatgggttcggctttcgataaggctttctctttggctaatcctttggctacggataagcctaagcctttgccaagaggtatccagaaagcagtaagcagtaaacagatcttaaaccccacacataacgcgcgtgggcgcgaagatgggcagccatcaggggattcggcgccgccggagtttgtggatgacaccaggcctgatgatcccgctgtaaaaaaaccgatgactgccgactggcagccgtcgccagattttcgccagcgtgcagcactctggaatgtacacctgccggccgccgggtgggagccgcacgaactggcatcgttccgagattattggacggcggaaggcaaggtattccaccaggtgcagtgggagcaaaagttcgcccggcatctggccagccagccttcgctaaatcgaaaagcaaacgcaacgggaggtaaccatgcggaattcagatacaacccgggtgatcagcgctcgtactacgagcagttcaccgaatgggagcggcagtccaccgccgcaggagtgggcgctctgggagctgatgaccaaaatttacggccagcggtggattgccaagaatggcaatcgtccatcggacctatggacggcgcaggtcaattcgatgacgagtga

SEQ ID NO: 430585 - DNA, 456 bp, Serratia marcescens
atgacgagtgaacaactcacccgcgtatgcagtgccttcgcggacaagtgcaaagctggcagccactggccgcccgatcttgccgagtttgtcgcggtgaccgccgaatgcagcggtggtgcgttcgggctgacggtcgacgatgttctcgccgagaacaagcgctggcgcaatgagttctaccgctacagctgcgcagagacgttcgagtggcgccatccggtgctttaccacatctgcatcgcactcaagcgcattggcattgagagaaaactcactgaacgtgaactgcgtgcgcaggccgcgaaagaactggatcgttgggaaaaacgggttgcaggtggtttacctatcccgccgatccgtcgacagctggcgccacctaaagcccccccagggccaacgccggcggaactgctttatgcggagtacaaacgtaaaaaggggattatttaa

SEQ ID NO: 430586 - DNA, 399 bp, Serratia marcescens
atgaccaacgatcaggctgtcagagtaaccgcaaaacagctggtggctatctgcctcggcaaagaaatgagcaccactgaaatctgggaggcggtcaaggccgcgcacccggcaaacacgatgacgcggcaggagctggcgctcaggctgcggtcgatgatcagatcgccggacgtaaaaatcacaaagaagggctgcgggccgagggcgctctacaagctgacaagcgtgtccgacaaatttgttgagcgcgccgaggtgaattatcgcgccaatccccgtaccggcacgccggataaaacgctgtggcacttccaccccaaagagctgcagttctgcaacgtccacaagatgtttgatcaggcgctggccaacctgcgcgggagggcatcggcatga

SEQ ID NO: 430587 - DNA, 405 bp, Serratia marcescens
atgattgacaagaatcaggttgttgcagtgcgcagcaaatctgccggtggccgaattgtcggcacggatgtgaatagagagccccacctctacgagtcgctttatcccgaaagatacgtctcagcgttgatctctgaggggaagatgcaggatgcaatgttggtgaacgcaacccgtcgaatcgttgaactggagtcactcctgctcatcccggttgaagaaactgtgtggccggctgagatcgcgcttgttttctcacagctcaatcatgcatcgaatttgcctgaatcccatcaagaacgcctccgccatcacattaaccgtatgtggctggagagtgtcccgatgccaaaaataatcaccgtggcgtcatccctggcgaaaacattggagcaatacgcatga

SEQ ID NO: 430588 - DNA, 2100 bp, Serratia marcescens
atgagagaaatcatcgttgataatttcgccggcggcggtggtgcgagcacgggaatcgaaatggctaccggccgcagcgttgatatagcgatcaatcacgacgagaacgcgatcgctatgcacaccacgaatcaccccaacacgttgcactactgcgaatcggtatttgatatcgaccccgtggcagcgactgcagggcgccctgtcgggttagcatggttcagccctgattgcagacatttcagtaaagccaaaggcagcaagccggttaaaaaggaaattcgcggcttagcttggatcgtcgtccgttgggcgctacgtacccgttttcgctgcggtatgttggaaaacgtcgaagagttcaaaacttgggggccgctgatggctgacgctgaaggaaacgaacgtccttgccccgagcgcagtggcgagactttcgcagccttcgtgtccatgctgaccacgggaattaacgcggcacatccggcgcttgctgaatgttgcgaagtcttggggattgccatcggcagtgatgaccatcagcgcctggtgaaaggtttgggttacgtggtcgattttcgcgaactcagggcgtgcgactatggcgcgccgaccatacgcaggagatttttcatggtaatgcgctgtgacgctaaaccgatcgtctggcctgagcctacccacggcgatccgaaatccctcgaggtgcaaagcggtaagttgaagccttggcgcacggccgcagagtgcattgactggtctatcccatgcccgagcatttttgagcgcaagcgcccgctggccgaaaacacactgcgccgcatcgcgcgaggtctgcaacgctttgttctggactctccggcaccgttcattgtgaagtgcaaccacaccagcacgaagacaatttacgattgtttccgaggtcaatcgctgggtgaaccgcttcagaccataacaaaaactcacggttatgccctggtggcgccccacatcaccaaattccgcaccggtgccactgggcaggagtgcgatgagccgatctctaccattacggctggtagctccgatcgccctggcggtaatggtcatgcgctgggaatggttgaggcaacgctgacgccattcatcgccggtgctggaggctcagaatatcagggtaaacctcgcgttgcggatcagccgctgcacactgttctcaaagaatcacatgcggccttggttacgccatacatcgcgcgtatcgggcagactggatttggcggcgatcgcatggcgtatggtgcgaaggatccgctgactactgtcacaagcaaagcggaacacttgctggtggcgccggttatcgcccgtcaatttggcgccagcgttggtcatggcgctgacgaaccgaacggcacgatcaccgctagcggtggcgggaagagccaattggtatcagcgtttctggcgaaacactacggcggcaattattccggccccggcgtgggtatggatgaaccagtgcattcagtcacaactgtcgatcatcatgctgttatcgcagcaaacctcctcacaataggctacggcgagcgcccaggtcagccgccgcgggtacaggatattgagaagcccttggggactgtagtagcagcaaaaaaacatgcaatggttacgtcccatcttgtgaagctgcgcggaacctgcaaagacggccagactgtggcggaaccgatgccgacaattacggccggtggcctgcatatcggcgaagtgcgtgcctttctactgaagtattacggaaacgagagagagggactgaacatcgaagacccgcttcacaccgtgacaagccgcgaccggtttggtttggtgacggttgccggcgtcgattatcagattgtcgatattggtatgcgtatgctccagccccatgaactctacgctgcgcagggttttccggggtggtacatcattgaccaagaccatcgaggagtgaaatacgcgaaggataagcaggtggcccgctgtggcaacgccgttccgccgccgtttgccgaagcgcttgtgcgcgcaaacttacctgaaatatgcacagccaaagaggatatcgcggcatga

SEQ ID NO: 430589 - DNA, 150 bp, Serratia marcescens
atgatcaacatcccacgcaggccgcgcttggtgcgcggtgtagaaatcacaacagaacaggacatgtggcagcagagcaaacattatcgctttcgctcaggcatgtactacgggcggatcagatatgcggagttgcgtgatgaaaagtga

SEQ ID NO: 430590 - DNA, 240 bp, Serratia marcescens
gtgaccggattacaagacacgcccccaggagggtacaaagtcgtgcgctgcatggatgatgcggtggttgccagattcaaaaatttccccgtctgcgagcgggcgttgatgtaccgaaagggcgatcagatctccttcatgcccctacagccagaagatattgtcggcacacccaaattgataacacaaattttagagcgggccggctaccgtaacctgaattctgatagactcacttaa

SEQ ID NO: 430591 - DNA, 597 bp, Serratia marcescens
atggcgcagttacaactcatcaagcaatcgcaaggaatactgatcccggccacgccggagaccagcgaattcctgcaatcgaaatgcaagctcggcgccgtgctggtggccgattttaaaaaggtgcgcaacccggcgtttcaccgtcgatttttcgcgcttctcaatctgggttttgaatactgggaacccaccggcggcgctatctccacgaacgagcgcaaactggttaccggctacgccagattcctggctacgttcggtggcaatgagtcggcgctgctcgatgccgccgagcagtatctcgagcgcgtcgcagaccgtcgcgccggcagcattagcgcctgcaaatcatttgacgcctatcgcgcgtgggtgacggttgaagccggtcactatgacgcgatccaactccccgacggcactctccgcaaacacccccgcagcatcgcgttcgccaacatggacgaaaccgagttccatcagctgtaccaagctgctctcgatgttttatggcgctggatcctgcacaagccgtttcgctcccacgaggaagccgagaacgccgcggcgcagctgatgaattttgcggggtga

SEQ ID NO: 430592 - DNA, 171 bp, Serratia marcescens
atggggctaaaaacggacgactgcgccaccgcggcgctctgcgtttgttgccacaccgcgatcgataacggcaaagatctctcacgcgaagagcggcgccagatgatggaccgcgcgatcgttctgacgattattcaaatcgcccgccgcgggctggtggtgccgcaatga

SEQ ID NO: 430593 - DNA, 693 bp, Serratia marcescens
atgatgaacgcacagcaactggaatatatacggctggagttaacccatgcgctgcatgatgactccggcggtactaaggggcaactccaggcatttatcgagcacccgccggcggacaaaaaccatttgccccgccaaaaaattcacaaggtgacgcttgagggcggccgcgaggtcaacgccgaaaattctgcggtctatgcgttagagacacgcagccgcaggcggccaatgccaccgatcaacgatcatgtcttttcgtcgtgcgcctggcgccgagcagtgatgacgttgggcgatcatcaaatcgcatggctgcgatactgctacggcttcgatctgcagttcaaatatcagaccgaaatttgccagcacgtgtgggagagctaccaggtgtacaaagtcggcaagcgccttcagtcaaaaattattaagcgcctggtgtcgttagtctggctggccgtgcaggaaaccgcggcaaaaaacaaaaatgagacgtacaaggaatacgccggcagcgcgctggccaatttgatgagcgtcgaccgctcaacctggtcacgagtatatgcgccgcactgggcgcgcctgaaagaggtcgcagagaaaatggatgtggaagccctgcagctggtgtcgtcacgtcgcgaagagattatttatcggttggaattgcaaaatgcaacaaaatag

SEQ ID NO: 430594 - DNA, 270 bp, Serratia marcescens
atgccattaaaaatgacgagtgcgcccgccgcactgctcctggtgctgttcttggcctcctgcgcggaacggacaccaccgccgccggcgccgctcgtgctgttaccccctgagtcggtgttcaacccctgcgaacaaccaaaattgcagggtgacacctggggggatatcggcagccacgcactggcgctgcaaacagcgttatcaatctgcgccggccaggtggccacgctgaaccaatggcgggcagccgccgggagaaaacaatga

SEQ ID NO: 430595 - DNA, 249 bp, Serratia marcescens
atgagcgaagctaagtcgcaagatggcagcactgtaacggggtatcgtgaactgtcatttggcgaaatcgggaagatgaatcaattcaaagatatcagccgccagttcatcaaacttctgcgcgagcatgttggcgatgtccgggccgattgggaagcaacggattgggctcgccaggctgagatggatatgaagcgagcttgtatggccgcttgccgatccgtggcgaagccggatgctgattgctaa

SEQ ID NO: 430596 - DNA, 1002 bp, Serratia marcescens
atgtcgaaaccggaagaaagcggccttgagcgcgattactgtgccggtcagctttctctgcgtgagatggcaaagatatacggcatcagtgaagcagccattagaaagcgggccaaaaagcatgggtgggtacgcagtgagaaaactggtacgcaacccggtacgcaggtacgcaaaaaaggtacgcaaaaagagaaggtgcgcaccaagccaaaagcggcaggaaaaacctcagaaaaaggcgaggtggaactgacggttgatcctgatgaatatggtctgacgttgcagcaggcgtggtttgttcattggtgcgtagtgagtaaaagcagggttgaagcgtaccgcctggctggctacgaggggacagggaacaccgcctatgtgggcgccagccgtctgtacagaagggataacgttcggcgcgctattcgcgacctgcaggaaagaacggcaaagcgctaccaggcagacctcgacgatttgataaatcaactggtggcaataaccaaagctgacccgaacgacctgatgcagtaccggcgagtgaattgtcgttactgctggggtgagggacacaaataccagtggcgagatctgggcgagcaacttaaggccgaaaaaaaagccgaggccgacaacaggcctccgccggatttgtcgggcggcattgggtttatcgaaaacatggatcccaacccggactgtccgcattgcaacggcgagggtgaaggttatgtccacatccacgacacccgggaccatgtcggcgacgcgcgattttatttcactggtgtgaaggaaacgaaattcggcatcgagatccaaacggaggataagaaagccgctcgggccatgttgatccaactcatcacgaaactggatctgaataatccggcgagtgatgtaccgagaggcctcgacgatttctatgcagatattggacaaagcaagcctgaatccagcgctccggcagttctggacgacaaaggcgaggaataa

SEQ ID NO: 430597 - DNA, 1215 bp, Serratia marcescens
gtgtacgcgttgctgaaaattcagatcgagcggtttggcctgcgtcatcgcttccgcattctggacaacaaaatcatcaaccggtttaccggcagtgaattcatgttttacgggttgtggcgacacgttgacgagatcaagtcgctggaaagcatcgatgtgctctggaacgaagaggcgcacgcgatgacagaggctcaatgggaaattctggagccaacgatccgtaaggaaggatcggagtgctggtttttgttcaacccgcgtttaacgactgattttgtctggcgaaatttcgttgttacgccgccgcctgacacgctggtcagaaaaataaatttcgacgaaaacccgtttctcagtcgcaccatcatgaacgtgatcgaggccgccaaggcccgcgatgaggaaatgttcgagcacgtttatctcggcgtgcctcgcacggacgacgatgaagccattatcaagctctcgtggatagaggccgctgtagacgctcacaaggctctcaacatcgaaccggccggccgccggcgcgtaggctttgacgttgccgacagcggcgctgataagtgcgccaacgtgtatgcgcatggttcggtggcgctttgggctgatgaatggaaagcacttgaagacgagctgatgaaaagctgtaaacgcacgtacaacgttgcgttgaagcatgatgcggcgattgtttacgacagcatcggcgttggtgcatcgagtggctctaagtttgcagaaataaacgaggaacgtgaaaacgccagtgattggggcgcggaagcgatcgagtatttcaaatttaacgccggcggtgcggtcttcgagccagagcgtgaatatcagccaggcatcaccaataaagattttttcgcaaatataaaagcgcaggcctggtggcttgtcgctgaccgcttccgtaatacgtacaacgtgattaacgggaaggaaaaacgcgagagctttactgacgaccagctgataagcatcgattccgattgtccgctgctggacaaactcaaatttgagttatccacgccgaaacgtgatttcgataaaaacgggcgcgtgaaagtggaaacgaaagacgatctgaaaaagcgcgacattccatcaccgaacgtcgccgacgctttcattatggcctttgcgccgatcgagatgccgctcgtgatttccgatgacttcctggagaatatttga

SEQ ID NO: 430598 - DNA, 507 bp, Serratia marcescens
atgcttaaatactacctctactgtattaaaaataaagtatcaccaactaaagctagactattttttaacaacacatcacattcacaaaaaaagaaacgcaaagtcctatcaaaatccggagtaagaattagcggccaggctaatatcatggcacctttttattatgagtacgggaaaattgaaattattggcaacgtattcattaacgccaattgcaacttccttgatgatgaaaaaattgtaatcaatgatggagcgatgataggccctaatgtaacgctgtcaacggtaagccatcacatcgctccagaaaagagacataaaaataacattgtcgccccgatcacaataggtaagaatgtctggatttgtgctggagccgtcatacttcccggcgttgtaatcggtgaaaacagtattatcggtgcaaatagcgttgtgaattgtaacgtaccagctaacactatgtatgccggcgctccggcagtattcaagaagaatatttaa

SEQ ID NO: 430599 - DNA, 2637 bp, Serratia marcescens
atgatcaaaatatccggcgtataccgcgatccggccggcgtagccatgcctggcgctttgatagctgtaaagtcgaaaaacaacacactggaaacgttcaaatgcttgtgtgtggaaaccgagacgaatctcggcggagagtatgagttctcagtcgctcctgacgattacgaggtgtttgttacctataacaatgggatccgccagcgcctcggcttcatgcgcatcgaagatggagcggcagatggttcccttaatgattatctgatgtatgcagatccggagctggcccggccgccggtttattctgacatgaagcgaatgtccgagcgtgccaaagcgtccgaaatcgcttctgctgagtccgctcgtgagtcagcgggcgcgcgtgatgcttcgatagatgccagcgaagtttccgtagacgctgccgaatcatcaaaattgcattcggaaacagcaatgcaaggtgctagggattccaaagaaaatgcggtaagcgccgctagtagtgctagtgattcgaagaccagtgcggataaatctgatagcgctgctgtgcgtgctgaaatggcggagaaaaacgcacagaacatcgctgatgccaatacttattatatcacacaaaatgatccagacggcacgatagcgggactggctggaactcccgagggaaaatcattccgcgttgcccagggagtgggggccgatgcatcattcatttattaccgaaaatataatggccaagccatagccatagccgacgccccaggtaaagcgataacagatttaataaaaaaatccgcaggaaaaccattcatgcggtggcgtgataagttgggtatggttgccgcatattggtctgcagataatgacggcggggttggttttgtcagcaaattagttgaatttagtagaaatggatttttctctgaaaacacagaagtatcagacaatgtcattaaaaataaagatttctctgtagttaaaagcgatgatggtagttttaagataaaagataggcttggtcttacccttcttaaagcgaaagccggtaacctttacctcccgaaaatcagtgcgatattgaactctgcaacaaatttaagttacggaaacgtaaaaatatcgattggaaccggtggcgatattattgctcttcgtgatagccgtggcgtagtgggccttcgtgttgataaaaactgcgtgctgcatgcgaagattgcagggtatgacggaagttcacccgcaagaaaaatgtctgaggattctattatatctctggtgcagtcatttgcggattcggcaaaaaccaatttcggtcgcagaatttttaataacgttccggcgctgggtaatccaaataaaaccaagaagaaagtgcagttttggattgtctacggccaatcattctcagtaggtgcgcaaagcggcgtcgccttatcacttactcaatcgttaggtaatgtgatgcttggcgattcgccgcgcggtatgaagttctccaccaatacaacttatgaatatgcgccgcttggtggtgcaaatgtctttaggccgctggttgaggtcatgcaggataacgcaggaaacatcgtggccaacacgtctggcggatatggagagactatttcttcgtcctttgccaataatttgaaggcctatcacaaccaaagcacgggtgtagaaaatgatgaggactttatcatcggcgtcgcctgctgcggcgtttccggccgtaccatcgaacaactgaagaagggtgcgacaccagagatatacaaccgtgtggagaccgccctggatggcattgcagaagccgccgctgctgctggctacgattgggaaattggcggcattatctacatgcagggtgagaatgataatggtcagtcgtttgaattctattatcctcgcttgcagtcaatgcatgatactctgattacgtcatgtatggataaaagcgggcaagcccgaaagccgctgtttatgcttaatcaactcgggaataactatgttcgcgggatgggtgtaccttccgcgcaaatagaattggcgctaaaaaatgataatgttgtgctggtcggatcgtatcagggattatcgaatccaggcgcgcatttatcggctaactcatatcgaattattggcgctatgtttgctcgggatgcattccgtcacatgtcgggatatggctcatatccatttaaatgtgagaaaggcgtatatcatgatgatgctatttatcttggcatgacaccacatatcaccccgctgaagttcaacaaggtatttaacgggtggagttatgttgagcattcagataagggaatcactgttagtgattcatcgggggtgattgcttcttctgatttaacagttaccaccgtttcgccaacagtaataaagatattgtgctccagaaaactgaccgggaaagtaactgtaactttaggcgatagtgctcatggtggaacgcacaacatatgcgatggagggggtgaagttgcttgcaacaggtgggaatatggagtgcctaaccaatatccgcaagagaacatcccagagttggtaaataaaagttattcgctggcgacatttgcagccatccaaacaattgaatgtaaagaggtctaa

SEQ ID NO: 430600 - DNA, 807 bp, Serratia marcescens
atggctattgatttagtgatgggtgattctattttttctaccggtgtttctatagacgttccggtaagcgagggattggtatcatttggtctcggcggtgatatgttgggcatcaaccttgttgaaggaggtgtagttccaactgttgtcggtaaccctatacgtatggatgcgaaatcctctaaattgggaagctttggctaccttgacttgaatattaaggaaacagagaatttcacatatattagcgtgaataaaatttggactccaacaggcctgagcgcatgcaatctgatcggtacgttccagaccacatcggcaaccggtgttactgtcgcaggttccggcctgataatggaagcgaacggctatagaactgcagtcgcatccgtctatgatggaacgccggctggagcgaccgttatatcggataatatctccgtaaccaacggaaccagcccgccgccggcaactgaagatacagcaacctggcgattcctcgcagccatctatgacggaaacggagattttggttcaggggagacagcgagcaaacgccggtacatcatcgataagactgtcggaattacccttaaccgtcgcaacgcggacctaactatgattcgtgatttgcgaggcaaggatacgatccgtgtgggtaatatgggcagccggttaactcaaaacagcaccacgatcatgggcgcatacgccgtatacaaccgcgcgctaactgctgctgagttcgatttgatgtacaaacgtatgcaggaaattgcttcggcaaatggctggaatgcgatctaa

SEQ ID NO: 430601 - DNA, 399 bp, Serratia marcescens
atgggaatgatgccaaaatttgccagcccggcagcagactacgttgagcgccgcttgagccttgacgagatctgcatttcaaagccgagcgctacttatctgctccgcgccgccggccaggcgatggcggtcggtatccacgctgacgcgttgcttgttgtcgattcgtcggcgacgccggtacacggcagcattatcgtagctgcggaggaaggcgcgcatgtgttgcgccgacttcgtctttacccgtatcgcgcgcttgagtttctcgatggctccggccgggaaactgaactcggtaacgaagactcggaagaagggatcgaggtgttcggcgtggtgatgtactgcgtgaatgatatgcggtcgtgcgagtgggatgatctgccggttatttga

SEQ ID NO: 430602 - DNA, 807 bp, Serratia marcescens
atggacatcgacaaaacgacaagagaaatacgttgccgcgagcatattggctgcaccgccagcgttctgcaaacccaaacgctgcttacccgcagcattgcgctggaatctgcgtcgctgattctggtgcgggaagggagcaaacgggtgtgttggcaacatcgcgatatccttctgcaaccgggtgatgccatcctgattgcggctgactgcacgttggacgtcacgaacatacggtcatccgaaacgggtatttatgctgccgagtggttgagtttccccgacgcgttgacgacggacgaacctcacgccctatacagtctttgtggcggttttcgtcaggcgttctaccacgcgcgcgcggctatcatggatccggaggcgataccggagcgggttgctgtaaagcgcatggaagaagtgcagatctggcttgaggagtcgggccttcggtgggcgcctgtgaaggccgaaaaactgagtcgtcaggtgagaaagcgggtatccgacgatttggcgcgccagtggttagcgccggatatcgcgcagcatttcgctatgtcggagtcgactttccgtcgtcggttggcggcggagggcatgtcatttcatcaattgcttaccgaagcccgtatgtgccacgccctgacgctgttgcaggtgaccgatatggcggtaaatcaggttgcgctctccgtggggtacgaaagcccgtccaaattcaccgcgcgcttccgtacccgttttggtttcaacccagctcaaattcgtgaaaggctggcgatcatcgctagcgactttgtctaa

SEQ ID NO: 430603 - DNA, 564 bp, Serratia marcescens
atgaacatccgcatcatggccgccatggccgttttatcctgtaccttcgccggttcggcgatggcggaaggaacatttatcctgtccagcccgcaagtgaacgacggacatttcacccaaaatcaattgctcagcaacgattatggctttggctgcagcggcaataatcgctcaccggcgttacgctggcagggagcgccggcgggaacgcgcagcttcgcactgcagatctatgaccgcgatgcccctaccggcctcggctgggtacactggcaagtggtaaatattccggccgatatcgccgcattgcccgccgggatcggcgcgcacaatgagggtttgccaggtaacgccattcaaacccgcactgactttggcgtaccgggatacggcggcccttgccctcccgtcggcagcacgcaccgctacgtcattacgttgaccgcgctgaaaacagaccggctgcccgccattacccccgacgcgacgcccgctctggtgggttatatgacccagagcaacgcactggccagcgcacagcttgaggttagacaaagtcgctag

SEQ ID NO: 430604 - DNA, 915 bp, Serratia marcescens
atgaatagacaagacccacttaatggcattcacctgttcctcaccgtggtagaaaccggcaatttttcacgggcggctgcgatgctgagcgtgacacccgccgcggtgagccagagaattagccagcttgaaaccgagctggcggtcaagctgttccaccgctcgacccgcagcgtcagcctcaccgaagccggcgaatggttttatcacaacgtagcgcccttttatcaacatatacttaatgctcgcgaaggcttgaatcagagccaggacatgccgtcagggcatctgcgcatcactgcagtgcagatggcgaaggaattgcttaaagcccctttcctggcggaattcaatcgtcgctatccacagatatcgctggaaataaattacgaagatcatctggtggatattattcaggaacgcattgatatcggcattcgtctggcagacaaattgctgccgggcatgatcggtgtgcaaataacaccggctctgccatgtgcattaatcgctacaccggaatatattgcacaatatggtgcgccgaataatattggcgagctgcagcaacatcgctgcatacgctttcgctttcccgatcgcggcgttttacataaatggtcactgcgcgatggcgaaaaaacgcaagatctcgatatgcccggcattttcattaccgataatacggaagcgattattgaggcggcccgcgccggaattggcattgcacacgtctttttgcgtcaccgggtaaaacaggagcttgatgcaggttcgttggtagaaatcatgcccgggatttgccggcccctaccgccgatgtgggtatattatgccaacagaaaatacgtgccgaaaaaagtcagggtgttcatcgatgagctaaaacgccattgccggacactgtcctggtaa

SEQ ID NO: 430605 - DNA, 399 bp, Serratia marcescens
atgtcagtctcgttatcgttggatcatgcccagcgaattatcgccatcggggtcgcgactgcacagcagttgggagtggcagtatgcatttccgtctttgattccggtgccaacctgatcgcctttgtacgcatgaacgataccccgctgggggccatcgatttggcccaaagaaaagccaaaacctcggcgttgtttcgcattcccagcgccgatttggggctgctttccggctcgggacaggagctgtggtctattgaacacagtaatcaggggctggcttctttcgccggcgggatgccgatttattcatccgagggtgaatttattggcgcaataggtatttcaggagccaaatcatatgaggatgcacatatcgctgaaaaatgtctgcaataa

SEQ ID NO: 430606 - DNA, 897 bp, Serratia marcescens
atgcatgaaataacccgcaggaaatttattatcggcagcggcgcactggcggcggcggcggtattgccgacgacgacagacgctgcaaatagtatcaagatgaaaagaggaaataattccatggtaaagaaaacagtattaattacgggcgcgggatcaggtttcggccagtccgtttcactggcgctggctgcccgagggcatcatgtgatcgccggagtgcaacttacgccgcaagtgacccagctgttggaactcgccaggcagcacggcgtttcgttacaggttgaaaaactggatatactggagccccgcgatcgtgaatatgcctggcaatgggacgtcgacgtattgttcaacaatgccgggatcgccgaagccggcgcggttgcggaaatgcccattgacgtgcttcgctctcagtttgaaaccaatgtgttttccagtatggccctgacacaaggcttcattaagcggatggtcgcccgcagaagcggtaaaatcgtgttcgtctcttcggtggcggggctattaaccggcgcgttcactggcgcttattgcgcctccaagcatgcgctggaagccatcgccgaggctctccacatggaattggctgaatttggggtgaaggtcgccacggtgaatccggggccttatctgaccggtttcaacgatcgcatgatggaaagcttcaggaaatggtatgacccaaaggtgaactttatcgatcacagcaagctgaaatttcctttcgaccagtttgatccgcaggaaatggtagacaaaatggtcagcgtaattgaagaagatgatggactgttccgcaatctgttgccggagtctttcatccaggtagtgaaggatgatcaaagcaacggctggacacgcaagcagtga

SEQ ID NO: 430607 - DNA, 870 bp, Serratia marcescens
atgaaaaaaatccactccctgccgcacctgtccgctttcgaagccgccgcccgtctcggcagcttcagcgccgctgcggatgagctgtttctcaccaccggcgcggtcagccgccatattcgcagtctcgaagcacagctggggatcacgctgttttatcgcggacacaaatccgtgcggctgacgcaggccggtgagaacttttcccgcaccgcgtcccgggtcatcggcgaactgtttgctgcggagagcgcgctgaaagcgagcgccggccagcagcggctggtggtgcacagcctgccgacgttcaccatgcactggctgatgccgaagctggcggcattcaatgagcgtcatccgggggtcgcgattgatatcaccaccggcatcggcgccgtcgatcgcaatacgccgtttgacgtggcgatccggcgcgatcccgcgcacttctcagggctgaaagcgatccctttcctgcaggaagacagcctgctggtctgcagccagagctatttgcacgccagaccggtcattgcgccggacacgcttggcgagcataccgccatccgcatccgtgcccgggaagatttgtggcgcagctggctgaatgcttatccgacggcgctggacgcttcgccgccgccgcttacgctcgatcataccttcgccgccattcaggcggccgaagacggcctggggctggccgttgtgccttatttgttctgcgccaaacacctgtcgtcaggccgactggtgtcgcctttcccgacgctgaccatccgaaccggcgtctattctctgctgctgcgcgaccgggacgatgacgtcgtgagaacattcgccgcctggctgcaggcgtttcaggcgtaa

SEQ ID NO: 430608 - DNA, 915 bp, Serratia marcescens
atgcagataaaagttctcggctcggcggcgggcggcggttttccccagtggaattgcaactgcgaaaactgccggggcgttcgcgaccacagcatcaacgccacgcgccgcacgcagtcttccatcgccatcagcgatgatgacggtaaaaactgggtgctgtgcaacgtttccccggacatttgccatcagctgttggcctcgcccgaattgaataatcccgacgtgctgcgcggcaccggtatcggcgcgatcgtgctgaccgacagccagatcgatcacagcgcgggcttactcaatttgcgtgagggctgtccgcatcacgtctggtgcacacctgaagtacatgacgatctcagcaccggcttcccggtgtttcccatgctctcccactggaacggcgggctgattcaccacccggtgacgcccggtgagccgttccacacggcggtctgcccgaccgtgcgctttaccgccattccgctgctcagcaacgcgccgccctattcgccgtatcgcgatcgtccgctgccgggccacaacgtggcgctgtttatcgaagataccgcacgcggggtcgggctgctgtacgcaccgggcctgggtgagccggacgaggcgctgatgccgtggctgcgccgcgcggactgcctgctgatcgacggcacgctgtggcgcgacaacgaactggccaacgccggcgtgggccgcaataccggcaaggacatggggcatctggcgctggcggaagaacacgggctggcagctctgctcgccaccttgcccgccaggcgcaaaatcctgatccacattaacaataccaaccctatcctcaatgaagactcggtagagcggcaaagcctgaccgccgccggcattgaagtgagctgggacggcatgaatatcgaactgtag

SEQ ID NO: 430609 - DNA, 1173 bp, Serratia marcescens
atgatgctaccttggctaaccggcgaggccgcagagaatcatcgccggcaaatcgccacccgagcgatcttcttcctcgccgggttgggcatggccgcctgggcgccgttgatccctttcgtgaaagcgcgattgggcatcgatgacggcgcgctcggtttgctgctgttttgccttgccgccggctccatggcgatcatgcccttcgccgggtatctgatcgccaaactggggtgccgcgccgtgttgctgggcgctggcgccttgctgtgcatcgacttgccgctgttggcgttactcgatgctccgctgttgatgggggcggcattgggggtatttggcgccgtcaacggcatcatggatgtggcgatgaactcacaggcgataatcgtcgagcgggagagcggccaggcgaaaatgtccggttttcatggcttctacagccttggcggcattgccggcgccggcggcgtcagtctgttgctgctggcgggccttgccccgacccaggccatcggcctgatcgccctcctcatcgcgatcctactgctgatcgtcgccggcgatttactggcgcacggcggcatcggcgagcggcgacggggcggcgcgcggtgggcgctggcccacggcaagatcctgtttatcgccctgctctgtttcttcgtgttcctgaccgagggggcgatgctcgactggtcggcattattcctgcatgccgagcgcggcgtggccaaatcgcaggcggggatcgggttcacgctgtacgccgtcgccgtggcctgcgggcggctgtatggcgacaggctgatcggcgccgtcgggcgctttcgcactctgctgctcggcagcctgtgcgccgcggcgggcgtgctgttgaccgtcaccgtccctctggcatcggccgcctttggcgggttgatgctcgccggcctgggcatcgccaacatcgttcccattctgttcaacgccgtcggcaatcaaaaacaggtgccgcctggccaggcgtttccggccgtgacgctggtcggctatctcggcttattaaccggcccggcgctgatcggttttatcgccaattacaccagcctggccctggctttcggctgcacgttgctgtgcctgttgctggtcagcatcagcgccaaagccgtgacgaacacatctcactaa

SEQ ID NO: 430610 - DNA, 1290 bp, Serratia marcescens
atgcgcatccgtacataccatcatcagctctccttttcgggggcgcccgcagcgagtgatttcgctaccctgcatcaacaaggctaccggcttattgtcaacaaccggccagatgaagaaccgggggagcatctatcccatcagcaagagaaaacgctggctgaaggcatgggcatagactacgtctatcttccttacacgttcgacacgctgacctgggagaccgtttataccttccattacctgttgcggcggggcaagaagaccctggcgcactgccggagcggggcgcgctcagcctgccttgctctgctgcatgcgctgcgcgaagggcggatcgatgaagcgcgattccgcagccaatgcgaagaatatggcgcggatgccgataaggcgctcagctggtatcgccggcatcagtccgttcagtctcatgcgcaagtgcacgcattttatgagccggaaagcggcagcctgcagtatgtcgtcgccgatcccgaggcgcgtcgctgcgccatcatcgacccggtactggattttgaccgccgatcgggcacggtatcgcatcagcaggcgcacaccattttgagctttatccggcagcaaggatggggcgtggcctgggtgctggatacgcacccgcatgccgaccatttttctgccgcaacctggctggcgcagaaaaccggcgccctcagcggcataggcgaaaaaatcaccgccgtgcaggggctgtggcaagacatctataatttgaaggaactgcctcccgccgagaccgtgtgggatgcgctgtttgcggatggggacgtcttttttatcggcaacctgcgcgctgaagtcttgctgtctcctggccacaccctggcttccgtcacgtatcacattgccgatgcggcgtttattcacgatacgtttttcatgcctgacagcggcaccgcaagggccgatttccccggcggaaatgcggaagccctgtgggattcgttgcagcggatcttgagcctgccagcggatacccgcctgtttaccggccacgattatcgcccggcggggcgtgaggcccgctgggaaagcaccgtgcgagagcagcgcgagaacaacccctgggtggccaacatggataaagcccaatttatcgcgcaaagaaagcagcgagacgccacgttgccgcatccggaattgatgctgatggcgctgcaggtcaacattcgcggcggcgttctgcctgattgcgaagatgatgggcggcactacctcaaaatccctgttaatcgcttcaaggggtaa

SEQ ID NO: 430611 - DNA, 1938 bp, Serratia marcescens
atgaaagtataccctaaaatcgactatacacatgttctctctgaactttcagtaaataggcaagatccatgtgaagttttaagagagttaatatccaattcatatgatgcaagatcaaataaaatttggtattaccctctagaagaatttgatgggttaatatttattgataacggcgttggtctaaaaactgcgccagaagaaggtaaagacatctcaaattatgaagcattcttttccattgggaaaacgacaaaattgaaaggcgatgcaattggctataaatgtcaagggtcaaaactatgcttcgcatcatctgaaatatcagtaatctccaagtttgacgacgaaaaagaatggatatacaaaaaaattgacaacccaagaagtaatttaaacattgataccgacataactccggaaaaagaattaaacatagcaacgatcctcgcaaaaatattccctaagcaggatataagaacaaagaatatattaaatgacataattaacaccatatcccctgacgacttcatttccgggaccataattataataaaagggttaaatgtagagcagtattctaaatactataccgtcaataatggaaatggttacgctttagatggttcatacgtttacaactatattaaattttgcacaaaacatggtgatacaagagccattaacgcaaaacatggcttttctccgatggaaaaactgcagcttgacgaacactcaaaagatattaaaggagtcgagctgtacatctgggatggaacgaatcaaatatccattgagcaaggctacccatatatagaaattgataaagatggcgagactccattattagcatccaaattatccagactaagatcagcgcgattttatgcaagaaaagcaaaagtaattagacatcagaatcaaaaatatacatttattctagctgtggatggtaatcggcgggccctcgaaaaatataataacctagacagacaaggggcatctaagtcaggtctaaaacttacagaccaacgaggtacttttatatcatcacaaggaataaaaacctgtaactatagccaactatggtatgagccatctctttcttcggactacgtatgcctggcaaataatgatatacagtcacattatttatttttgattgatggaccatttgatttggtaacaaatagaaactctataagcaacgatgcattgagagttcttaaagacccggcatttatctcgcaaataaaagaatttattgacacagcaaaatctgaacaaattgtttttcgagatttcatagatgtaattaataaaaagaaggatgctgaaaatatatcagagcaaattaaagctttagatgaaacaaagcataacctagaaaaaagggagagattcatgataaaaaacatcccttcactagaaaaaaaatggtttattgcacctgaaacaagtgatgaacattgggtaggaacattatatacaatactcagtcattttgttccacacgactccccatatagaagtctatggttgaggccattgacattttcagcacgtggaattgatagtgttggaactgattttggagagtcctcatttgggtatgataagctcaaggctattgagtataaaaatagatttagccatcttgaggttcttaaccacccattgaatattatagactacatactatgttggacattcgaaaaagttgctttcggaaacaacgaaagtattgaggatgactttaatatgcaaggcaatattgaagagtgcaaaaatatcgattttaaaaaatgcgcttacatgattaacaatgttgaaaccaagtctggtgatatatacgacaattctatttatgtcatatcattgcgcgagctaatacttaatacttttgattgtagagttagcaatgcaaaaaacacgtag

SEQ ID NO: 430612 - DNA, 807 bp, Serratia marcescens
atgagtagcgaagttattaaaaaatatataaagaataatcttaagtcactgaagcgaactgttgttaatcttcataaaaagtggaagtatcgtaataattctaactcggaggttctttggatttcaataggagaaaattgccttccggatgatattcttagaaggcacaaaaggaaatcttttagctctgtattttcttctggacgatctaatattgaatatgccattcagatggaaagagatggatacaagaatttattaaaaagagatttattgaattattttcctgatggggataattctgtcttacgttcgatattttataaggattgtgaaggggaatatagcgaaaggcatatgattgggtttgaattcacccatcatgatcctctcaaaattaaagaggatggccgagctttcaaacggcgaatatctcgacaattaaaatatcgaggcaagaaagattttattttcttttatcatcatagggttactgaaaaaagcgatcttcctcttttgaggaggaatttaaatgattttctatctttttataatattaataactgcaattgtcaaatcgtgcttttttatcaaaatataataatgagaagtgaagaaaaacatatcgatttcactgcctttgatacaggtctacttgagtttgtatgtcatactcatgatatgtggggcggggatgatccggaaatattttgggctaaaggagatgatgatctttttactgagatatttagcactgtcgataactataaatttaaaaagggagtgggaaaagttgtagagcattaa

SEQ ID NO: 430613 - DNA, 1497 bp, Serratia marcescens
atgaatgaatttgttaatgccgtcaacggcgtgatttggagtcaggcccttatttacctctgtttgggaaccggtttgtatttttctttgcgtacccgatttttgcaactgcgtcacctgaaagggatggtacggctgatatttcagggcaaagcaaatgctgccggagtgtcttccttccaggcgttatccatgaccctggccggacgggtaggtaccggtaatatcgccggggtggcgaccgctatcaccttcggcgggccgggggcgttgttctggatgtggatggtggcgttcctgggggccagttccgcctttgtggagtcgacactgggtcaggtctataaggagaagctcgatggcgaatatcggggtggcccggcgttctatatcgagaaagggctgggcatgaagtggtatgcctggatttttgcgtttgccaccatcttttcttgcggcgtgttgttgccgggcgtccaggccaactccatcggcgccagcctggatattgcattcggtattagcccgaatgtcacggcagccctcattgccctgctgctggggttcattatcttcggtggggttaagcgtattgcgagctttgctggtaccgtggtgccgttcatggcgctgggctacatcattgtggcctgcgtgattgtggcgctcaatattgaccaactgccgggtgtgattttactggtctggaaaagtgcgtttggtcttgatgccggattcggcgctatcctggggctggccatcatgtggggcgtgaagcggggagtgtattctaacgaagccgcacaggggacaggaccgcacgcctcatctgctgctgccgtcagtcatcctgccaaacaggggttggtacaggcgttctcggtctatattgataccctgtttgtttgctctgccaccggttttatgctgttgattaccggcctgtacaacgttcagggcgcggacggcgcggcgctctatacagggattgccggtgttgctgcgggtcccggttacgtgcaaaccgcgatggaaagcatgatgcccggttttgggagttattttgttgccattgcgctgttcttcttcgcgttcacgaccatcgtggcgtattactatattgcggaaaccaacgtcgcctacctcaaccggaaaatgcaccgcccctggctgaccttcgtattgaaaatcgggctgatggcatcggccgtctacggcacggtgaaaacggcggatttggcgtggggtctgggggatatcggcgtggggctgatggcgtggttgaatatcattgctattttgctgctgcgcaagacggcgttcacctgcctgaaggattatgaagctcaactggcgaagggcgaggacccggtttttcacccggaaaagctggggattaagcgggcggactattgggtggataaccgcgccgaggtgaaccggatacgcgaatcgacggggagcattgatgaaaacgtggggctgtcgggtaaatag

SEQ ID NO: 430614 - DNA, 585 bp, Serratia marcescens
atgaagcgtaagtatttgaccggggaagaagtgcggagtttattgttaacgatttccagggcgagggtgtcgtatcgcgattactgtatggtgagcatggcctttttgcatggtctgcgagtgagtgagttgaccgggcttaaagtgacggattatgaccctctgtcgaagaagatacatatcaggcggttgaagggggggttaagcaccagccatccgttattaccggaggagaatgcggtgctggaacagtggttggtggagcgccagacctttcccgggcatccgttgccgtggctattcttatcccggcagggaaagcgcctttcccgccagcgcttttatcagttattgaaagaatacggccaaaaagcccagctccctttgcccattcacccccacatgctgcgacatgcctgtggatataatctcgctgagcgtggcaatgacacacgattgattcaggattatctgggacatcgtaatatccggcatacggtactgtataccgccgccaatgccgcgcgttttaatggtgcctggttgaaaggaaatgaaggcgtaccggtttcaccgctggcctga

SEQ ID NO: 430615 - DNA, 3084 bp, Serratia marcescens
atgaaaataaaatcgatatcaatgattagcgcgtcggtggcatgcgtgatgttccctgtatctgttttcgccaatgaggcaggatattctgaagcagggcgtatcggcgttcccatcagttggatgagtggtgagtttaatcgtcagtgggggttggcggcgattaacgcgcaggatgcttatgccgccggattcaacggacaaggggtgacgattggtgtcttcgacgaaaaaacatttttccatccggagtttgcaggaaagataaacgtcatctcagattatttaccgtatgactttgatgaggatgagagtgatgaagattttgatgacaatgactacgacgatgaatatgaagcgggggtaaatatttcgttcggttcacatggtacgcatgtggccggtatcgcggctgctcatagggacggtgtgggcatgcatggtgttgcattcggcgcctcgctgatttcgggctccatgcctggcgagcataatcaactggagtacatggcacagagccctgcccgcgtcattaataacagttggggagatacgcctgagattgaatatgacgagtatggtgatgaaatcgaattggataacggtacgtacaaatatgaacaagtctcgttttcgaccatcctggagggactgttaccgcttaaggacgacatcgacacgagaagccgttcccctattccctgggtgaatggcggcgaggaggcccgcgttgccaattacgcggggatgctgcggctggcacgcagtggcaaattgattgtttttgcagctggcaactcgaacaactacaacattcctatgagtgatgagagcatcccataccttttccccgaggtgttggggaattacctgacggtcaccaatcttgggcgtgatgatgacttgagtgcttcttcgacgcgctgcgcgcagacggccagttattgcgtgtctgcgccgggggaggagatttacagcacgagtgggtactttgtttcgttgaccgatggccccattacggaccaggctctgttcaacgatgaactggatgttgaaccccaatatgaaaaaatgtcgggcacgtcgatggctgctccgctcgtcagtggcgcggcggctgtcgtgatgtcccgtttcccttacatgacgacagaacaaatcagcagcgtgctgaaaaccacggcaactgatctgggggcccctggcattgatgagcgcttcgggtgggggaaaatcaacctgaaagaggccatgggcggcccgaaaatgttcatcaccgcacaagatattccggcggacctttatgtgccggggtcatacacccagacgcaattcgtggccaacattccgggaatgggggccattgtcgaagccggtaccagcaacgaacgtgtctgtaatgctgtcgaatgcggatttgacagttggacgaacaacatctctggccacggcggcctcaccaaagaagggatgggcacgctggtcatgaccggcgccaacacctattccggcccgacgctggtcaatcagggctggttggcagtcaacggctcggtcacctcggccgtcagcgtgcagagcggcggtatcgtcggcggcagcggcacggtcggttcgctgaccgcccgtcagggcggcaccgtggcgccgggcaacgcgatcggcaccctgaacgtggcgggtaacgtcagcttcgaaccgggttcgcgctacgcggtggaagtggggccgaacggccagagcgatcggatccagagcagcggatcggcgacgatcggcggcggtgaggtggcggtgacgctggagaacagccccaacctgctgacgcaaagcgaggtgcgcagcctgctgggccagcagtacaccatcctgagcgcgcagcagggggtgagcgggcagtttgacgcggtggcgccgaactacctgttcctcggcaccgggctgagctaccagccgaccggggtgacgctgagcgtcgggcgcaacggcaccagcttcgccagcgtggcgcagacgccgaacgagcgggcggcggcggcggcggcggatgcgctggcggcgggcaacccggtgtacgagagcctgctcggcagcggcacggcgggcgaagcgcggcaggcgttccgtcagctgtcggggcaaatccatgcggacatcgcctcggcgctggtgaacgacagccgctacctgcgtgaggcgctgaacgggcgtctgcgtcaggcggaagggctggcgagctcgtcggccatcaaggcggacgagggcggtgcctgggcgcagctgctgggggcgtgggaccacgcgtcgggcgacgccaatgctaccggctatcaggcctcgacctacggggtgctggtggggctggactcggcggcggcggacgactggcggctgggggtggcgaccggctacacccgcacctcgctgcacggcgggtacgggtcgaaggcggacagcgacaactaccacctggcggcgtacggcgacaaacagttcggggcgctggcgctgcgcggcggggcgggctacacctggcaccgcatcgacaccaagcggtcggtgaactacgggatgcagtcggatcgcgacacggcgaagtacagcgcgcgcaccgagcagttgttcgcggaagcgggctacagcgtgcggggtgagtggctgaacctggagccgttcgtgaacctggcgtacgtgaacttcgagaacaacggcatcgcggaaagcggcggcgcggcggcattgcgcggcgacaagcagcacacggacgcgacggtgtcgacgctgggcctgcgcgcggacaccgcctggcaggtgagcgcgggcacgacggtggcgctgcgcagtgagctggggtggcagcatcagtacggcagtctggagcgtggcaccgggctgcggttcaacggcggcaacgcgccgttcgtggtggacagcgtgccggtctcgcgtgacgggatggtgctgaaggcgggggcggaagtggcggtgaacgagaacgccacgctgtcgctgggctacggcgggctgctgtcgcagcaccaccaggacaacagcgtcaacgccggcttcacctggcgcttctga

SEQ ID NO: 430616 - DNA, 729 bp, Serratia marcescens
atgtccggcacgaacaagaatgcgaaggggcgagcaggggctaccgccatggcggcatcaggggccgtttcaccgtctttcgatgaacggatgcgctggtcgtttgttgtcgtggatgtctgtgactatggacgccaggggttggtgttcgcgctgaaagagacgacgcatgttgaggggaagaaggaggtgttcgcctttccctcgctggatatcgccttgtcgctgcgctggcctgccagaaacagcaaggtcacgcagtgtctggtggtgcgcctgtcgccggttgcccgggaggcgttagtcatgttgttgcaactgagcgaacgcatccacagcgcggccatcggcagtttccgtgttgcggtgctgtcgccatatggtaaaacgctaacgcagcgtctgatggacgcgatgggaatggatgagcttcccgttattgatgctcgtctgccgatttcgctgctgtgccgtgaagtcggtatggcaatgaaaaaggagccccagattcaggaggcgtggcacgtcttttcggtattgagccccagtgagcgtaaggcgttattctcatcgctgcaaaatcgagatgttcatcagcaggcgcgcagtcgccgtatcagcccaaaaacggtgtatgctcagcgaagtggcgcgctacggcgattgggggtgccgaatattttatccttattgcgcctgctcaattcaaaaaagtatcgggctgcatga

SEQ ID NO: 430617 - DNA, 408 bp, Serratia marcescens
atgatattgctggccgttggcggtgcgttgctcctgttgtggttgggtatgacggccttgttggtgggagggatgtgggtgttgccaccactttcctcatcaacatcgctgtcaacagcgggaatatggcgctttttgtccggtgagtttggtgtttggggaacgctgcgcgtgggaatagcggtgggggctgtggtgtggtggtgtgcagcggccggttatcccctgttgctgtcagtgcgtgatgggctggccctggtcgtgggtggtgtgatgttgattgcgttattcaatgcagggcggcggttgcctctgtcttccgccggagaggtactgttctgtgggggattgagtgcgggctggatggggatgttggcactggcgctttatctgttgctgcaatcatga

SEQ ID NO: 430618 - DNA, 591 bp, Serratia marcescens
gtggcgttattgatgaatattgggggatgcatgtctcgtgagaaaaatgaaaataagccccggcacaaaagcaacgccgttcgggtagcggctcgtcaacgaaatcacgacaactattcgcttcctgccgaggtaacacatttatcggatgcgccgctttattgcgcagtggcgtattttgccctgttgcagcagcgcccggtatcgcgtcagcagatttgtcgcgcctttcacatcagcacgcgtcgtgcggtggaggtgatgcgttatctgacaggcagtgctaccccgcatgtggcatgtgagcgtcttccgccggtatccggcgaacgcgagcagggataccgcattcatgtgcatgccatcgcagggggcggggtaaggcggaaacgccgtgcggcacctggcattgatgtcgaagcaaactccgcgccggtatcggtgtctccgtctgacgaagggggagagggcgtaaaggggtatcggcgcgtatcacgcaaggccaatgagcaagcgcatcaaaaactgcgcagctggtttttacagcggcccaacccgaatgcccaaccggaggaacaggagggatcatga

SEQ ID NO: 430619 - DNA, 894 bp, Serratia marcescens
atgaatggtcggttgatgatggcgtgttgcgttctctcgtgtcttgcgactgctggcggggaagcgtgtgcacaagaggacggctcacttggggcggtatatgccaggctcctgatgctgtcgtcaaccgaggatatcagtacgtcgtcttttcgttccgataatggcgtgacgtttgataagttctcgctgccttacgaggtttttcgcctcgatattactgacagattatctctctccggcatcgttcggggggggtacctgaaggtcaaggggggtgatgacgatgacggtttgacgacacgctctcggctggacattttttcggccgtatcggggctggttgggcgttatcatattagcgatgagatagctgttaaaaatggcgttgaactgggctatgcccgcatgaggaaccgcatttttcttctcgaccatgcttcaggttataaataccgaggggatatgcgatcacataacggactggttattccgatggtcggcgtcgaatatgccaacgagcttgatggcggagaccgtattcatgcagagggtagtatttcatggatgtacgtttcatcctttaacacgaacaatcgcccggtaaatattcgcaacgaaaatgcggggagctggtctttgagcggggaatatactttcggcgatgcttatcggttattgggctggccgatggatgtgatggtgtcaaacaagttgggcggtttttacggtgcgggatatcgggaaatcgatatgggatttatgaacaataccgagctggcaaccggtacgcgtatcagggttctcaatcgtaattataacgtgcgtgtcggtatagggtatctaatgaatgataatgggcgcggtatatcgctggttatacggatgaattag

SEQ ID NO: 430620 - DNA, 780 bp, Serratia marcescens
atgaaaatgcgcgtattgtcaggagtgattttttcgctgatgtcggcgggagccatggcggaaaccatttcgtcaggtttttacctttccggcaagctcggggcatcgcagttccgtaactcgcagaatacggcgagtgaagcggggaccacagtcggtgcattgaactgggatatgggtaaaacgcaactggagaacacctcgtcttccgtgttctcgccgtcgattgccgtggggtatcgctttgcagatgattggcagcaaccggtcagggcggagctggcgttccagaccttcggtaaatccgagaaagatttctcgttcaaaccgtctgccaacggttattggaacggggatgcgaagaacaactttgcactgccggccacggccgacgtgcgtcagaagactcgcgtcaatacattgatggtcaatgccttctatgacttcccgctgggcaatgacatcacgccatatgtgatggcaggggtaggggctgcctttgtgcgccataacatcgcaaccagcagcaacgtcggcgggcaggcactggcagaagacagctacagcagcaaaaagaccaatctggcctgggctgtcggcgccggtgtagcttgggatgcgactgaaaatgtctcggttgaactgggttataccttcacggatgccggtgatatcaccaccgactggtcggccgccaacggcatcatcaagggcgacggggacgtacataccaaagtgcagctgcactccctgcacgccggtgtgcgctatcacttctga

SEQ ID NO: 430621 - DNA, 570 bp, Serratia marcescens
atgttatttgttggttttggcgcgcactctccttgtcggaagagtatgcagctcattcgtccgctcattctcatcgcagggttaggtggtttatcacccgcctgggctgatttgggcgttgtgaacctctatatgcgtgcgacgctggtttctaatgcttgtacggtgagcacggattcaaccaacaaaacggtgaatctgggcgtatgggcgaccaagcagtttgttgagacgcctgcaccggtcccactggtgcggttcaccatcaatctcgaagattgtgggccgggggcatccggcgtcaagctcagttggaacggtacggcgcatgcgagcaacaatgagctgtttgccctgacttccggcagcacggccacaaacgtaggggtggaattgctggactggagccgtaaacgggttgcgccgggctacaccacgccagcctatggtttgacggccaatgcgtccagcgtgtcgatcccgttttatgctcgttacatgagggcgggtggtgccgtcacggcgggaacggccaattcaatggcgacctttacgctggattatttgtaa

SEQ ID NO: 430622 - DNA, 1080 bp, Serratia marcescens
atgcgcgtgctgggtgtatttaatcaaaggggtgagattttgattactcaattaaataaagccgctctacaattgtggtcatttctgtttctattattgattagcggaaatacatatgcggtgagttgtgtttcgggatgtggtcagacggtaaatcatgttatctcggataacttaggttcgaacgagaatagtgtgggggtaacaaaagacagcaatcccgtaacaatatctggtgttactttacgttataatcaagggtatgccaatgactgggggatctatgccgatgacgagataagagaagctggcttctacgggagtgattggaattataagaaaattgatgactatatatccgtggccttaagggatcaggatctttgcttcactcgatactttccatttaatgtgattgcacgcagctcttcggcaggttgtagcgctctaaatcgttacgagggggaagaaggaacatctgaccctcatacatatacgactaggataaggattgacaagaagattgtctcaggaacttatactaggaatatgttgttggcggaagtagggaagtgtcaaccaggcgggctctcatcatcggggtgcaggtcgaaagatgtggtgatatcgaagatctacctgagccttaatattacggtgccgcaaacctgcgagttgaacgctgggcaagtaatcaacatcgattttgataatatttcttctggcgcatttaaaactgcgggagcgattgcgcagggggttcagcccaagtcacgagatattagcgtcaagtgcgataacattgccggtaatgcacagctgaccctgcgtctgcaggcggataaaaccaacggtaatattgtggtttcggatgagaataatgatgtcgggttccgtgtgaccaataatagcgggacgccattgatacccaataacttatccagtgttattccctttaccctggacagtaatgcgcgtcaaaacgtcaccatccaagcttacccggtgagtgtgacgggaaataaacctacagagggacctgtaacatcgcgaggttatttgcgtgtcgacttcccttga

SEQ ID NO: 430623 - DNA, 2640 bp, Serratia marcescens
atgcagtatttcaagctgccggcgtatttcaggaaaaatgccgtgtgggccaaattatccctgcttccgtgttttgctctgatggggctgggagcacatgttagctacgcggaagagtattttaacccggcgtttttatccggcgatgcgtcgcaggtggcggacctgtcccgtttttctaaaggggaggggcagccggctggtacgtaccgcgttgaggtttatatcaacgaggaatatatcggcacgcaggatgtgcgttttgatgcactggaaaaaggtcgaaaaggtgcggacgataccggcctagtgccgtgtttatcgcgcgcctggctggaaaagcaggatgtgaatatccaggcgtcgccggcactgctgaagttgacgggggagcagtgcgcagacctgcctgcgtcctttgagaaggcgcagacgcgttttgcgttcgagcgtcaacgtctcgatatcagcattccgcaggcggcgttcaggaacaacgttcgcgggtatattccccctgagcgttgggataacggcatcacggccggcatgctgaactacagcttctcgggaagcaacagtaagaacacggaaagtgatgccaattacaacagttactttctgaacctgaacagcgggctgaacatcgggccatggcgactgcgtaattacagcacgtggaactacagcgagaacgggcgttaccgcaataacacctggcgtaatgtcagtacctatgcgcagcgcagtatcattccgctgaagagctcgctgactttgggtgacagttacaccgaaggggacgtgtttgacggcgtcggcttccgtggcgtgcagttggccagcgatgacagcatgttgccggacagtatgcgcggctttgcgccaacggtacgcggcgtggctaacagtccagcgcaggtaaccattcgccagaacgggtatgagatttatcagacctacgtgccggcgggggcgttcgaaatcactgacctgtacccgacatcgaccagtggtgacctccaggtctccgtgcgggagaacaacggcaccgtcagtcagttcaccgtgccgtattcggcggtaccgatactgcagcgtgaagggcggatgaaatatgccctgacggcaggtcagttccgttccggctctgacctgcaggactcgccggacttctggcaggggactcttatctggggcttgccggccggagtgacgttgtatggtggttcgcaattgtctgacaattatcagtcctttgcgttcggtgcgggcaagaacctgggtaactggggcgcagtctcggcagatgtgacgcacgcccgcagcgtgctgcctgacgacagtcaaaaggaagggcaatcgctgcgcttcctgtacgccaagtcgcttaacgattacggcaccaacttccagttgctgggttatcgctattcgacccagggattttacacgctgagtgaaacggcatggcgtcaaatggaaggctatcgcctgaaaacgcaggatgggccggtggatacgaaaccggaactactggactaccacaacctgtattacagcaagaaagggcgactgcaggtgaacatcagtcaacaggtgtcggatgtggggacggtgtacgtgaccggcagtcaccagacctactggcgcaccggtgagaaggaccagctgtggcaggtgggttacagcggtaactgggaagacatcaactacaacctgaactggtcgtggaacaagagtccaggtctgagtgatgcggaccgccgcgtggcgttcaacatctcggtaccgctcagccgctggctgacgggcacgggcaaggcgcgcgacatcaccaactcgaccaacacggcgtacgccacctactcggtgacgcacgatgcggataaccgggtggcacaacaggccggggtgagcggtacgctgctggatgacaacaacctcagctatagcgtgcagcaaggtcacaccacgaaaggcggtggtgccaccggtacggcgagcctgagctaccaggggcgctatgcgaacagcaatatcggttacaactacggcaaacactatcagcaggtgaactacggcctgagtggtggggtggtggcgcatgcggacggcgtgacactcagtcaaccgctgggtgacaccaacgtactggtcaaggcgccgggcgcggacagcgttcgcgtacagaacgcgaccggggtaagcaccgactggcgcgggtatgccgtggtgccgtatgccacgtcttaccgtgcgaaccgcattgcgctggatacgacgacgctgcaggacaacgccgagctggacaatgccgtgaccaacgtggtgccgaccaagggtgctttggtgcgtgccagcttcgatgcacgtatcggggcgagggcgaaaatcacgctgacgcagcgtaacggcaagcctgttccgttcggggcctcggtgagtgacgaaacgggtggcggcggcggtggcatcgtgggtgatgcgggccaggtgtttatgtcgggtctgaaacctaacggcaaactgaaagtggtctggggtcatgcggcatcacaacaatgcacggtgagctaccagttgggcaaagacgcagagaagcgtggcatcagttatgcgcgtgctgggtgtatttaa

SEQ ID NO: 430624 - DNA, 714 bp, Serratia marcescens
gtgtttgattcttattttttccaatttaaaaaagccgttgccgttaccgggctcagtgcattgctaatgttgccgtcattgtcctgggccggcggtattgcgctggggtcgacgcgagtgatttatccggcggatgcgcgtcaggtttcattgtcggtcaataacagtgacgagcataaccggtatttgattcagacctgggtagaaaatgaagcgggcaaaaagacggaggactttatagtcacaccgcccttatttgtcagcaagccgaaaagtgaaaatacgctgcgtattatttacagtggcgaaaaactgcctcaggaccgtgaaacattattttggctgaacaacaaggccattccgtccatcaataaggatgaggtcaaggacaacaacgtcctgcagattgccgtgctggcccgaattaaattgtttgtccgtccagcagggttaaccgaaaagtctgcggatgcgccgtccaagctgagttttagccgcagtggtgatgcgctggctatcaataatgcctcgccgttctatgtgacgctggtgaacatgtccatcggtggtcgcaatgttgccaccacgatggtgccgcccaaatccagtgcgcgtgtggcgctgccaaaaggcgtgacgacgggcaccttaagctatcagacgattaacgattacggtgcgaatacgcctgctgccaaggttcagatcaactga

SEQ ID NO: 430625 - DNA, 549 bp, Serratia marcescens
gtgtacaaaaaacagttgtgcgccggggttgcgctgctgctcatggtatctacaggggcgctggcagggaaccgccaccacgtcgtgattgatggcggtatcacgcattttcgcggtgtgctgacggcggaagcctgtacggtctccaccgacagccgcagccagacggtcaatatgggacaactgcgcagcaaccagttcagcggcgtgggaagtctgacttcgccggtgggcttcagtatccggctgacggaatgcagcacggctgtcagcgaccaggtgggtgtgacgttctttggcgtgacggatggcaaggatccgcaggtgctcaaggctggcgagggtgtgaatgcggccacgggggtcgggttggcgctgtttgatgagcagggacaaatcattgtgcccaatatgcaaccgcgtgtctggagccggttgcatgaaggggataacagcctgcgctttcatgcgcgctatcgggcgacatcccgtcaggtgaccggggggaatgccgatgcctttacctggtttgcgctcacctatcaataa

SEQ ID NO: 430626 - DNA, 558 bp, Serratia marcescens
atgttgaacaagcagcgttttatcaaaactgttctgggtctggctctgttgtccgcaggcaccgtggcgtcagcggcaattgtcaccggcggtaccgttcacttcactggccagattgtcaacgcggcctgtgcggtgagcgcggattctgttgaccaaaccgtgaagatgggccagttccgtaccgccaacttcagctcagtgggtacgcgttccaatgcggtacccttcaccatcaagctggaagactgtgacacttctgtttctaccactgcagcagcgtcgttctacggtagcctggatgcgaacgatccgaccgtgctggttgttagtaacatcgccggcggcgctgccggtaccgcctctggcgtgggtatcgaaatcgccgaccacaccggcaaagtgctgaagccggacggctctgtgttctcaactgcacaaaagctggtcgacggctccaacgtgctgagcttcaccgcccgctacaagtccaccaaagccagcgtcaccccgggtgaagcggacgcggatgcgaccttcaagatgcaatacaactga

SEQ ID NO: 430627 - DNA, 594 bp, Serratia marcescens
atgaaccaacgaaagcatttaacgcagtcagaggtggaaagcctgctggcctgcgcaaaggaaagcaaaaacccggaaagggactattgtctggtgtacatgagctttattcacgggttccgggtcagcgaagtatgccaactgcggctgtcggacatggacctgcgggcgaagagcctgttcatcaggcggatgaagaacggcttcagcaccaatcacccgttgctgggcaatgaaataagggcaatacgtgcctggctcagggtgcgcaagaccaaatcgggcgccgaaagcgactggctgtttttatcccggcagggcggtcagttgacgcgtcagcgggtgtatcagcttatcagtcagtttggcgcacaggccaatatctccgtgacaccgcatccgcatatgttgcgccatgcctgcggctttgcgctggcggaccgggggattgatacgcggttgatacaggactacctggggcaccgcaatatccggcacacggtacgttatacggccagtaacgctgaacgatttgagggggtatggcagggaaaagtgaaactgcgagggagacaaataggaccaaactgttaa

SEQ ID NO: 430628 - DNA, 2331 bp, Serratia marcescens
atgagcgcccagttcgtttcccagaccgtacgcaccgccaccggccactggtcggtgatactcccggctctcggtatcgctttgcagccgaacggcaagccgcagccgtgtccgacctgcggcggtaaagaccgcttccgcttcgataaccaggacggacgcggcacctggttctgcaatcagtgcggggccggtgacggcctcaacctggtggaaaaggccctgtcactttctgccagggccgccgccgaacaggtggctgccgtgatgggggataatgccagcattttaccaccgaccgctgaggccggtcattcaccacaagacaaggccgaggctcagcgcaaggccgcgcaacaggcactggctctggtggccgctgcccggcctcagaccggcaacgcctatctgagcgccaaaggctggccggaggcagaaaccctgaccctgcacggtcagccgctgcgcgtcggcggtatcaccttccagcccgacgacctgttgctgccgctgcacaatgccgggggtgaagtggtcaacgtgcagctgataaatgctgatggtgacaagcgcatgctggcgggcggtcaggtgaaggccgcctgccacaccctgagcggcccggacaacgcggttatctggctctccgagggctacgccaccggcctcaccgtgcaccgattgaccggtgagacggtgtgcgtggcgctcagcgccaacaacttggcggcggtggcggagcaggtgcgcaaccactacccggatgcgcggctgctgctggcggccgataatgaccgcagcggcaccggacagacccgcgccgccgaggcggcaaaattgaccggcggtatcccagcactgccacccacggaaggcgactggaacgacgtttatggccgggaaggggccgaggccacgcgcgcgcagctccaggcgttcagccagccgccgcagcccagcccgttcgacacgctgagcgatgctgacctgaaggccatgagcgccagcgagaaggccgaactgctggccgagcactacggcaacaccctggcggtgccgccggtgggagaggagctgtgccgctacacgcgcggcgcctggcaggtgctgccgcaccggcagctgagccgggagattgctgcgttgttccagaaggtgcgcgcaccgttctctgccgccggtatcaacagcattttggacaccctcaagctgatggtgccgcagatgggcgacccggcccgccggttgataggctttcgtaatggggtattcgataccgtcagcgggcagtttagcgcccaccggcaagcgcactggctgcgcaccgtcaacagcgtggactacacgccgccgcgtgccggggagaacctggccgaccatgcaccacacttctggcagtggctgacgcgggccgccgggggcaatcacgacaagcaggagcgtattctcgcggcactctttatggtgctggccaaccgctacgactggcagctgttcctcgaggtgaccggccccggcggcagcggcaaaagcgtgatggcggccatcgcccggctgctggccggtgccgataacaccacctccgccaccatcgataacctggagtcggcgcgcgagcgggccagtgtggtcggttactcgctgattatcttgcccgaccaggagaagtggagcggtgacggagcgggcatcaaggccatcaccggcggcgatgcggttgccatcgaccccaaataccgcgacgcctacgccgcctacatcccggcggtgatactggcggtcaacaacaacccgatgcagttcagcgaccgcagcggcggtgtctctcgcaggcgggtgatactcaccttcccggacgcaataccgctagccgagcgcgacccgcaactgctggacaaaatcacccaggagctggcagtcattgtgcgtcacctgatgcagcgcttcgccaacccgaatgaggcccgcacattgctccaggcgcagcaaagctcggacgaggcgctgaccatcaaacgccaggctgacccactggttgatttttgtggttacctgacggtgctgggcaccccggaagggatgatgatcggcaatgccaacatcaccccggccaacccgcgccgctatctgtaccacgcctacctgtcgtttatggccgcgcggggctatcagcacgtgatgaacctgacggcgttcgggctggcggtgccacagacgctgaaagagtatgagcacacgctgctgaaacgccgcaccaagctgggtatccagaccaacctgcggctgaatgatgactgtgacgtggactggttgcccaaatgcgaggcgtaa

SEQ ID NO: 430629 - DNA, 336 bp, Serratia marcescens
atgaatacctcatcctgtttaccgattgaagtccgtaccgccgttttccgccgcgccgtggcgcaagcctatctggatacctgcgccttttaccgggtgagcctggggtacacgctggacgagctgcagatgacgattgccctgcgcctggagggacattttgtgcggcagtacggcgtggatgacggcatggacatggcgtgcaccatgctgagcgacatggtgcagccggacgttctggtggccgcaccgcgcctgaccgcgctggggcaaaagatgatggacgagctgtgctgcgagcgcctgtcggcggcacagaacgccaccgtacactga

SEQ ID NO: 430630 - DNA, 264 bp, Serratia marcescens
atgaacaccctggccgaccgttattaccgcgacacccattaccctatcccgcacgccgattttctgcgtctccagcatgcgcacgccaccggcgtgctgttccttgacctgctggacaccctcgacctcggcgggcagcgccctgatgccgtccaacaggcgtcgtttgcctcggtcattgccttgctgaccgaccagctcggccacgtcgtcaacacctgtgaaacccaaattcttgcccgcatggaggccaccgccgcatga

SEQ ID NO: 430631 - DNA, 999 bp, Serratia marcescens
ttggttataatggttgacatgaaaaaaagatcaaccattaccgtctgggaaggatgtgatccaaccattgcagacgccatcaagcaatttgagagtcgctgggagtcctactccgagtcagccaagcgttaccccatcgtgcggctgattgaagaactcattgatcccgccgtagccgcttattcggcaatgcttccctcgcgctatcttgggcacatacctggagccggaacaggcgtccgctttagcgagatcatgcaattggtggggaccgatgcgatggttcggttacagcgccagttgatacgagcgtttgttctgacggaggataaacagaccgaaagagaccaacaatttatcgcaacgctcgaaacgatgatggagttggtatgggcaagtaagcgcaaacaaccgaaaaaaagagacgtgcgcggactgaatagtcaacgcgtacaaggcttctgccgattttgcggcgagcttgcggagctggcttcattcgcgggtgggaacgggcagcgcggtccagatgaacaactgcgactgagcaacctgtactgtgctgcccatcgacccaaattgccggatggcgcgtggaaccccgcatacagtcaagcgaaacgatccgtggcgcagttcgatctcgaactaagcaggcttagccttcaatccgcgaatctccgaacgcctttggcaacttccggcgacccactcatagacagctacgtctatcactatgtccgcaaatacggccttcaaccagctgacgaaccagaattgcgccatcacgcaaggcggatggcggacatgaaattcacagatcagaaaaagagaatcgtgatgcttcagcggtatggcgtgagacagtccgagatttctaggatgctgcggatcagtcgccaagccgtatccaaggctcttacctcgacccccgcgctgttccgcgaacttccgacattaagcggctttccatcctatttcttgcgtcaactagaatga

SEQ ID NO: 430632 - DNA, 210 bp, Serratia marcescens; identical to SEQ ID NO: 200603

SEQ ID NO: 430633 - DNA, 537 bp, Serratia marcescens
atggacgtgatgaacgaaagtaagcgggccaaggtaatcgagcaatgcgaaggcgctcgactaatcgttctggacacgttgagccgtattcatacccttgatgagaacagcaacggcgagatggctcagcttgtcgctaagcttgaggaaattgcgaccattactaatgcgtcagtgctttatctgcatcatgtcagcaaaggcagcgcccgcgacgggcaggccgaccagcagcaggcagtacgtggggcctcggctcttgtcgataatccccgatggtgcggtttcgtcgcgaagatgactgacaaagaagcgcagaaccatactgaccgcgtctacgaccgacagcctatcggggaaaaccgccggaagttctttgttcgtttcggcgttagcaaacagaactacgccgagattgacgctgatcgttggtatcagcgtcatgacggcggcgtgttgctgccggtggagttggcggcggtgacgaaggaacgcactctgcacgtcgtaagtgggagtgacgatgagcggtggtaa

SEQ ID NO: 430634 - DNA, 753 bp, Serratia marcescens
atgagcggtggtaatgctgtgacccccaccagtactagcgcacaggcgcgggtaatgctctatcagcctagccagcgcccgcgattgcgcgagggtgattggacagacacatcatttggccgctgccgcgtggcaggcaggctagggcagaggcacgccgatattgtggaagcggtcctgtactgcgcagaacgtcggcgtcctgtctctgacggcggcgtagagctgctggtagaccccgctcgggtgagaaagacgctttccgacagccgctacagctttacacagattgaaaagctgttggccgagctgcgagcggcgacgatcacaattgagacgccacaattcgatttcccaataatcgggggattgattgatcacgttatcccatcgcccatgacacggcctgatcccctaactgggggagagcggaatctgtggagagtgcgccttggcgtagcgctggtgatgctgcttgagcatgacttgagtctgtactacgacccagcccccattgcccgcctacagcatggcatcagccaagcagtcgcaagacacgtcttgagccacaaaatagagccgacaggcggttggtatcttgatactgttatcgtggccgttgctgggatcgtgccgagcaaagcaatgcgagatgctcgattcaggctgagagaagatgccgacgaattgaaggcgctcggcctgattctagatggcgaccgggtgaggaaaaaaggtactggcgacgcctaa

SEQ ID NO: 430635 - DNA, 315 bp, Serratia marcescens
atggaagtcaaattcagccgctacgatacggcggactatctcaagaccgaggacgatattgcggcctatctcgatgccgtgatggaggacggtgaccccgcactgatcgcggcggcgctcggagacgtggcccgtgcccgcaaccttagccagcttgcccgcgacgtaggaatgagccgccaagggctggacaaggccctttcaggcgatggcaatccgagcctcgcaaccgttgtgaaagtcgctcaggcgcttggcctgcggctcactttcaaaccaacccacggcggccccgcaccggccgcaggagcctag

SEQ ID NO: 430636 - DNA, 297 bp, Serratia marcescens
atgatcgagctaataaaaaccgacctattcgaccgctggcttgtcggccttcgtgatcgtcaggcccgtgcgaggatcgaggcgcgcattcggcgcttgagccttggcaaccccggcgacgtgaagccggtaggcgaaggcttgtcggaaatgaggatcgaccacggccccggctatcgcgtctatttcatgcggcgcggccccttggtggtgctgctgctttgtggaggcgacaagagcagtcaggagcgggacattgccctagccaagaccattgcagcgcagtggaaggagtga

SEQ ID NO: 430637 - DNA, 243 bp, Serratia marcescens; identical to SEQ ID NO: 105463

SEQ ID NO: 430638 - DNA, 513 bp, Serratia marcescens
atgtgtgttgtaccggtacgggcaagcccggaccagtccaacaccgccccttactcacctgcggttcgacggcatcttgctctacgaggctgtcagtcgctccgcgacatttacaccaaagaggaaaggcttatggccggtgaaaatgcgattgaggctatcaagccgcattcgcgtgggacacgtccacggcgggagcgaattgaagtttgggtcagcagtgatgagaaaaaagagctagccgaaagggccgatcaggcgggattgtcgaatgccgctttccttcgcgctgttgggctgaatctgcctataggttcacgtgccgatttggaagctgtccgccagttggcaaaagtgaatggcgacctaggccgagtggccggattgctgaaattgtggctcgctgagaaacgcgtacagggcgctcgaccgattgacgtggaaacgatgatgatggatttccgcgcaatccaagaggacatgcgggcgctcatggggaggatttccaaatga

SEQ ID NO: 430639 - DNA, 1953 bp, Serratia marcescens
atgatcgcccatcgcattaaccgtgaacgcaaggcctcaagcccagcccggttaatcaagtatatggtggcggccaagggcggcattgacccgacgagctgggagcgcacagccgattacattctggattccgctaatggcacgactgagggcgagaaggtcgccagctaccgcgttaccaactgcggcacggatgatccggcagatgccgcaatcttaatccaagccacgcaagcggctaacaccaggtcgaaggcggaaaagacctaccactttgtctattccttcccgcccggcgagcagccagatcttgagacgctgcacgccatcgaagacgaactatgcgctgccatcggcctcgacgagcaccagcgtgtatcagcggttcacatcgacaccgataacctgcatgtgcatgtagccatcaacaaggttcacccgaccgggttacagaacatcgaaccctattacgatcagttccgcctgatggaggcctgtgagcgtcttgaggtagagcacggcttgcaaagaacgtttcatggtctggaggcgaagcagcggcatcagaaccgcgacattgagctgttgccagcgaaagccccagagcagcgcgatagcctattccgtaaacaccttagaaacgcttgcgacctcggcatatcggagcctcccgaagccaaaaccctgaacgggttgcgcaagctgtccgatacccgtctacagaagcagtcaacagataaagcgcagccagtccgcatcggcgcgaaggtggccagcgtggaggcgcagtccggcatcgagacgctgaccgggtacgcggctcgcgagctggccccggcgatgcgacaggcgacgagctggcaggagctgcacgacgcagcggccgagcacggcctagaggttcgccagcgcggcgctggccttgttatcggagagccggatttaggcatttgggcgaaggccagcaacgtcggccgcgacctttccatgaaggctctaactgaccgtcttggcctgttccagccttccgaacggcaggccgaggcgaaggcgaaccgcaagcggtacgagccacgaccccggcgaccggacaacccgacgacagcgggcctgttcaaccagtaccagcgcgagcgacaggcggccattctggcccgccgtcagggtctcgaccagatcaagcgcgagagtgcggctttcaatgcgcaggtgaggcagtggagccagacagagagaatgcttttgaaggtcgcgggcaaggggccgaccaaacgcctgatgtacggcactatcaaacagcaggccgacgcctcgcgccagaaaaaccggcagagcgcagacgctcgccgtcaggcgctgttcaaacagacgacgatgcccacttgggccgactggctgacgcagcaggccgagcgcggcaacgccgaggcgctggccgtgctgcgcgaccgcgaggaacggacacgtcgctggaacggggagctactgaccgccgaccgggccgacaaggccaaggctgtcgttctcgacaagctcaagcccaaggcccggaaagacggaacgatggcgtacagcaccatcgacggcggcatggtgatcgaccggaagacccacgttcaggcgcagaaagccacgaccggcgcggcgctggttgcgctcgaactcgcgtgcaagcggttcgagggccaagccctcatcgtggaaggcacagacgagttccggcttgaagtcgcccagctcgccggtatgcacggcctcaaggtcacgttcaccgatccggcgatggagcagatgcgccgcgagacggtcgagcataaggaaatggagaaggcctttcagaccgaggtatacgctcggaaggacaccaaaaagggggaggcgagcgagatgccgggcgtggccccacagcgtaggcagaagcaaccgaaggaccgctctaatggactgatatag

SEQ ID NO: 430640 - DNA, 1008 bp, Serratia marcescens
atgcatctaataatgctcgatacatgtgtttggcttgatatttcgtctcaaaaagctgaattgccgatgcttactgccatagaacatctggtgcaggatgggagtatcaaaatactactgcccgatctgatacgtgccgagtacgaacgaaataaagatagggtgattgaggctacgcgcaaacggctcgccagtgaatttcgagtaattaaaggggtggttgagtcgtttggcggtgaaggtaaagagactgcgctcaaaaccttggatgatgttaatcacaggctgcctattctttccgaagtaaatcggaacacagtaaatcgtgttaccaaactttttgacatggcccacgaagttataatctctgataccgcaaaaatcagagcagcagagcgggctatcgctaagaaggcaccgtttcataagcagaagaatagtgttgctgacgcagtgttagcagagactttccaagagtttcgggtgtcacacgcaagtgagtacgaaacctttagatttgtcactcataatgtcacggatttttccggcaaagaccacaggcagccacacgacgatttcgcagatatttttgacggcagcagctctttattctttaacgccacaagctctgccatcgaggatttgctcgatcttgaagaatttcactatgagaatagctttgcttgggaggacgaaactcgtgggcttcaggaaatcatgtctgcgatggacgagttgttcgataaagtttggtacaaccgccatatgaacatgatgtatcacctagataatggtgacatagagatcgtccccgctggcacaaaacgctacggcaatgatgtgattcacgaagatgtcctcggccaagcagaaattgcagctcaacgggtcagggataaatatgaagatactgggccttggagcgactttgaatgggggatgctcaatgggaagctctctgccctgcgatgggtcttgggggatgagtgggacatgctcgacacgtaa

SEQ ID NO: 430641 - DNA, 825 bp, Serratia marcescens
atgggcaatgtaacaattattaccaatgctattgggcgttttgccaacgccatgcggctctatggtgaagccttcatcagatatcgagggctggcagcaatcgaccgtgaagaggctatccacaacctcgaccgcgcatttgagcaaaaccttgagagttttcatacgttatatgatgtatcgcaaggggtgtttgactttcatgctcatccggataccagtctcctaattgctattcgtaatgctcttcatcatcgtgaccatcctttgttccatagttttcttcagactatttggttggacggggagccagagcgtctgcttggagcggagtatttaatggctaggcatcgaacgacgggtggcaatcccccgccgatgatgcacttgatcaagttggaagatatatacagtcgcctcgacccacgtcgtgaatcggtgcacataaatccaatgggtaagggcaatgctttatctagatttatcactctggaaaatggccttgccttcgagagagtgtgggccaaagcaaaaaaagatcgctatcctaccaagcaggtgtatttggacttgttgccgatatttaattctgcggtttcgagagtttttgctgcattggatacggctggagtgccgtttcaagggtttgatgcaaactcctataaatctacatttattgatgaattaaagacagaccttcaacatttcgatttctttggtctgcgtatgcatgcgctacagatagaattaggcccgaagttcacaatccaagaggcctctatcagacggggctgtacctacgaaaaggtgatggaggacgaatag

SEQ ID NO: 430642 - DNA, 162 bp, Serratia marcescens
atggccgagtacttccgagccgatccgacctatgcagcggagttgcttgccgaagtccgtcgtgacggcaacccggacgagctggcaattctgttgcggcagatggacgaggcgttcgggagcgactgcaaacgttcgggctctccggtgagacaactatga

SEQ ID NO: 430643 - DNA, 699 bp, Serratia marcescens
atgacgcaagcagcttggacacgcgacggtcggccggtagatgcggcttccattcccggcgccgagtgggaggcgttgaaacagacggcgcagttaggtgacttcgtcatgccgtgctgcaaggcaccggcagtactcaagacaagcatcaatggtttacctttcttcgctcatctgtcggaggagtgcggcactgcgcccgagactaaatggcataagtcgggtaaggccgcagtgatggccgccttaaccggcatgggtatcgaaaaccgtgacgaggtgccgggccgatcaccaagcggcgacaagtgggaggctgatgttcttttctcggcttccggtcgcaccatcgtcatcgagctgcaacgttcctaccagcatctacgcgacttcacgcgtcggcaggagcggtacgctgcatcgggcgttgagtgctactggctggttcgcaaagagacattcatgaccttaggaaaggccacgtcacgcctattgttgaagcgtgatttcggcaacgtgtttccggctagtggaatcggtactggcatgctgcccgagttgccggtggcgatgctggacaccgagggcgagcaaccggttcagttcggcgggtttaagaccgcgactgtgcctgtgtggttggctggcatccttgatggtgcataccaatatcgcggcggctcttggaaccttaattaa

SEQ ID NO: 430644 - DNA, 2109 bp, Serratia marcescens
gtgtctgcatttacgattcagataaaaaactgcaacagcatcgaaagtgctgagattcggatcaataagggtacgcttaatataaagtacggtcctaatggattggggaaaagctcaatagcgaaagcaatcctagcatccgtgagcgatgatggaacgcttcaaaaattgaagccctttaaacatcgtgcgtttgcagggcagtttgatccgtctgtggttggggttgaagatataagctcggttttggtttttgacgacacctatgtgtcgcaatttgcattccagcgggatgaagtcctcaagaatagttttgaaatattcatcaagacagatgattttcttgctgctatgcaggagatagaagcgctattccaaggaattaaggcggccttcgacggaaatgagaacttgggcaatgctatatcagacctgaaagaacttcgtgatgcatttggagttacaaaaacgggggcgctttccaagtcaagcaagggatataaagcatttggttccggaaataaaattgcaaatattccagaacatctcaagccatttgaagaatttataaaaagtgatcaaccggcgacgtggatagcttggcagaataaaggtaattccttcttggaattgtcggataactgcccttattgttcttctagttttcaaggtactgataagaaggacgtggcgcaagcagttgccaaagaatacgattcaaagtccgttgagcatttgagtgcgttacaggcaatcattgcaagattgggaaaatattttgatgatgcctgccgtgagagcttggagaaaatcacaaaatcaaaggttgagctttcgttagaagaaactaatttcctaagcgcccttagaggcgacgttgaaacgctcattgcaaaactcgaagggttacgatctatctcgttttttgcacttcgagatgttgagaaaattgaagacgaaatcagcaagctgagaattgatctcgaccttcttgggaggcttaattcggcagatactaaatctgtggttgatcccgtaaatgctaagctccaagagttggcggagaaggtgggagaacttaaaggtaagatcaacaagcataaaaagctaattgagaggaccgtcgcggaaaatcaagatggcattaatggctttctgaagtcggctggctacaaatacagcgtagttatcaagtctgaagccgagtcttacaagatgaagctggtacaccaagaccatgacgaacatattgagacagcggcccagcacctaagctatggagaaaggaacgccttcgctcttattctattcatgtatcaggttctgagggaaaaacctaggttggcggtcttggacgatcctgtctcaagctttgataagacgaagaagttcgccattctgaacgagttgtttagaggcaaggcaagtcttcgtgatacgaccgtccttatgctgacacatgatattgaacctgcaatagatgttatacgtggcgttaagcgattattccaacatcctaagccaacggcatattttctggcgtcgaaagcgggtgtagtgtccgaggtggagattagagaggaaaatattcaaacattcgcgcagatatgtagtgataatattcacgaacttgatgatgaagttataaagtgcatatatttgaggaggcattttgagatcatcaatgatctaggtgcggaatataattatttggccaatcttttacacgctagggacgtgccaattctaaaatctgccgtgggcgatatcgctatgaatgctgaacagattgcgaacgccgaagctggcatcaagaaattcatcccggattttgattactcggcggtgcttgctgcgattaaagataaagcagagatgaagcgtcgcttcacagaagctaccgttgggtacgacaaaatccagcttttccgcatctttaaggaagtgcatggttccgccaatggggagcaggatagcattcttcagaaatttgtgaacgagtcattccacatcgagaacgaatatgtgatgcagctaaatccccacaagttcgataatgtgccggagtatgtcgttttggaatgtgatagggccattctggcgtcttaa

SEQ ID NO: 430645 - DNA, 3048 bp, Serratia marcescens
gtgaatgacacgacatcgcattctttagcggttaaaacaccgctttccaaactttacctcgctctattttccgcgccgctgttgatgctggcgcccgccgatatcgctcgcgcagacgatgccatttttgacggcgactcaaaaattaccgaatcattggcctacaccggggacgtttacgtcggccgtaaccaaagcggcaacctgctgatcgagaatggcaagatcagcgcctataacatcaatatcggccggatgttcaacggccaaattcatgacagcgtagtcacggtccgcgggccgaacgccgagctgaatgcggtgaacgatcagttcgtgctgcgcggcggcctcaatctggggcggggcactttgcgggttgaagacggtgcgctggccagcgcgaaagagatcgtggtcggcaccacccgtggctatgacagccaccttatcgccaccggcgccggttctcgcgttaccagcaattttctcagcgtcggcaccgatctgggggcacgttccacgctggcgattgaagacggcgcggtgctgaacactgcctttgacgcacgcatcggcaatggcagcgggccgggtgagaccgatacgctgagcccgaaagccacggtcaagggggacaattcccagtggaacgtcggccgtgcgctcacgctctacggcgatctggacgtgctgaacggcgctgcggtcaacgtcggtaatattcaggtggcgggcgtctcgggcgcgcgtaaaactgccgagctgacgatcgccggcaacggctcacggtttaccagcggcagcagcgtcaacgtcggcgattacggcaacggcgtgttggcggtcatggacggcgggacattctccgccggcggcaacgaagtggtgctgggcaagaccggttccggctcgaaccgcggcgcgctgattatcggcagccgcggcaatatggacaccggcaccgggttaaccgaaccgacgctcggcgcggcgggcgctgcaggcactatcgatgcccagacggcgatcgccctgcgaggcggattgttccgcagctatgtgtactttaaccataccgacggcaattacgtttttagcaacaagatgagcggcgaaggcgaggtgatcaacagcgccgggcacacgacgctgaacggcgatctctctgagctgcaggcgaacgtcaccgcgcgcggcggcaagctcatcatcgccagcgacatcaatacccagaaagaagacgacatcttcgagatccaaaccctcggcgccgagaacggcggcacgctgatccttaacgcgacggcgggcaccgacgtcaataacgggctgggctacagcagcgccgcgtcgatcaaggccggcggcacgctgggcggcaacggcacgctgggccagaccgagatccagtccggcggccatatctcgcccggcgacggcaatatcggcacgctgacgctgaaacgctacctgaactttatcggcgaatcattctatgacgtcgatatcgccggcgacggccgcagcgatcaactgctggtggcgggcaaaaccaccatcagcgatcgggccaaggtgcaggttacggcgctggatccgcaaaccagctataaaaccggccaaagctaccgcattctgacctcggacggcggtattgacggccagttcgcgtcggcggtctccaagtctgccttcctcgatgtggcgttaaaacacagcgccaacgccgtggatctgaccatcgcgcagaaagacaccggcggtgaaaacccgggcggtgagaatccgggtggggaaaatccaggtggtgagaatccgggcggagaaaaccctggcggtgagaatccagggggcgagaatccgggcggagaaaacccaggtggggaaaatccggggggcgagaatccaggcagcggcaagccgggcattttccaaacggtggccgagagcggcaaccagtggaataccgccggcgcgctctccacgctggcgcagcgcggtccttcactggcgctgtacaactcgctgctgctgctgagcgcgccggaagcgcgcgaggcgttcaatcagctgtccggcgaagtctatccgtcgatgcagtctaacctgatcgccggcagcacccagctgttcaacgtgctgaaccagcgcatgctgcgcctgttcgacaatgacagtctgccggtaccgccgttggcgatgtcgctggtgcaaccggcgcaggcgcaaaacagcggcgtctggggccagaccttcagttcctggggcaggaacagcggcaacggcaacgtgggcaagctggatggcaacaccaccggcttcctgttgggggcggatcgcaagctggcggaccataacgtgcgcatcggcggttacttcggttacagccgcggcgattatgacgtcgacagccgccgctccaaggccgataccgacaactaccacctcggcctgtatgcggccgggcaacaggatgcgttctcgctgcgcggcgcgctgggttacacctggcacaagattgaaggcaagcgcaacgtcgatttcagcggcttctcggatcggctgaagtcggattatgacgcgaactcgctgctggcattcaccgaagcgggttaccgtttcggccagccggagatgaacgtcgaaccgttcatcaacctgagctacatccgcctgcataccgacagcttccaggagtcgggtggcgcggcggcgctgagcgtgcgcaatgaaacgatggacaccttctactccacgctcggggtgcgcggcgtgactgaactgccgaagaacgtcagcctttacggctcgctcggctggcaacatgcctacggcgataagaacacctcatcgcgcatggcgtttgccggcagcgacgcgttcgtcactcagggccaggccgtggatgacaacgtgatggtgggcgatatcggcgtgagcgtgaagctgtcgcgcgctgcgacgctggatgttggctatcaggggcaattcggcgccgatacccgcgtcaattcggtcaacgccaacctgcgctggtcgttctga

SEQ ID NO: 430646 - DNA, 201 bp, Serratia marcescens
atggccgccgttgtgtacgacttcgtagcttatccagcattcgcggcacagatcgtcggattgaaaactatccgactccatcttgcacaagagggtgacgccgttgctgaattcataaagtatttcgcgctcttcaatgacgttttcctcatcaatgaagcgttcgacgatttccgttttgttgattgcccgtacctgtga

SEQ ID NO: 430647 - DNA, 633 bp, Serratia marcescens
atggatttacaagcatgggataacgttatctccatcgcttcgaatactgtaacagcgttgagtgtggttggcggcgtcatctttggagggattaaacttcaggagatggtgaagacgagaaaaatggagcgggcaattgattcagcaatcgctcttaaagaagagattgatggcactagaagccgttacaatcgtatgcgctttgacttaaaccgcatcatgacgtttctcgacacactggcgaagtcaggacaaagagccgacgaagaaagctattaccatattcaagattccttgaaagatatgacggaaaatacctttcgcattggtagttctttcatcaaattacgtcactataatgttctgattaaagaggtttcctgggagccattcaacacccttcttcactctgctggtaatacgcaaattgccatctcaaaactgatgactctcatcatgcaggctatgcttaaagaacagataacactagaagaattcatggcaatacgtaacgcttatgatgaacatggtgcaaagatgaaagatgtaaatcaagctatctctggtttagatatcattagatttgacaatctttttgacttcagcaaagtacataaaaaaagccgggattaa

SEQ ID NO: 430648 - DNA, 222 bp, Serratia marcescens
atggctaaagtttcaaacctgctgctttttatcggcctggcgatgtttgccatcgccgtaaccctgaatatatatagcggctacacgtccgcagatcccaacagcaccccgctgttttccccgctctggtggacgcgctggttcccgctctatgcctcgggcgctgcattgttggtggtggggttggtattgcgggttacggctaaaggccgcgcgcattaa

SEQ ID NO: 430649 - DNA, 993 bp, Serratia marcescens
atgcaacaacgtaaactcggttcccacggtcccgtcgtctccgccctggggttgggatgcatgggcatgagcgacttctactccaccggcgccgatcggcaggaagccatcgccacgctgcaccgggcgctggagctgggcgtcacgctgctcgacaccgccgacatgtatggcccgcacaccaacgaagagctggtgggggaagcgatcaaaggcaagcggcaacaggtgttcctggccaccaagttcggcattctgcgcgatccggcggatccttcggcgcgcggcgtcagcagccggcccgagtatatccggcgctccgtcgagggcagcctgcggcgcttgggcgtggaggagatcgatctttattatcagcaccgggtcgatccgcaggtgccgatcgaggacgtcgtgggcacgatggcggatctgatccgcgaaggcaagatccgccacatcggcctgagcgaggcgtcggtcgccacgctggaacgggcgcacaaggtgcatccgatcaccgcgctgcagaccgaatattcgctgtggacgcgcgacgccgagcagggcgtgctggcggcctgcgagcgcctgggcatcggctttgtgccctacagcccgttagggcgcggtttcctcaccggcgctatccagcggccggaggatctggccgaggacgacttccgccgcagcaacccgcgcttccagggggaaaacttcagccgcaatctggcgctggtggagaaggtgagcgagctggcggcgcagaagggcgttaaaccttcgcagctggcgctggcctgggtgttggcgcagggggaacacatcgtgccgatccccggcaccaaacgccgtcgttaccttgaagagaacgtcgcggcggcggagataacgctgagcgcggctgagctggcggcgattgaagcggtgttcccgctgagcgcggcggccggcgatcgctacggctcggagtcgatgacctacatcaacggttaa

SEQ ID NO: 430650 - DNA, 1416 bp, Serratia marcescens
atgaaaatcaaaacccgttttgcaccgagcccgaccggctatctccacgtcggcggcgcgcgtaccgcactttactcctggttgttcagccgccatgcgggcggtgagttcgttctgcgtatcgaagataccgatctggaacgctccacccaggacgcgatcgacgcaattatggatggcatgaactggttgaacctggattgggatgaaggcccgtatttccagaccaagcgtttcgatcgttacaacgcggtcatcgacgagatgctggagcagggcacggcctataaatgctattgctccaaggaacgtctggaagcgctgcgcgagaagcagatggaaaacggcgagaagccgcgttacgacggccactgccgcgacagccagtgcagccacaccgacgacgagccgcacgtggtgcgcttccgcaacccgcaggaaggctcggtgatcttcgacgacaaaattcgcggcccgatcgaattcagcaaccaggagctggacgatctgatcatccgccgcaccgacggttcgccaacttataacttctgcgtcgtcgtcgatgactgggacatggaaatcacccacgtgatccgtggcgaagaccacatcaacaacaccccgcgccagatcaacattctgaaagcgctgggcgcgccggtgccggaatacgcgcacgtgtcgatgatcctcggcgacgacggtaaaaagctgtccaaacgtcacggcgccgtgggcgtgatgcagtaccgcgacgacggctatctgccgcaggcgctgctgaactacctggtgcgtctgggctggtcccacggcgatcaggagatcttctccatcgacgagatgaaagagttcttcacgctggaagcgatcaacaaatccgccagcgcgttcaacaccgagaagctgcagtggctgaaccaccactacatcaaccatatgccggcggaagaagtggcggtgcatctggcatggcacgttgagcaactgggcattgaaacccgcaacggaccggaactgaaggacatcgtcaagctgctgggcgagcgctgcaagacgctgaaagagatggcggagtcttgccgttacttctacgaagacttcagtgagttcgatgccgacgccgccaagaagcacctgcgtccggtcgcgcgtcagccgctggaagcggtgcgcgccaagctggccgccatcaccgtctggacgccggaaaacgtgcacgacgccattcagggcacggcggatgagctgggcgtcggcatgggtaaagtcggcatgccgctgcgcgtcgcggtgaccggcgccggccagtcgccgggcatggacgtgaccgtgcatgcgatcggccagaagcgttcgctgcagcgtatcgatatggcgctggcttacatcgccgagcgtgaagcccaagcctga

SEQ ID NO: 430651 - DNA, 786 bp, Serratia marcescens
atgtctttgcattcaccaaaagaaatcgccgccctcgccgttcaggccggggtaaacaaaagccgcgcccctcttgctaatctgctgattctgggctttctcgccggcgcctttatcgccaccggcttcctgctggatattcacgtcatcggcaccctgccggccgaatggggctctttcggcgcgctgttgggcgccgcggtcttccctatcggtttgatcctgacccttctggccggcggcgaactgctgaccggcaacatgatgaccttgccaatggcctggttcgcccgtgaaattcccgccatcgccgtgctgcgcaactggttttgggtcaccctggccaacttcgccggcagcgtggccgtcgcctacttcttcggccacctgctgggcctgaccgaaggcgcgtttttacataagacgctggcgatcgcgcaggccaaagtggatgcggacttcctgcacgccttcatttccggcgtcggctgcaactggttggtatgcctggcggtgtggttagccttcgccagcaaagatgtgccgggcaaagtgatcggcatgtggttcccggtcatggcttttgtcgccatcggcttccagcacgtggtggcgaatatgttcatcatcccggcggccatctttgccggcggcatgggctgggagcagtatctgcctaatttcgtcgcggtatttctcggcaatgcgctgggcggcgccggctttgtcgggttgatgtatttcctcgcctaccgtccgggtttgccggctagcgaacaagcctga

SEQ ID NO: 430652 - DNA, 1188 bp, Serratia marcescens
atgtcccatattgcgcactttgcgttggcgatagtggtggtggcgatcctggccctgttggtgtgccgcgatcgcaaaagcatccgcattcgctatgttattcaattattagttatcgaagtactgctggcctactttttcctgcattcggaagcgggtttgggcttcgtaaaaggattcgccgcgctgtttgacaaactgctcgggtttgcgggacaagggactgatttcgtgttcggcggcatgggcgacaaaggcctggcgttcttcttcctgaaggtgctgtgcccgatcgtcttcatttcggcgctgatcggtattctgcagtacatcaaagtgctgcctttcatcatccgcattatcggtaccgtgctgtcgaaagtgaacggcatgggcaagctggagtcgttcaacgccgtcagctcgctgatcctgggccaatccgaaaacttcatcgcctacaaggatatcctgggcaagatgtcggaaaagcgcatgtacaccatggcggcgaccgcgatgtctacggtgtctatgtccatcgtcggcgcctacatgaccatgctggatgccaagttcgtggtggcggcgctggtactgaacatgttcagcacctttatcgtgctgtcgttggtcaacccgtacgacaccaataaagaagaagagctgcacctcggcaacctgcacgaaggccagagcttctttgaaatgctgggcgaatacatcctggccggcttcaaagtagcgattatcgtcgccgcgatgctgattggtttcatcgccctgatcgccgcgcttaacggcgtgttcagcgccatcttcggcctgagcttccaggaaatcctcggctacttcttctatccgttcgcctggatcatggggattcctaaacacgaagccctgcaggtcggcagcatcatggccaccaagctggtttccaacgagttcgtggcaatgatggagctgcagaaagtgtctgccgaactgtcgccacgcagcctggggatcctgtcggtgttcctggtgtccttcgccaacttctcttccatcggcatcgtggccggtgcgatcaagggcctgaacgaacaccagggcaacgtagtgtcccgcttcggtctgaagctggtctacggctctacgctggtcagcatcctgtccgcttctatcgcgggtctggtgctgggctaa

SEQ ID NO: 430653 - DNA, 1236 bp, Serratia marcescens
atgctgaacagtcgcgtggttgaaaccacctccggtcgctccgccagaaaaatcaaactctcgctgatggggcccgccttcatcgccgctatcggctacatcgaccccggcaacttcgccaccaatatccaggccggcgcctcgtttggctatagcctgttgtgggtcgtggtctgggccaacgtgatggcgatgctgatccagctgttgtccgccaagctggggatcgccaccggaaaaaacctggctgagcatattcgcgatcgctttccgcggccggcggtatgggcctattggattcaggcggagattatcgccatggcgaccgatctggccgaattcatcggcgcggcaatcggcttcaaactgctgctcggcgtctccttgttgcagggcgcggtgctgaccggcatcgccacctttttaattctgatgctgcaaaagcgtggacaaaagccgctggaatgggtgatcggcggcctgctgctgttcgtcgccgccgcttacatcgtcgagctggcgttttcccagccgcagcttgcgccgctgctgaaaggcatggcgttgcccgatttgcccaacggcgacgcggtattcctggccgccggggtattgggtgccaccatcatgccgcacgtgatctatctgcattcgtcgctcacccaagttggcggtgagcacgataaggcggagcgctatgctgccaccaaagtcgacgtcgccgtcgccatgaccatcgccggtttcgttaacctggcgatgatggccactgccgccgccgcgtttcatttcagcggccacagcggcatcgccgatcttgacgtggcctatctgacgctgcaaccgctgctcgggcaagccgccgccaccgtgtttggcctgagcctggtggccgccggtctttcttccaccgtggtgggcacgctggcggggcaggtggtgatgcaagggttcgtgcatttccatatcccgctgtggctgcgccgagcggtgaccatgctgccgtcgtttatcgtcatcatgctgggagtggacgccacgcgcattctggtgctgagccaggtgctgctcagcttcggcattgcgctggcgctggtgccgctgctggctttcaccggcaatcgggcgctgatgggggagatggttaacggccccgtggtgcaaaacctgggcaagctgatcgtgttggtggtggtggggttgaatggctacttgctgatcggcagtgtggtgtag

SEQ ID NO: 430654 - DNA, 411 bp, Serratia marcescens
atgtttaaacctctgctcttggccgccatcttggcggcgacggtactgcccgccgcacagcaggcgcacgccgaagggatcagcatcgatctgatgccgggcgtttcattgcgcatcggcgatcaggacaatcgcggccgttactgggacggttacgactggcgcgatcgcgactggtggcaaggccatcagggacgctatctcggcgatcgcagcccgcgcggctattactgggatggctatcgctggcgcgaccgcgactactggcgcaaacactattactatcatgaaggacgctatcgtaaatacgacaagcattacgataagcaccattggaagaaagagaaaaaacaccaccacgatcatgaccgcgatcgctggcgccgccacggcgatgacgaccgcgattaa

SEQ ID NO: 430655 - DNA, 990 bp, Serratia marcescens
atgtcctactcagcctccccctcgcgttatcaagatatggaataccggcgctgcggccgcagcggattgaagctgcccgccgtctcgctcgggctatggcacaactttggcgacgccacgctgtacgacaacgcccgcgccctgatccgctgcgccttcgatcgcggcataacccacttcgatctggccaacaactacggcccgccgcccggcgccgccgaggaaaactttggccgcattctcaacgccgatctgcgggcctggcgcgacgagctgatcgtctcatccaaagccggttacaccatgtggcccggcccctacggcgattggggctcgaaaaagtacctggtcgccagcctcgatcagagcctcaggcgcatgggattggagtatgtggatatcttttatcaccatcggccggacccggacacgccgctggaagaaaccatggcggcgctggatctgttggtgcgccagggcaaagcgctgtatgtcggcctgtccaactacccggccgagcgcgcgcggcaggcgttcgacattctgcagcggctcggtacgccgtgcgtgatccaccagcccaagtattcgatgttggaacgcacgccggaggcgggattgctggatacattggcggagcatggcgtcgggtcgatcgccttctcgccgctggcgggcggcctgctgaccgaccgctacctgcacggcgttccgcaagattcccgcgccgccagcggcagccgcttcctgcagccggagcaactgaccgacgagcggctggacaaggtgcgccgcctcgatgcgctggcgcggcaacgcgggcagaagctgtcgcagatggcgctggcctgggtgctgcgcggcgatcgcgtcacctcggtgctgatcggcgccagcaagagtgcgcagatagaagacgcggtgggcatgctggccaatcgtcacttcagtgaagaagaactcgcgcagatcgagaaaatcttattgtaa

SEQ ID NO: 430656 - DNA, 876 bp, Serratia marcescens
atgactcccctgctgtttcacaaatatcacggtctgggcaacgactacctggtatgccaccgttcggtcgccgatcgcctgagccaggaacaaatccgcctgctgtgccacccgcattacggcatcggttccgacggcctgctgatcgacagcggcgacgccgtcaatcccaccctgcgcatcatcaacccggacggctccgaagcggagaaaagcggcaacggcttgcgtatctacgcgcggtatctgttcgacagcaagcgcgtggcgcatcagccgtttctggtgcacaccgccggcggcgacgtgcgttgccaggtggcggaagacgcgcatcagataaccgtggagatggggcgcgccaatttcagcccggcggcgctgccggccttgatcgatctgccggaggcgctgaactatccgctgcccctgaaggaggagacgttaagcgtttcgctggtgtcgatgggcaacccgcactgcgtggtgccggtggaaaaactggatctggcgcaggtgcatcggctcggaccgcagattgagcgccatccgctgttcccgaaacacaccaatgtacaactggtggaagtggtcgatcgccagacgctgcgcatcggcatctgggagcgcggcgccggctttaccctcgcctccggcagcagcagctgcgccgccgccagcgtgatgcgcaagttgggacgagtcggcgatcgggttagtgtgcggatgccgggcggcgaactgcagatcgccttcagcggcgattttcaggtcagcatgcgcggaccggtgcataaaatcgccaccctgacgctggacgaagactgctttgccggcggcgcggggctgtttacgggatccaccccagcagcctga

SEQ ID NO: 430657 - DNA, 462 bp, Serratia marcescens
atgcatatcgaaccgctgctcgcccatcgccggcgcattgaggaactggccgcgttgctgcacaaggaatggggcgcctttgcgcagtggagcagccgcgataccatcagccggcggctggctgaacgctgcacacccgagagccaaggcgtcgtgttgctggcgctgtcgccgcagcaacagatcgtcggcaccgccagtttgacgctatatgaattgacggataaaccggagcgccaatactggctgagcgaagtctttacccacccgcagcaccgcggccaaggcattgcccgcaacctgatcgcgcgctgcatcgagcacggccgaatccagggcatcagcgaactgtatctgtatacgcccgaccagcagacgctgtatcagaaactcggctggcgccctctggagcaacgccaggtcgccggtgaaaccgtcacggtgatgagccgcacgttgtag

SEQ ID NO: 430658 - DNA, 837 bp, Serratia marcescens
atgaaattacttattactgatttggataatacactgtacgattgggtaactttttactcccagtcatttagtgccatggcagaggaactatctaaggagataaaagtccctttagatatacttttgtctgaatataaaattgttcatcaaaaatttggtaattctgaaaagccatttgctactttagagttgccatccgttatttcttattttgggacaaaggataaaattttcttacaaaagaaacttacaagggtattttctgcatttagttcaaaacgcaatcaaacattaaagttatatcctacggtcaggagtactttaaaaacattaagggagcgcggtgttaaaattgttggacatactgaatccttggaattcaattctttgtatcgtctttataaacttgatgtgattgatttttttgatcacctctatacactcgaagataatcacaacctccatcccgacccaaaaaatgcaaaagtaattccagtaaaagatgattttattataagattgtcccattctgagtcaaagcctaatcctaagctactggagcatatttgtttcaccgagagcattgatgtcaaagatgctgtatatgttggcgactctattaccaaagatatatcaatggcaaagtctattggaatgaaagctgtttgggcttgctatggtcgtcagttttctcccgagttatggaaaattttagtgaaaataacacactggactgatattgatgttgaaagagaagaacaattaaagaaatcattttcaaaaatagagccggattatacaattaatagtttttcagaaattttagaactgaaatga

SEQ ID NO: 430659 - DNA, 1647 bp, Serratia marcescens
atgaatgcaacttacatttttaggttccgcgatctgggtaaaagtgaaggatttaccatcgaacaacacaataaaattgctctcaaagaaggatatgtttggtgggggtggtgggctaaatctggagagatctttccatcacaagaacttggggttgcttcagagaattctacacaaatatatttttttgattcagggcgattaaagttctataaggctgatttaaagggtgtttgttcttcattctctggcgatatcaaaagggatgttcctgagaatggtagtaaaacgccagagtattataataatgacaagttgttaggatggttgaaaatttcttttattagtgatattactgatgccgaaattctcaaaaaactcacctacacatcatttgattcattgttccctggctcaaaggatttagatgagcaacttttcaataaggtcgttttttccgcaactgaattaaaaaaacaagatagaacaatttggaaagttagaactgcagttgaaaccgattttcagcatgagtcgttagcatctcattatattccttataattttaataaaaaacacagtcagaaaaaaggagagtttataatctggctttcggatattcatttcgataatggcggaggcaagcatgcatttccaatgcaggataatcatcaacaaaaatgtttatcttctcgcgtggtagatttggctaataaatatagtaatgggaataagtgtgccgggcttgccatttcaggtgatttgacttggcaatcacagagcgaagggtttgagcaagctgcgaagtttatcaaagatgttagctcttctttaagtcttacacgtgatgatataattatttgccctgggaatcatgatgtgggtttggtatctagagatgaatactttgaaataatgggtgaggctgaaaccgataaaccatggacaactcttgcaaaaaactaccatagagaaagtaaagaaaactatataaatttttatcgagatatttttcaaaggttgccggaagaggatctctctcaaggaagaaagtttttactgggggggcacaaaattgttgaagttgccgcattgaattcatgcgttttacaacaagtaaaagattcatttttgggcatgggattcattggtgagcaacaactcaataatgttgcgaaatctatgggatggacggatgaaagtgggggatgtgtatctaaaaaaaaaggagtcacaagaattgccatgctccaccatcacctgacttctattaatgaggttgaagatgcctatctggattcaaagtatagcgtaacgcttgatgcagaaagattcttacgttgggtagtaaggcacaaagttgattatgttattcatggccatatgcatagaagtagttgtattacaataacaaaaacactatctccactagaaccagtgtcggattcaaattatgaacatacattccaaattttttctttgggaagctcaggagttgttagttcggaattgccaagtcaggattgtgctaactatgtatgcataatggatttttctggcgaaaagctaatttttaactttttcaagcttgataaacagagcgaaggaaaaggagtggccacctatactgttgaaggcttattatga

SEQ ID NO: 430660 - DNA, 150 bp, Serratia marcescens
atggctcctgtgccgtacgtcattcactcccacgagccagaaccgctcgcccaactggcgaaacaggttcaggagcccggcacgccgcaggccgtaacccacctcccccatcgccactgtctcaccctgcgcctggcaaaaacaaaataa

SEQ ID NO: 430661 - DNA, 1134 bp, Serratia marcescens
atgaatattacgagaataaagctaaaaaactggagaaatttcaggaatatagatgtctctctcagtgaccgggtttacattattggccctaatgcggtaggtaaatcaaattttttagatgttttccgctttatgagcgatttgtgtaaggacggtggggggttacaaaaagcagttaatgatagaggcgggattactaagttacgttgtttgcaggctcgaaatgatactgaagtagcaatcactcttcacttgtcagaaaatgatgatcattggatttatgatttggtttttaaggcatcaggaagaggtaagcagttaattaacgtcactaaagaaatggtgacaaagaatggaattgagattctatctcggcctaatgataaagatcaaatagatagtgttcagttgacgcaaacttatttggagcaaatacttgcaaatcaagactttagggtggtagcgaacttctttacctctattacctatttacatatagtgccccagttattgaagtttgcaaaagagatagggataaataagattgaagatgatcctttcgggcaaggtttcttagatagattagctaatacacagaatagaacaagggatgcatggttaaaaaaaatacaatccggtttgtcaattgcggtaccccaatttaaagaactaagatttgaacgagatgactctggtcagccacatttagaggcgcgttatgaacattggcgacctaatgcggggtggcagaaagaggaccagttttcagatggtacattacgcctaattggtcttatgtggtctcttctcgaaaagagacaactgcttttactagaagaacctgagttgtcattaaatagtgaaatagtgaggtttataccagaaattattgagaatattttaaaaggagctaggaatcaaaaacaaatcattattagcacgcatagtactcccttgttgagtaataatattgatggcaataatattgtgttattcttagcctcggaaaatggtactacagcaagatctccaaatgaagatgagcttgacgctatgagggcaggattctctccagctgaaattatgctacctttaactacacctaaaaacattaaaaaaatagcagagatctag

SEQ ID NO: 430662 - DNA, 609 bp, Serratia marcescens
atgagaatatctatcgccacggaggatgttttaacagaggaaataattgctaaaataatcttatcaaatggaagatttgagataatacacaagttaggtaaaagaggtaacggctatcttataagtaaactaaataatttcaatgagttgtctagaggattgattgttgttgttgtttttgatttagatttaaaaccatgcccagtgaggtttaaggaagaactggagaggactgttgctaataaaagtgataatttaaagttagtgatttcggtaagggaggttgaaagttggattttggctgatagagaaggcttcggttcatactttaaaatatcaaaagataaaatagatagaacaccggatgcattattagatcctaaggataaaataatcaacttagcacgttactcaaaagatagtgcggtaaagagaggtattccaccggttgccggagctgcatcgaaagttgggttgtcttataatagattattgactgattttatccagcaggaatgggatgtcaatagagcgattcaaatttcgcctagtttagctactgctatggctacaattaatgagttattagaagaacataaagatgattaa

SEQ ID NO: 430663 - DNA, 255 bp, Serratia marcescens
atgatgcgttgcccgctgtgcactcatgcgtcctatacccgtaccagccgctatatcacggagcggacaaaagaggcgtattaccaatgtcagagcctgacctgttcttgcacattcaagacggtggaaagcgtcgataaaatcctgtgtcagccgatacagccacaaccggccgatgagaacgccctgccaccgccggagaaacggacgttgaaccgctatcgccgttacaacagcaatcctaccctgcactaa

SEQ ID NO: 430664 - DNA, 726 bp, Serratia marcescens
atgagcaccaccgccttaccgaaatccatcaccgataaactgcaagccctgcgcgacgctcgcaccgcccacgacaaaaactaccaggcgttgaccgacgtcgtaaccggcattgcccgctgccaccaacagaagaaagacgccgaagtgcaaagccaggaggctgaaagccagtggcgcaccctgtttcgcaaactgcgcggagaaatgacgccggaacggcaagcgcagcaccacagccggatttccaagcgggagctggcgaaagagttcgacggcctgattgaggagatggagctggacaaaatgcagcttcacctcaactgcggcggcacagccccgaaggtggtggccgcacacaaagacgccctcacgacctttgcggcccatgcgatgcatcaggcagtggatgcgctgagcaaggcgctaatcagccctgacgttatcaaggcgtgcgcactggcttcacgggcttacggcgtctatgcggacaatccgatgaggatgattgagcaacaggtactgggcacgctacaaggccgcattcgcgctaccatggctacgcaaaatatcgaccacccggtgctgaatgagattggtctgacgataccggaacaaaccggcgtattgcaggagcgacaaagatgcccaatgcgccagatgcgaggggcaagagaactggcggaaaaacgccgtcggctgcaagaaaaaggagcccaatcatga

SEQ ID NO: 430665 - DNA, 858 bp, Serratia marcescens
atgggtaagttagcgttagccgccaagattacacatgtgccatcgatgtatctgtcggaaatccctgggaaaaactttggctgccggcaggcggccatcgacggccataaagagatcggcgcgcgttgccgcgagatgggcgtcgacaccatcgtggtgttcgacacccactggctggtgaacagcgcctatcacatcaactgcagcgcgcatttctccggcgtgtacaccagcaacgagctgccgcatttcatccgcgacatgacttacgactacgacggcaacccggcgctgggccaactgatcgccgatgaggcctgcaagcggggcgtacgcgccaaggcgcacgacatcccgagcctgaagctggaatacggcacgctggtgccgatgcgttacatgaacgccgacaagcatttcaaggtggtgtcgatctcggcgttttgcaccgtgcatgacttcgccgacagccgccggctgggcgaggcgctcaaaagcgctatcgagaaatacgacggcaccgtggcggtgctggccagcggctcgctgtcgcaccgctttatcgacgatcagcgcgccgaagagggcatgaacagctacacccgtcagttcgaccagcaaatggacgaacgggtggtcaagctctgggaagaggggcgctttcgcgagttctgcgaaatgctgccggagtatgccgattattgctacggcgaaggcaacatgcacgacaccgtgatgctgctgggcctgctcggctgggacaaatacgacggcaaggtggagttcatcaccccgctgttcgccagttccggcaccgggcaggtcaacgccgtgttccctttgcccgctgaagcctga

SEQ ID NO: 430666 - DNA, 924 bp, Serratia marcescens
atgtctgattccgtcgattttaatcagctggtcgatgacatcgtcaggtcaggtaatctggcgtccgtcaggcccgtggtggaaaaggagctgttgcattatgacattttgtacgcgctcgcgaatgcgggattcttaaagtctctgatatttcaggggggcacgtcgctgcgcctgtgctacggctctaaccgcttcagcgaggacttggactttgcgggaggccgtcatttctgctctgcaaacatgaaggaaattaaggcgtgcattgagcgctatgtcggaagtcggtatggcctggcagtgacggttaaagagcctgcggaactgagacgggagcctgactacgttgatgttaccgtggacaaatggcagatgtcggtgacgacgttcccggaacgaaaagaattaccgaagcaacgtatcaaaatcgagatagccaatattccagcctatacgagcgacccacggatgctgataaggaattattctcagttgccggacggttattctgatttgattgttcaggttgagacattgaatgaaattatggctgacaaactcgtttccctgcctgcgactacgcgccgcatccgctatcgcgacatctgggatctggcttggttaaagcagcaaaatgcggatgttgatgcggagctggtggcaagaaagctggccgattatggcctgggtcccaagtttgaagcgctgctacaggctcgcatcggtaccttaaacgtcattatcgaaagcagggaactccaggctgaaatgaggcgattcctgcccgttgaggtttatgagcgcaccatcagtcagccgcagtttatgcaatatcttgagactacgttgcgcgagttgctgactaccgtgcaaaggcaactctacgataagcctgcggctgtcccaccgttcaaaatgtaa

SEQ ID NO: 430667 - DNA, 534 bp, Serratia marcescens
gtggataaaatgacagccatcaatacgctggataaattcagcaggttgggaaagcacatttttcttactcaagatctcgccacccttttccctgccgagtcgccgcgaacattgcaaaaatcagtcgatcgtttagtggctgccggtatccttacgcgagtggcgaagggcgtttatgcgaacggccgggcttctctgggggggtaccctcttgagagcatcgcgatcaacctccggcggggggaatacaattatatcagcttggaatctgctttatctcagtacggcgtcatctcacagattcctatcgatagactcactatcatgtctaccggccgttctggtgaattcgtcacgccctggggcgttatcgaaatcacccataccagcaagaaacccatcgatattcttcgaggcagccttgaaggccggggcccgctacgcatcgcgacgaaagaaacggcgataaaagatctgtttcgggtcgggaggaatacgcacctcattcaacagggagagctgactgatgtctga

SEQ ID NO: 430668 - DNA, 321 bp, Serratia marcescens
gtgattcgcaatcactttagcgagctcagtagcttattcagtatttacttcggtcaggattatgatctgtttactgatgccgaaacggccgaaggtgtgattgacggcttccttaagcaaaacggtagtcaggtcatccgcgatatcctagaggaagccaaagaatttcaggccacctatgcggggcgtataaacgagggcatggcggagcatttttcagatgagtttatgccggagagctggggtactaccgcggtagcgttctttgccattttgcaacgaaaagcagagcaaaagctggggcagcttaaacgaatttaa

SEQ ID NO: 430669 - DNA, 1287 bp, Serratia marcescens
atgggtaaggtgatctctgtttttgagtatgacctgttaggcgttgaaaaagagtcgccggttggcgctgttcctcttcctcctgaggtttttgactatttagaatcgcttagcttgactagtgagaaaggaagccagctgcttaagctcacctcacgttctgggcgccgattactacaggtacagaattacgcagggatactctataccccctatggcctgcaactggagatcctgcccaagataggcaaaaaccttacgttagagcaagcgcgcgaaacgctactgattatgctaagtcatctgtctggatttaggcatattcaaacccagcaggcttcagttgatgcgcaacgaatgcctttactggagatctttatcaaccagtttttgcatagcgttagccagctacttaagcagggactgcggtcagattacgtgaaagaacaggctaacttgccctttatgaagggcaagttgatgctgtcagcgcagttacgccataacgtagtgaaccgtcataaattctatcttgattacgatgattatttacctgattgtgcggccaataggctattacattctacactttatcagttgggtaacctgagcctgtcctctgataatcaacgttggttacaggaattacgctttgcttttgatggtatcccgtcgagtagagatataaaaggtgacatatcgagtttgcgtttggaacgcggtatgactcattaccatgagcctttggcgtgggcgcagttgatattgcagggtatgagccccagcgctctacagggcgatgctaaagcgttgtcactcttgttcccgatggaggcggtatttgagtcctttgtcgcgtcaacgcttgctgacgaattaccggatggcttcaaggtgaagcctcaggcagcgagctattcgttggttaaacatggtgagagggactgttttaagctgcgcccagatttgttgattcaatcacgtcatccggtcagtaccaaaatggtgctagataccaaatggaagctgattaataacaactcgcaagaaaaacctctctatggcattgctcaatccgatctctaccaaatgtttgcctatggtcaaaagtatcttggtggctcaggagatatgtatttaatttatcctgcgcacgatgacttcaatcacccaatacgccagcatttcgcattttcagacacactcaggttatgggttgttccgtatcagatctctgcaaagcgtgggcagagaatgatgtggggaaaagataatccctttatctag

SEQ ID NO: 430670 - DNA, 1392 bp, Serratia marcescens
atggctaagtataaagcgtatccggagtataaggattctggggttgagtggttgggggatcttcctgggcactggaaacttagcaaacttcgttaccaatttgcttttggtaaagggcttaccatcacgaaagagcatcttcaggatgaaggtattccgtgtgtaaattatggcgaagtgcattcaaaatatggtttcgaagttaacccagaaattcacactttaaagtgtgttagtgataaatatctcaaagataactccagctcgttattaactaaaggtgatattgtttttgccgatacgtcagaagatatagatggatccggtaattttacgcaattagtgagtgatacagttacgtttgctggataccacacaattattgcgagagcatttgaaagagacactagccgattttatgcttatcttttggattgcgaagagttaagatctcaagtaagacatgcagtaaaaggagttaaagtatttagcattactcaagcgattttacgaaatctttcgatatggcttccaacaaaggatgagcaagcgaaaatagctgctttcctcgatcacgaaaccgcaaaaatcgataaactgatcgagaagcaacaacaactgattgagctgctgaaggaaaaacgtcaggcagtgattagccatgccgtcaccaaagggctaaaccctgatgtgccgatgaaagactctggtgttgagtggttgggggaagtgccggagcattggagtataaaacgtttaaaacatatatctcctaaggttggtgtagggcttgttataaatccatcttcttacacgagagatgagggggtttattttatattcggtggagatgtaaaggagtacggatttgaccttggcaaaacgaggaaaatatcccctaaggatagtaataacttactctcatctagactgaataatcaggatttagtatcggtacgtgttggctatccaggcattacggctgttgtgacaaaggatttagaaggttctaattgcgcctcagttattataataagaaatggtgaatttaattccggatggttgtgtgcagctatgaactcttgggttggaagacagcaagttgaattggtttcctatggagccgctcagaaacaatttaacgtggcagatgctgtggagtttatattcccagtacctccatatgatgagcaagttataatttctaactttgtcaaaaattctttagataaatttgatacagtatccttacaagctcaagtccaaattggcttacttcaagaacgccgcacagcccttatctccgccgccgtcaccggtaaaatcgacgtgcgcgactgggttgcacctgatatgcaagacgctgaggagccacaggagaccacagcatga

SEQ ID NO: 430671 - DNA, 1242 bp, Serratia marcescens
atgagttatatcccttttaaagcacctagcaagaaactgattatatctgttctttcatcctccgcattcattaccggactaaccatcgcagttatatggttatacctttttaatttagacagattagatatattctatgatgctattagcgctcgttcagccatagccgtgatatttggctttactataatatcaactcttggttttagtacgttaattttttcttcttcatttattataatacttatcttttctaactataaaaatgaactggggaaacaacacagcacagttcatggattttctaatgttggattatttaataatctaggttcatgtattctgttgatcacatcttttattgtttataattactcagtggcaaatgggtacatatgcacaatacttttcattgtcgcctctttactttttagctattacattacttatataaaaatcataaagccaattaaaataactcatcaaagcaacaacgaaataaaagtcagaatagataaaaggtcgatgatatttttattacctttgttactacttgcccctgctattgtacaaatacttcctcttttgttcttactaagccagctagagtttacagacggcagtagcgattttgctcaactggctttacttgctgccgtagctctaacattttccaccttaagtattctacctggcactatttatataaatgaaaagaggaatggtggtatgcttcactccattattattatattagtatcaatcccaacagccttagttgttttatccatgatattcagaccaataccaaatatgattataaatctaacaatgaatctatctggtattagtgactggcgcatccatcagttttacatcaaagaagaaactcaccctcataccatgtttaatggtctattatggaatacgagatattttcaaaacatacctagtagattctttatcactggcgttagtgtattcactttaggtaataaacaactaatttgcccaacaacaatcatacaaactagagcagaaagtttaaaactaacggttgatgacatcaataaatatgatgagaaattagtcaagttaaaagcatccgcgatgaattgcattccatttaataaaggtgagatccatgtttgggactcatccattctagagccagtttattatgaaaagataaaaataaaaaatgaaaacagcatgataaaactgatgcaatcattgaaatga

SEQ ID NO: 430672 - DNA, 180 bp, Serratia marcescens
atgatcggtaatgccaacatcaccccgccgaatccgcgccgctacctgtaccacgcctacctgtcgtttatggccgcaagaggctatcagcacgtgatgaacctgacggcgtttggccaggcggtgccgcagacgttgaaaaagtatgagcatacgctgctgaaacgccgcaccaagtag

SEQ ID NO: 430673 - DNA, 2334 bp, Serratia marcescens
atgagcgcccacttcgtatctcagaccgtacgcaccgccaccggccagtggccggtgatactcccggccctcggcattgccttgcagccgaacggcaagccgcagccgtgtccaacctgcggcggtaaagaccgcttccgcttcgacaaccaggacggacgcggcacctggttctgcaatcagtgcggggccggggatggcctcaacctggtggaaaaagccctgtcactgtctgcccgggccgctgctgaacaggtggctgccgtgatggggaatagcgccagcgccttgtcaccggccgctgagaccgctcattcaccacaagacaaggccgaggcccagcgcaaagccgcgcgacaggcacgggcactggtggccgccgctcggctccagaccggcaatgcctacctgagcgccaaaggctggccggaggcagaaaccctgaccctgcacggccagccgctgcgcgtcggcggtatcacctaccaccccggcgacctgctgttgccgctgcacaatgccgggggcgaggtggttaacgtgcagctgattaacgccgccggtgacaagcgcatgctggcaggcgggcaggtgaaagctgcctgccacaccctgagcggcccggacaacgcggttatctggctcaccgaaggctacgccaccggcctcaccgtgcaccgcctgaccggtgaaacagtctgcgtggcgctcagcgccaacaacctggcggccgtggcgcagcagctgcgcagccactacccagatgcgcggctgctgctggcggccgataatgaccgcagcggcaccgggcagacccgtgcaaccgaggcggccacactcaccggcgctgtcccggcgttgccgcccacggagggcgactggaacgacgtttactgtcagcagggcgctgaggccacacgcacgcaactccagacgctcagccaaccgccgcagcccagcccgttcgacacgctgagcgatgctgacctcaaagccatgagcgccagtgagaaggccgagctgctggccgagcactatggcaacaccctggcggtgccgccggtgggggaagagctgtgccgctatacgcgtggcgcctggcaggtgctaccgcaccggcagctgagccgggagattgctgcgttgttccagaaggtacgcgcgccgttctccgccgccggtatcaacagcatcctggacaccctcaagctgatggtgccgcagatgggcgacccggctcgccggttgataggctttcgtaacggggtattcgataccgtcagcggcctgtttagcgctcaccggcaagaacactggctgcgcaccgttaacagcgtggattacacgccgccgcgtgccggggagaacctggccgaccatgcaccgcacttctggcagtggctaacgcgagccgccgggggcaaccacgataaacaggagcgcatcctcgcggcgctctttatggtgctggccaaccgctacgactggcagctgttcctcgaagtgaccggccccggtggcagcggcaagagcgtgatggcggccatcgcccggctgctggccggggcggacaacaccacctccgccaccatcgacaacctggagtcggcgcgcgaacgggccagcgtggtcggttactcgctgattattctgcccgaccaggagaagtggagtggtgacggcgccggtatcaaggccatcaccggtggcgatgcggtcgccatcgacccgaaataccgcgacgcctacgcggcgcacattccggcggtaattttggcagtcaacaacaaccccatgcagttcagcgaccgcagcggcggcatctcgcgccgccgcgttattttgccgttcccggaagctatcgcacccgaagagcgcgatccgctgctgctggcgaagatcaccgaagagctggccgtgattgtgcgtcacctgatgcaacgcttcgccaacccgaatgatgcgcgtgcactgctccaggcgcagcagagttcggcggaagccctggaaatcaaacggcatgccgatccgctggtcgatttttgtggttacctgacggtgctgggtaccccggaaggcatgatgatcggcaatgccaacatcaccccgccgaacccgcgccgctatctgtaccacgcctacctgtcgtttatggccgcacggggctatcagcacgtgatgaacctgacggcgttcggccaggctgtgccgcagacgctgaaagagtatgagcatatgctgttgaaacgccgcaccaagcagggaatacagaccaacctgatattgagtgacgagtgcgaagcggattggttgccgaagtgtggtgccgtgtga

SEQ ID NO: 430674 - DNA, 336 bp, Serratia marcescens
atgaacacctcatcctgtttaccgattgaagtccgcaccgccgttttccgccgcgccgtggcgcaggcctatctggacacctgcgccttttaccgggtgaacctggggtacacgctggacgagctgcagatgacgattgccctgcgcctggaggggcattttgtgcggcagtacggcgtggatgacggcatggacatggcgtgcaccatgctgagcgacatggtgcagccggacgttctggtggccgcaccgcgcctgaccgcgctggggcaaaagatgatggacgagctgtgctgcgagcgcctgtcggcggcacagaacgccaccgtacactga

SEQ ID NO: 430675 - DNA, 264 bp, Serratia marcescens
atgaacaccctggccgaccgctactaccgcgatactcattaccctatcccgcatgccgattttctgcgtcttcagcatgcgcacgccacaggcgtgctgttccttgacctgctggacaccctcgacctcggcgggcagcgccccgatgccgtgcaacaggcatcgtttgcctcggtcattgccttgctgaccgaccagctcggccacgtcgtcaacacctgtgaaacccaaatccttgcccgcatggaggccaccgccgcatga

SEQ ID NO: 430676 - DNA, 192 bp, Serratia marcescens
atggctacgaccctcaccccgactcaccctacattctgctttttgtttgcggccgtacgccggtctgcgctgactgccgccccgcgtatcgtgcgcaccgtggcggattctgagcacaacgctcgccgcctgctggcccgtgattacgtgttgtcctttgccgggcgtctgccggttaaggcggcagcatga

SEQ ID NO: 430677 - DNA, 246 bp, Serratia marcescens
atgatgcagttaacctttggtcgccagcatttcaccctcgatgagcgcgacgcgctgtttgtggcggaagctattctgttgcagcgtaaagagcctggcgtcgtcttgccggagcaccgcagcgaaaaacacggcgttattcgtctggcgagtcgccaggcggagccgcgcctgttccgtgccgggccggtgccgctgacctgcgcggcggccgatactcgcaacgaccagttgaccgactgttga

SEQ ID NO: 430678 - DNA, 1176 bp, Serratia marcescens
atgcgacttaataacttacaaatccggaatgctaaacccacccctaaaccttacacgttgagtgatgggttgggcttatcccttttggttgaacccaatggcagcaagagctggcgctttcgttatcgctttgccggtaagcccaagatgatttcattcggcgtctatcctgccgtttcgttggccgatgctcggtcaaaacgcgatgaatccagaaagttagttgctgaggggcagaaccccagcacagttcgtaaagagaaaaagctggcgcagctatacgggaatgcgaacacctttgaagcgattgcgaaggagtggcataagtccaaattggcgacgtggtcagaaggctatgcgaccgatatcatggacgcgttcaacattgatattttcccctatctggggcagcgccccatatcagcgataaagccgcttgagctactcaccgttcttcgcaaaattgaggcgcgtggggcgcttgagaaaatgcgtaaggtcagacagcgctgtggtgaggtcttccgatatgccacggcaaccgggcgggcggagttcaacccggccgccgatctctccaccgttttgattagcccaaaatctactcattatccttttttatccgttgatgaaatccccggatttcttgctgcgctggaggcgtactccggtagtcggttagtacaactggcgacgaagttgctgatgttgaccggagtcagggggattgagctgcgcatggcgcaatggcatgagtttgatctggataacgcgctttgggaaattccgctggagcgcatgaaaatgcgccgggagcatctcgtgccgttatcgacgcaggcggtggccatcctgaatgaactgagaacctatacgggcaactatcgctatgttttcccgggccgtaatgacgtcaacaagccgatgagcgaagcgagtatcaaccagctccttaagcgtatcggttatcacggtcggctcaccggccacggcttcaggcacatgatgtccacgattttgcatgagcaggacttcaataccgcctggatagagatgcagctcgcccacgtggacaagaacgccattcgcggtacttacaaccacgcgcagtaccttgagaaacgacgtgagatgctgcaatggtacgccgattttatcgcgggcattgctcgctaa

SEQ ID NO: 430679 - DNA, 330 bp, Serratia marcescens
atggaaatagggcggaaagtcaaaatagattttgccaagataaaaacgctggatgatttttatactgagctatctggtttatttgggtttcctgatttttttggtaggaatattaatgcattaattgattgttttttcagcttgcgctatccgcaagatgaaatgacgaagattcatgtagcagcttctgagtatttattaatggagcttcatcatttctctttagcatcagaggaaataaaggaaacattaatattcactattgaaaatgtaagcttaaaatgcaaagaaaaaggccaggagccctcgattgttttattgttgaggtag

SEQ ID NO: 430680 - DNA, 813 bp, Serratia marcescens
ttgctgcaggagcagcgcgacgacggcagccgccgcagctggagctacgatccggccagcccgtggagcccgctggcggcgctggagcaggcgggcgacagccgctcggcggatatttactggtatcacaccgatctgaacagcgcgccgctggaggtgaccgacgcggcgggcaacctgtgctggtccgggcaatacgacaccttcggcaagctgcagggccagacggtggccggcgcggcgaagcggcagggcgcgcaatatcagcagccgctgcgctacgccgggcaatatcaggacgacgaaagcggcctgcactacaacctgttccgctactacgaacccgaggtggggcgtttcaccacgcaggatccgatagggctgcgcggcgggttgaacctttatcagtatgcgccgaacccgctgatgtgggtggatccgtttgggttgacatgtagccattctgctaagaatcctaagcaggcacatgcggtaattaaagataaatgggggcacgcaatgtctaaaagagatatgcgtgagctacaaaacacagttgatagaattaaattaaacaaaccttattattcaaatgatggaacaacatttagcaatacgcactctattggtaactctaatagccagcgtcttaacactggtagtggaccatataaagaatggactgttaagacaccagatgtaggtgggaatggagcgaggcgtgtggtagttgatacgaagacaggtaaagcttattatactcatgatcattatgattcgtttatagagatcgatcttggagggtggaaataa

SEQ ID NO: 430681 - DNA, 612 bp, Serratia marcescens
atgaaagaagtagctgatggtataagggctgatttagatgaagtgcagtctcttttttcgaatgaagagctattagctgaaaaaatatcttctattagccatgcggaatcaaaggttgtatcgtggtctaaaactaatgcctttagtattattccattttacaatgagttaaccggctttaaaaccggagaaatattgagtaaagagcctaagaacaaaagtaatgcatattgctatttttcaaatgatggccttgtaaataaaatcgacagctataactcaaaaggagttgtggcggatacatcttatgtcattagagatggtgatgaggttcttgaaataagacaggatgtaaagggcaactatttagctataagtagagtttttttaaactctcaagggcagccatctaaagctttttttgcaaatgatgatggcaatttatctggttattattacttttataaagatggtagaatcgatagtatattgacggtaagtaattactctcctttaccatatgttattttatcatgtgtttatgatgatggtaaaattagtgaaatttattttaataacaataagggaaaggttgttatatatcctcgctag

SEQ ID NO: 430682 - DNA, 477 bp, Serratia marcescens
atgatagctaaagaaatgcagagtaagtgggaagacaatcaactgatcggattagatgtaatcattaatgatgtaggtgtcgtaagagaaatagacattgaattcgagatgaattataaatttaaagacacctttaataaggaatataaaatttcattaggtaatgagacaaccttgaatgcattgattgaacagtatgacgaggtgtggtcagagattcaagtgaataacaaggtgcaacttcctgacggtgatttcttgttatgtggtgagggtgaaatgggcaatgaagggtttattgcacgtacagatggaattaatagattgaaatggtttatgtactcaacaacctctaacccttttgttaacgttatagaagctggcaaatgtgtatattttcaatctacgctgggtttctatctctgctttgatataaccaataataacatatctataaaaaatgaaaaaagttggtga

SEQ ID NO: 430683 - DNA, 918 bp, Serratia marcescens
atgatatatagcaaaaagatgattgtgatggcggcgctgctgagcttttccgccgcggccgcgccaggggtggatctcgtcgccaacgaaacgccgatccacacggtgaagagcgccgaagccgtggccaaaatccccgccgatttcaagttcgtggaacccggcacgctgacggtggccatttccctgctgggcagcggcccgccgttcggcctgtacgcccgcgacaataaaacggtgatcggcagcgaggcggacatcgcgcgcttggtggccgacggcttgggattgaaactcaagctggtgcccacctcgtgggaagactggccgctgggggtggcctccggcaaatatgacgccgcagtttacaacatcaccgtaaccaacgaacgcaagaccaaattcgatttcgccacctatcgccaggatacgctggggttctacgtcaaatccgacagtaaaatcacccagatcaacaccgcgccggatatcgccggtaaaaagatcatcgtcgattccggcaccaatcaggaagcggtgctactggcctgggacaaggagaaccgcgccaaggggctggcaccgctgcagccggtgtatgtcaccgacaaggccgcctccacgctggccattcagtccggccgcgccgacgccaccttcggccccaacgtctccggcgcttatcaggcgcggctgaccggcaaaacccggctggtaggcatcgtgcccggcggctggccgaagaccgccaacatcgccgtcacgctgaagaaaggcaatggcctggtggatgcggtgcaggcatcgctcaacagcgccatcgccaacggcagctatctgcaggtgctggatcgctgggcggagagcgacgagaagatcacccattcggagattaacccgccggggctgggggattga

SEQ ID NO: 430684 - DNA, 1149 bp, Serratia marcescens
atggggtgtcttatgcgtgaattaacaacaatggcgagctttacgctgttggccgttgcctgtctgacgatcatggtcggctgtgtgatcgttcctggtttgacagagatcgcaatcaacttgggcacgccttcggcggccagctggctggtcaccgtaccgtcattgggagtggttatatttggcccgctcgccgggcgtttcattgataaggcgggcgcttatacggcgctcagctgggggttgttctcctatggtcttctgggggcgggggggatattgctgcacggctttttaccggtgatgctcgacagattgctgcttggcggcgccacggcgatcgtgatgtcagccggcaccgctctgatttcttccttttactgcgggcaggcgcggttgaaaatgatcgcttcacaaggtgtgtcgatcgaactgggcggcgttatctttctgttcatcggcgggctgctggcgacgctcggttggcgctggccctttctgttatatcttgtcgcctgggccttgctggcgatgcagcgactgtgggtgccccaacgccatcccgattttggcgaatcggacagcgttcagcagggcgaggccatttcaaccggcgccggcagattgaaagcggtctatttttccgcagtgctttccatgatctgtttcttcaccgggatcattgtcatcccgcagcatttccaccatatgaatatcggtgcggcgcaaacagggtatttcctgtcgtttatctcgctggtcgccgtttttgccgccgcgttgatgcccaggctggtggctttaatcagagaaaatgccacgctttgcacggcatttatctgctatgccgcagcacaccttatcttcgccttcgcccacggggcagcggcatttgttgtcggtggcgtcttgatggggtgcgggttcggcttctcggtgccgttggttaaccatatgaccgtagagcaaagccacgctcgcaaccgcggacgaaacctggcgtatttatcgatggcgatattctcgggccagttcttgtcgtcctttatggcgtttattcccggaagctcgtccgccgtttttctgggcgccgccggcgttggcatcgtcacgattctcgcgttgacgcttttccgcaggttaggataa

SEQ ID NO: 430685 - DNA, 1050 bp, Serratia marcescens
atgagtaaagaaatttcacgtcgcaacatcatcaagagcatccctcttctggctggcggagctttgctgtctcaatccctgctgtcttctgccattgcggcaaaatcctccgccgcaggtgcggcggcgcataaaggcgcgtttactgatgcgggcgcatcgctcgataagtcattgatttcctactatcaggtaccgatgcagaaacgtttgaagatcaatgagaaaggcattcagggcaagccttatgccgcgtttttcgacagcaatctggatgcgccgatagacatgatccgcgcgctggaaggtggcccgttggcaaaagaacaccttcttccgccaacgaaagcgggtctgagaatcttattggagcggtttgacgaatttccggtgtcaggttacgccgtcgttgaagatggcgggccctgtgcatatgcgcaaagccgccatctatttccgggcgtaaccacagagatgttcaaatggtggttttgttggcacccgatcgagagcgaacgctactatctgtggttccctcatgcccatatccacaactccgttgtcgatccgaagcgcctggcggatacccgtctgtcctacgctgagcggctgtacgacaacccgaaccacattaccgagtatattggcgataactaccttgacggcgttatccatttcaatacgccggaaagcctcggcgtcgagcgtgaactgctcaaaaagaaccgctttacctttaacgccagcggcattatcaccccctatgatgcgcaatcaacgccgctggtgctgatgattcatctgggccgtgacacgcccgaagggatggaaatgatcaaccgttactggatcggcacgcatgagtcctgggaccgattcgaaagattccctgacggcgggaaacgctcccgtgactacattacaaaagcggggatgacgacagcgtcgctggaggactttgcctatgaaatggcagtccatgatatgacggagttttcttcactcggccgtttcctgccggatatttatgcgcgattcggcaacagctga

SEQ ID NO: 430686 - DNA, 750 bp, Serratia marcescens
atgatgagtaatgacgcggaaaatagcggctcacaggtgattgcccgagccgctacgattctacgggcgctggaaactcaaccgaagggcatgactatctcgcaattatcccgagaaactgagctgccgcgcaccaccgtacaccgtttggtcacctcgcttgaatcgcaacagctgcttatcaccggcagcgccggcgttcaattagggccggcgctcgcccgcctggccgcatccgcgcatacggatgtgatcacccttgcaaggccggcgatggaaacgcttgggcgtcgaacgcgtgaaactgtcgatttgtgtgtctaccgcggcagccacgcggtatcggtgggtcagtttgtttcagatcaggaactgcgcgtcgtgtcagccgttggcactgccttcccgtgccactgtacggcgcatggcaaagccattctggccgagctgtctgacgaaaagatcgcggatctgcttggcggccatccggatgtcagaacggataataccctgagaacgatctcatcggtgcttgatgatatccgggagacgagaattcggcgttacgccatcgatcgcgaagagcacgctcgtggcgtctgcggcgtcggagtgtatctcaatatcggcgtcagcgaactttacgcaatctctatcgcggttccggccatgcgtttcgatgagaaatttgaccatctgctcggttcgctgatgcagtgcaaggccgaaatcgaggcgatgctggcataa

SEQ ID NO: 430687 - DNA, 606 bp, Serratia marcescens; identical to SEQ ID NO: 107131

SEQ ID NO: 430688 - DNA, 2898 bp, Serratia marcescens; identical to SEQ ID NO: 7675

SEQ ID NO: 430689 - DNA, 630 bp, Serratia marcescens
gtgtcatttcgccctcagccggaaccgacccctgaatggctgaaagaagcacagcgctggatggacacagcgaagcattaccagagccagatacaggcatacaaagaccaactggcgacggccacaggtgttcgtgatattgccagctttgttgaccaggccaagagcctgaaagccgacctcgaaaagctacgcaagcccggacaggcactgaatgatttgcttctctccggcggctcctccgggcagttcgacgcgctgtacgagaagtacaaaatattcgatacctgcaacaccgaacaatcggggagttatgccaacgtgtgcaaacagcaggttatcaataaagcaatccagctagaacaaactgacgagatccagaaccaggtaagccagaccctgggggaaatcaacagcctctccaacagagtagcattagccaaagattcgaaagaatctcaagaccttgcaaacagtattcagctaaaatctgtcatgctgaacacgcttactacccaatgggaaatgagtgtgaaagcagcagataagcgcgaaaatgcgcttgaagcggagcgtgttaagcagtggaatcaacaacaattaaatgctccagatataaactttaattaa

SEQ ID NO: 430690 - DNA, 1071 bp, Serratia marcescens
atggctggtattttttcgtcagtagagaaaaatttaattggtggaataaccaacgctaccagcggactaatgatgtcttattcttctatgatgatgggactggcagcagcgtcagtcaccatctacatcatgtggcgaggatatcagacgctggctggtaaactatctacgcctatggaagacacgatgtgggacatcatgcggatggctatcatcctgtcctttgtggctaatttgggtggttatctcgatggcgttatcgacgctgttaatgggttaaaggagggattttctggaggagaaaacatctggcaaatgttagatagtttatggaaaagcgcaagagtattagggaaaactctacatgacatggataattccacttatgtgaaggatgaggggtggacagctcaattttatgtctggcttggcatatttattttaatgcttattacagcttttgtttcaatgatagctgaagtaatgattctattactgagcattacagcccccattttcatattttgcctgatgtatggttttctgcgtccgatgttcaacaactggctacaaaacatttttgcggcgatattaacgatactattttcggctttatctctacgtattgttataaattttttaacgtcgagaatggcagaagccaccgcacaagcgggtaaggcaaatatcgtagaattaggggcacaagtctgtcttgctggtttctgcgccgcaatactggtgtatatctccgctaaagtagctgctgcactggccggggcgagtgctaccgtatccatgcaggggctggccgctgtaggtatcggtgctgctgcttttggtgccgggaagctggccgggggagcagttaaagaaaccaaacgttccgcccaggacaacattcagggctggaaggatgcgaatgcaggtaagcccggcaaacccggaggtgagttaggctataacgcatctaaagcgcggaagtacgcgattgagcagatgatagcccggaacgaagcgcggaggctggcacagtcgagagattccgcggttaagaagttcaacagctag

SEQ ID NO: 430691 - DNA, 138 bp, Serratia marcescens
atgaaacgcttgattgcgctggctttgctgtgcgcgctttctggctgcgcccagaacacgcctccctctgcctttagcggtaagggagaacccgtaaacaccccccaaattatggcggagttaaacagtcatgagtga

SEQ ID NO: 430692 - DNA, 684 bp, Serratia marcescens
atgagtgaacacaaattaattgctgaatcccgcacctttgagcagcaaatgattgagcgggataaacgcgccacaaaagccggttttgttgttggcggcgtgggtctgctgattgcggtactggcgctcgtcgccgtggtcgtaatgttgcccctcaaaagaacagacgtggaactggtttctgtggacaaccataccgggagactggaacacattacccgtgcatcaaaaaccagcatcaccgcaatggaggcttaccagaaatcgatggccgcaaactacgtcaacgtgcgtgagcggtatgtctatccctctttgcaggacgactacgagacggtacagatctacaacgctccccaggtaaacgatgactatctggcgctttacgccggaaaaaacgccccggacaaggtttataagaacggggcgcacaccgtgaaagtggagatcctgtccaaccagatcacagatgcgacagcccctgatagggtcgccaccatccgctacaagaagattatccgccgtctggctgataacagcacccgcaacgaatattgggatgcccggttcacgttccattctgaccctgacaaggaaatgagcgatgcggaacgcgagatcaactacttcggctttaccgtcaccagttggcagaccgaccgcgaaatccggggaggtgaatga

SEQ ID NO: 430693 - DNA, 906 bp, Serratia marcescens
atgaaaaagttaacgtttaccgcactggcactgatgatgtgcggcgcggcatggggtgcggccataccgcaggcaagccgctatgactcccgcgtgcagcaggttatctataacccgcagaatgtcaccgtcattaacaccaaacccggctttatgacaacgctggtctttgataacgatgaggcggtcataagcgccaaacctggctttgatgaggcgtgggaagccacgccggatgcaaaccgggtcaacgttcgcccggtcgcgctcacgcagggagcgcccggagaggatggcaacacaacgcaggtcgtgatccccccgaacagccgggactggcataccaatatgctggttgtcaccagtaagcgcctgtacaacgtcgagctgaacgtcatcgatgataaatcggcacagcaacccgctttccaggtgagctatcgctatccgggcgaagaacgggacaaagcgagccgggaggcgacggccagacagcgcgagtgggagcagaaacagcaacaggccagcgtccagaaagcgctgaactcggcgcagacgccccgcaactggagttacacccaatatccgggcaaaggcagtttcaacattgttcccgattttgcttacgacgatggccgcttcacgttcgtgggcttctccccgtctaagtccattccttccgtcaccaaagagctgaacggcaaagagcatgtggttaacagcagtatccagaagaaaggcgacttcaccgtactggtgattcaggaggtgacgccacgcctggtactgcgttccggtaatgccgttttgggtctggaaaatagcggatttggcaaggtacacgccgccgatggttccaccgtatcccggcaggtggaaagagtggaaaaaccggaatccaattaa

SEQ ID NO: 430694 - DNA, 1251 bp, Serratia marcescens
atgaacgacgaaaacaaagtgcctgtgccggatgaagcgcaggcatccccggcacacgctgaggatgatattgccacgcttgagcgggaagcccgcgctaaaagggaggccgagcttctcaatgcgcaggacgacgaagagaaagacccggtacaacccgccgttaacaagctgaaaaagcgcaaacggggcaaagcaaccgcctttcttgccattgtcgcggtcgcgcttatcttcctggcatggggtggtaactgggtttatcgcaatatcctgtggcagcctacggaagagaagaaacaggacacagccccgcagacgaacaaaaccgattaccggcagcgtaacgatctcggtatgtccaccgatacagccgaagaagagccagagcgacaggataacggccagagcagcacggggggaacagggcaggcggctccggccgccccgccagaactcaacaaagccagcttccttattcgccgtgatagttcagccaccacacagaaccaggtaaaaacccggcagcaggaaatgacgctgacatcggcaacgaccaccggacaacaggacagcagcgcggccacaaataccgccgcaccgtcgccgggacaaagccccgcaccagtgcgccgcataccctataaccctgacctgtacatcccggaaaatacctcgatcccctgctcactggatcgccgctttgtatctgaccgggcggggaaacttcgctgcacggtcactactgacatctggagcgccagcggcaacacgaagctgatagagaaaggcaccaccgcatcattactttaccgcgccatagcggaagaaggtatgaagcacgggcaagggcgggcattcatcattgcgacgaagctacgcacccgccagccgccatatctcgatatcccgttggttgataccagcgcggcgggcgagctgggcgaggctggcgttgatggctggatagattcgcacttctgggaacggttcggcggcgcgttaatggtcggcatgatccccgatattggcgcatgggcatccaacagcgcgggtaaaaaagaccgcaatacggactatacggaaaacagtcgccaggctatggcagatatggcgcgtaccacgctggagaacagcatcaatattcccccaacgctccataagaaccacggcgagatcatcaacctgatcacaggcgaggatattgatttttccaacatctatacactgaggttgaaaaatgaccgctaa

SEQ ID NO: 430695 - DNA, 1026 bp, Serratia marcescens
atgaccgctaagaatatttccctcgaccgctataaacagcgtttctttggcgactttctggagcttcccggcctgacggaaatcgccgtcaaccgtccaggcgaactgtacacaaaaatcaacggcgtgtgggaacagcacgccgttcctttgagctatgaggattgctacaactttgcccggtgcctggcaaagcaccacggcgacaatatcgaagatattaagccggggctgtcagccacgctggaatctggcgaacggtgccaggtgattgttcccccggcctgtgagcgcgatacggtgtctatcaccatccgtaagccatcgaaggtacaaatcccgcatcagtcatatatcgatgcgggattttataaccgggtaacaggcgaggaaaaaacggagacgcacgacgaggaattaattgcattgtacaatacaaaaaatattcctctgtttatggagaaatgcgtcgagtacggtaaaactctcgcggtcgccggggaaacaagtaccgggaaaaccacctatatgaaaatgttgatagggtatattcctgtacatcttcggatatcaaccattgaggacaacccggaaatcacgttctttatccataaaaactacgtccatcttttttatccgtcagaatcatcagatgaaaaaggttctatcgttaccccggcgagccttttacgctggaattaccgtatgaaccctgaccgcattttattaacagaggttcgcggtgcggaagcctgggacttccttaaaataacaggttccggccatgaagggagtatgacctccattcatgcaggatcagcgaaagaagctattgatgggtttattacccgttgctatgaaaatccacagtgcgcccagctcccctatacatttatgttacgtaaggttctggatagcctggacgtgattgtgagcattgatttagacggaaatattcgccgtatgaatgacatctatttccgtccaattcatcgaaaccagtattttgaggaaatgaaagcatga

SEQ ID NO: 430696 - DNA, 306 bp, Serratia marcescens
atgataaacgaagatttattcattaagaatatacactcaaaaaatcaggacagaatatctgtagccctagtatatgacacgttatcaaaagaagcccaaagaggttgtgggctgtattacgaaatatacgaaagctgttttatcggtcttttgcgcgatcatctttcagaacttaatgaggttgacgcaaacaaattaagacgctatgccgaaagcaaaggcacaaaaattgatgatgcgtcctacagtgaagcgctggaagctgaaagggagtgcagggctgaaatataccgcgagcagatgtaa

SEQ ID NO: 430697 - DNA, 1737 bp, Serratia marcescens
atgggttcccacctgatgcaaaggctgaatgcctttgccgatgcattttccttttttcttttatggctgcaaaacagccctgtaatattatccctgctcgcaggtcttacattaccttttatattccaccttccccgcgaggaaagacagaacgccccgttctggttaaagtcggtggcgtgtgtgtcaattttcttttttatattcggcaccatatcaccgctaactattcaggggttgagctacttttttaagtcactcgacaacaacatactgtttagagttccgctatggattatgaccataatatttacggtggcaggattaatatttcatattgcagcccgacgacttttagcaggagaaattgacaatctaaaacatcgaatgattaagaaaagcaagctggagagaaataccagaacggatgtacgcaaagtaaaagagctattacccgacagcatagaatacaatccactcgattacattgatttaaagaaaggtgtttttattggcttaaacaaagatgaccaaccgcaatacataaccataaaagaatttaaaacccaacacgcagcaattatcggtacaacaggttccgggaaaggcgtaactgcgaccattctactttatcaggctattcttttaggtgaggctgtttttgtagaagatccaaaagatgatgaatgggcaccacatgtacttagggaagcatgtaaaaaagcaggcaagaaattcacactcataaatttaaacaagctaaatttccagcttgatttactggctgatatctctcatgaacaactggaggaattatttaacgctggctttagtctggctaagaaaggggaggcttcagatttttatcgtatatctgaccgtcgcgcagccagaaatacatctgcaatttatgaaaaaggaatgacgcttcgtgatttatttaacactgactttgttcagtcattacgtgaagatgttcccgcattttgtggtgagctggaagaaattgctttagttaactcaatcaatgccaccaaaggattttctttaaaagaggtttttgatgaaggtggttgttgctacattattggttcaacgcgcaatcaaaagataatttccgcacaaagaatgattctgactcggttgatacaaatagcagagaccagggacagaataaacagcaccccgcgtaccgttgctattttcctcgacgagttgaaatatcatctttctcgccctgctcttgaaggacttggaacggcacgagataaaggcgtgcatatattcatggcttttcaggcgatagacgatctgcgtgactgcccgtctgatttaaatggcgattcagttattggcgctatcattgaaaacgccaaattcaaattaatttacaaaatccaaaaccccgaaacagcagagtgggcggcaaaaatgacaggctctatcttggtcgatgatgaaatgaggaaagtacggactgatttgtcattaacggaaaaagtggatacagaccgaatgataagacaggcagaaagttactacgttgacagtaatatgtttttaaatctccctgaaaaagttggttttgtatttacgtcaaccgaactaccaagagctacaaagatgtttcaggttcaggtcaaaaaagaaaacatcgaacttctttcatttgagtataaacaagccacactggaaaaaaatgaaagccaggaacataagccatcaatcaatctgtga

SEQ ID NO: 430698 - DNA, 756 bp, Serratia marcescens
atgcttattcataacgttgcagaaaggaaagaagccgcaaacagaaaaatgcttgcattgctgacattccttaaagaagaaacatactccgattttaaaacgctgaaaaaagttgttgggttcaagggtaaaagtcaccgtccaacgtatgcgctactgaataaggcggttgcattggggtttctgataaaacatgaatacccggtaatagccggaaaaaaatcactatgggggatcaccatgcaaggactggcgatggtggttaaacccgatgataaagtattccccggttattttgagccggggaaactcaaatactggacactggaacaccggctcctgaatcatcgggtcagaattgcactggaagagaaaggcgggcaaggctggcttaatggtgatcggggggagtttattgcgcgttatcctggcgttcgccatcgtcctgacgggattatcacgttagatagcggcgcaatcgtcgccgtcgaaactgagcgctcaatgaaaacccgcgcacgctatatcaacatcattaacagccatctggcggccagcgatgccggacgctggcactacgcgatgtatgtcatgccggatgacaaaaccaaaacatcgttaatccggctgtttgactccatcaaaacggtaatgaggaacaacgttccggtgccgttcgacgcgaaaaaccgcgaaatgtttcttttccgcaccattgatgaactggagcaagcagccgccagcggcggccagtga

SEQ ID NO: 430699 - DNA, 342 bp, Serratia marcescens; identical to SEQ ID NO: 86488

SEQ ID NO: 430700 - DNA, 234 bp, Serratia marcescens
atggcgaacgtcccagcaaaaccgcgcaataccaaaggtgagccgccaagtcaggcggatacggaacacggctttaatcctacccggaaaagtgctgatggccgtaaggcacagcttaacttatacattgatatggagctgaaacgtgagttccgctccattgctgcggccaacgatatgaaacatggggagctcttcgaggcgtaccaggaattctggaaaaaacatcattaa

SEQ ID NO: 430701 - DNA, 648 bp, Serratia marcescens; identical to SEQ ID NO: 143701

SEQ ID NO: 430702 - DNA, 681 bp, Serratia marcescens; identical to SEQ ID NO: 105190

SEQ ID NO: 430703 - DNA, 396 bp, Serratia marcescens; identical to SEQ ID NO: 105189

SEQ ID NO: 430704 - DNA, 480 bp, Serratia marcescens; identical to SEQ ID NO: 105188

SEQ ID NO: 430705 - DNA, 636 bp, Serratia marcescens
atggtattgtttatgtgtctattaaatcgattttttgttataacagacacctgttgtccgatatttgatttaggatacatttttatgcgcctttttggttacgcacgggtatcaactagtcagcagtcgctcgatattcagatcagtgcgctcaaagaagcaggagtgaaagcaaatcgtatctttactgataaggcatccggcagttcggttgatcgtccggggcttgatctgctgcgtatgaaggtggaggatggtgacgccattctggtgaagaagctcgaccgtcttggccgtgacactgccgatatgatccagttaattaaagcattcgacgctcagggcgtagctgtccggtttatcgatgacggaatcagtactgatggtgacatgggaaaaatggtggtcactattctgtctgctgtagctcaagccgaacgtcaaagaatattagaacgaacaaatgaaggtcgccaagaagcaatggcaaagggagttgtgttcggtagaaaaagaaaaataaacagaggtgcgatattaaatatgtggaaacaaggtttaggagcctcacacatatcaaaaacaatgaatattgctcgttcaacagtatataaagtaataaatgaaagcaactaa

SEQ ID NO: 430706 - DNA, 2097 bp, Serratia marcescens; identical to SEQ ID NO: 80555

SEQ ID NO: 430707 - DNA, 783 bp, Serratia marcescens; identical to SEQ ID NO: 158516

SEQ ID NO: 430708 - DNA, 1026 bp, Serratia marcescens; identical to SEQ ID NO: 158515

SEQ ID NO: 430709 - DNA, 282 bp, Serratia marcescens
atgaaactggtaagccataaagaactgcataacgagtggatgcaggacgatgaatatcgcgctgcatggcaggaagaagaacgcaaggagaagctcagagagctacttgcggaatggcgtaaacatgacaacctgacaaaagcgcaggttgctgaacgcatgggggttacacctccggttatttcccgcctggaaaacaacatcaccaaagccagcatcgacacactgacccgctacgctcacgcctgcggcatcaaaaaacctgtcattgccctgtactga

SEQ ID NO: 430710 - DNA, 330 bp, Serratia marcescens
atgtttagcgttgtttatcacccggaagccaaggaagaagccacagcattacccgtaaaaatcagggtgaagtttgaccgtctcataggcaaactggagtatgacgcccgattactgcgggagccggacacgaagcccctgggcgacggactttttgagatccgcacgatggggacggacatagccaggggaatatgggtataccacaaaggcaataccatcatcatgctccgggttttcatcaagaagtcacagaaaacgccagcgaaagaaatcgatctcgccaaaaagcggttagcggaggtacttaatgaaactggtaagccataa

SEQ ID NO: 430711 - DNA, 216 bp, Serratia marcescens
atgccgaaaagcgtaccaggcaaatcaagcacggctgttatttacatcgggcaaaagcgctatcaggagttagcaaagcaagcccgtgaaatcagctacctgtctgaatcaaatatccggccaagcacctttctccagttcctgatggatgaatttggtgagcaagcccgtactgagctgctccggcagctactcgcagagaaacagaaggagtaa

SEQ ID NO: 430712 - DNA, 219 bp, Serratia marcescens
atgagaaaacccacctataacgtgtacgtcacgcaggaaacccagcccgacgagaacggcgaaaaaaatacgtactggacgaaagtcggtgcggccttcgcacacaacggcaagccgggtctgaacatcatgattacgcccggtatttccgtttccggcaagctggtactcctcgaacctaaagatgacgcagcgccgcaggctgcttctgtcagttaa

SEQ ID NO: 430713 - DNA, 711 bp, Serratia marcescens
atgctttccaccactgcttttctggcggtggctatgcagtgtgccgccaccgttcacccttctacgtccctcgatgtggcaagggtggagtccggttataacccctatgccatcgctgagatcgtgcctaagcccgaacgaaaacccggcgataaaggctttattactcacatgccaaaaagtaaggaggatgcagtcagcatcaccaatcagattgaggcgaaaggtcgccgctactctgttggcctgatgcagataaccagcaccaattttaagcgttacggcgtcaccgctactgaccttttcaatccctgcatcaatctttccgtctacgaaaaaatcatcaccgactgctaccagcggggcggcaccctgaaaagggcgttgagctgctactactccggcaatttcagtaccggacaacagcaggaacccgctttttcaaagacgagctatgtacagcggattggctattccccggcggatacccgctatgccgttcccggcacccgcgatgatatcgcaaccccagcggccaccctgaaagctacgccagtggatgcgccgacgcgcccgcgcgtggtgtggccgggtgcgatcgttcgcggcgttccggctcaactccgccagaaaaaggcggccaccgtctattaccccgcgcaggttgtgcgcggaaatcgcgatgtaacaacgaaagaggaagaaaaatga

SEQ ID NO: 430714 - DNA, 306 bp, Serratia marcescens
atgaaacttttcagtaaggtaaaggaattaatcagccgtgcatctgcttatgttctggctccggccatgagcgtttttgctgccagtccggcgttcgctgatggttttagccgggcaaataccatcatggaaaaagtatcaacaggcctgcacggtctggcggccatcacgatcaccgtggccgtgatctggattggctataagaccctgtggaaaggcgaaagcctgtcacagtgcggctacatcatcattggcggcattttaattggcggaggcagtgaaatcggcgctctgctgatgagctaa

SEQ ID NO: 430715 - DNA, 1167 bp, Serratia marcescens
atggcaaagctgctcaaggcaatgaaacgcccggcggcgctgtggggggtgcctattgtgcccctgctggctgtcacgggtgtaaccatcatcgttgctatctggacttccgtcgctctcctgttcttacttcctgtgcaatttctggtgatgaagtcccttaccagaaatgaaccaatgcggttcaatctgattgccgtatggctgagagcgaagggaaagccggtagcaaaccgtttatttggcgcaacaacatttatgcccgttgagcatgatgatgttgatatcaaggagtttctcgacgccatgaaactaaatcagtgtgccaccgtcaagaagtacatcccgtactcatcgcacattcatcagcatgtggttcgctcgcctaaaagcgatctgtactgcacctgggaattgatggggacgccgttcgactgcgagtctgacgaatcgctccagttcgggacgaaccagttacacgggctaatccgctcattcgaaggtatgcccgttactttctatatccataacgaccgtaatacgtttaccgacaatcttcataaagattccggcaacccgtatgcagatgaagttagccgtctttactacgcttctgtcggtctgttccggcgcaaccgcctgttcctgacggtctgctatcgcccgtttgtcagccttgaaaaagcagaacgcaaacggatgaaagacagccagaaactaaaggagctagacggtgctttgctggaaatgctggaaataaaaagcacgctcgataccgcgctgtcgcgctatggtgcgcggcctctcggtacgtttaccgaagaaaacgcggtgttttcgtcgcaactggctttctatgaatatctgttaacgcaccagtggcgaaaggtgcgcgtcacccgcaccccggcctatgacgtgatgggagcggcggcgttgttcttttcggctgaatccgggcagataaaccacgccaacggtacgcaatatttccgggggatggaggttaaagagttctccgaagagaccgccacggggatgatggactcccttctttacgccccctgcgattacgtgatcacgcagtcctatacctgcatgtcacgcgaggaagcgaagaaagccattaaggggtcggttccggctgagggcgaaatgacaccctaa

SEQ ID NO: 430716 - DNA, 606 bp, Serratia marcescens; identical to SEQ ID NO: 107131

SEQ ID NO: 430717 - DNA, 2898 bp, Serratia marcescens; identical to SEQ ID NO: 7675

SEQ ID NO: 430718 - DNA, 171 bp, Serratia marcescens
gtggagcacagcgataacggactgtttatcaaacgggagcgttttgaagttctggcgattctgcgtgaaatttgcaaacaacgcacgccgctgcgcgtagaaaatcagcagcaccggtttcaaagtctgttattggggtcggttccggctgagggcgaaatgacaccctaa

SEQ ID NO: 430719 - DNA, 783 bp, Serratia marcescens
atgcctcactcgtttatcccgccgttattgtccgccgacgaaccctctgccgccgccgttgaaatcccgcgcggcaaagcgccctttttgctgctgtgcgatcacgccggcaaggcgatcccgcaatccctcggcgacctcggtttgccgccgggggagatcgaacgccacatcggctgggacatcggcgcgctgagcgtgtcgcgccatctgagccgccaattggacgccacgctgatccaccagcgttactcacggctggtgatcgactgcaaccgggcgcccggcatcgccagctcgatcccgcatttgtccgagctgacgccgatccccggcaatatcggtatcgacgccgagcacgcgctggcgcgcgagcgcgaggtgtttttgccgtatcaccacgccatcgacgatcatctggggcaacgccaactgcgcgaactgccgacggcggtgatcgccatgcacagtttcacgccggtgttcaaaggggcatcgcgcccctggcaggtggggctgctgtttaatcgttacccggaatttgcccatctgctggccgagctgctgcgcgaagagggagatttgcaggtggggatcaacgaaccctatgcgatgaccgatgccaccgactacacgttgccggtccatgcggaacgccgcggtttgccttatgtcggcatcgaaatccgccaggatctgatcgccgacgaacgtgggcgacaggcgtgggcgaaacgtttcgcacgcctgctgccgcaggcctggcagcgctggcaaatttga

SEQ ID NO: 430720 - DNA, 246 bp, Serratia marcescens; identical to SEQ ID NO: 117525

SEQ ID NO: 430721 - DNA, 1284 bp, Serratia marcescens; identical to SEQ ID NO: 117524

SEQ ID NO: 430722 - DNA, 993 bp, Serratia marcescens; identical to SEQ ID NO: 117523

SEQ ID NO: 430723 - DNA, 705 bp, Serratia marcescens; identical to SEQ ID NO: 117522

SEQ ID NO: 430724 - DNA, 1368 bp, Serratia marcescens; identical to SEQ ID NO: 117521

SEQ ID NO: 430725 - DNA, 327 bp, Serratia marcescens; identical to SEQ ID NO: 117520

SEQ ID NO: 430726 - DNA, 744 bp, Serratia marcescens; identical to SEQ ID NO: 117519

SEQ ID NO: 430727 - DNA, 2451 bp, Serratia marcescens
atgctgaaccttgccgaatatcgtcagcgcccggccttgcttgccgactggctgccctgggccgggctggtcgcgccgggcgttgtgctgaacaaagatggttcgtttcaacgcacgttccagtttcgcggccccgacttggacagtgcgacacagggcgagctgattgccacgtcggcgcggcagaacaacgcgcttcgccgtaccgggtctggctgggccttctatatcgaggccgagcggatgcgggcatcgagctatccgcaatcctcctttcccgaaccactgtcctggctggtggatgaggagcgacgcgcggcgttcgaggagtcggatggccatttcgagagcgtctatcacttcacgttgcaacacctaccgccgcaagagtctcgcgcccgtgcggctgggatgctgtacgagaaccggcccactgagggtgtggactggcgtggtcggcttgattccttcgtggcagagaccgatcgcgtgttcgacctgctcgatggtgtgatgccggagattgcctggctggacgatagccagacgctgacctacctgcatgccacagtctccacccggcgctatcgcgtcggcgtgcccgacgtgccgttccatatcgacgcactgcttgccgatgccgcgctggtcggcggcctggcgcccatgctgggcgatcagcacctgcgcgtggtgtcggtacgaggcttcccgacctcgacctggccggggatcttggacgacctcaaccgcctgggctttgcgtatcgctggagtacgcgcttcctgtgcctggacaaagccgaggcggaacgggaattggggcgcttgcggcgccaatggttcgccaagcgcaagaacgtcatcgcgctgctgcgcgaaacgatctttcagcaggaaagcccgctggtcgataccgatgccagcaacaaggccgccgacgccgatgccgccttgcaggagctgggcagcgatcaagtcgccttcggctacctcaccgccacggtgacggtgctcgacgccgacccggccgtggccgacgagaagctgcgcatggtggagcgcgtcatccagggccggggtttcgtgaccatccccgaaaccctcaacgcagtcgatgcctggctgtcgtccgtccccggcaacgcatacgcgaacgtgcgtcagcccatcgtttcgacgctgaacctggcgcacatgatgccgatgtcagcggtatgggctgggccggagaagaacgaacacctcgatggcccgccgctgatcgtcacccgcaccgatggcgcgacgccgttccggctggtgacgcacatcggcgacgtggggcacacccttgtcgccgggccgaccggcatgggcaagtcggtgctgctcgccatcttggccatgcagttccggcgctacttcggctcgcggatcttcgccttcgacatgggccgctcgatgcgcgccaccatcttcggccttggcggtgagcactatgacctcggcgccgatggcggcatcgccttccagccactcgcgcgaattgcccacgagggctaccgcacctgggccgccgaatgggtggagggccggctgctgcacgaaggcgtgacggtcggcccggacgagaaggctgccatctggtcggcgctgagaagccttgccggtgcgccggtggagcagcgcaccatgaccggcttgtcggtgttattgcagtttaacgcgctgcgccaagcgctcgcgccctatgtgctgggcggcgcacacggcaagctgctggacgctgaccacgaccggctgggcatggccgacgtgcagggcttcgagatggaagaactgatgcacagcccggccgccgtgcaagcggtgctgcgctacctgttcgcccgcttcgacgaacgtttcgacggcgcgcccacgctgttgatcctcgatgaagcgtggctgttcctcaatgagccgtccttcgcggcccgcatccggcaatggctcaagacgctcagaaaaaagaacgtcagcgtcatcttcgccacgcagtcgctggccgacatcaaggactcgaccatcgcgccagccatcatcgaaagctgcgcgagcaggatcttcttacctaacccgcaggccaccgagccgcagattcgcacgatctacgaaggcttcggcttgagcagccgccagattgagatcgtggcgaccgcccagcccaagcgcgattactactaccagtcgcgcctcggcaatcgcctgttcgacctcgacctggggcctgtcgcgctcgcattcgcgagcgcatccacccctcaagaccaacgcgacattgaccgcgtgctgacgcaggccggcgctcccggcttcgccggcgcgtggctgcgccatcgcggcctcggctgggccgccgacctgctgccgtccgctccggcggcagcttcctttctcgcttctcaaccgctggaggtttcgccatga

SEQ ID NO: 430728 - DNA, 270 bp, Serratia marcescens
atgagtacggccagcgaccttccaggcttcgaggtgccgctgcatcgctcgctgaccgagccaatcctgctgggcggcgcgccgcgcaccgtggcaattgccaacggcacgctggccgccgccgtcgggctgggcctgcaactgtggattcccggcgtggtgctctggatcgtcggccactcgctggccgtatggggtgcgcgcgtcgatccgcagttcatgcaggtcttcgcgcggcatatcaaacaccgcccgcttctggacgtgtga

SEQ ID NO: 430729 - DNA, 387 bp, Serratia marcescens
atgacgcacgttgattctttccgcttttccgtaaatccgcttcctcgcctgtccggcctggcgcggctgcgcagcctcacccgccctgcgaggcaggggctgctgctggccgcgctgctgctgttgctggccggaacggcgcaagccgccggttcctcgatgccgtgggaggggcccttgcagtcgattctggagtcgatccaggggccggtggcacgcatcgtcgcggtcatcatcatcatcgccacgggcctggcgctggccttcggcgacaccagcggcggctttcgcaagctgatccagatcgtgttcgggttgagcatcgcgttcgccgcttcctcgttcttcctgtcgttcttctcgttctccggcggggccgtcgtatga

SEQ ID NO: 430730 - DNA, 1080 bp, Serratia marcescens
atgagtgccgttccacagatccagcccgaacctcgctcatccgcagcagcgtcccaggatcgccgcatccagatgctgcgcactgcaatggggccgctgatcgccgctgcgctcgaagacccggatgtggtggaaatcatgctcaaccccgatcgcaccctgtgggtggatcggctgtcgtcgggtcgctcgccgctgggcgtggagatgcccgaggccgatggtgaacgcatcatccgcctggtcgccgcgcatgtcggcgcggaggtgcatcgcggccagccgctcttgaccgccgagttgccggaaaccggcgagcgtttcgagggcatcctgcctccggccgccccggggccagccttcgcgctacgcaagcgggccgtgagcatcatcggcctggatcgctacgtggccgacggcatcctgaccgccgggcaggccgagttcctgcgccgcgccgtgcgcgagcggcagaacatcctaatcgccggcggcaccagcaccggcaagaccacgctggcgaacgcgctgctggccgagatcgccgccacaggcgaccgcgtgctggtgctcgaagacaccatcgagctgcaatgcgcggcccgcgaccatgtgccgctgcgcacccgcgccggcgtcgtcaccatgaccgagctggtgcgggccacgatgcgcctgcggcctgaccgcgtgatcgtcggcgaggtgcgcggcggcgaagccctcgacctcatcaaagtgtggggcaccggccaccccggcggcattgcgaccatccatgccggctccgcgctgggcgcgttgctgcgcctcgaacagttgattctcgaagtcgctgtgaatccgccgcgggcgctgatcgccgaggcggtcaacgtcgtcatcaacatcgccggacgcggccgcaagcgccacgtcgaaaccatcgcccgtgtcgtcggcttcgacggcaccggctatcgcctggcggacgcactggaaacgccgtttcccgagctgacgccggttcctctcgcagccgacgccgctgcacattcccgtcccccaaccaacttggagaactgccatgacgcacgttga

SEQ ID NO: 430731 - DNA, 477 bp, Serratia marcescens; identical to SEQ ID NO: 117514

SEQ ID NO: 430732 - DNA, 1998 bp, Serratia marcescens
atgcaagctcagggcgtactgttcgggcagatcgccgccgtattcggcatcgtgatcgccggcgtgtggggtgcaacgcaatggacagccgccgccctgggctatcaactacgccttggctcgccatggttcgacttctttggaaccccggtctatcacccttggcggctgttcgagtggtggttcttctttgatgcctacgcgccgcacgtcttcgatatcggcggggccatcgcgggtggaagtggtctggtggccgtggtggtcgccatcgccatgtcggtgtggcgctcgcggcaagcgcgccttgtcaccacctacggttcggcacgctgggccgatgcggaagacatacgcaaagctgggctgatccagcccgacggggttttcctcgggctgcatcgcggccagtacctccgccatgaaggcccggaacacgtcctgaccttcgcaccaacgcgctcgggcaagggtgtgggcctggtcgttcccaccttgttgagttggcccgcatccgtcgtcgttcacgacatcaaaggcgagaactggacgctcaccgcaggctggcgttcgcggtttagccactgcctcctgttcaaccccacggatgcgcagtcggcagcctacaacccgctgctggaagtgaggcgcggcgcgcacgaagtgcgcgacgtgcagaacgtggccgacattcttgtcgatcccgatggcgcactcgaacgccggaaccattgggaaaagaccagtcacgcgctgttggtcggcgccatcctgcatgtgctgtacgcaggcgaggacaagacgctgcgcggcgtcgccaacttcctcagcgacccggcgtgtccgttcgagctgacgctgcaccggatgatgacgacgaagcacctgggcgatgcgcctcacccggttgtcgcatccgctgcccgcgaagtgcttaacaagtcggacaacgagcgatcgggcgtgctctccaccgccatgtcgtttctcggcctgtaccgcgacccgaccgtggccgaagtcacatcgcgctgcgattggcgcatcgccgacctgatttccgccgagcacccggtatcgctctatctggtggtgccgccctccgacataagccgcaccaagccgctgatccggctcatcttgaaccagatcgggcggcggctgaccgaatcgctcgacggcagcgatggcatcgcgcgccggcacaagctgctgctgatgctggacgagtttccggcgctgggccgcctcgattttttcgagtccgcgcttgccttcatggccgggtacggcatccgcagctttctcatcgctcaaagcctgaaccagatcgacaaggcgtatgggcagaaccattccatcctcgacaactgccatgtccgggtgactttcgccaccaacgacgaaaggacggcgaaaaggatttcagaaaccctcggcaccgccaccgagcttcgcgcgcagcgcaactacgccggccaccggctcgctccgtggctggggcacctgatggtgtcgcgtcaggaaactgcacggccgctgttgacgcccggcgaggtgatgcagcttccacctgatgacgccgtggtcatggtgtccagcgtcgccccgatccgcgcgaagaagctgcgctactacgccgacgccaatttcaagaatcgcgtcctgccaccgcccgcgctcgtagccgggaggtacgccgacgcgccgccagcccgccccgacgactggagcggcttggcgatcccggccgtacctgcggcgccggcctcggcatccgccgatggcctgggcggcaccgatgacggcggcccacgccgccagcccgaactctccgaaaccgtcgcctacgaccccgagccggacgcacatgcgaacgacctggcgctgctcgatgacgacgacctggcgctgccgcttcccggccagctcgacccggccatgcagcgcacggcccggctggcttccctcgaccccaacgacggaatcgacctatga

SEQ ID NO: 430733 - DNA, 906 bp, Serratia marcescens; identical to SEQ ID NO: 117512

SEQ ID NO: 430734 - DNA, 531 bp, Serratia marcescens; identical to SEQ ID NO: 117511

SEQ ID NO: 430735 - DNA, 507 bp, Serratia marcescens; identical to SEQ ID NO: 117510

SEQ ID NO: 430736 - DNA, 318 bp, Serratia marcescens; identical to SEQ ID NO: 117509

SEQ ID NO: 430737 - DNA, 264 bp, Serratia marcescens; identical to SEQ ID NO: 117508

SEQ ID NO: 430738 - DNA, 906 bp, Serratia marcescens; identical to SEQ ID NO: 117507

SEQ ID NO: 430739 - DNA, 1404 bp, Serratia marcescens; identical to SEQ ID NO: 117506

SEQ ID NO: 430740 - DNA, 489 bp, Serratia marcescens
atgccgcctcgcgcgaaaacaaagttgccccccccgtccaccgcccatagcagcaccgatgcgcagcccgttctccagcaaggagcccagctaactcgcgagcgcatcctgcaggccgctcgcgaactggtgctggaggaaggcgccagtcgtctgacgctggacgccgtcgtcgtgcgggccgggttgagcaaaggggcgtttctctatcatttcaagaccaaacgcgatttgttcgtgacactgatcgacgagatgatccgggcgttcgacgcggtacaagccaatcacgagcgcaggtttgccggagatttgtggctcgcgctcaagcggattccgatcagcgcggcctctgcagcctgggcaggaatcgggctacttggaaacttgggtatcggcgccctcttgctaggcgatctcgcatcagtgacgcgctggtctggcaccgccctcatcgcagcaggcattgcctgtcttagtttcgtttga

SEQ ID NO: 430741 - DNA, 621 bp, Serratia marcescens; identical to SEQ ID NO: 117502

SEQ ID NO: 430742 - DNA, 1158 bp, Serratia marcescens; identical to SEQ ID NO: 117501

SEQ ID NO: 430743 - DNA, 822 bp, Serratia marcescens; identical to SEQ ID NO: 117500

SEQ ID NO: 430744 - DNA, 930 bp, Serratia marcescens; identical to SEQ ID NO: 117499

SEQ ID NO: 430745 - DNA, 702 bp, Serratia marcescens; identical to SEQ ID NO: 117498

SEQ ID NO: 430746 - DNA, 1995 bp, Serratia marcescens
atgaccgaccgccgcgacgacgatttccgggtgcgccctggcgcgccgaagaaccgaggcaaaggccagggccagagcttcgtttccaaggtgctcaagcgggctggcaaagccagcggcggcaagtcggcggtgcgccgtcctgtcgctggcgggagcggccagcacgcgggccagcggcccggctcacggcttgggcgcggccatacggcagcgcgcttcgcaggtgcaaagctgacacccatgtcacggcgcgtgaccgtcaagacgctgctggtcaaccagcgcaacgccagcccgcagtcgctcgccaagcacctgcgctacatcgagcgcgacggtgccggccgggacggcgagccgggccgtgcctacgggccgcagaccgaccatgccgacctcgatgccttcaaggaacgctgccaggacgaccgacaccatttccgtttcattgtttccccggaagacggagccgagctggacgacctgcgcacctacacccggcacctgatgaaccgcatggaggccgacctgggaacgcggctggattgggtggcggtcgatcactggaacaccgacaacccgcacacgcacctgatcgtgcgcggacgcgacgataccggcagagacctcgtcatcgcgggcgactacatcgcccacggcttccgccatcgcgccgccgagctggcgacggaatggctggggccgcgcaccgaactggagatccagcagacctggcagcgcgaggtgaagcaagagcggtggacgagcctcgaccgcacgttgcagcgcgaggtcggcgaggatgaccgggtgcggatcgaacgcttcaacgaaccgacgttgcaacgccagcgcctgctactgatcggccggctgcaacgcttgcagcggctcggcctggccgacgaggtgcagcccagcacctgggccatccatgccgacgctgagaagaccctgcgtgccctgggcgagcgtggcgacatcatccgcaccatgcagcgcgccatgagcggccagccgcgcgagctggcggtattcgagccggccgacgacggccgtaccctcgtcggccgcgtggccgccaaggggctggccgacgagctgcacgaccgcggctatctggtcatcgacggcgtggacggcaaggcccactacgtcgctttgaacgcccgcgacgaactggcgagctaccccaccggcgcggtggtggaggtgcgtggttccgccgaggtacgggcggcggacaagaacatcgccgcactggcgagcgatggcctgtaccgtaccgatcatcacctggcgatcgagcaaggccgagccaagcccggccgcgacccgcaggaagtcgtcgcggcccacgtccgacggctggaagccctgcgccgggccggcatcgtggagcgcgtggcggaagggctatggaaagtgccggacgacctatccgagcgtgggcgccagtacgatgcgcagcgactgggcggcgtggccgtggacctgaaatctcacctgccgatcgagcggcaggcccgcgtgatcggcgccacctggctcgaccagcaactgatcggcggcggccggggattgggcgacctgggctttggtggcgatgccaagcaagccttgcagcagcgcgccgacttcctcgaagaacaggggctggcccagcggcgtgggcagcgggtgattctctcccggaatctgctggaaacgctgcgcaatcgggagctggcgcaggccgcccagcacattgccgccgatagtgggttggagcatcggcacgtcacagacgggcagcgcgtagccggcatctaccggcgctcggtcattctcgccagcggtcgctatgcgctgctcgatgacggcatggggttcagtctggtgccttggcggccgataatcgagccacgactggggcagcagatcgccgcgactgtacgcggcggcggtgtgtcatgggaggttggacggcaacgaggtcctgggattggatag

SEQ ID NO: 430747 - DNA, 588 bp, Serratia marcescens; identical to SEQ ID NO: 117496

SEQ ID NO: 430748 - DNA, 558 bp, Serratia marcescens; identical to SEQ ID NO: 117495

SEQ ID NO: 430749 - DNA, 264 bp, Serratia marcescens; identical to SEQ ID NO: 117494

SEQ ID NO: 430750 - DNA, 639 bp, Serratia marcescens; identical to SEQ ID NO: 117493

SEQ ID NO: 430751 - DNA, 822 bp, Serratia marcescens
ttgccgcagcgcgaacagctcgatctgttccgagcgctgccgggcgacatggcgccacgcgattcccaggacttgatggcctttccgttcttctcgcttgccaagtcgcggcgcacggcgccgatcgacttccgcagcgggaacgtcaccattcgcgtggaaggcacgcaggagcacggcatcgcaacgatatgggatgccgacgtgctgatatgggccgcctcgcagatcgtggaggcgcgcgacgcgggcctgcgcccgtcgcgctggatacgcgccacgccttacgagattttgcgcttcatcgggcgcggcacgtccctcaacgactaccagcgcctgaaggccgccctcgaccggctgcaatcgaccacggtggccacgtccatccgcgaaaccacgggaaggcgcttgcatcgcttctcgtggatcaacgagtggaaggaactcgccgacgccagcggcaccccgctgggcatcgagctgatcttgccggactggttctatgccggcgtgctcgacgccgccctggtgctgaccatcgacccggcctatttccgcttgaaaggcggtatcgaacgctggctgtaccgcctggtgcgcaagcatggcgggcggcaggagcacggctggcaattcgacttccgacacctgtaccgcaaatccggcagcgcggcccgcttctcggacttcgcctacgacgtgcgcgccctggtggcgcggcagtcgttgcccggctacgtcctcggcatcgagcggatgccggacgacaacaccgagctgctgaccttccggcccgtgccgcacgcggcacggggataa

SEQ ID NO: 430752 - DNA, 285 bp, Serratia marcescens; identical to SEQ ID NO: 117491

SEQ ID NO: 430753 - DNA, 771 bp, Serratia marcescens
atgactgaccgcagcagccaacactggtatcccacggccgcgtatctctacacgctgcacctcgatggcccagcgctggcttgggagtatttgcgcaggaatgcaagctaccggcgcgactggctacgccggcgtcgcaagccagatgcggcgcaggcctggggcctgcgcctgctggaagatcccggcctggatgcgcgcgatgcacatcctgcttggttccccgatcacgacggcgtggtgcagctataccccgacgccgacccaccacccgatgcgcataccttcgagttctggcgcattcctgggcgcaagcaactgacccacgacggcaagcgcctggtgcttgtatcgcattggccaggctgctgcgttcggctcgcactcgcacccgacctagaagatggctcggcctatctctacgccacacgcgcctgcgccacgccctgtgcgcgctaccgcacgctcgctgcgaagctggatgcgctatctgccgcaaccgtggccgcgcctgtggcaacagcccgctctcgccccacgcccgccgcgctgctggaactgcataccttgcaagcgctcgacgcgaccctcgcgggagcctctttgcgcgaagtggccgaaggtctgttcggcgcggatgccgtcgcggccgactggcacaaagacagtgcattgcgtgcccgcgtgcggcggctggtacgccgcggcgatgagctgatgcacggcggctaccgccgactagcgcagcttccaatgttcccgtcgcattag

SEQ ID NO: 430754 - DNA, 318 bp, Serratia marcescens
gtgcacctactggcccacggcctcacccgcgccgcaggccaggaatgtgacccgctgcccgtggtgcgcctgttcacaccggacgcacatgcgacctggctattggccgcgctcgatccgaccgatggcgatacggcctacggcctgatcgacctcgggatcgggatgcctgccctggcgacggtgaagctgtccgatctggcgtccatcgtcgggccgctcaagcagcccgtgatacgagatcggtacttccagccgacgcggccgctgtcggaatacgttcgactggctcaggaaaacggttcgatcaccgattga

SEQ ID NO: 430755 - DNA, 237 bp, Serratia marcescens
ttgagccaggaagcgttctccaacgtgtccagtcgcacctacatgagcacgctggagcgcgacctgaaaagcccaaccatccagaagctggccgatctgtgcgaggtcatggaagtgcatccgctcacgctgctcacattggcttatgccggtgacagcacccgcgaagctgatgaattgctggcacaggtgcgccaggaactcagggcgatattggaagagcccgacacgccgtag

SEQ ID NO: 430756 - DNA, 315 bp, Serratia marcescens; identical to SEQ ID NO: 117487

SEQ ID NO: 430757 - DNA, 654 bp, Serratia marcescens; identical to SEQ ID NO: 117486

SEQ ID NO: 430758 - DNA, 210 bp, Serratia marcescens; identical to SEQ ID NO: 117485

SEQ ID NO: 430759 - DNA, 2070 bp, Serratia marcescens
atgaacgccgttacccaaaccgaagcccgcgccatcaacaccgccgccgctatcccgctggaagccgctgacccgaccaagaacctgattctggttccgctgtcgcggctggtgtcgcgccccactggccgcaacgtgcgcaagaccccgcgcatgtccattcccgaactcgccgccagcatccagcgtgtcggcctgctgcaaaacctcatcgtgattgccgccgccgacggcgagcattacgaagtcgtggccggtggccgtcgcctcgcagcgttgaagctgctggcgaagaagcaccgcatcagcaaggaatgggaggtgccttgcctgcaggtggccgatggcaccgcacgcacggccagcctgaccgagaacgtgcagcgcgaagccatgcaccccgccgaccagttcgaggcgttcgccgcgctggtggccgaaggccgcagcatcgaggatatcgcagcggatttttccgtcacgccgctggtggtgcagcgccgcttgaaactcgccaacgtctcgccgcgcctgctggccgactatcgcgccgaggccgtgagccttgaccagttgatggcccttgccatcaccgacgaccacgccgcgcaggaagccgcgttctacgatgcgccgacatggcagcgcagcccgcacaacctgcgcgaccgtctgaccgaacgcgaaatcgacgcctaccggcatccgctggtgcgctttgtcgggctggacggctacgagcaggaaggcggtggcatccgccgcgacctgttcgcggagggcgacaaaggcgtgtatctgaccgatgccgcactgctggaacggctggcgcaggacaagctggcaggtatcgccgccaaggtgcaggccgagggctgggcgtgggtggatgccacgccgggcatgacccatgccgatctgcaagccttccagcgtgcgccaagggaacgccgcagtccgaacaagcgcgacgcgcagcgcatcgagaagctgcaaaccaagctgcacgaactggccgaagccgtggatgccgcgctggacgacgaagacgaagaaaaggccgatgccttgcaggaagaaggcgaacgcctgggcgagcagttgcaggcgctggaagaaggcttgctggactatgcggccaatgtgaaggccgcagccggtgccatcgtcaccatcgaccgcgacgggcaggccgcgattcatcgcgggctgctgcgcgaagccgaagccaaggcgctgcgcacgctggaacgactgcggcagggtttcggcagcgaaggcgaagccgcaaacgaggacgaaggcgaggacgacgagcagcccaagaccgccaccatgtccgaccgactggcgcagcggttgagcgcgcaccgtaccgccgcgctgcaaatcgaagtggcccggcatccgcaagccgcgctggccgccgtggtgcatggcatggtgcagaccgtcttgcaggaaagccactacggccacgacctgccgctgggcgtgcgcctcacggtgcaagaccggctggaaggcatggccccggactggccggaatcacccgccgccgtggcgctgcgcgaactgcaacaggtggcaggcgaaaccttgccggaggacagcgccgaactgttcgccgcgctgctggcgaaatcacaggatgaactggtgcggctgctggccgtgtgcttagcttccacggtggacgtggtgacgcctcgcgccacgccgcaccagcccggcgcggaactggcgcaggccgtggggctggatatggccgcgtggtggcagcccaccaatgagggttacttccggcatgtgccgaaggccgcgattctggaagccgttggcgggttcgcgccctcgcacgtcacccgactggcgaagttgaagaagggcgacattgccagcgaagccgaacggctcgccgctggcaccggctggatgcccgccatcttccgcaccgaaggcccgcagcaggccgggcaggacgcgccggcggatggcgaagccgaagcacaggaagaagcggccgccgtggcggatgtccagccgcaggccgaggctttggccgcgtga

SEQ ID NO: 430760 - DNA, 828 bp, Serratia marcescens
atgcaactcgcatcccgtttcgctttccgctccccctcgctgcgcagcgattacccgctgtccgacgaccagattcaccgcgtggccccgtccatcttcgcggatgccccgcacgagagccgttcgcagcggtacgcctatatccccaccgccgccgtgctgaccgagcttcgcaaagaaggcttccagcctttcatggtgacgcaaacccgcgtgcgcgacgaaggcaagcgcgagcacaccaaacacatgattcgcttgcgccatgccagccagatcaacggcgcggaggccaacgaaatcgtgctgctgaactcgcacgacggcaccagcagctatcagatgctggccggaatgttccggttcgtgtgcagcaatggccttgtttgcggcaacaccgtggccgatgtgcgagtgccccataaaggcgacgtggccggtctggtcattgagggcgcttacgaagtcttgagcggtttcgatcgggtgaaggaatcgcgcgatgccatgcgcggcatcaccttggacgatggcgaatccgaagtgttcgcccgcgccgcgctcgccctcaagtacgacgaccccgacaagcccgcgcccatcacggaatcgcaaatcctgatgccgcgccgcttcgacgaccgccgccccgacctgtggagcgtgttcaaccgcacccaagaaaacctgacccaaggcgggctgcgtggccgcagcgccaacgggcgccgacagcaaacccgcccggtgcagggcatcgaccaaaacatccgactgaatcgcgccctctggctgctggccgatggcatgcgccagttgaaagcctga

SEQ ID NO: 430761 - DNA, 2304 bp, Serratia marcescens
atgattgtctgcatcaaccgcctcaaacagttcggaatcttcagcgacttcaatggaacgaagatccaaaagttcggccggtacaacctggtctatggttggaatggaacaggcaagtcaacgttatcgaatctattctcttgctttgagcttcgctcgatggttccccgcttcagcacgggccaattttcagtagttctggaggatggctcaacgatcacggaatccacactccactcatcccaattgaatattcatgttttcaatcaacgcttcgtgcatgagaacattgattgggacaaatccgtaaagagcatccttcttattgcgaaagagaagattgatgacttgcagaagctggagaagctgaagagcgagcttcagtcgaaaaagaaggctcacgacgacaagcaaagcgatatcaagaagcagcgtgaggcattagagaagttcctgaccaatgctgccaagaaaatgaagcttggacttcaggcgattgatacgagcgacagttattacttgaattacgaccgccgcaagctctccaacttcatacagaataacggcgagacaattatcaaggcggagtcggttcttccagatgagagggttatcgaccttacgaatgccgccaagccagatcagcttccaagcattgctttcgcctcaacggccattgagccggactactttaagaaagcggcgggccgcatcagagatttgattgggactacggcggtcaatcaagcaatccagcggcttaccgataacccggacatccgcgaatgggttcaagcaggcttggaaatccataaaaaccacgactcgcaatcctgcgagttctgcggctctccgttcgcccagcttcgtgccgaggcgcttgctgcccacttcagcaaggagttcacggagtttcagagccgacttcagaatgcggcgacatggattgaatctcaaggcgctccagctaatcagtttcccgcatcgaccgagttttataaagaactatcggccgaggcagaaaagcttcaaaaggactacgcaactgctgctgaaaagatcgaccagcaaatggacgcctggcgggaagccctgaaggccaagatcacagaccctgggaagacagacattcagatctcggatgtggttgaagacgatgtcaccaatttcaatgacatcctgaagtcgattgttgctctcgttggaaagcacaacaataagacttcaaatttcaaatctgagacctcaaaaagcaaggtggcactggagcttcactttgctgcggctgaggtgcaagagtttgactatgctggaagtgagaagaagtgcaatgaccttgagtcagaagcaaagaacgaccataaggaaattgaaaaaattagtctagaggtcggagccatagaagcggcgctctcgaatgaaacggtcggggcaaaggagttcaatgacatcctgcatcgcttcattggccgctctgagctttgcctgaacttcaatcagaagaagaaaggctatgagatcatcagaaacggggttggtgagcacgatgggaatttgagcgaaggtgagaagactgcgattgcatttgtctatttcatcacgaagctcaaagaaaatggaaataacatcaaggatacgatcgtcgtcgttgacgatccggtctcaagctttgattctaatcacttgtttcacgcctactcgtttttgagaacgcaatgcactgaagccaagcaactttttgtgctgactcacaacttcacttactttaagctagtgagagactggttcactggcaccaataggaatcgagtcaaaaaaggcaacgccgagaattgcttcttttatcgcctggatgcgccacctggctcccctcgtcactccctacttgtggatgccgacgactcactcaagaactacggttccgagtaccactatatcttcaagaagctttacgaatatagggcgcacacgacactcaatcgagatgaggcgttcttgaccgccaacctcgcccgaaagcttgttgaatcgttttttaccttcaaatatccaaggcggcgaagcgacattagtcaattgatggaggctggcctaaaagattgcaccatcacgacaccagagcttaaagaaaaaatctaccgctttatcaataagtattcacatagcgacgttattgagataacagaggaatccgcagaaaacttggcaggcgaaagccacagcgtcatcgggaacatcttccagtggctggaagaggtggacaagaaacattacgacgagatgattcaggttgcgacggcctga

SEQ ID NO: 430762 - DNA, 510 bp, Serratia marcescens
atgtcgcaactgtcctttccctcgttcgattcctgtctgctggtgcgcgacgcgcacgggcgctatctaccggcatcggccgacgacattctggaagctgcgcgccaggtcattgaccggaaaatgcagcgcggagcagagttcacttcgccggcggcggtcaaggaatacttgcgtacaaagttggccagcttcgagcatgaggtgttcgtagtgctgttcatggatacgcgccatcgtctgatcgaatacagggagatgttccacggcactattgacggtgcgtcggtgtatccgcgcgaagtggtcaaggaggcgctgcggctcaatgcggcggcggtcgtcgtttcgcacaaccatccgagcggaaaccccgagccgagcgcggctgaccgggcgctgacccagcggctcaaggaagcgttgggtctggtggacgtgcgcgtgctcgatcacatcatcgttgcgggcaacgaaacggcatcgttcgccgagcatgggctgatctag

SEQ ID NO: 430763 - DNA, 1065 bp, Serratia marcescens
atgaacgggcgccggccatcagcagcatcgctcgcagcgcccgcggcgctgctgggcgacattcgggcactgatcgaggcggcgcgcaagcgcgccgcctcgacggtgaatagcgagcttacgatgctctactggcgcatcggccaacgcatccacacgcaggtcttggacaggcgccggggcgcctacggcaaggaagttctgcccaccttggctgcgcagttggtggaggagtacggcagcagctttgcagagcagaacttgcgccgcatggtgcagttcgccgccaccttccccgacgagcgaattctcgtatcactgatacgagaattgagctggacgcacttcatcgccctgatgccgctgaaagacccgctccagcgggactactacgcacagatggccagcacccaacgctggagcgtgcggacgctgcgcgagcgtatcgactcgatgctgtacgagcgcacggcgctttcccaaaagccggaagaaaccatagcgcaggagttggcgaccctgcgcgatgcgcagcgcatgtcgccggccctggtcatgcgcgacccgtacatcctcgacttcctgggcctgcgggacacttggcaggaaggcgacttggaagcggcgatcatccgtgaaatggagtccttcctgctggagctgggcgcgggcttctcattcgtcgcccggcagaagcgcattccgatcgacgacgaggatttccaccttgaccttctgttctacaaccgcaagctgcggcggctggttgcggtggagttgaaggtaggtgacttcaaggcggcctacaaagggcagatggagctttaccttcggtggctagacaagcacgaacgggagccggaggaagcctcgccgctcgggatcatcctttgcaccggcaagaagcgcgagcagatcgaattgctggagctggacaagtccggcatccacgttgccgagtatctgaccgccttgccgccgaggggcgtgctggtggagcggctgcaacaggcaacgcaacgggcgcagttgcaaatcgagcagcgcaagacggacaacgagtag

SEQ ID NO: 430764 - DNA, 1200 bp, Serratia marcescens
atggcaaagatcaagctcaccaagaccgccgtagagtcggcgcaaccccaggcgaaggacatcgaactacgggataccgtcgtgcccggcttcctttgcaagattaccccgacgggacgccgggtgttcatgctccagtaccgcacgaactctggccagccccgcaagccctcgctgggactctacggggagctaaccgtcgaacaggcgcgggtcaaagcgcaggactggctggccgaggttcgccggggtggtgatcccggcggtgccaaggccgaggcgcgcaaggcgcccacgatggccgagttgtgcaaaaagttcatggaggactactccaagaagcgcaacaaggtcagcacgcaggacggctaccagggcgtcatcgaccgcaacatcatcccgctgctgggccgcaagaaggtgcatgacgtgaagcggcccgacattgcggggctcatggaaaagctggcctacaagccgaccgaggccaacaagaccttcggcgtgctgcgcaagatgttcaacttggccgaagtctggggcttccgcccggacggtacgaatccgtgccgccacgtcccgatgtacccgccgggcaaggaaacccggctcatcgtggacgaggaaatggtgcggatcttccgccagttggagaaactggaggcggaggggctggagaactacgtcatcccgttggcgatccggctgcaattcgagtttgcggcgcggcgctccgaaatctgcccgctcgaatggagctggctggacttcgagaaccggcgcgtggtgtggcccgacagcaaggttggcggcatttccaagcccatgagcgaggaagcctatcggctgctttcgacggcgccgcgtctggaaggctgcccttacgtcctgccgtcgccgaacgacccggccaagcacctgacctttggcgagcactatggcggctggtgccggacgctcaaggccgccagcgtgccgcacgtaggcacgcacggcatccgtcatcgctcgaccaccgacattgccaattccggtgtgccgaccaaagtgggaatgaagctgacgggccacaagaccgtggcgatgttcatgcactacgtccacaccgaggacaagccggtgcgcgaggcggccgagctggtggccagccgccgccaagccatcacgggcgcgcggcagcttgcggaggcggtggcatga

SEQ ID NO: 430765 - DNA, 816 bp, Serratia marcescens
atgaaaattttaaaatcatacatgccattattacttttatgcgtggctttcaccgcttcgtcaaataatcactgcgatccttcccggactgaactgcccgccagttgcctcacggaacaattcgccatgtcggtattgtggtatcagaatgcggcagaggcacgggcggctttttatcaagggtatcagttgggcaagctccgacttgagcaggaattaaagaataaatcggagaagccgcgtgccgtcgtgctggatcttgatgagaccgtgctggatgacagcccgcaccaggcctggttgataaagaaccagtcgtttttgcttgacggttgggatgaatgggtcgacatggctgcggcggaagccgtgcccggcgctatcgatttcctgaggtttgccgatgaaaacggcgttaccattttctacctgagtgacagaaagcagtcgcagattgacgtgacgctaaaaaatttacgccgtattaatttgcctcaggcgaaaaaagaaaatctgttgttgaaaacaccggagatgcagggtaaacagagtcgtcgcgacgcgttggaaagccagtatgacgtcgtgctgtattttggcgacaatctggctgactttattgattcaaaaggtaaaagccaggctgaaaggaataaaatgatggaggatgtgcagcaagaatttggcaagcgttttattatcttcccgaatccgatgtatggcgattggtatggcggtattatcgatgggcagtttaaagcgaaaaacaatgagctttataagctgcgagcgtctaaattgacgccgtttaagtaa

SEQ ID NO: 430766 - DNA, 174 bp, Serratia marcescens
atgagtattcaagcatggtctaaaaacctaaaaaaacactatcctaatgttaatattgaaaaagtcaccgtcggcgatcgcgggaaaggttatattgtctatgtcgatggggaaagaatggcattgaatcatttttttcgccgcttctatcgacatcgacttgataaagaatga

SEQ ID NO: 430767 - DNA, 756 bp, Serratia marcescens
atggatttttgtaaccggatttccgtgtgtttattgacgtttaattcatcgcgcctgctgcgtgacgtgctgcaacctgtggcggcgttcgccgatgaaatcatcgtggtggattcgggcagtactgacggcacgttggccatttgcgaagacttcaatatcaagcctatctatcacccgtttgaaacccatggccggcaaatgaattacgccatatcccgcgcgcagcatgactgggttttgtgcctggacagcgatgagattatggatgatgaagtggtcgacgcgatagggcttttcaaacgcaccccaggccctgacaaaaataatgcctatcgcattcgtcgtgattggtttgtgttgggacaggcggtcagaacgctttatcccgtctcgtcgccggatttccccattcgcttttttcaccgccaggtggtgaagttcaatgacgcgccggtagatgatgcggcggaagggggggcatcaaccttgatactggccgggcacgttaaacacgatacttttttctcaatcgaggaagtgtttgcaaagctgaacagctatacggcgcgcgtggtgaaatacaaggcgataaggccatcgcttctccgaggggtgattagcgccatcggcgcctttttcaagtggtacgtttttagcggcgcctggaaaacgggccgggttggcgctgtgaccggcgtttacgcggtgtcctacagctttttgaagtatttcaaggcgtggtaccacagatag

SEQ ID NO: 430768 - DNA, 1050 bp, Serratia marcescens
atgaagttgaaatatattgaagttaatcaaccaatcggtactttctatttaacatcaataagagccattgacttgctcgatatagttagagttgatcgtcgcagagatttcgagtttggtgtgcaaagggatatttcatcatcaagagtttcagaaatcgcaaagtacactagtgagccggatgcgacttttccaacgccgatcataatttccgtcgatgattcatccaatttaaaaatggatgatacttatttttactttgaggctgaagtggttataggtgatgttatcgatggtcagcacagattatggggaattaaaaattcctctaatgctaaactttttgatctacctgttgttttaatgtttgatcttactgatgaagaaaaagcctatgttttctcaattattaatagtaaacaaactcgtgtaaacccatcaattgtatatgatttgttttcgcttgcagaacgcaggagtcctcagaaaacatgccacgaaatcgcgagaggaataaacagtaatcctgattcccctttttataaaaagctaaaaatgcttggaaaaaaggaaataaaccaagacaatgcatcattatcacaaagcactttcattaaatatcttatccaacatatttcaaaaaaacctgatgatgatgcaagaatgttaaaaatggatctgccattaacaccaaatgatcagtgtatattccgcgattattttatcgaagagaatgacgctgtaattcaaaaaataatattgaattattttaatgctgttagcgatgtctatccagttgagtggaatacaccaagggaatattatttaagtaaactcacagggtatgcagcattaatgaaagccttccctgtaatatattcaaagggcattaaagaaaaaacattgaattatgactttatgctgagtgaagtaagtaaaataaaaagaaatcttgcagcgcgaggtattaattttaaagcgggtgaatttggcactaatgaatctgaaataaataagcttgcgaaaaatatcattgattcatgtagttaa

SEQ ID NO: 430769 - DNA, 600 bp, Serratia marcescens
atgagtaaagattggcaaatattaaagaaatccctttcctatccattcgatgcgataagaaaaaacaaaagagagttttttatttggatcgtttttacagttgtttgtgggcaaatggggattattgcaaatataatcataagatattattcacattcaataccactagatcaatctatttacatagaaggttcatcagggagtttttacacattttccattgcattaatagcctctgcccttgggcctatgtttgtaactttttttagttcaaaacttgaatttaaaacaataaaaatcatatcaataatattattgataattttattacaattatcaggaataatatacgctgccacgcaatcaaaggatttaatcctaccaaattctaatgatttaacattcggtttaactcaacctataatttatgttatttctatagtcttagtaggctatacatttggcgtattaaaacttaacgctactgcacatacagatatagatgatgaaagttatatagaaaaagaagatgcaacagttatagatcagacaatggcaaccaatgaagtaactgatgatggtaaaggagttatgatatga

SEQ ID NO: 430770 - DNA, 480 bp, Serratia marcescens
atgttagattttcgctttccgacagcgttgcaaatggtccttagcgtcgccgtagctgagaagcagggcatgcgttcgacgagcgccacccttgccgccgctctggaagccaaccccagctttatccgcaaactgatggtgccgctgaccaaagacggcatcatcgtttccaccctgggccgcaacggctctatccacctcggccgcccggcggaagagatcaccctgcgggacatctatctggcggtgatcgacgacaagcgcatctgggcttcccgccctgaagtgccggcccgttgcctggtgagcgccaacgcctgctggtatttcaaatcggtggtgaacgaagccgaacaggcttcgcttgcggtgttggcgcgccataccgtggccgattcgctggccgaactggagcggggcgacaagcgcgcctgcgcggagtacgccgccgcgcaagaggctgaaaccgccgacaaataa

SEQ ID NO: 430771 - DNA, 243 bp, Serratia marcescens; identical to SEQ ID NO: 158940

SEQ ID NO: 430772 - DNA, 1119 bp, Serratia marcescens
atgtggtcgctgcaaccgcagcggcgcggtgcaggcgagcagaccgagctttacaacgtcgatcgcgtctcgaagtccgaagggttggacgcgctgccggcggactactcgaagctgccgccccccttggcggcatccgtgccggagttggggccgccgctgccaggcgatcttggcccggccattgtgaagtcgcagcagccggtgacggccgcctacgcggcccccggcaacgaccccaacgacgcgttgcgcaaggaagccgaagcagcagcggcatcggcggtgttcttccgctctggttcgcagaaggccgcgccggtggcgcagacacaggtagccgctgcgccgggcttcaccgccaatgcggccttcgacccgctggcggccgggcctgcgtcgacggcggcccagcccgccgacccgaccgccgtgcagaaccggcaagaccagaaagaggcattccagaaagccggaaccacggaagcccgtgattccggcaacctgacgctgccggcgtcgccgtatcaggtcatggccggaacggtggtcgccggggcgctggtgacgggcatcaagtcggacttgccgggcgatgtgatcgccacagtgacggagccggtctatgacacggctaccggcaagttcctgctgatcccgcaggggtcacgcatcctgggcaaatacaacagccaggtcagctacgggcagagccgcgtgcaagtggtgtggaaccggatcatcctgcccgacacgtcttcgctcaagctcgacaacttggccggcaccgatccggccggctacgccggcttggaagatgatgtggattggcattgggatcgcgtctttgccggtgcggcactgacgacgctactgggcatcggtgccgaactggctgcgccggagaaccggcaggacggtgatcgcgtcatcatcgccggccgcgatagcgcccaggacagcatcaatcaggtcggtcaggagatgacccggcgcaacctcaacatccagcccaccttgacggagcgccccggcttgccggttcgcatcatcgtcaaccgcgatctggtgctgcggccgtaccagccacttttcttcaacagggggacttcgcgatga

SEQ ID NO: 430773 - DNA, 993 bp, Serratia marcescens; identical to SEQ ID NO: 158942

SEQ ID NO: 430774 - DNA, 705 bp, Serratia marcescens; identical to SEQ ID NO: 158943

SEQ ID NO: 430775 - DNA, 1365 bp, Serratia marcescens; identical to SEQ ID NO: 199339

SEQ ID NO: 430776 - DNA, 327 bp, Serratia marcescens; identical to SEQ ID NO: 158945

SEQ ID NO: 430777 - DNA, 738 bp, Serratia marcescens; identical to SEQ ID NO: 199337

SEQ ID NO: 430778 - DNA, 2451 bp, Serratia marcescens; identical to SEQ ID NO: 199336

SEQ ID NO: 430779 - DNA, 273 bp, Serratia marcescens; identical to SEQ ID NO: 158948

SEQ ID NO: 430780 - DNA, 384 bp, Serratia marcescens; identical to SEQ ID NO: 158949

SEQ ID NO: 430781 - DNA, 1068 bp, Serratia marcescens; identical to SEQ ID NO: 158950

SEQ ID NO: 430782 - DNA, 465 bp, Serratia marcescens; identical to SEQ ID NO: 199332

SEQ ID NO: 430783 - DNA, 2016 bp, Serratia marcescens; identical to SEQ ID NO: 158951

SEQ ID NO: 430784 - DNA, 276 bp, Serratia marcescens; identical to SEQ ID NO: 158952

SEQ ID NO: 430785 - DNA, 945 bp, Serratia marcescens; identical to SEQ ID NO: 158953

SEQ ID NO: 430786 - DNA, 1146 bp, Serratia marcescens; identical to SEQ ID NO: 158954

SEQ ID NO: 430787 - DNA, 636 bp, Serratia marcescens; identical to SEQ ID NO: 158955

SEQ ID NO: 430788 - DNA, 1167 bp, Serratia marcescens; identical to SEQ ID NO: 158956

SEQ ID NO: 430789 - DNA, 3117 bp, Serratia marcescens; identical to SEQ ID NO: 280994

SEQ ID NO: 430790 - DNA, 336 bp, Serratia marcescens; identical to SEQ ID NO: 158958

SEQ ID NO: 430791 - DNA, 618 bp, Serratia marcescens; identical to SEQ ID NO: 158959

SEQ ID NO: 430792 - DNA, 1389 bp, Serratia marcescens; identical to SEQ ID NO: 158960

SEQ ID NO: 430793 - DNA, 1983 bp, Serratia marcescens; identical to SEQ ID NO: 158961

SEQ ID NO: 430794 - DNA, 600 bp, Serratia marcescens; identical to SEQ ID NO: 199320

SEQ ID NO: 430795 - DNA, 546 bp, Serratia marcescens; identical to SEQ ID NO: 199319

SEQ ID NO: 430796 - DNA, 276 bp, Serratia marcescens; identical to SEQ ID NO: 265137

SEQ ID NO: 430797 - DNA, 639 bp, Serratia marcescens; identical to SEQ ID NO: 280985

SEQ ID NO: 430798 - DNA, 843 bp, Serratia marcescens; identical to SEQ ID NO: 161439

SEQ ID NO: 430799 - DNA, 285 bp, Serratia marcescens; identical to SEQ ID NO: 280983

SEQ ID NO: 430800 - DNA, 768 bp, Serratia marcescens; identical to SEQ ID NO: 199654

SEQ ID NO: 430801 - DNA, 351 bp, Serratia marcescens; identical to SEQ ID NO: 159041

SEQ ID NO: 430802 - DNA, 333 bp, Serratia marcescens; identical to SEQ ID NO: 199652

SEQ ID NO: 430803 - DNA, 315 bp, Serratia marcescens; identical to SEQ ID NO: 199651

SEQ ID NO: 430804 - DNA, 2067 bp, Serratia marcescens
atgaacgccattacccaaaccgaagcccgcgccctcaacaccgccgccgctatcccgctggaagccgccgacccgaccaagaacctgattttggttccgctgtcgcggctggtgtcgcgtcctgctggccgcaacgtgcgcaagaccccgcgcatgtccattcccgaactcgccgcgagcattcagcgtgtcggcctgctgcaaaacctcatcgtcattgccgccgccgatggcgagcattacgaagtcgtggccggtggccgcaggctggccgcgttgaagctgctggcgaagaagcgccgcatcagcaaggaatgggaagtgccttgcctgttggtggccgatggcaccgcccgcacggccagcctcaccgagaacgtgcagcgcgaagccatgcaccccgccgaccagttcgaggcattcgccgcgctggtggccgaaggccgacccatcgaggacatagccgccgatttcagcgtcacgccgctggtggtgcagcgccgcttgaagctggcgaacgtctcgccccggctgctggccgactaccgcgccgaagccgtgacgctcgatcagttgatggcccttgccatcaccgacgaccacgccgcgcaggaaaccgcgttctacgacgcgccgacgtggcagcgcaacccttcccaattgcgcgaccgcctcaccgagcgcgagattgacgcataccggcatccgctggtgcgtttcgtggggctggatacctacggagccgcaggcggtggtgtgcgccgtgacctgttcgcggaaggtgacgcgggcgtgtatctgaccgatgccgcgctgctggaacggctggcgcaagacaagctggcaggtatcgccgccgaggtgaaggacgaaggctgggcgtgggtggatgccccccccgccgtgacccatgccgacctgcacgccttccagcgtgcgccgagggagcgccgcgaaccgaacaagcgcgaagcgcagcgcatcgagaagctgcaaaccaagatgcacgaactggccgccgccgtggatgacgcgcttgataccgaagacgaggaaaaggccgatgccttgcaggaagaaggcgaagccgtgggcgagcagttgcaggcgctggaagatggcttgcaggactacggcacgaccgtgaaggccgcagccggtgccatcgtcaccatcgaccgcaacgggcaggcagtgattcatcgcgggttgatgcgcgaggccgaggccaaggcgctgcgcacactggaacgcctgcgccaaggtttcggcagcgaaagcgaagccgggaacgacgacgaaggcgaggacgacgagcagcccaagaccgccgccatgtccgacaagctggcgcagcggttgagcgcccaccgcaccgccgcgctgcaaatcgaagtcgcccggcatccgcaagtggcgctggccgcgctggtgcatggcatggtgcagaccgtcttgcagggcagccactacggccacgacttgccgctgggcgtgagcctgaaagcgcaagaccggctggaaggcatcgccccggatataccggattcgcccgccgccgtggcgctgcgcgagttgcagcaggtagcaggcgaaggcttgccggaggacagcgccgaactgttcgccgtgctgctagcgaagtcgcaagatgaactggtgcggctgctggcgatatccgtggccgtcacggtggacgtggtgacaccccgcgccacgccgcagcaaccgggcgcggaactggcgcaggctgtcggcttggacatggccgcatggtggaagcccaccaatgagggttatttccggcatgtgccgaaggccgcgattctggaagccgtggagcagtacgccccggcgcacgtcacccggctggcgaagttgaagaaggccgacattgccagcgaagccgagcggctggccgatggcaccggctggatgcctgccatcttcaaggccgaaggcaccgacgacaccacggcgcaggatgcgccgcaggcggtgacgaacgacgagccggaagccatcgacaacgacgacgagcagcaggcccacgcactcgccgcctga

SEQ ID NO: 430805 - DNA, 831 bp, Serratia marcescens; identical to SEQ ID NO: 199577

SEQ ID NO: 430806 - DNA, 564 bp, Serratia marcescens; identical to SEQ ID NO: 199576

SEQ ID NO: 430807 - DNA, 1410 bp, Serratia marcescens; identical to SEQ ID NO: 199574

SEQ ID NO: 430808 - DNA, 2139 bp, Serratia marcescens; identical to SEQ ID NO: 159008

SEQ ID NO: 430809 - DNA, 1800 bp, Serratia marcescens; identical to SEQ ID NO: 159009

SEQ ID NO: 430810 - DNA, 297 bp, Serratia marcescens; identical to SEQ ID NO: 159010

SEQ ID NO: 430811 - DNA, 552 bp, Serratia marcescens
atggcggtaatccacaaagcgctggatgaatgcagcgcagagcatccggtattttatgaagatgaagtggatatccaccttaatcctaaaatcggtgcggactggcagttgcgcggacagcagaaacgggtagtgacgccggggcagaacgaaaaatactatctggccggcgcactgcacagtggcacgggtaaagtcagctacgtgggcggcaacagcaaaagttcagcgctgtttatcgctctgctgaagcacctgaaagccacttaccggcgggcgaaaacaatcacgctgatcgttgataactacattatccataaaagccgcgaaacacagcgctggttgaaagcaaatcccaagttcagggtaatttaccagccggtttactcgccgtgggtgaatcatgtggaacggctatggcaggcacttcatgacacgataacccgcaatcatcagtgccgctcaatgtggcagttactgaaaaaggtccgccattttatggaaaccgccagcccattccccggaggaaaacatggtcaggcaaaagtgtag

SEQ ID NO: 430812 - DNA, 927 bp, Serratia marcescens; identical to SEQ ID NO: 159011

SEQ ID NO: 430813 - DNA, 1068 bp, Serratia marcescens; identical to SEQ ID NO: 159012

SEQ ID NO: 430814 - DNA, 1200 bp, Serratia marcescens; identical to SEQ ID NO: 159013

SEQ ID NO: 430815 - DNA, 591 bp, Serratia marcescens
atgaaaaagtacgtcttagtggcgctggccgcattaaccctcagcggctgtctgtcgcgcccgcctgagccggaacaaccgttgccgccggtcaccgtcgaaccggaacagccgacgccgccggtcgagcagccacagccgccaaccaccgagccggtgccgcagccgccgaaaatccagcagcttgactggctgggcagcgttcagccgctggtggggcagatgctgaaggccgatggcgtcacggccggcagcgtgctgctgctggacagcgtcaagaacaacactaacggttcgctgcagatgggcaaagctaccgcggcgctgtacaaggcgctggcgtcgaactccaccttcagcgtggtgccggaagcgaagctgaccagcgccagacaaacgctgggcctgtcggcggatgacagcttcggttcgcgcagcaaggcgattggcctggcgcgcatcgtcggcgcgcagtacgtgctgtacagcgacgtcagcggcgacgtgaagtcgccggcgttggatatgcagctgatgctggtgcaaaccggcgagatcgtctggtcgggcaatggcgccgttaaacgctga

SEQ ID NO: 430816 - DNA, 843 bp, Serratia marcescens
atgaattatacacatattgataatgatataatttcagggcagtgtgccaaaatccgtgtgcaaatttcagttgtgtctttttacattaatgatgacatctttactttgatggattccatcgtgaaagctgaacgagcctgcccaaatattcaagtggacgtgactgtcgtcgagaatggtttcaaacagaaaacggatctccaccatttccttgaggagcaatatccctgctgtcgagtagtcatttcgggtgaaaatatcggttatggccgtgcgcacaatctgacattaagtcatgactatgattaccatcttattttaaatcccgatattattctgtacgaagatacactggccgtagctatgcggtttatgaacgataaccctcagtgcggattattgacgccgttggcccggtggcgaaatggtgagcgacagtttttgtgcaaacgctatccatcagtattcactttgctgttgcgggcatttgctcctgcgatagtaaagaaattttttaagttcagactcgaccactataatatggtggacgttattaatgagacagataactactggaatcctcaaattgtcagtggttgttttatgctattccgtagtgatgttttgcagcaactcgcaggatttgaccctcagtttttcttgtattttgaagatacagacctcagttttcgagccagcagcattacgcatgttgcctatgtgcctagcgtgaaaatcatccatcatggcggaaatgtatcaaaaaaaggaatcaaacatattctatttttctgtcattcgatggttaaattttttaataagtatggctggaaaatacggtaa

SEQ ID NO: 430817 - DNA, 897 bp, Serratia marcescens
gtgaataggaaaataatcgcaattacggtaagttataatcctaatatccccagccttaaacgacagattaaggtactgttggcaagccaggttgctgtagttgttgttgacaataattcaaccaattctgaacagctgacaattgccttggccgagttttctgggcaattaacgttaatgtgtttggccgaaaatgaagggatagctgcagctcagaatcgcggtatccgaatggcaaaagagcaagggttcgactatgtgttgttgatggatcaggatagtctcccggcagataatatggttgaagaacttttgacggcggctaagcacaagaatggattagccgccgttggtccctgttttattgacgcagatcaaagcgtcagggctcggtttattcgcgttgaagggattcgtattatcaaaatgtcatcaagttcctgcgataatatcgttgaggttgatcatcttattgcatccgggtcgttgattcctgttgctgttttcgaacgggtggggctaatggatgaatccctctttatcgattatgtcgacatagagtgggcactgcgtgctcgggcaaaagggttgttgtcatatggtgttttttccgcgcaaatgcatcatagcctgggagacggacgcattgagtttgccggaaggcacattgcaatacatagcccccttcgtcattattacctcgttaggaatgccatacttttgtataagaaagattatattcctttgaattggaaattggtcgacacgtacaagcttgtcttgaaattgacttttttgttactgttttctggtcagcggttgcagaacttaaaagcaattgtacaagggggtattcatggtattacgagtaaatcaggtaagtgtccattacaatga

SEQ ID NO: 430818 - DNA, 2475 bp, Serratia marcescens
  misc_feature (685)..(694): n is a, c, g, or t
atgcgaacgggtgtagcgaatctgcgtaaattaaaacgcggcgtagtcgtttctaagaatgttatcaaaatacacggtcttcaatatagcctgaaaaaggctatggcagtgtataagcagtttggtatgcgtggtgtgattgacaggctacgtttgataaatcaacagcacgttgcctctcacgttatagaacgcaaggaattggccactgttggcgttgtggccgaagcggttttgatgcctaaagtgctgattattgctgaaatgtctattccccaatgccgcaaatatcgtgttgaccaaaaggtagagcttttcaaaaagcttgggattgaagccactgcattaagctggactcagcaaaatgagtgtatggaagcgttgcaaacgcattcaatagttatcttttatcgcgttcccgcttttgaaagtatggatcgtattttcgatgaatgtgaacgtttgaatctgaccactctctgggaagttgacgatctcatttttgatagggacgtgctggctaatagcaagaccttgaatgaactagataaaaatacatttaatgggcttcttgaaggtgccagcctttataagcgagcaatgctgaaatgtcgggggacgattgcttccacgcaacatctggccgaggcaatgatcgatgcgggcgcgaaatacgcctacgtgnnnnnnnnnncgcgcacgagtgaaaccgatgggattgttcgaattgtttatggctctggaaccagtacacataatgttgattttcaggaagcagccagtgctattcttaatgtattgaaaaataatgaaaatgtacgttttcgtttaattggggttttagaacttccgccatcgtttgatgcggtgaaatcgcagattgaacgcgttgaactttgcccttataaagactatcttaaggttttggcagaatgtgacatcagtttggctccgctggaagattacgtatttaattattccaaaagcaacatcaagtttattgaggcctctattcttggtataccaagcatttgctcaccactgccgacctttagtcgagttatagagcatggtgtgaatggttacctatgtaaaacccctgtggagtgggagacgacgctgctccagttggttcaatctgctgagttaagaagcgaaattggatcgcatgctcagacgacggtgctgcatcattattcgccggataatatagctaaagaacaagtttctgttattgctgataaatttattagacgcaataaagcagctaagcagaaaaatatactctcggttaattgttattataaccctcgttcatttggtggggcgaccgttgttgcagaggagcttaataagcgtttcgattccaatggaaatattaatattcatgttgtgacatccctctctgaagattatgtaatgccataccatatacggcgttatggtgcttttggtcatgattgttatggcattgggttgcctcacttcttgcgtgaagaagaacaaatactgaatcacaatattgatcctgcatttaagcagattctcgatgttgtcaaaccggactgtgttcattttcactctattcaaggcctaggcatttctatgttggaggtctgtgctgaaagagatatcccaataattgtcactgcgcatgattattggtggttatatgaccatcagtttattctcagcttcgacgataagcacaagttgcgtggtgttttcgagggtcacgaatcggaaaaactgaaggataaagatacggtcagttattatgtcctgaagaaacgcaaggcgctgatgttggcgagtaaaattcttgcgccaagtgcatttactcgtcaactttatgctagtgaaggcttcggtaatgttcatctgaataaaaatggtgtaaattatccgcagttgactaaagatcgagaggtttcaaaagtgataacctttggttatgttggtggaaacaccaacattaagggatatcatttaatcaaggaagctttcagaaatattgctgctgaagatgccaaggttgtgattgttgataatacgttgaatcttggctttagaacttttcatgacagtgacctagacgggttgaataattatgaagttgttcccgcatttactcagcaaaatatggatgaattttatggcagtattgatgttctgctctatccgacgcaatctaaagaaagctttggcttgacggttcgcgaagccttaatccgcaatgtttgggtgattacctctgatgcggggggagctcctgaagatattattgatggagaaaatggtattgttattccatttgataacgatgccatgaagttgctggctgctgttgaggcaacgatacaacatttccgtcaaatgccagatggatgtttgcctgtcatgcctcactctcatattcgttcttttgatgaacagtatgaagaactggcagagatctacctttctactcactaa

SEQ ID NO: 430819 - DNA, 1383 bp, Serratia marcescens
atgagcgaaacaacgcttgccactccacagaccgccgacgccgcgctggcggccgatgaacgcctggcaaccaaagaggggcgcagccaattttggcgcgccaccttctcctgctggctcggcaccgccatggaatacgtcgacttcgcgctgtacggcctggcggccggcatggtgttcggcgatgtgttcttccccgaggccacgccgctggtcgctctgctggccagcttcgccacctactcagtcggtttcgtcgcgcggccgatcggcgcgctggtgttcggctggatcggcgatcgcaaaggccgccgcgtagtgctgatcaccaccgtggcgctgatgggcatttccaccacgctgatcggcctgatcccgtcctatgcgcaaatcggcgtctgggcgcccacctgcctggtgatcctgcgcttcgcgcaggggttcggcgccggcgcggagctgtccggcggcgcggtgatgctggcggaatacgcgccggccaagcggcgcgggctggtggcctcgatcatcgccatcggctccaacagcggcaccctgctggcgtcgctggtatggctgctggtgctgcaactcgacaaggaagatctgatgagctggggctggcgcattccgttcctcgccagcattctgatcgccggggtggcgctgtacctgcgccgtcacgtgcgcgaaacgccggtgttcgagcgcgagctgcaacaaaaccaccagcgcatgctggacgccgctcaggccgcgccggactcacgcagctacctgcagcgcaccaaagcgttctgggtgatgctcggcctgcgcatcggcgaaaacggcccctcctatctgtgccagggctttatcgtcggctacgtcgccaaggtgctgatggtcgataaatcggtgccggcgctggcggtgctgatcgcctcgctgtgcggttttctggtgatcccgctggccggctggctgtccgatcgcttcggccgccgcgtcacctaccgctggttctgcctgctgctggtgctgtacgccttcccggcgttctggctgctcgacagccgtgaaccggcgatcgtcatctcggtgatcgtggtcggcatgtgcatcgcatcgctggggatcttcggcgtgcaggcggcctacggcgtcgaactgttcggcgtgaagaaccgctactccaagatggcgttcgccaaggagctcggctcgatcctctccggcggcaccgcgccgctgatcgccaccgcgctgctctccggcttcggtcactggtggcctgtcgccgcctattttgttgtaatggcgggcatcggcttaatcaccaccttctttgctcccgaaacccgcggccgcgatctcaacctgccgcaggatgccgcgtag

SEQ ID NO: 430820 - DNA, 870 bp, Serratia marcescens
atgggcaacataggtgtatatgttttctttgccattagtggttatataatgtcctacacgacaaaaaataaaaattttgatattttatatgctaaaatatttatacaaaaaagaataaagaggatatatcctttatattggatatatctttcgatatttattgcactatgggctgtcggcttggctatgcgctcccatcattatagtttttctcaaataatatactcatacatcctaataccttatggtgtaactgatgataaaataacgccaccagtcttgactcaagcgtggacattaagatacgaaatgttcttttatataacatttggattttttataatgttaagaataaataaaaaaacaatgccaatgttactactcgtattcttttcaacattagtcgtactctcacaatccaatctatttccattagccgaactaaatatatttttctcaaattggctacttttgcttttcgtggcggggatattattagaaaaaaaccaaggcattataactcaactattgacaaaaacaaaaaatcatacactatggataattacaaccctacttatactaatagctacctacgttgaaaaaccagttattatagactacttattaagcatattgatactgatttttatcttgccaattgatcaaggaaggaaaagcctcttaaaaattggcgatgcttcatatacaatatatttgagtcactcattcatagttttagcttacgggattatatcaaaaaacacctcaagtatgtggatatgtctaattacaggtttattatcagtacttgcctctgcagttttaggcatattcctgtatgagaaaatagaaaaaagaatacatcgttaa

SEQ ID NO: 430821 - DNA, 432 bp, Serratia marcescens
atggccggctgtctgctgttttccggtgcggcgctgacgatgggtggcgacggcagcaatcaaaccccgcctacctgtccaagaggccaggtctacgacagcaaaacccagacctgcatggtggataaaggcggcagaatcggcgacgcagaccgcaccagctatgcctatgcgctggcgaaaagcggccgctatcaggaagcgatcgatgtactcaacacgctgaaagatcccagtaccgccgtcgcactgaattatcgcggctatgccacgcgcaaacttggccgcaccgatgagaggatcggctattatttaaaattagccgccctcgtgccgaaatcccctaaagtgcacgagtacctgggggaagcctatatgctgaaaagccggcccgatctggcagcggccatcgttcaccaaccggaatcttga

SEQ ID NO: 430822 - DNA, 351 bp, Serratia marcescens
atgacatcccctaatcacataacagcatattcccccgccagtgccggccatggcgtcgaactgggccgcttcagactaagaaaaggcgttaccgaagagaagatgtacgcggcctattgccaaatggtgcaacatcatctgtctgcgcaaccaggttggctacatcagtatttactcaaactggacggagacgttttcgtcgatgtggccattgcagaaagctatgcacagtcgcaggccatctgtaccagttggcatggccaatcacattgcgaaagcttccttagccttatcgagccggagagcatgcactttggaacgttaatgtgcgctccactcgttactcgataa

SEQ ID NO: 430823 - DNA, 687 bp, Serratia marcescens
gtgagaaccgtcaggttattttcaatactcgagcaactgcgcggcagacaacgcccggtttcggcggagtttctggcccagacgctggatgtttcggtgcgaaccatctatcgagatatgagcacgttgcaggcgatgggtgctccgatccgcggcgagtctggattggggtaccaactggaaaaggggtatttcttgccgccgctgcattttgacgctaacgagctggaggccataatactgggcactcgtctgattgcggctcgtggtgatgcgcagctgggtgaagcggcacgtcgcgtttcagccaaaataggtgccatgttggatgacgatgcgaagaaacgttacgaggatatgccattgcgcgccgtctcgcgcaggactctggagtatgaactggccgacaggtatctggagccattgcgcatggctattcgaggcagaaagcggttggccgtccgttatcgcgaccttaaaggtaatgaaagccgaagaaatatcaggccattaggattgacgatgtttgacgccgtgtggctgctgaccatatggtgcgagaccaaagccgatttccgcaatctgcgcgttgatggcattctatcgttgacggacaccggcgaacgttttcgacaggaaagaggtaaacgttttgaagattatattaaatctttaccggcagcatag

SEQ ID NO: 430824 - DNA, 141 bp, Serratia marcescens
atgaagaccttattcttgacagtaagagccgaacacacttattcaaaagcagaaaacatgaagttgtattttattttgaaatcaaccaaccattttttgattcagaacttggaattaaaagaattcacactaaggatgtga

SEQ ID NO: 430825 - DNA, 333 bp, Serratia marcescens
atgaaagtcccacggaaaaagctggtagacggccagctttatgactccggctacgtcatgtttgacaaagtgttattccgtgtaggagttccacgaccaacggatcctatctgtgtacaggacgagaaggcccagtacattcttgaccagacgtttgcagaggttttcgatggagaatggctggtaggtattgaaggtaagatcagtgttcgcaccttaacccgcattccgattaaaaaaattcgggtaagtggcgttggtatggcgtttgactgcgttcttgacgatattcaaattattggaaaagttgttttgaaaataacggaacaatga

SEQ ID NO: 430826 - DNA, 162 bp, Serratia marcescens
atgcgtcctaacatccccacgccttacctgcctattgatgagtactgccgtatcaccgggactcctatgggcagtgctcgtgacatggtccgcgatggtcgtttgcctattcacggcaaaggcgacaagccccgcgcacgtgttgaaatcaacgttgggtga

SEQ ID NO: 430827 - DNA, 504 bp, Serratia marcescens
atgaagcaactttgggaaaaaatggaagccattctgcaagacaccgaccctgatttattagctgatcttggccccccggccactgatgaggatatcgctacgttagagcaggctctgggtttgagtttgcctgctgattttgttgcctgcatgaaaattcacaatggccagcacggtattagccacggactgtttgatgaatgcgagttcttatccacttcgcgcattatacaggaatggcgcatctggaaagggttactcgatggtggtgattttgagggtgctgagtcgtgtccgcaaagcggtattcgtccggaatggtggagtcccgcttggatcccgtttacttacaacggggcgggagatcatctttgcattgatctcgcgccgactgacgttgggattcccggacagattatcacgctctggcatgatgatggcgtgcgtgaaaaacaagctgacagcttcattcagtggttcacacagtatgtagagcaaatgtag

SEQ ID NO: 430828 - DNA, 1539 bp, Serratia marcescens
atggatttaacatatgaagaattaaaacagcagcgcctgcaaaaattctttaacgattgccagcagcaagtgttgtcacaaattatcggacctttcggtctttcaacggccatgtttgaagatcgcaacggcggaaatgttacaacgctgcataatttcgagcgcgaagagtcggatttcattgcagataaagacatgtccagtcatgcaaaatcacgccaagattaccagcgcaaagagtatgaaagtaaagattttacaaaaaaaagcaagaaactacgggctggtagcgttgatggttatacgggtaaaacgaccaatgctgcggatatggatctcgaccatgtcacttcattaaatacattgtccaaaaataagaaagtgcatcttgctctggaaaccggggaaggtgttgaaaaagttgttaaaatggctaatgccgacgaaaatttggtgaccacacataagtcgattaaccgttcaaaaggtgcagctgaactggatacttttgcagaaaaaaatggcgaaaggtttgagctggatcctgagttagtcgcagcagcgaagaaacaatcggatgaccatatttcggcaacgcttaactcggcgctgattaaaaaacagggcaaagagttgttgcagacaggcggccaacaggcgttgcagatggggctgagacaagcacttggtttactgctcactgaactggtgaatggcttatttaatgaattcaaagttctcattcaacacggcgttgagatgagtaaaacgttgtttgaggagatccaccagcgcttaatgcgggtaattgcttccgtggtcaaaaaaatccccgatgcgctggggcaaatgttccagggtggtgtgagtggatttatgagtaatttactcactttcttgcttaataattttctctcaaccgcaaagcgtttcgtgaccatgattcgggaagggctgttggggcttttccgggcgttcaaaatgattttcttcccaccggaacatatgacagcgcagcaggcgttacaggaagggctgaaaattctcaccactgtcatcttgacttcagtcggtatgttgttgaacgaaagcatagtgacgtttatggcgactgtaccgtttctgaaaccgtttgcagatatgctaacgccagtgcttattggtattgccaccgggttactgtctgcctttctcgcatatcagatagacatgttttttgatcgttcccgttttacgccgagcgaaaaaatgatggatgagatgctcgcagatagaaaacgtcgggaagcgtttgctaatgaactggtgaccctttcagagagttcgctgggtaatattgcaaattacacgaacgcaataactaagtatcaagctattggggcaaacctggctactgcaacgatttcgactacagcaactctggcatgccttgagaggacaactagggaaacggctacgcaggtggcacggagtagcgctgtaattgcctttattaatgaaagccaagctgaaattgatgattttttgaaaaatatttga

SEQ ID NO: 430829 - DNA, 1035 bp, Serratia marcescens
atgagtttgctaaacaagcaggaacttcaggtcattcaagccttttcgtccgcagatttgccggaacgtatctttcgcgacagcaacattaaagaattaatcagcggtatgacggaggagcaacaaaaggttcagaagagcgcaaaagatcttgatcgcctgcgtagggaacagagggatggaaactttataactaactggtggaacgatcgcgacgatgtgttacaggatgcacagattgatcttaataaagccattggtcgcctgacgcaaaaatcttctcagttattgattgtcaatacggcactatccaaattactgaaccagcaacaacagattttattggaacagcaaaacattctggaaggtcagacacattcccttgctgaacaaaatgaacagatcctgaaacaacaggtgctactggaagagcagcaaaaagagattactaaggctaaccagggattgatggatgcaaaaggagtaacgcaagatcaggctaagcaactggttggctgcgtaaaacgggtgacagaggcggaaaacaaaatcggcgaggcaaacgcgtccttgctagccgaacttgaacaacgtgtcgcgaaattttcctcggatcttgcacagcaattgcaaagtggcctagaggagcaggtaaggcggcacaacattctcgaacagataatggaggacaaccacattgtacaacaggggcgtattgagacgttgcaacagtcgctgtcgcaggaacagcagttgtctcataatcaactgctcgccaaacttgagcaagaccgtcaggttttgcttgattcggtaaaatcaaccgtaagccagtgtgatgcgctccaacaagagttatccatcgtcgtgaagcagcacgacgataggcaaataagcaataataatgctgttacagcgttacaggtggaatttatcaaatcacgatttcgtcaccgttttgcactgacagtggtggcctgtgttgttgggctttctgtcggttggcaaattgcgcagcattttttgatgatctga

SEQ ID NO: 430830 - DNA, 1299 bp, Serratia marcescens
atgaaagctcgtttaataccaccgtacgaaaactacactggcaatgttttatggcgaaaagaggattttattaataaagtcgacgatatctcaacatctctaaaaaagttaagagatatgggatattgggccagtgcctatcctgaaggagatggcattacatttaaatacaccaaggatagttatcaaaaaagcagtatcgaaattctagaagacttctcaatatgctttgagtgggtagaaatagagttagctaaatcaagaagctctaacctagaattagctgaattagagggggaaaacaaaaatatggagtgcatagttattgtgccgattgagaagattttcattcaggaaaccatcgaggtcggaaagtatattttttattgcggaagacaatttgatgaagagtcacataagcgattatcagagcaagatggttcgtatatacagtttaactgtgacctaccatatattgatttattaaaacttaattcaagcattgatcataacagccatgttataaacatgtgtttgtctatagctgaatatgcgcttgatttagtcagattttctcacagctcatttacacgtatggaatatacccctaatcctgcaggtcaacgctctgacggattttatgatgtagaaatcattcctcgtgagatgactcatcttaaaccaattaagataagtggaatatcaagaccccttgccgtgagtaataattggctaggccctcaggttgacagcttgtattaccctgggttgcaatatttatcttctatctacgatggaatcgttgaaaatgaactttcaaaattagttagctccgtagttagggcatgtaggcaatctttttattcaattggcgcggaatcacaatttctaaacctagtctttgcacttgatggtcttgctaatattgacccaaattggaaaggatggaagcaaaggacctacattgcagcacttacatgtaataactcactaatcaaatttaagaaaaacctagaagtttatgacaagttatatactgacgtaagaaacaagcttgttcatgatggtaaagatttttacgaacttaacgtcaacgcgaacgaatcctctgaacaaatctttaagtatattaagataattataatactcatcgaaagtaacggcttttccactttgcaagaattaagagattatgcagtttacctacttcagcaggagggttatagaactgcttctgttgagataattgacaaagtatctcttttaagaggaaaaaaacctaattatccttcatggtga

SEQ ID NO: 430831 - DNA, 963 bp, Serratia marcescens
atgccaatattagacttcaaagaaataccagaggctcataaagcaacagggctgcaagatacatttgaacttttttctcgcgacttcttggcttttctgggatataaaattatatctgacccagatagaggtgctgacggtggggttgatattatagcggaagaaaaaaggactggtgtcggcggggaaacaattatccgttggttggtaagctgtaagcataaagctcatagtggaaattcagttaatccagtagatgatgcaaatatttttgatcgagtaatcgcgaataactgccaaggatttatcgggttctattcaactcttgctagtacaggtctgtctggaatacttgacgggttgaagggacgaattgaatttcaggttttcgataaagaaaaaatagagagggaacttttacattcttccagaggattggagattgccgaaaggtacttcccaaagtcgttatctgagtggaaaacagaaaacccaaaacccgcaagaatatttgccgatgaacctagcttaaaatgcaaagtttgtaagaaagagcttctgtctcaagacgacaagggagttatcactctatggcaaagaatccgcaccgactacaaaaatgaaccagagtataatgaacatactttttggacgtgtcgaggtaactgtgaccgagcactccggcagtatattgaaaaacatacaaataatagccttattgatagctgggaagatatcgctgatgtaatgatgccaactgtatttataaaatgggtcatgacaataatgaatgagttaagatctgggactctatattcagatgaggcatttgacgaactcaagacatttttgatcaatatttacccatttgcatgtcgtcatctcaccgaaaaagaaaaagaaagggttaaatcattaatgatgataccgtcgtatcttggcggcatgaactatgaaggttaa

SEQ ID NO: 430832 - DNA, 1368 bp, Serratia marcescens
atgtacaacaacctctatgctctcacagaaagccttttttgggttgatcgacttttagatcaggaatatgaaaatatcggattgaatgaattgctaattgagttagctgaatataataaaagaatagattcactgattatcgaacaaacaaattctgtacaagagtctcggctaaatgtttacatggcggggaatcgtaatattgaaagatataagagtggattattttcaatggacagagtcattcttgatgacgttctgtattcattgagcctacgatacagggtgaatctagcagaaaatgcacttgaaaaatttattgtaagcgatagaaaagataaggttgaacatctcaggaaggaaattgctagatttatcaggtttgctaaagataactttgaccttatccgtggagagtttatcgtttttgtacgaagcgaatcttatagtaatgattcggagagagccgatgggatttttagcgacaactctgatgctaattttatatttcgatatcttccccctaatgttgcccgtctttatgaaaatagactatccgtaaagaatatagaacgcttgggcaatacaaataaaattcggttcttaaacaagaatgctttagcgaatgaaatcatgttggaaattaaaggctgcgaaagttcgtatacaaatggatatatgtatcaacatataaaaaatgccattgataatgatgacggcaccatgtctatggagcttgtcatgggaaatcatagcggaaaaaaaagttatgaacggtgggtgcagggagcaaaaaaccgtacagttctctttcattataaaaaccttattactgaccttaaccaagcgcattcatgtagagcatcccttggtgcatattgcccatttcatggagagattcttcgtaaacttgatcaaaagaatgaagttcagagggttaaactctctattgacgttccattcttagagggactgactccaagcgaactctacaaaattagaactgactacgagccgagttttaatgccttccgctctgtactacgtgaagctgcgtatgacatagaagcagaaagtgatccatataagagacaactgataaatcaacattttgtcgagcgcgtgtgggatgaaggattgacagatattgagcaaaaaatacaagcctataagcggaaaagtaataaagaactttttcttaacagtgtgccatcattgataggttttattggtgcaccaaatccagtgtcgttggctacaggagcttttacgattctaaaagatgtttttaatatcacaagccattcttcagaaataaagagccacccttcatatttccttctcatgatgtcaaaagccaaaaaataa

SEQ ID NO: 430833 - DNA, 210 bp, Serratia marcescens
atgagctatctaaagtcttggggcagtaagctcggtaaaggattgtcgcaccttgtggaagcgattttgggcgggatattttctgtcgctgcgtttggctcactgttctggttcgacgaatggtggcaacgaattctgagcgcggcaatattcctgttgctggtgtttgccactattgctttgtgtagccttgtgagaggcgagcgatag

SEQ ID NO: 430834 - DNA, 1833 bp, Serratia marcescens
atgacgcacgtgttgaaaaaatttgcggtcatcatgctgatcgccgtgctggggccgctcggcgcgctgaacgcgctggcggcgtcctcgctgtccgatatcaaagtgaccaacgcccaacgtgaagcgacggtgtcggtgagcttcaatggcccgccggactatgcgtttttcccgctgcacggcccggaacgcgtggtgctggacgttaaccagaagggcaaggtcggcggtcttccgctcaatttcagcgggcaaaacctggtgaaaagcattcgttccagcgcgccgaaagacgcgcagagcgtgcgcctggtgtttgatctgacccagcgcgccaaaacccgcgtcgccacccgccagaacggcggcgtgcataccgtggtgttcaccattacggccgaaggcggcgccaataccgtggtgcgtaaagcgccggtgcaaacgcctgcgccggttgcggtcaatccaccgccgcgtcaggcgccggtcacggtcagccagccaccgcgccaggcgccggtcgcggtgcgtgaagcgccggagccgccgctgcgcaaagcgccgacaggatcgaatccctttaccaataaacagaccgtggtcgcaggcaccgccacagaggtcacgccgcgcagcagccgcgtttccgccggttccggcgatcgggtggtggtagcgatcgatgccggccacggcggccaggatccgggcgccattggcccgagcgggctgaaagaaaagaatgtcaccatcgctatcgcgcgccgcctgcaggcgatgctggacgccgatccgcagttcaaaccggtgctgactcgtaccggcgactatttcatctcggtgatggggcgctccgatgtggcgcgtaaacagggcgccaacgtgctggtctccatccacgccgacgccgcgccaaaccgcagcgccagcggggcctccgtctgggtgctgtccaatcgccgcgccaacagcgaaatggccggctggctcgaacagcatgagaaacagtccgagctgctcggcggcgccggcgatctgctggccaacagccaggctgacccttacctgagccaggcagtgctggatctgcagttcggccactcgcagcgcgtgggatacgacgtggcggtgaaagtgctgcagcagctgcagagtgtcggatcgttgcataaacgccggccggaacacgccagcctgggcgtgctgcgttcgccggatattccctcgctgctggtggaaaccggatttatcagcaatagcacggaggagcggctgcttggcagtagcgcgtatcaggagaagattgccagagccattcataacggcctgcgcagctacttcctggcgcatccgctgcaagccgacccaaaggtggaaaaccgaccgctggacgtcgcagcggcggttaacacctcaacaccagacgtgcgccagcctgagcctatcgtcagctcggccggcgcgagccgcagcgtaagcggcaagacccggatccacgtggtgaagcgggcggaaacgctgtccggcatcgccgacagctacggcaccaccatggcggcgctgcgtgatctgaacaaactgaaaaaagacggcgtgtgggtagggcaacgtctgaaggtgccggcggggaaagccgccgccgtcaccaccaccgtcgccaaggcgaaaacgccggcgaagaaaacgtctaaacataaagtggcccgcggggatacgctctcctccatcgcttctcgctacggggtcagcgtcggcgatctgaaacgggtcaataatctgaagtcggacgtcgcgccgctggatcggacgctgaccattccgcaggcctag

SEQ ID NO: 430835 - DNA, 1893 bp, Serratia marcescens
atgaaactaagaataagtaaaatatcattaaaaaacttcaaaactttcaaaaacattactatcaatccaaattctgatttcaacatcatcattggagaaaatagcgctggaaaatcaacagtttttgaagcaattcatttatgggagaaatgttataaaacttacattcttgcctcaaggaagggtttttataaagtcaagaaatcaacaaatagatatgttaattatcaagagctagatttcttacgaataacaagtgatgaagatctttttcacgatccaaaagatccaaatctaggtaaatgctctgaaattactctaaccttaaaaaatgaagagaaagaggataatagttgggagcttggatttaaggtcacatgtccaacatcaatcgaaaatgcttttttccgagttcaaccaatagatgaaagtcagtttactggctttgcggaatcattttgtgacgaggggaattttttggatgaagctatttttatttaccagacgagaccagtagctggagtccatcagtttgagccgtactataatgaggctcagattaagagaaaaattcaaaaaggttattcacacgaagttctcagaaacaaaattatcgctaaaagaaaatcaatatcagatctagaatcaagcatttctgaaatacttgagaaagatgtcaaattcgcgatgccttcagatactaggaaaaataaagatgaattcattcaacttgatgtttcaatcgatagttcaaaatattatgaccttcaccttcaaggaagtggttttcttcaaattgtagaaatactatctactgttgaatttattgaagcccccctcaagttactgcttgttgacgaacctgactcacacatccatacaaagcttcaacataaccttctcgcccacttaaaaaaaatagatcacaatcagttctttatcatcagccacaacgatcagtttgtgagcaactcaggagaaggtgaagtatttttcttaaacgaagatgctaagttaagtggtcatctagaagcgatagacccaaatggttttgacattataaaaaattctttaggtggggttattttatcccttgagagacttaacaatgccaaactaatcgcatttgttgagggtaaagacgatgaaaaatacctcagaaaccttaacattaagattaaagaaatcactaacccaatcgggtgtttaaaaaatgtagttttctttcccctaagaggaaaagataacattctccaaaaagttgagtataataaaagaacgctaaattccattctatctggaaagtcgtggcatgttatctttgatcgggatttttcaacaaacactattgatataaatcttagaaagaagataaatgataaacattgcaccccatatagtcacattggatattgtattgaatccgtattattttcagacttaaacattctcaaaaaatatgtactatccttgactaaagatattgaagaggacgcattatcaatacatatcgacaccgtaatcaatgaattaaaagactccatcaatgatataaactctcaactaaacaaagaagtagagattagattcaatagtcaaaaaaacaatcgaccggaattctccgaacttaatttcgtagatgtcattagatcatggtgcgaagatgaagtatttaaacctgaattagtgatgtcaaaaccaattatcaaaatgtttgttaccgaactagaaaataaaataggtgtctcgcttttcttacgtagctcaaatgaagatgacgaagtagcatcaacattattacttaaatactttgatttcattaaagtaattgatgatttatatccatcatttaggaacttgatggagcaacttgaagtgttagaaagggtgtaa

SEQ ID NO: 430836 - DNA, 957 bp, Serratia marcescens
gtgagcaacatcaacttaataactacatgcacaaatggcaaacactgtggaagcggagatatattgagcctgagtcaattttcatcaggccgaaccccttcaaatgtgcttgtgaattcttggtgtaatgctctgaatgaagctatatctacatccgcaactgtatgtgtagaggatctttataagggtgggcactggtcgacagccaaagcgatattaaataattatcctattgatttatgggttctttctgctggcttaggactccttcaccacaaagacaatgtggtaccttataaagcgacctttgctgttggatatgacgaatcaataccactgtattctcaagaatatgtagggaagagttttcatagaacatggtggaaagaagtatccaatagatctatttttaaatctaaacaccctacatctattgtagagttaatgaaaaaaaacaaaaaagactattatattatctgcggctctccagattatattaatgcaattgaactggatgtcattaatggtcttggttatttggttgatgcaaaaaaacaactgcttattataacttccaaaaaaatcaatgacaggttggcttcataccttttcaaaaccaaccaaaatatggctcagtggttgggatgcaatatgctcatgcttaatatcagtgtggcaaaatatattgtgaaggaatttacgtcaaaacaactcaataatttaaataagttatctcaaaatttagtagaagagctcaaggagttacctgagcgtgaagtaaaaaaaggaattcgccgcagtccggaggaagttaagtctttcattttgaaaattatgcaacaaaaaccaggtttgagtgctacacatgcgttgcgtgaatttcgtgactcaggatattcatttgaagaaaaacgtttccgggctgagtttaaggccctaatggaggctaaaccttaa

SEQ ID NO: 430837 - DNA, 1272 bp, Serratia marcescens
gtggcgtcacaggagagtaagttgtcgaagctaaagtattttttccctgatagtcaggattttatcgatcccagtttcgacttcctccgcgaaacgcgtaacgaacatcgtgtgcgtcaacgagacgatcattatccgcatgaggtttttcctcatccttacgacggtatgctggtttctaaagccgtggtggatggccttggtggcggtgagagcaaatatacccgtgcccaacgtttacgttacttccgtaatggtatgaagcattttttccggttgccggaaaatatggaaactatgggtgattgcggagccttcacctatgtcaaccaggatgtcccgccataccgggtggaagaggtcattgaattctatgaaacttctcgctttaactacggagtatcactcgaccatatcgtttttggctacgaaaaaccgggcgagccgttctcgggagagatactggcagaatgccgtcgtcgtcaggatattaccctgacgctggcgcaggagtttttggtgaagtcgcagaaaaactgcttcacgccgtttggcgtggcgcacggttggagtaagaaatcctaccgccagtcggtagaagcactgctggctatgggctataaaaatatcaccatggggggtatggtgccgctgaaaactgcgcagatcctcgagactctggaagagattaagccgctgtttaaaagcgatacccaggtgcatctgctggggattgctcgaccggaaagcttcgtcgacttcatccgtctgggcgtcaccagtatcgactccacaacgccgcttcagcaggcgtttaaagatcgtaaaaacaactatcatacgcctgatggccctgcctataccgctgtgcgtgtgcctcagtttgatgcgaatccaagtttgagtcgcaaaataaaatctggcgtgattgatcaggatattgcacggcatctggaaaaggatgccatgaatgccctgttcgaatacgataaagaagctttgtcccttcagaaaactcttgatgcagtcctagcttatgaacgcctgcattcgggtgaaaaagaggccgacaaaatccgtgcggattatgagcgtacgctgggagaacgtccctggaaaaaatgccagtgcaatgtttgccaggccatcggtatcaacgtcatcattttccgcggagcagaacgtaaccgtcgccgcggtttccataatattcaggtgttgtacaaccgtttacagcacacattatcattacgctcagaggaactgtcatga

SEQ ID NO: 430838 - DNA, 1128 bp, Serratia marcescens
atgagtgaatatcgtgttcccgccctgcgaatccgacagggtgaggagaggcaactctatagccttgcgatagaaggtaaacaaatcagcaaaattgcagcgatttcacgtattcgtcgcggcgaagagagtttggtcggttatcagcgtccagaagtacgtaaccatattcgcgaaattcagcgctacattgagagctcgaatccgatgataccaaacccggtgattattgcttttgataagcgtgtgcgttttgaaccgcttacagataatggcgacatggggcatctggtaatacctttctccgaagataaggattttgagaagccaggttttattgtggatggtcaacaacgcaccgctgctttgcgagatgcggaaattgactcgtttatgatgccggtctccgcttttatcgctaatgatgcggaagaacagcgtgaacagtttatgttggttaactctacaaaaccgttgcccaaaacgttgttatacgagctggcaccgcatacccacggtcgtttgccatccgatctgcaaatgcgtaagtttccttcactgctgactcaacgactgaacttcggcgaaggctcacttgcagggcgtatcaaaacggcgaccaatcctgatggggttattgctgacaactcgatgatcaaaatgatcgatgccagtcttcgcgaaggagcattgtatcgattccgtgacccggcgacagggttgggggatgaagggaagatggtgaaactgcttaataacttctggtcggcggtggaaaccgtgtttaccgatgactgggataaaaagcctcgctattcccgcttattacatggcgttggtattcttgcgcttggcagtttgatggatgaaatcgatcaggtgcatcaggactacaaaggtgaacctggctggacagagatcccttcctatactcgttttgtagaagagttaaaccgcattaagccgctttgtgcatggagtagtggcgtgtggagctttggcacagatattgatggtcagcctattgttcgtaaatggaatgaactgcaaaatctttcaaaagatatatctttggttactgactatttggtaaccagctatataaaaaccgtaaacgcagatatttaa

SEQ ID NO: 430839 - DNA, 2115 bp, Serratia marcescens
atgcatggtaacgaactgaactttcttgcgatgttgcattgcctcaatgaagaagcctggccactggacccggcaggttgtgagcattttatccaacgcgtggcagagcgtgagagccttggcgggatctataccgcgctccagcctgaaaacgacaacggcattatcgaaagctgtcttgaggagttgtctgagaagtttcctgatgatgaggaacttcagggtttaattaatgaggtgcggccgcttgttgattttatcgccgatgaagaaggggaagagcgtagcaagaaaattttggcgcttcgcaattggttaggtgagcattaccgtctgattcatcgactgttacgtaaccgtcgcgaagatccttctcttgcctggcttttcccagggttagcggggctgaatatcgcttactgggccgtcaagcctgaagatgtcaccctagacgaacttcttgaggactggcgttctagtgccagaaattctcctgagaagcatcgccatatcaccacggagaatctgaacgattgggtggatgcgctgttcaccagtcccctgacattttcacgtcgggcacgcttagcgctggaacagggacccgcgagcatagacgagcaaaattaccttgaacaagcgctggaaattgcgaagcaagagcaacgccaaaaagatgagaaattgatgctcgccctcaatgcatggtttgcgaatcacaaagaagggaaagcggttatattctgtagtgaagaagcggaatccgctcatctgttcgcaaagctggatctacagtccacctggaaaatcttccgccacgccccggataagtacgcgcttaacaaccactggcaggtgctgatatgtgacaggcgtggggaggatggtcttaatcttcatgggaaagatcgtttggccgttcattacagcctgagtcgcgatttcaaccgttttgagcaacgtcttggtcgtttcaaccgctactcaggcaacttaaggggcattaagccgatagaaagcctcgtcatcctgcctggaagagatggcctgtcatcggagtggatcaggcttttggatcagggcattaacctgttcaaacaaagcgtagccagcctgcagtttgtgttggatgagcaaattgaggctatgtggcggcattattttgagggaggccttgctgtcattagtacaaccatcgatgccctggggggagaaaaagggttcgtagccgttgagcgtaaaaaagtgtttgagcaggagaatctgctttctatggagcaagaggtcattgcttcacaggcattctctgaggcattgctggagtcggaggatgatgcggaacagcgtgcgctggacatgctgcaatggatcaccaaagcactcctgtttaatcagcaaattgaggaagataaaaccgggttcaggttacgctttgagcgagatgaatataaggggcgcacgctcgtcgatgtgcaaactttcatcgacaactgtttgcttggactggatttttcagagggatatcctccttctacagcaatcatgaccttatcgcgtacccaagctagtttgcacaaaaatacttaccctctccgctacgggcaacctttcgtggataccgtctggcaacttatgcagagtgatcctcgcggtacgacgatggcgatcctgcgcatgatgaaaacgattaaactcccgtcgccacagttttatttccattttcaatggttaagctgcgctgacctggatggcgataataagttggtagctcaacgtcagggagatgagtgttttgccccgcgactagaaaccttctggctcgatgctagtggtcgagaagttgatgaaaaaattatcactgttctggaaaagccgtacgataaaaaagggactgtgctctacgaagatatgaacctgcgaaccgatgtatggccacagataacgcgttggtttgatcccgaagcttggaaaaatacggtgctggagttaacagaaaaagcgaagcagcgtcagcaaattcgctacccttcgagtgacttattgcctattgggcaccagttgatggcagtgaaggcgataattttgtgcagcaaagagacgttccaagtggagtaa

SEQ ID NO: 430840 - DNA, 2481 bp, Serratia marcescens
atggaattccaatggaggaaactccgtgagctactcgcgatggacgagtgtcaggacaataattttgtaatccatcaggatgacggtcagtttttctatcgtctctggcgatgtctgaatgatgcaggggcggggatctcagaccgattacatggctattatgacgctttacaatgcgccagagctcatggccttctgccgttgcgcctgccgctcaaagagcgcatcttatcagaagatttactgcgtgctggccttcggcgcagccgagattatccgggtgaggttctgttagacaagaacgcattacagatcgctccagagttattggcagtgtggcgaaaggagaaaagacgtctgctccaggccccgccgctggatacgttgttaccgattctgttgaatgacactaaatacactcattacacatctgttgggcagcaacttgctgtacgcacagtgttgacgagtgagaaagaccgttttttgtttattaacctgccaacgggggcaggtaagacgttcattatccattctctgatgctggcaacccccgcaagtcagttgacactggtcatcgttccgactatcagccttgctattgaacaggctcagcgcgctcagtccatgttactgcaggcaaatgtcgaccatggtggcgaatacacttggcactctgggcaaacaccagaggcacgcgaggcgattaaggcccgtatcagggccggtgaacaaaggttactgttttgttcaccggaggcggcatccagtggttcgctgctattgctgttattttcactggccaagcggaaaatgattggcgccctggtcgtggacgaagcccatcttatcgatcaatggggtgcggaattccggccggaattccaactacttgcgccgttggtaaaatcactggtgaaagtgagtaaggcgagcattcgcacggtacttctttccgcgacgtggagccaggcaacgctcaatacccttaaggaactctttgccggtgatgaccctcagacgatcgttgaagttaacggcagtttcctgcgaccagagcctatgtggtacgtcagcatagcagatgatcgtgaagatcatcgccggcaggtggaagatgcgatttcaacgctaccgcggccgttgatcctttacgttacgacggtcgaggatgccatcgactggcaccagtatctgcacaaggccggctataagcgctgcggattagtccacggtaaggtctctccacgcgagagagaaaagcagatagccgactgggctgaggataacgttgatattatggttgcgacctctgcatttggcgtcggaatggataaaaacaacgtacgcgcggtgctgcatgttaccgtcccggaaaacatcgaccgtctctatcaggagagcgggcgtggagggcgtgacggttatgcttcagtagcacaactcatttatagggacgatcagatctctttggctcgtcaccttaaccgcgataaccttatcggtgcaaaaaaagggtttctacgttggcaaaaaatgcatcagaaccgggaatcggaatcacccggttatttctcagtttatctggataccaagcacgacagcatcaaaattgattctcgtgctaatgtcgcgtggaactggcgcacactcctcatgctccaacgtgccggcttcttgagtctgcattttgctgcaccggatctcgaacagtttgcctcagataatgtggacgatgcgaaggtagaacagtactttaaccattatttcagccatattggcgtcaaactccatcgtgaaggtcatcttgatgtgcaggagtggaatggcacgttaaaagaattgcgttccagagagttgcgtgcccggcaaaaagggtttcaggtgcttgaagattggttgaatcatcaggaaaatcagctatgtagtgtccttgaatcgttctacacgcttgatggttacgccccagaactggcttgtggtggttgcccaggttgtcgctctcaggcgttgtcagcatatacgcctacgctgggcttgaatgcatatttgatttctggcgaagaacgcgagcgcatcggtagcgatatgcgtatttattaccctccggcccgatcctccgctttgctgcttcgccagtggatcgactggatcgcacgtttgctagtcacacgtgagattcaggccatccgcgcaagctcgaccgtactatcccaattaagccaacaactttataagagcgtgccattctggtgcgcgctttcacatgacgatccctcgacaaactggaatgaactggtacttgtcctgcccggagagagcctgccagaacttgacccgtttagtgatatcaaacgaatcattgtggccccagagacgctccctgaaaaaaacgttcggggaaggctatggtgggagagtgatcccagagctcgtacgctggaccaatttataaggagtttaagcagtggcaatcattaa

SEQ ID NO: 430841 - DNA, 903 bp, Serratia marcescens
gtggcaatcattaataacgcccatccgggtagccagattcgcttgatctgcacaattgatagggtcctcaatcgccgtggaggaaaaccgattttgcatgaagatttggttgaactgctgcgtccccaggcgctgccgcaatccgatattggtgcggagcgttttcggaagaatctggatttctggttggaagaagggctatggcagcagactgaggcgggtatttcccgacatactccactcgcgaatgagcgcaatctgccgagccgcgtattacgcacattgataacaaacgagccaaaagagtcattgctggaaggcacccgtggacagcctttcctactcagtatcaccgcgttgcttgcgcaggataattttgccttcatcggcaagagcacgctgacaaaagagagtatcacgggaggcgttggaccgctgctcaaggattcgaacaacgaaggcgtacgtcgccagatcaacttatcaaatgaagcgacaacgttccttgaatttgcttttttcctcggttttgttgagccatttatggatggatatctggttgatccgacgcgagctattgagggcgtactggaccgtgtgctggagaaccacagcaaccttcccgcaattgacttcatatcccggcttgcagaagtcttaccgatgatcgatggcggaagctatcgtcagcaggttgaaccaatgattacggcagataactggacaccgaaagaaccattacatttgagcgcctctctgagtcaggcgctggtgcgtcttgagctggcactgaagataaagtttgagattagggctgatgatcatcaggcgctattgttaaccgggccggacggtaatacccaacggataagcgccattagccctggggagcttttaaaatga

SEQ ID NO: 430842 - DNA, 3138 bp, Serratia marcescens
atgaaaatgctggaatattggccgtctttaccgaacatcagacagtgcattcgtaccgaggcggaagagctttcggaccatacgctgctggccgttcatgagccagcccgaatcttacgaatgaataccgacggcagtccgttggcgtatgaaacggaagagcagttgctaaaacactttctggaagtgcagcgcccactgccaatcataggcaacacaggggtagggaagtcccatattatccgttggctggatgcgaacctgcgcctgcgccctgaatttaaaaataaacagtggcatattgtccgtatacccaaaagtgcaagcctacgggaagtacttgagcttttactggaagggcttgagggcgaaatttttgatgaagcgcgtgaggatatcaacaaggtcagcgataaacgctcacccaaagagatcgctgaatggcttttgatgttgatggggcaagagcttcgcgatcttcatgcgcgttcaagcgctgattatgagcagcttaagcaggaagcggcggaagcaagcccggagcagcagaatgcactgcgcaagaagtcctctgagttaaagaaaatcaatattcatgccgcagaaaatgccctgccgacgctgatcaacgacgcttatttcaaacagttcttactaaaggaagaacagtgcctgttccgtttcgccagccgtctaatcagtggcgcaaacagcgatgaacttgaagagggtgaacagcaacttaaagccagcgatcttgatttccaaatacacctaagtgatctgagccttccgacgcgttcgtatatcagtcggacgcgactcaatacgcatgaacctggtcggcaggaagccgctgatattctgaacctggtgctcggtaaagcagcacaaaccctttttaatcagctgtttaatttccgggggcgcagcttttccgatctatttctacagattcgaaaagcattgcatgaacggggaatgaccctgatggtgctggtggaagatatgtctctgatcaccgctattgaagatgtgcttatcgacagcctggagcgtgaggggacgcgcgatggtgaagaagtgctttgtccggtgtgctcggcctttgcgacgactgaaggttatcagggatataaccgtcgtcgccaggggatgcgtgaccgtgcgaaaggtgaatggcggatcgaagaggttgtaggtgagcgttcagagacgcggcagcggattgtcgacttttgcagtcgctatatcaatgccgcgcgttttggggataagtctctgctcgagttctggaaaaaacgtaccagcgatacgaactgggtgccaaactgggatcagcatgctgaagccattgagggtattgatgcttttggctacagctctctgggctatgcgctttttccctttaatgaacgcgcaattcatgcgctagcggatgttcattgtggcgatggtaataagggcataaaatttaatcccagaatcatccttaacaaaatcctgttaaacatcttgttcaactatcgggttatggcacaagaaggacggtttccgcctccgcaacttgatggcattaccgcacctcatgggctgcgaacctggctgagtcgaaaaacgttggcggagcaggaccgctctgaaaccgtcgcggctatttggggatatccggcagacaatggtcccgcccttgctaccgcattgcctcctgcggttgtgcgctgctttggcctcaatgatttggcaaacgaactcgcgtcgactgagaaaggcgcgatcaaccccggtaatgctgcaacggttggacgaaaaatcgagcctgtcagtgcgaaaacggtgaagccaaaccctgttccgcaagaatcggttgagcctgttgatcccctcgaagcacgtgtttacaagatggaggcaagcgtttccgactggatactgaaagatgtattactcgatcaggatacggcgaaatatatccgtaactcgctggcaatgatttatgaccagcacgccaatgctgactggtatggtgcgaagtctaagcccgatattcgcagtgggaatttcgttaacattaatgtcccaaatgcgcacggtaacaggctgaaacaggtagtgaattttttctccgaggcggagtataagaaacggtcagtctggataactgaggtatcgctggcccttgcacgtttcgggctctatatggacaaaaaaaatggcccggactggacttattcgaaagctgcggaagattatctggttatacagtcctttgctgaccgttgggtgccctacgctctcaccgaactcctgcgcagcaagcgtgaaaatcaggggatgatactgactgaacatctgcagttggcccgggcccttggcattatcaaaccgaatgcgacctccaaagaggtgctgaatcaattgctaatgaacaaagaggcattgatcggccaacataaatctgccgccacagagagcattgccaaagtacgctctgacgctcttgataagtgggaggaggtgaagtcgaaatggctaaatctctatgccccaaacgatcatgcactggaaggcgatattgtgcagaaaatggtgctggaggccctgaaacaaccagcagacagcaggatacagcaggcggcgaacagaacggtaagagagattgcgtcaacgctgaccgaggtcaagtatttctccgattgcgaaaacagtgaggcattcgctcaacttatcgaggatgccgtatcgttgttggaagagttacgtgaagaaggtgactatccggttaatgctgaggtggactgcagtacgctgcaagcagaactaagtgctttaaaagaaggtggcacgtgggcaatgatcctcaaattacgaagcattacgcagaaagaagaaccacttgctttgtggcagttgctttgcgatttagatggaaaattactcaagcgttttacagatactctgcagcggtggcaaaagatttgtaagcaaaccttgagtgcgattacggggtacaaccaggataaaggtggtcaccgaatcagtgagtgtcgcgcgcaaattgacagagtcctgatggagatgatgcaggatcttcagatcctcaaagagaatgcaggaggtagcgatgaacacgcttaa

SEQ ID NO: 430843 - DNA, 744 bp, Serratia marcescens
atgaacacgcttaagcagcaactcatccaacttcgcaaggattttcaactgaagaagcaggtgaaacaagaagataatgtttacgaaaagtaccggcaaattcgcgacgatttgcacaacgttgcttcatctttaaaggagacggcaactcagcttcatgtcattactcaactgccttcaacgttgtcgcaaatcactcttgatgcccatgaaaaagcggcgatttatgacgctgaaacagctctgaaagaatttgcagaaaaattccagcatatggccgatgaggctcagcaaaaagggggattaggcgagatgctcgatgcgctgatgtccgtccaatcgaaatttgcagataaaattgatagcaactggcagacattcatccacgatcttgaaagccaacagatgctggaaacggtcttccttgaacagcaaaagacgttaggattcaataacacctataacgactaccgaaaggcacttgatggcttcaatcatcagaaaatgatggggcccgctaatcccattgtgattaaaaaactacagcagtactgtgatgaaatggtcgagttaaaaggcaaaatggattttaaagcgccagcctgcgtccttgattttttccaggcgctcaataatagcaatcgcgcaccgttgactttgctgacgcctgaagtccttagctggctgacggaaaaagaaatgctgaactcattcaatgtgatgcgcaaaggtttactgggatga

SEQ ID NO: 430844 - DNA, 4473 bp, Serratia marcescens
ttgctggtgtggggagacacaggtggcttcttcagtgaagaagagttactgactcacatcagaagagagttgggcgttgtttttaaacgcactccgaccgatgaggaatgtgataatacacaattggcgatgctagacgccgccatgctgatccaagtgccgcacctcagcggcatgcctgtctggcgaacccgaatgggggagacggtccatctcttgcgtaacttgcgccagtggatgcatgggcaaaacctggaccagagcaaaacgctggtatcggactatcgctttattcgccggccgcgcacttatcccgatcgcatttacgaaccgaccacgctgattactggctggaaaaagcagctgaaattaagcgagcgcgtttgtgacattatgcgccaagcgctggcgtcagataagtccttcctgctggcgggttttcaggtgcgatctaccgaacgcattatgcagtgctggcaggatcacaaggtgaaaagcgacacggccagcggaaccattatttgtgccggtaccggtagcggtaaaacgctgtcgttttacctgcctgcgctgacccgtcttgccgaggagatttgcagcaaccctgagcgcaaggtgcgtatcctcgctatctatccgcgaaaagaactgctaaaggaccagtttgctgaaactttttcacagtgccgcaagcttgacgactatatgctcacggcggccggacgaaaaattcgaatcggcgccttttttggcgatacgccagtgaaagcggaatggtcgaggaaagacgttaagggtaaggttgggctgccgttcgggttgatgaaatgccagcatccccacccgcatcatcctaagcaagcgtgcggaggggcattgatttggcgtcgtgaggacatatttgacgcgcgagaggtgctcacctgtacgcagtgccagcatcaattggatcagagtgaaatcatgatcacccgtgatgcgcagcaaaatcgcggcgatgccccggatattctatttaccacaacggagatgctgaatctccagttgaactccacctggagtaatcatctgtttggcgtcggagagggctatggcccgacgctggtccttcttgatgaggtccatacctacagcggaaccaccggcgctcaaactgcgctgttgctacggcgctggatgcagcgcaccgattgcctgccgcattttgttggcttgtcggcaacgcttgccgacgcgcggcacttctttgccaaactggtgggcgcatctgaagagcaggttgcgctgatccacccctatgcggaagatatgatcgaagagggggctgagtacctgctggtgctgcgaggcgatcctgtctctgaaacggcattactctccaccaccatccaggccagtatgctggtggcgcgcatgttggatagtgaagcgaataagtcgaaaggcacgtggggtaagaaaaccttcatcttcaccgacactcttgatggtaacaaccgtctgtaccatgacctcagcgatgccgaaggctgggtcacggggccaggggcgtcgcgcattgatcacccaccgttggccgtattacgtagcccctttgatgatactgcacctgagcggtctaaaaccgaactggggcagaactggaaggcggctatggagattggtcacgacctcgcgcaaaacaaatctatttcccgaacgtcgagccaggatgctggtgttgatgcatcagcggatgtcgtggtcgctacctcttcgctcgaggtgggatataacgacccgctggtcggtgctgttgttcagcataaagcgcctaacgatgtcgcctcttatttgcagcgtaaaggtcgtgccggacgtccacggggcatgcgtccttggatgctggtagtgctttccgagtttggccgcgatcgcatcgagttccagcgttatgaagggctgatgagcccggagatcaaacgtcagggcctcccgctgggcaaccagcacgtgcagaaaatgcaggcagctatggcgaccctcgactggatcagcaaagtcgggcggttcaaagacctctggggcatgttgaaaaaagttgaacataatcagctgaaatatgaccgaatgtattgcccgcttatcaagctgattgaggaggttctgagcggcggcagacggctgaacgagttgacgcgctaccttcaggacgccctgcaattatctgacgacgcggtgcagaatatcctctggagcccgccgcgatcggtcatgtttgagtttctcccaaccatactacgtaacctcagaactcgctggtcgattaacggcgtggagtgggccggactgcgcctgaatcagccgaatggcgagggcgaacagcaccggagcaattcgcccgccccggaatacatcccgcagaacctgtttagcgagctgaatttgccggaactggacattcgcctgaagcgtggatttgacgatgaagaccactgggaaactctctctttctggcagggaatacgtgaatttgcgcctgggcgactctctaaacgctatgccgtcaaatcgaacaaaagtaccgactggctggtgccacaatcctacgagccgatggcaggggaagggcggcaattcgttgatttccagataagcgatgcgttcggtgatagctggcaaaacgagtgtgaagttgactatcagggaaaaaccatcaaggttgttaaaccgtcgaaggtcatgaccacccgggccgacattcgccgtataaatgataaaagtaatgcgcaactgcaatgggtactcaacgtcattaaccccgctattgctacgccagacgaggtgccgaagggaccctggaagcacacgctgagtgatgtcacgttctacaaccaccagcatatgaccccgctggaattggtccgcttttctaccggatcgcaggcgtcgcttcggttcaggaataaggagcgggctcacgttgatttcacctgggttaatggcgaggaacaggttggcgtaggaagtcgtcaatgggtggatgcaatgcgcctgcgttttaacctcacctgtgatgatgtgcttggtctgctgcatcaggaagaaattcagcgaggcatgcgccccgtttattttcaacatcttgtaagacagtcgccggaatttgaatttgacagtttcaacgcggactgggccattgaatgttttatggctcagcttgcggagacactggcaaacggcgctcactcctcggttgagtcggcattacgagaaatggcctccgaaagaggggtagaaaggctggcagagatcccggccagcctgttccagccggatactgacaatgaagcaggcactgaccaggcgctacagattggcctcaacaaacttcttcagcgaccggaaatacagcaactgctgctgaactgcgcgcaggcgctctggaaacccctggctgaaatcgacggttttgttgaatgggcacgccaggtattagcggataccttggctgcgggtgtgcagcaaacgctaagcacgctgcttccagacgttgatgagcgggcggtggtgacagactccttttggatgagcgatcccgacaagggcgcagaatggctggagatctggctctgtgaaatggagtctggcggtagtggtattctgattcgtttacagcagaagtgggcagaagatcctgtctccttcctcaatgtgctggtgcgtaatctttcagccagcgactacgagcagatcgattacgatctgcgaactgtgttgcagatgctgcaaacggatgaggcgcttcgtatggcgatctcagccgtacgtgaagcgagcaacatggacgcccggcgggaggctaacaagaatctgcatttgcggctttcacagcgcggtctgcgcctttcccacagctttaccacggtgctgtactcgcggattctgcgggcgggcagcagcgatgacacagacacccagctttatcagttactgtcggactggtcgtcgcttgaagtgagcgcgggtattgagttcagtatgaacaccatggcgcacgcgctggcggtgaacgcgcttagtgtggaaaccgatgcttcagtcgtgtttaacgcgcagtgccggaaccaaaacctgctctggccgcgtggctacacgatccgccaggctgagctcggcttttacaatatgttttgctcgcgcaaagtcacaaccgagcgtctgcttgctggcgcgttatttagcgaacaaatcgaaaagatcgctcttgacgatgactggcttgggcatttgcatgcggcgctgcgtaaaggcggtcgtgcggagctgatcctcactcgccagcagcgaaatcaattacatcaggtcattaccaccgtgcaaattgaacccatcgatcatttgggactgctgctgtatccgcgtctcggtgaagtccgccgtgagcaggatttgctcatattgcgtattgaactggcggaggcgatgcaatga

SEQ ID NO: 430845 - DNA, 336 bp, Serratia marcescens
atggatttcattgaactgctagcctgtgcggcgaataacggtgcgccgctttcgctggtgacccgcgacgaccctatgaaccgtatctttgtaaaagcattggaaaagcgcctgagcagctttgcgaattttcgtctggaatggcgtaaccagctgcatacaaaagtttttttgacgcctaacgtcttcctgaagggctctatgaattttacccggagcggcgtcaatcgaaatgaagaatttgtagaactgaactgcgattcgcatatgatcggtgaagcgatggccgaatttgaaagtcagtatctttttagtggatcacaggaagcgttctga

SEQ ID NO: 430846 - DNA, 2172 bp, Serratia marcescens
atgtgtgcagattggctgaaaaacttttacgctgaagataaacatctggattatgacagggcgatgcagggcggttatagcatccaacaaatgaacacgctgattcagcgggccgctgcgcaacggatgccctgcatcgttccttctacgcgaacgggaaaaacggtgttttatgctctggcagagaatgcgagaagcctggacgaattacggcgcattttgaccgcggcgctgggttccgccgacactaatgcggatatcagatccctctatcacactaacgatcctggggaacagttgcttctggataaatctccggacggaattctgaccttcgactttttaccggtgccggatggatcgccgcaacaggtaaaagaatggcagatagcccgaatgaaacgggtctacgccatgctgcaaatgatgatggatctttatcatcagagacccgtcttacattcgctggtcagtcggcaaactggacgaatcctcagagatttctacacagcatgccacgctcgcgatggcaagattgccgaacagtatctggaagagttacgcggaaatcagatgctttcttctcttaatctcctgtttcttgagctacaggggatggcggcttcggcaaaatgggactcgattctcaaccaccctcggctggaagtattgttgcgcggtcgggtgccggagcgtatccagcgcctgctgttgcgatcctctggccatttaatgcttaacgccatccgcgatgcgcacttcccgctggacaggcgtgaggatgcaaggcgactggtgctgggcttattgccgctgtacaagcataagccccgctttgctcatcaggcgagttttctgcctgactggcaaatgtggaccatgggagccgcgctgctggggatcaacgaatggcaaacggcgtcgcctctattagatcctgactggatacagcaggtcgaggggtgggtgacaggcgcaagttcgctgcccgcgccgatagaagcggaagaacaggcgttgatccaggcgccggttgtcatgctgataagccttgaaaacgcgaccgatttgttacttgaagcgctactggcggacgctgagcgcgaaagtgagatctacgcgcaattggcggcgatgcctgaagcaacacgacaggcattgcaaaaaatacccaaactctgggaggcgtggcaggcgctggaaaaacgctgtgaaccacaagactatggctggagtcgctggcttgcagatatacaacaggctacggaatccgaacggtttgaatcactgcgccagcaggcgactgttcactacatggactggacaccgtcaaccttcagcgaaaggcagtggcaggcgctgctagagcagcagtccaacgcccagttgagtaaagttttacgagacgtactgccaacccttctgaactggctggaagaatatgatgttcaggtatctgcctccttgtggccggactggcttatgctgctggctgttgaggatattcgctcagaggaggatgtgcgtcttggtgggatgattctggataaattcctttccggtaccttcacccgagaggaatatgcgtccgcaattgaatcggtagcaatgctgtgctctgaaaatctgtcggtaagaaccctgggctactcgattgatattgctgagcttctttatgataaagtcaccgctgatgacgccgccagattaggtttctgggtcacgttgcaggagttgctcaagcagcgctgggagcgtctggatgtcagcatgcaactttctacgcgcatggtagaaaggctctatctcggcgaacatgcgggacacactttcccagaagaggataatacaccgggcatcgcgtcttcgcttcatcgcgatctcagcggtaaaacgttggcgatttatagcctgatggaaggagcggcaagacgcggaaaagaggcgttgcttcagctttatcctgggctacgcgtggaactcaaccacgatcacgtcgctacctcggcgctggtgaaccttgcggaaaaagcggactactttatcttcgccagcggcagctcaaaacatcaggcgttctataccgtaacggattatcgcaaagagattatctatccatctggtaaaggggcgtcgagtatgatcgccgccttcatcagtgcgctggggtaa

SEQ ID NO: 430847 - DNA, 363 bp, Serratia marcescens
atgaaaactacgttatacaaagatttcacctttgaagccgcacaccgtcttcccaatgttccggaaggccataaatgcggtcgcttacacggacactcttttgtcgtgcgccttgagattactggtgaagttgataagcataccggttgggttatcgactttgccgaactaaaagcgatttttaaaccgacgttggatagactggatcattactatctcaatgacatccctggtctggaaaatcctaccagtgaagtgcttgcagaatggatctggaatcagattaaaccacaactcccgatcctgaacgcagtcgtcgtgaaagagacatgcacagcaggctgcatctaccgtggtgaataa

SEQ ID NO: 430848 - DNA, 231 bp, Serratia marcescens
atgaagaagcgtttttccgacgaacagagcatcagtattctctgcgaggctgaagtatccgcccatgaactctgccgcaagcacgttatttccgatgcaacgttttacacttggcgtaagaagtatggcggtatgggggtgccggaggttaagctcctgaagtcgcttgaggaggataacgccagactcaagaatctgcttgccgaagtcatgctggataaggaagtgtaa

SEQ ID NO: 430849 - DNA, 210 bp, Serratia marcescens
atgcgcaaagcccgatttactgagcaccagatcatcaccgaattgaagtccgtcgaagcaggccggaccgtcaaagatgtgtgccgcgaagcgggaatatctgagtactcgtactacaactggaaagcaaagtatggcggcatggaagccttagatatacaacgggaagaaacacagctaagcataatgccacttcctccaccccattag

SEQ ID NO: 430850 - DNA, 1794 bp, Serratia marcescens
atgaacagaagagatctggtaaaaactatcatagcgggcacctcaggtattttagtagcgaagtcctatgcggcagagaccgtaaaaagcatcgaatccaacagtacggaacaagacttatcttcaagtaacaatttatctgttctctcgtcaaaattatccggctatgatggtgctaaatatataggtcgttgcccagatattgatacattaagaaaaataaccccccaatttcctgggcaaaaaattgatgtcgttagcttttactccactaatgatatcaaatcaacaggtggaggagagttttactcagctcgttcaaaagatctaaaggaaaaaaatggaattgttattagagtagatgaaatctggtgctggataagagttgattccgtatcaacaaatatttggccaattgaatggctaggtgtcaggattggttcacctcagtacggcgaggacaattcaaatatactccaagaatccatggtaaataactatcgagttgagctgatttttccaagtggagtcacttatcttaaaccaggcatattacggataccgggtaattgggccggagtactgagagggagcaacacaagaaactgtataatatcaccaagcgaggatccgaaaaatcccgatgtgatacttttagaatataatcatgagaagatcttcagttggggcttgaggatagaaaatatttctttcgatggaaataactatacgttgagtgcactacgcattagtaacgtcggatatatttacaccaacaatctacagatctactcttttcatggttgcaatctttggctagataaagtacaagattccgtttttgaagcaaccaatatacaagacggtggatactctaccggtgatgttagcgacaattcacaaacgacgcatccggcattattactaacaagcaccatcaaaaatgatgcgtgtaacatgataagattcaacaactgtcaaatagagaacaataagtgcagcccttatgttcgcattaaaagtggaattgggctcatgttcacccaaacacatgccgaggttagagatcaaaatcaatgggcaaagagagactttttagaagttgataatgcagatgtacaaataattgaacatgctggttctcgcttcagaaacgctgtattaattaaaggctacggcgcaaccacgataagcggggggcgtgcattaggtggtgatattaagactctggctgaggggaaaagaggcaatatttctttatccaattgccgcgtagggaacataataatttcggcttactatggaaatcatcagttctcaaacgtctacgcagctgatgtcatattaaataaaacggcaggttctataagatggtttggcggctcgataggtcaactgtctgtaaatggctctgtcaatccatccctaggagttcattttgatggagttatcgtatctaaagacgtatattttaatgacaaactcaatgacagaaaattatctcattcatttataaatagtactgtactgggaaatatgatttttaactgcattaatggcgtttattacgctaacaatgttgcagggaaagagttaattggggccgaacagaaaatttcaatcccaagtaatgtgcgaacaatttacagtaatgcagtgccaacatcaggtagttacaatcaaggagatagagtcataaataccctccccatagctggtagttgggacggttggagatgcgtagaatcaggttctccgggtgtatggaaggggtacggtaaaatatctgattaa

SEQ ID NO: 430851 - DNA, 375 bp, Serratia marcescens
atgtctggcaaaataacatctgtggtggtgatcctgctggcgctggcggccattgttagcgctggcgcctggttggctgggcgtcactaccagccaacgattgaacggctcaacgacgcgctgacgcaatgcaaagccagcaacaagcaacaggcagcgacgatcgccagccagaacgcaggcataacgtcgctacagcgtaaacaggaagagatggaagccaagtccaaggcggagcaggaaaaagcccgcagggaggcgcagggcgattatgagagggctaacgcagttatggctgagcgaacaaccggcgaggtgtgttccgaagcgtcggcagcgtttgacgcagagctgcgccgggagcgtactcaatga

SEQ ID NO: 430852 - DNA, 273 bp, Serratia marcescens
atgtcattcgttatcaggaaaaagcttcaggtaaataagtcatacccagatttgttgctggaaatccctggaggaaccgaggacacggacgttacctatgaggtgatcgcactcgagcgcatggctgggacaagtgcaactgtctggtacacgttctccgtcggtggcgttacgtcgggatggaaactgacctttgactttatctatagcggtgttggcaatcctcttgaggagggcgagcgcgcgctgaaatcttctttaggcgcgccataa

SEQ ID NO: 430853 - DNA, 2250 bp, Serratia marcescens
atgaccgtatcaacagaggtaagccgagaggaatacaccggcaacggggtgacgacagattttgactatcgcttccgtgtgttttctgcggatgagcttgttgttactgtcgctgacacaacagagaacatccgcacgttggtgttgaacaccgactataccgttaccggcgccggcagtcgtaacggaggcaaggttaagcttgtcagcgcgctggccaataactggcggatcagtatcgagcgagagctgcctgtcacccaggaaaccgacattcgcaaccagggcaacttcttccctgaagtgcatgaggacgcatgggataaattgaccatgctgatccagcaggcgattggtggccttggccttgcgctgcgtaaacctaactggctggcaaagtattacgatgccaaaggtaacagaatcgcaaacatggcagatcctgctggcccacaggatgctgcaacaaaaaaatatgttgatgagaccgagcaaaacaacctaagacgagtattgcggttccctgaaaatgtggctgcaatgcctgatgctgaaacgcgaggccactcactccagggctataacgcagagggtaggccaacccccgtgttttcaatgaccgatactgccgatcttgcgttaaaacttgccagcgaaggcggggcggggctggttggttttgacatcgaaaagacttacccaattgcaaccattggccatcagttcactaatatttttcgcaatgcccagcaccttgagttttattacgacaagcttggcgattgggatgaggcatattttcaagcccagatgaacgtattccgacttggattttcacctgaggtgctgcttcctggcggggttatcgatatttacaggccgtttttcggcggtcctgcaattggtgacctgattcacgcccgccatccagagctcggcctgtataacggggatggaacttataaggggacgtggccacttattcttaagggtgtctacaagaagaatgaggacgggttaactaacccgtatacagggacacaaattgttttccacggatgcgcagaccaaaacgataacacatggcgtgatttcggcgtaatacattctgcgcctacaaatctatccgagagacgcgtacctgtaccagttaaacagtggtttgggacggttaaaattgatgacctaaatattcgtgtccttaaccgagacaatagccgtcatggcaaatgccatggcatctatagcttctacggcccaaagagtgaagttaataaggttgttgtctaccagccatatggtggcgggattatatgcgatctgatgtgggattctgtactacgagattgcgtattgctacagtgcggccgtatgagtcctaacattggagactatcaatcagccaagaatgtcgacataaaatatcaaacctatgccccgctgcatatcctatattcggcaaccggctccgataacagcaatttcatcagattcgaaaacttccacttcgaggataattatcattctgtagctgacgttatcgtcagtggggactcatcgccgatccacatcatcaatagccaccacgaaactgatcgcgcggcgggcgtcccggctgtggttaatggtggcttcaagaagcgccttgccgctggcaccgttggcgttcggtacatggggcaggactcagagccaggatttgactataccgcaggtccatttactgcgcgcggcggatacctgcatgcagacggcgccaatggttatcaactggggtatgacgatgtgtattacggcggccgttacacaggcgcaatacttgaaaatattaaattcccgaactctggcggcattaaggtagcggcaggtaatactgcatgcaccgttgtggcgtctaacagcactttcacagacatcagttttagtggtggtaacgagagctttgccccgctgaaaatgtccaactgcaatatcaaatcgttgacaatgagttatgcctacggatttaaattgtcaaacgttgaggttgagtcatccataacactatccaacatgtacacgaatgctaatggtatatgtggttttagtaatgtgtctgccgcaagttttaatggcgttattagctatggaactggcgacctaacactaacatctccatctgttaaatctgaggtggtttgctacttcgggaatgtaacaatcccacgctattcgtactacaacaacgttattttgggaggggcgccgtaa

SEQ ID NO: 430854 - DNA, 702 bp, Serratia marcescens
atgactattacacttccaacttctacccctgaaatttctgttatccacggcaagcccgtaaccacttctatgggggtgtcctcgttcttcggcaaacgtcacgacaacgttttgcgcagcatcgataacctggaatgctcagataattttcgtgccctcaattttgaggagacatcaatatcggtatcacagccgcgcggaggcagccgggaagtgcaagcattcaacatgaccaagaacggtttcgtattcctggtgatgggcttcaccggcaagaaggcgtcccagttcaaagaagcgtatatcgcggagttcgaccggatggagagcgagttagccagccagcgctatggccacaacacgcttggcgatctgaccggcaccgctaacctgtccgcattggtcgacaagttgcagcagatcatccatgaaggtgagttcatccccgctggcaagcgaccgaactacagcctgccggcgaaccggaagcatgaagcgacaatcatccgcgacttcctgagcaaggatgacagaagcaccctgatcactctgctggaatggctgcgcgctgatgggttcgatgtgtcggcggccgatcgggagctggacattatccgcggctacgtcggcggtatgcgccgcgcgctgggtgacatccaaacccacgcccgttacattgatcatcagattgggaagatgtga

SEQ ID NO: 430855 - DNA, 822 bp, Serratia marcescens
atgactgcattgaatttagcaaacaacgctggcgctgtcactatagcgggagtggaaatttctactgattcagaggggcgctttaacctcaacgcattgcataacgccagtgggttaggtgtgaacaaggccccggcacaatggcttaggacgaagtcggctcaggaagtaatcaatgagctgcagaaagatactgtgcagatctgcatagtttcttctgaagggcgcaatggagggacttacgctcaccagcttctcgctgtgtcctatgctgggtggatcagtccagccttccagcttcaggttaaccaggctttcattgactacaggactgggaagctgtcccctgctgtggacccgctggcggctctgaacgatccggagttccttcgtggcgcactgctcacctacagcgaaaaggtaattgcgctggagagcactaacaaggagctggcgagtcaggtcgagcacatggagaacctcttcaaggacggaatgacgccaacgcaattctgcaagatgttgaacggtgttaacgtcatgcaggtatgccggtatctcgaaggccgcaagtggctatacaatgagagcaagacggggacacgctggcgcaccgggagctacgcgcgcgacaaatatcttactgaacatcagagcaaggtaagcgtgcacggtggtgaagaattcgtgaagttcacaccggtgctactgcataaaggcgccgtccggatctatcagctctatttgcgtggccaactgccaatgaagaataattggaatggcgtgttcacccatgacaaagaactaaaaggagcagcgtaa

SEQ ID NO: 430856 - DNA, 639 bp, Serratia marcescens
atggaaattttctggatagtggtcggggtggtggtggtgataatttttctcatcaaccagaaccgtaccaaggtctccgatagaaccgttgtaacccataacagaaccataaaaactgacgatggtgagatccgggtgcagcgtactcaggtgatggacagcacatcaacccagtaccataagccgggagctgcaagtgtggcttcaaagacagagtatgacctgcaagcaattaataattattatcaacaaaaggcagggatagaggctcagcaaaaaaccatccaagaagtaaagccaaccattgaagcacaaccgatcagaatagagcagccaaaagctatcgccagcatagatgctgaagaaaaccttagccattcgaaatcccaagaagggaaaaaacaatgcacaagatgcagaatcagcttaccgtacagcaaatttagcaaatccagtaaacacccggatggtgtaaccatctggtgcacatcctgcctaaaaggggaaaaaaacaccagacacatgaagtggtgccccatctgtaaggttcgccgcaagagaaccagtttctatcccaataattcaaatgccgacgggctaatggcatggtgtaaaacttgctgggataagcgcaaatga

SEQ ID NO: 430857 - DNA, 2517 bp, Serratia marcescens
atgccaatcgtcccaacgtatgagcgccaatcccgctcggaaatggcgccggttaatcaggttgatattcgcgtgccgcagactggcgcaggcgaagccttggcgcaggttggtggaaactaccttcaggctattgggcaagagaagcaaaagcaggatcttgccgacatgcaggacaagctcaatcagttttccgtgtatgccgatgacctttacaacaaccctcagaacggtctgataaccctgcagggtaaaaatgccattggtcaaggtgaggcattcgctggacaaatttccgctaaagccacggagctgcgcgactcaattcctgaatacatgcgtcaagcatttgaccagcagatccagccgctggggcgtagttatggcaatcgcgcgcggcagtatgaggttgggcagaagcagcagtttgagcggcaggcttattcatctgggaacgagcttgcaattagccagtcccgaggtatgtggggagatgatgctgccttcggtggcctggctaaatctcgtttcgatgcgactgacctttatgcagatacctatggaatgccagatgaatggcggatatctgagaaagtaagaataaaagagagcatggccgcatctgcgattgacgactggatagcgaacgatcctcagagctttatttctcgcaatggagaaccttcagaccttggcggcgtgtctcgcttctctgctcatggtaattcgtctgcggcgcgcgggctgcgcaataacaaccctggaaacatagaggccagtgataaaaacccatgggaagggcagataggaagcgatgggcgatttgccaagtttgaaacacctgaacatgggattcgcgcgctgggtaagaaccttcttacttattaccagaaacacggtttagatactgttggcgaaatcattacccgctgggcgcccccaaaagagaacaaaactgacgcttatattaaagctatttgtgatcaactcggcgttgctgcagaccagcaaatagatgttaccaacccgcgcaccttggcagcgctttgcgccggtattgttaatcatgagaatggcagccaaccttataccgatgagcaaataggttctggcgtgagtgccgcgcttggcctttcggcgctggagtcgcaaaagcgatataccggcaacactatctatgatgccgccagtccgcaatcacagatgaaagccaatcgatatgccatgcaagttgtcgaaaagcagcgagctgaattcagggttggtttagagggtagagtaaaggatgctgaagcagcctaccttatgggcaaggatgcgccaaatgcaccaagttttggtgagtttataacggcatatggagaaaagaacggacctattgcgtatgaacaattcagggatacgcagcagcttggatcagacatagcggcagttcagcagttatcaccttctgcgcaacaggcgttgttggacatgcgagagccatcaccaggcgatggttttgatgctgccacgaaacgccagcgaattttgagacaggcagtagacactgttaatgccgcacgctccgctgatccgattcaatatgcaacatcattaagtcaggtagatccgatcaatattggcaaccctgcggcgctacaggcagatctggtaaagcgtgcatcttcggctgttgatgtgtctcgcaagtaccaaactccactcacgatgttctcgaagcaagaggctgcacaactcggtgaaatgttgcgtacagccccggcttcgcagtcagtatcatacctggatgcaatgcgccaagggttgggtactggtgctcagtactcagctgcaatgcagcagataagtagctatgccccatccgctgctgtcgctggcgctatcatgggtaaaagcggcaatgtgatcggtaaatccggacggatctcagactctatggtaaaccccgatgatgcggcaaaaacaatcatcgaaggagctaatgcacgggctggaatcgcctcaaaagtgaacggggttgagaatagaactaaaggcattgagataccgaaggattccgatctgcgtcctgatttcgttgatgcagtcggtaatgcctttgccggagatgcggccggcgccgcacaggcctatgaggttgccaaggactactacgccgggttgatggcaaagaaaggcgatatttctggcgagtatgaccgtgacgcatggacacaggcggtaaacgtagccactggtggcgtatacgattacaacggtcagggtgaggttttactgccatggggaatgtcagaggggcaatttgattctgctgtaaacaccgcatggaaatctcagattgtcgatgctggcataaaagcaccacctggccagtatggtctgcagagctttggcgacagccaatacctgataaaacttggagctggctacttgctcggaaaggatggtaatccggttgtgctccatatcaacgctgagcgcgttcgcctcggaaacggagggataccgcagtga

SEQ ID NO: 430858 - DNA, 189 bp, Serratia marcescens
atgactaaagcattaatcgaattcaccccagaccaccacgacaagcaacaagaggctatggctcgataccacgccaagcttgatgctttgcgaagcgtaatgatcgaccgtgggtcatgcgatagcaaggaagcgctggaaactatcgccgaaaacatcagcgcagcattcgacaaaattaaactgtga

SEQ ID NO: 430859 - DNA, 363 bp, Serratia marcescens
atgaacgaacaggctaacaaggtgctggctgaactgttgcaaaaagccagtaacggtatcgatgcagcggtgtcattcagccaggcgcagatccctgatgttatccatcaattgttggtgtggaattccgtgagcagcgctttgtatcaaattgtaggcatactaattattattttgcctatcgtgtattccgtaaagaaatgggagttgatttgtgacaatgattgtcagccttttatgctatgttacatcatcacattaccaattggtttactggtagtcgaagaaaatttcgactggctgaaaatctggttggccccgaagctctacctaatcgagtacgccgcaagcctgatgaaataa

SEQ ID NO: 430860 - DNA, 258 bp, Serratia marcescens
atgagcaagaaagcagacatttatcaggtggtctacaggggagagtggctgcagcagtttgttccaggtggatgggttttctttcaacgtaatatcgaatatggcggtggctattggcttggcaggacatacgagaatgtcttcatgatcgagtatgagcggccggtttcgcttaacgagggtatccagtttatccttgcgataatggcgatagagcgcaactctccgacatttgatgatgacttccagctggtgtga

SEQ ID NO: 430861 - DNA, 660 bp, Serratia marcescens
atgaacagtaatattttagaccagatgagtcaaattttccgcttccggttacagcgtcttgagcatcagctctcgccagatctgtgtctgtccacacgccgcctcaccatttcggtaacacccgccagctggcccaggcatagattcgccgcactggcatttgtggctgcccagctccgcaagctggcgcttcagttggttgatgtcctgtaccgccagcaactcgaaatattcatcaacgctatacggttctttcccggggcgccgcgcactacagttggccttgatctgctcgaagatgtgatcgctaacctcgaacgtaattcggcgccggccgcttacagcagcgctgctcgccgcttctctttcgcgttgacgctgggcgcgcttcctgtcgcgcgcgtcagccttgcgttgttcgtcgctcttagccattcccactctccggcgttgctgccagcattgcggcgcggcaggcgttccatgcagaaaaggccatctgaacgccagagaacttgtaggcgccatcttcattcttcatcaggcgatctggctgcttatatttttcaacaaaccacgcctcaaaatctggcgctgcgttcactgctggcgctggcggggaggtgtagagcggcaccgggacaccgacattttcagtga

SEQ ID NO: 430862 - DNA, 318 bp, Serratia marcescens
atggataaattcagggagccagagcaatttgatgcagaggtagaaattcacggcggcgagcctttcgctgtatgggcgccagcggtaaacggctcacacgttaaggcagagttatatttctccctgctggcagagctggaaacgaaggataagcgcatcgccgagctggaagccaagctggctacgccgctgcggttgccgcccgttcaacatcgtgaatttctgggactgaaaatagacagcatggatgctgagcaagtgcggatttccatccgcgccgctggtttcaccgtagagggggatgaacagaatggttaa

SEQ ID NO: 430863 - DNA, 363 bp, Serratia marcescens
atggacaataagctgagcgaactgagcaagcctgtaggattcgttagcaagcaggcgcaagcccttttgaagtccggtgatacggccagtgtgcggccattctttgatgtgcaaggaagctcgccactctactcgcaagagtacgtctccgccctgcaacacgaatccgcggttaactgggaagcggcagcatcgctgaacgttgaaaatcaggagctgaaaaagcgcatcgcagaactcgaacaagccatgcgccacatccacggcgcgttgttggatatcaccgtaccgagagccgcgatagccaaagccgcagaattggcggttgaacacgcttccatgaaggagcagagcaatggataa

SEQ ID NO: 430864 - DNA, 756 bp, Serratia marcescens
atgatccactaccacggcgggccgataactcctgacacgtgtgcgatgaaagcctggcgcgcgcggcatgcgtttatctcgtttgtacatgatggccagctcgggctggctgctgaaatctgccagtcgtttgccatcgacaacggcgcgttttctgcgtggaaggcggcaggcaaaaacaaaattgactggtcggattattacgcgtttgttgagcgctggaaaaatcaccccggattcgactttgcgattatccctgacgtgatcgacggcggagcagcggagaacgatgccctactgactgaatggccgcacggaaaattcttcggcgtgcctgtctggcacatgaacgaatctgacgatcggtttatcaggctgtgcaatgagtatccgcgggtggcaatcggcagctgcggtgagtacgacgtccgcaagccgtctatttcagtcacgcgcatgaaagacatcatccggcacattgtcgataagcacggccagccgatttgcaagttgcacggactacgcatgcttaatccgctgattttcacaaaattgccactgtcgagcgctgacagcacgaacgtagcgcgcaacatcggcatcgataaaaagtggaaaggcgcatattcgccggcgtcgaaagaaaccagagccgcagtaatggcggagcgaatcgaggcatttaacagccccggcacgctcgaatacaacgaagaggctgaacgattcacgcctcagctctctcttgaggtgtga

SEQ ID NO: 430865 - DNA, 222 bp, Serratia marcescens
atgaaagagcgcccagtgatgccagcaaatgaactgaagccgtgcccgttctgtggtgtgcatggaaatgggaatgtgcaactgcagcaccgcggacaaattctcgggtggcaagtcctctgcttgtcgtgcggcgcccgcggcccgagcggagaccatgacgatgctgtagaccgctggaatcatcgctccggtgacggcgctagggaggtggagcaatga

SEQ ID NO: 430866 - DNA, 399 bp, Serratia marcescens
atgataaatatcgttgaaaatcaagatataaaaactgataagccgctgccaatgagttacgaagcgctgaaggctgagcgcgatgcgcagcagaaacgagccgatgcactggctgtggagaatgaaaatcagcgcgattggattaacaaatgctctgaattgtgggatgcaggctgcgaattggacgattttcttggcttgataccagaaactccagccactgacgcagcacttgcagctatcgaagtgcgaggagtggagaagctcatcaagctgaagatggaacagcttgccaacatgcatccagacacccacgcatttggcgctacagccgagtctctgcgcgctcagattaacgagctgcaagcattcgccaccgagctgcgggaggccaaatga

SEQ ID NO: 430867 - DNA, 885 bp, Serratia marcescens
atgagcaatgacatcatcacagtgggaaaccacgacgtaacagacacagcaacggcaatttttagcccatccggactacgccagttacaacaattcgctgaagtaatggctcagagtgtgcagacgctgccaaaacaccttgcaggaaaaccagcggattgcatggctgtggcaatgcaggcggcacagtggggaatgaacccgtttgcagtagcccaaaaaacccacctggtaaatggcactttgggctacgaggctcagttagttaacgcggtagtgaccagttctcgcgccgttcaaggtcgattcaagtacgaatatggcggcgactgggatgcgtacatgctgcatcctgataaacagcatgaagcaggtttattcattcgtgtaggcgcagtgatccgcggtgaaacagaaataacctggggtgagccagtctatctggcacctatcaccacgcgcaattcacccctttggaaaactgcaccaaaacagcagatcgcctacctggcagttaaatactgggcgcgcctgtattgccctgaagtgattctcggtgtgtacacgccggatgaattcgatgcaccgctgccacgcgttgaacgcgacgtcaccccaccagccaccagcgccgccggcctaaatagcctgatcaacggcaagaagccggaaaaagagatcaagactgtgaaccaagatgagcggtcacctgatgacctgctggctgcatttaccgaagcggcaaacaaagccgcaagcgtggaagaactggacaaagcctataaatacggcgcccacgttctggcgccacatgaagaacagttgcaggcagccaccgacgtttacaacatccgtcgcgatgagttgaacgaagtcactatgtaa

SEQ ID NO: 430868 - DNA, 1467 bp, Serratia marcescens
atgaaaaatatcaactttagagaaataaattgggggcctgatgaagcaaagggagacaagaatcttccaaattatttcttcgagtttcctgatttcaaagaaataaaagatggtaattgccgatatgttattggacggaaagggactggaaaaacagccgtaattgaagctgtaaaaaacaaagtagaaaatgaaccattgaactttgcgacatcaatgtcattgcgtgacttccctcttgctattgtcagaaaattacgcgacaagacttttaatgataaatctcagttcgttcctgtatggaatttcttaattataattgaagtttgtaaacttattgcgcaggatgctggtgcagaacctgtagaagaagttgattttttaaaaagaatgttagtatctaacttcggttctattgattttactattgcagaaactttgacgtacttagataaaaaacaatcaaaactaaaactgcttacttcagtaattggcggggagtattctgaagagagtgcaaaaaacatttctggagaagtgcattatcaaaaagctgggaaatatatacttgataaaataaaaagtatcaggagtgagtcgacttattatctgtttattgatgagttggatgaagggtacaaggctggggatgataacctaaggttattaatattatcactcctgcgctctaccgaagattcatatattgagctcaatggtataggaataagtttcatcccaattcttgctctgcgcaatgatatttttgatcggctggaagataatgacataaataaactagatgattatattactcgtttgaactggatttctataaaaaatggccgaatgtcactctttgatgtggtcaataagaggattcaagcatcatttagggagttagtgacatgggatagagtagctatagataacgacccaagcttacctaatggcgtcaatagcctttggaaatacatcacaaatagaacatttgaaagacctcgtgatttagttaagtttcttaaaatatgtagtaaagaaaccactgcgggtccattaacgtttaaagatgttagtgcagcagaagataaatattcatcttggttctatcaagaatttcaaaacgaagtccattcctaccttcctgtttggagagagtcattgcaagctctgacgaaattaggaaagtggcactttacttatgcagagctcacggcaaaattaatggctgatgaagatgtagtgagattcctggatgaaaaaaaatggtcatctgataagattataaatctgctttttgattttagtgttataggaaatattgactctaaaagaagatggttgttcaaatacaaggaccacgatcttgcttgggataaagaaatggatataataattcatttcggatttgcaaaaaaactaagactaaaacacgttgataataaaggtaaatataataaagactga

SEQ ID NO: 430869 - DNA, 2469 bp, Serratia marcescens
atgacgatgaataacaaggccaccaataaaacatcggtgctgtttttttgtgttctatcttcacctgcggttttagctgaagactactttgaaccctcagcactgaacagagattaccagaccataactgacttatcccactttaataattcgcgcagtcaattgcctggtgagtattgggttgatatctatttgaacaatgtgtttttcgctaataaaaaagtgtctttctattatgtggatggtactttgcagccccgaatctatcgcagcgctctggttaacctcggtgttcgcatggacaaactggaaataaacaatgacaccgaccttgcctcaacgcctatcagcaagattattcccggcagtcaggccaagtttgattttaatcgacaacgattggatttaaatatcccgcaggcttatatcgaaaatcttcctagagactgggttaaccccgcactttgggatgatggcattcgcgcatttttaatggattacaattttagtagtaccgagtcatggaaaacgaaaaataaaaaagataatggaaatcaatatttaaacttgcacagtggttttaactatgatgcctggcgcttcagaaactactctacctattcaaaccaaagcagtactaaatggaaaggtatcaacacctatgccgagcgcagctttcgggacagcaaaaacacgctgaccattggcgatagttcaacatcgggcgacgtttttgacagttttcaatttcgcggtctgaaattagcaagcgatcccagcatgtggcccgacagccagagagggtttgccccaacggttagaggtatagcgcaaagcaatgctgaggtcactataaaacaaaatggctatatcatttatcaaacacatgtaccagcggggaattttgaaataacggatatctaccccaccacctccagcggtgggctgcatgtgatcatcaaagaaaccgatggctcagaaaggagtttcttccagcctttttcctctgtccccatcatgctcagggagaacatgaaaagaaatgaattcacaatgggggaatatcgctctgcgcgaagcgctaaccaaaagtataagtttctacaggcatcgacgatttatggcattaaagatgataaaacactctatggtggcgccattatttctgaaaagcaccagggaatttctgccggcattggcagcagcctgggacatttcggctccgtctctgccgatgtcactcacaccaaaagccgattagccacagggcaggatcgtaaaggacaacaataccgtatccagtacgcaaaaaatattgaaaaaacgggtaccaactttacgctggccggctatcaatactcgacgtccggctacttaagtttctcgcagctcagtgatattaatgccaacattgaaagaaactggctggcgcgcggcgtgaaaagaagccggctggttctcaatattaatcagcctatccgggatttcggcagtctatacatcaatggttaccaagaaaactattggcacaacggtgccgttgaacgaaattttctcatgggattttccacgaaccaatctggagtgagttacaatattggattgggctacaacagcggccgctatacggacaaacccgacaagatcgccacgcttaacgttcagattccgctaagcaaagggcaatcaaacaactggatgaactatacctcgagcaagagcagcaaaggcaaactcaatcagcaattaggactaagcggcaccgcactggaaaataaccagctcagttataacgtctctgcagctcaaagcggtacccgtgacggctattctggcaacagttcggcttattatcgcagtagatatggtgaaataggcgccggatacagctttgataaagatgtgcagcgaataaactacagtttgcgaggcggcgccgtggttcatcgcaacggcattacattatcccaatcgctgggtgacacaatcgctttagtcgaggtgccaaatgcaggcaacgttgaaatcatcaacagtaccggtgtcaccacagattggcgaggctatgccgtggtgccttatatcaacagttatcataagaatagaattaacttaaatccgcagtcctttgatgattcagtagaaatagagaacaacagccaaaccgttatcccgacgaaaggcgccattgttgtcgccaactttgcatctcacataggaaaccgaattattttcaaagtacatcatcgtgggacggagattcctttcggcgcagttgccacattgcgcagcgacccagggaaatcaggtatcgtcggcaacaataacgctgtctatatgagcggcatgccagacgctggaacaataacattgcgttggggagcgggaggaagctgccaaggaaattacagcatagagcctaacgattctgcctcaagagttaagcagattagcttgcaatgtgaataa

SEQ ID NO: 430870 - DNA, 123 bp, Serratia marcescens
atggcggatatcgcggtgattttccactggccgccgtcagaaatgaacggcatgacgctggcggagctgatcggctggcgccacagagcgctgcaacgtagtggagtaaaaatagatgagtaa

SEQ ID NO: 430871 - DNA, 1851 bp, Serratia marcescens
atgacagcaaaataccgcgccctgctcaccgaacagggcaaaacgctgctggctaacgctgcagcaaccggccaaaagctggaaattacgcatatggcggtcggcgacggcggcggttcgccaacgcagcccgatgaaagccagaccaagctggtgaacgaaaaacgccgcgcagcattgaattcactgcagatagataccggcaacagcaaccaagtgatcgccgaacaagtgatcccggaggacgttggtggttggtggatccgcgagctggggctgtatgacaaaaacggcgtgctggtggcgatcgccaatacgcccgacacctacaagccgcagttgaccgaaggtgccggccgcacccaggtcgtgcgcatggtgcttctggtaaaaggcgacgccaatgcgacgatcgtcgcagacaaaaccgccttactggtctcgcgcgatatgctgaatgccgctatcgacgaacatgcccgctcgcgcaatcatcctgacgccaccttgctggcaaagggtttcactcaattgagcaacgacagcaatagcgccagcgaaacgcaggccgccaccccaaaagcggtgaaaacggtcagcgacgcctcgctgaaaattgccgctaacctgaaagatctgccaaacaagtccatcgcgcgccgcaacttggaattgggtactgccgccacgtgtaacgtcggtacgcaagccagtcaattgatggaggtgggcgcctttggtctaggctctggcccgaaacatcgcgaggagaccatcagcaatcttggcgagatctaccgtgtcaccagcgcatcgaaaaacgcgccgggcggcggcgtctacggcgtgctgaacctgccaatcgacggcggcccttccagtggctatctggcggttcagactaatggatcatcttacgtcggcacatccaccacccctgacaaaccgctgaactggtaccgaatttacaccaccggttttaaaccgaccgctgcggacgtcggtgcttacagcaaggcggaagccgacggcaaattcgtcaaacagagcggcgataccattaccggcagcttgacggtcaacggctcaattgaaacgaaatcgggattgaccacaccttacgccacagtgatggggtcgttaaccaccaaaggcggcgtcgaattattcggaacctcgccctatatagatttccattatggcaatacgaacgcggattatgatgttcgcatcattaatgatagccagggtcaattaagtctgggtgcaaaaaacgttcgggccaatgaaaaccttaccgttggtttagatgcccacgttgatagaactctttatatcaatggccaagattttattactaaaaaaggggtaataaccgaaaccagtggtaatcgcaatactcaagggctgcacatacaaggtgcaggtaatcagtatgttgatcattacttttatgaggagataggtaagcgtgcatttggtgcaatgcatgtttcatctggcggctctgatggctggttccaatttggtcatcaaggcgatattcgcagcaatggcccatggccgcgcctgatgttaggtgaagcaacctactttaatgacggcaatatcaacggcagcatttgggggggctatttaagcaactatctcaatcaaaactttgtgcgcgatgttcgcctgggtaatgtggaaagtatcgctacctggcgaggccccggctattcggatagtgcgggttatgtcctgaccggcgcagcaaataacaacgtggatgaatacatcgacgtaattttccgtcgtccactgcaaaaacacattggtggcaattgggttaccgtctggagcgtttag

SEQ ID NO: 430872 - DNA, 1215 bp, Serratia marcescens
atgaagcgaccttttcacctgatggcgaaacccaccagttatcaatgcaatctggcctgtgattactgtttttatctggaaaaagatcaaggcacgctgaaaccacaacaggctcagcgacatatggacgacgaagtgctgcggctctacgtacagcagtacatagaagccaatcccgcgcaggaaatcgagttcacctggcaaggtggagaacccaccttgtcgggcctggcgtttttcgaacgcgcgttgttctggcaacgccactacgcgggtgaaaaagtgatccgcaacagcatccagacgaatggcgtgctcattgacgaggcctgggcacaatttcttgccgaacaccgtttcctggttggcttatcggtcgacggccccgctcacctgcacgatcgccatcgtaagacgcagagcggcaagtcggcgttcgacaaagtcatcaatgcgctgcaatggctgcggcgctaccaggtcgaggtcaatattttgtgcgtggtcaccccccaaacggccaaggcgccgctggaggtctaccgctttatcacgcaagaattggcggcggagttcgtccagttcataccggtcgtcgagcaacgctctgtcagccgaaagtacggtgagttgctctatccacaaacgctgtccggcaacgaggtcaccgaatggtcagtctccggtgaagaatacggccattttatcaacacgatttttgattactgggtacggcacgatgtgggacgggtttacgtgcagctgttcgacaacgcgctggccgcatggctgggggagaaaccaagcctgtgcatcatgcagcctacctgcggtttcggtctggtggtggagcaaaacggggatatctacagctgcgatcattacgtctatccggaacatcgtttagggaatctcaaaaccgaccgtttggataaattggtgaatggcaaacagcaacgtaaattcggcatgatgaaagccgctctgccgcccgcttgcgagcagtgcccctggcgtttcgcctgtcatggcggctgcccgaagcaccgtatcagcagggtcgacaatcattggcacaatcatctgtgtgcgggttacaaagccattttcagccacctggatccttatatgcgctttatggcgcagcaaatcgcccggcggcagcccccggcgaacgtgatgcacgttgcggccagcatcgctgcacaaagttaa

SEQ ID NO: 430873 - DNA, 1536 bp, Serratia marcescens
atgaaaaaaatgttcgctggagcacagaatctggggaagtcgttcatgttgcctatcgccgtattacccgcagcagggctgttgctggggattggcggcgtatttaccaacccgattacgattgaaacttacccgtttctacagaatacattgctgcaagccgttttcacgctgatgaaactgtgcggcagcgcagtattcgacaacttgccgctgttgttcgccgttggcgtggcgatcgggctggggcgcagtgataagggcacggtgggattggcggccgtgctgtgcttcctggtgatgaacaaggcaatcaacgccatgttgatactgacggggacgctggcgacggaaaacctgaacggccacggtcaggccagcgtgctggggattgtgacgctgcaaaccggcgtgctgggcggcattttaagcgggctattgaccgcctggctgcataatcgcttcggaaaaacggtgttgcccaacctgctggcgttcttcagcggctcgcgcttcgtgccgatagtcgcctcttttttcggcatctttttgggcgtactgctgttctttatttggccgccgatccagcagggtatcacccacttgggctggctggtggagaaaaccggctacgtcggcacgttgttctacggcatgattttaaagtgcctgatcccttttggtttgcatcatctgttttacctgccgttctggctgaccagcgtcggcggtgaggtgatggtcaatgggcagatggtgcagggcactcagaaaatcttcttcgcgcagttggccgatcccagcgtgacccaatactacatcggcgtatcacgcttcatggcaggccggtttgccgacttcatgttcggcttgcccggcgcggcgttggcgatttatcacagcgccaaaccggagaaccgcaaaaaggtggcggggttgatgctgtcggccgcgctgacggcgttcgtcaccggcatcaccgaaccgctggagtttgcctttatgttctgtgcgccgttgctgtatggggtgcacatcgtgttgaccggcgtggcttttatgctggcgcacatgctggaaatcaccgtcgggcagacattttccggcggcctgatcgatttcctgttgttcggcgtgttgcaaggcaacgcgaaaaccaactggctgctgatgctgccgttgggggcattgatgttctgcctctattacttcagcttccgtttgctgatcggttggcgtcaattgaaaacgccgggacgcgaggatgaagcgatggaggatgccgtagtgattgatgatacgccacgcgcggccggcatcgtcgcggccttggggggccgggagaatattatcgatgttgactgttgcgccacccgcttacgcgtcacggtcaaagaaccggagcgcgtcaaaacagaggattttaaacggcacggcagccgaggcgcctttgtgcgcgggcagggcgtacaggtggtctatgggccgcacgtgacgttgattaaaaacgaagtcgaagaatttattgggctctaa

SEQ ID NO: 430874 - DNA, 1764 bp, Serratia marcescens
atgaaagccgtaatgttgatgttcgataccttgacccgcaaccatctggcgccttatggcggagcggcgattacgcctaatttcacgcgcctggctcgcgaatcggtgcagttcgataatttttatgtgggcagcatgccctgcatgcctgcgcggcgcgaactgcacaccgggcggtacaacttcctgcaccgtagttgggggccgctggagcctttcgatttctcgatgccgcaggcgctgggccaaaacggcgttcacagccatatggcgaccgatcacaagcactactggcgtgacgggggggccacttaccatacccgctattcaacctttgagtttattcgcggccaggaaggcgacaaatggaaagggcaggtgagcaagccggaggtggtctatcggggcatggaggatgagaacacccgtaagcggcgtatcgggcgtatggcgcaggatatgatcaaccgtgcctggatgccgactcaggaagaacactttacccaccgcactatccaggcgggtctggactttattgatgccaataaggatcaagataattggttcctgcaaatcgagtgcttcgatccgcacgagccgtttttcgtgccggagaagtatttggcaatgtatggttgcgcccccggcgagtttgacggctggacgccctattactgcgcaatgcaaagtgaagaacacgctgagaaagtgcggcggttctaccaggcgctggtcaccatgtgcgacgactaccttggccgggtgatggatcacctcaagctgcaggggctgtgggatgacacgttgtttatcgtctgcaccgatcacggcttcttgttgggcgaacatcagtggtggggcaaaaacatcatgccggtgtataacgaaatcgccaacacgccgttcttcattcgcgatccgcgcgtcgggaaatatggcgaacggcgccaggcgctggcgcaaaccatcgatattcccgccaccctgctggactatttcgggatcaagcagccggaaagcatgttgggcagatcgctgcgcccggcgatagagaatgatacccccgtgcgtgattatgcgttgttcggctactacggcgggcatatcaatatcaccgacggagactatgtgtatatgcgcagcccacgtcaatgcgacagaaacgggctgtatgaatacacattgatgccgacgcgcatcgatagcccgttcagcctcaatgaactgaaagcgatagaaattcatcccggtttcgatttcacccaaggggcacaactgatgaagatcccggcgggattcgaatatctgaatgcctaccgctatggcgacaagttgttcaatgtggctgacgatccgcaacagcaacgagatctcggcgacgatcttggtcgtgcattgcactatgctgcggcgatgaaaaaaatcttgcaggataacgatgccccgcctgagctttacgcccgttttaagctggatgctttgacgccggtacaagagcaaagcgaccgtcaggcgcgtttgagctttgacgcgttggcgggcagtggcttcggctgtcaggatcgcggcgtctatgaggccttgctgttgctgatcgcggcagcagagaaacaaggcttggccttgcatgggttgctgggatctttcaacactccacgcgttctgggcagcgacgatattttctggctgattgcccggcatttcgacgaggcgaaacagcaggagctggtctatcaaacgcgcctgttgctgcgcatcgactga

SEQ ID NO: 430875 - DNA, 885 bp, Serratia marcescens
atggaaacgtcctggacgctggaaaacgccggattgcagctgcgcatcgcgtcgctgggcgccgagatgatcagcctgtacagcaaagcgacggcgcgagaatggctatggcgtccccgcaaggcggtttggcaaagtgtgtcgcccatcctgttccccgtcgtggggcgcctgattcggggcggattatgggaagaggagcgattctacccgttgcctgcgcacggtttcctgcgtcatctgccgtttaggcgggtgcaacagtcgtcggatgggttgagcctgcgcgggtgttcgaacgcaaccacgctcgctcagtggcccttcgacttcggatttgaagcccaatggcgcttgaagacaaatagcgtgcagattagctattgcattgaaaacaccggagatcgtcgtttcggcttttctctgggatcgcatccggggtttgctttgccgattgttcatcaccccggctggcgcgtggtattttccgcccccggcgtcagtggcccgtttcccacgcgcgatcgcacgcttgaagtgcgggatggcggcggcagggtgacggctttcgctctggcgtccgacacctttgagcacggggcggtttacttcggcgattgtcgtcatcagacgttaagcgtgctttccccggaaaatgaaaccgttttgcaaatgagcacgggcgatcatccctggctggcgctgtggtcggtcccaggaaatgacctgctctgcatcgaaccgttggatgggacgacggatgcgccggattttaatggccaactggcggagaaacgggggatccgttggctggaggccggggcaagctaccgccaaggttatgaaattgtactaaatccagacgcaaggcgtcgagacgggtaa

SEQ ID NO: 430876 - DNA, 879 bp, Serratia marcescens
atgggcgtcaataaagaaaacgtacgcgtatatatttcaaacatcatccgcaatctgggggataacgatcggcggatcgccgcttttatcctggataacgccggggtgttcgtgcagttgccggtaaaaaaactgtctcaggaactgcaaatcagcgaagcgaccatcgtccggttttgcaaaaagatcgggtatagcggcctgctggaactgaaagggggactcaagaaggaactgttgcaggaaaacgatctgacgctgccggccagcccggatatttttctgaatgacagccggttagacgtggcgaaaaagattggcctctccattgaacagacggtacgagacaccgtcgacttgctcgatgtgcaaaaaagcaaggcgatcgtcgagcggtttattcgcgcccgccgggtgatgtttgtcggctttggcgcatccggcttggcggcgatggaggctcgtgacaagatgaaccgcattggcattgattccgaggcattcaccgatcgttttaccatgacgttgaagctggcgaatctcaaaggcgacgatctggtggtggcattttcccattccggcgaaacgccggaggtggtgaacgctttccgtctggcgcggcaggcgcaggcttactgtctggctattacgcatcgcacgcactcgccgttgaccgaactttgtgatgcttttctgctgacctgcggtgaaagtgagcgttatcagggggattcgatcggtacccgagtctcccagttatttatgattgagtatctctgtaccgaaattacccggcagagttatcaaggacgtggctctccaggcatgtcgattaaagagttgttaataaaagagcgcattaagcgagaagaacgctga

SEQ ID NO: 430877 - DNA, 1752 bp, Serratia marcescens
atggaaaaaatactatttttattgaaatatttcaacaagtcatcaagttacacagtaaaacgtcaattttacactttgattttaatctcagtgatcgccacatttttattttctgtacaaccggtaattatggcttacctaattaatgccattgaggaaaaggaattcagtttatctctttccatcattacccttgctatcagttatatcgccattatgagcatgcgaaagctctcttccgcattaaacttcatattaatcacatcgctacgtaacaatatcgtgatcaacatgactgataattattttaaaagccttttcaatttgaaagaagtaaatagccatgaaaatacgggagatatcacccaacgtttaaatcaggctatagatgaattgacaattttactgaggaatatctcacacaacctactcccccctctattccagctaggattcagcatttcaattattttattatccggagactacctcgtatcatcactattcttaatttattttatcctttaccttcacactaagaaaaagttcaacaaaaaaatctctgaactttactctgatttttactctacctcggtaaaaaaatacagcatcatcactgacagcgttaagaacatggaggctgccagagtttgcaatacatatgaatttttatttaacagatacaaaacactccttaacaagattgaagataaacatgaggcattactcaaaacagatttcaaactcttacttattgaagcattactaagtatctttttcttcggctcatcgtttttactttctctttattttgttataagcaaggggattaccttaggtcactttgtcatgatagcctcttacatcatgttattggcgactcccttagagaacatcggttccatgtatacggcgatgcaaaagtccacagcatccttatatacatttattacatcaatcaagccgccgacaactcaaaactcacacaccaccgatttacaagacacggcagtttcgatcacgctaagagatgtgcaatattcatatgataaaaacgggacatatgccattaaaaatatgaacattgaattctcgcacgctggctttttcactttaacgggacctagcggagcaggaaaaagcacgttagcaaaattgatttcaggtgaactggaacctgatgcgggaaggatatatttaaacagcagtgaaataaatgcactctcaattaagcagcgggctgaaataattttccacgtcgctcaaaatgactatatatttatggatacactccgatttaacctgcaaattgcgtgcccagatgcctctgatgaaaaactccttatggctttgaagcacgcacaactcaatgaccttccacttaataactcaacctcgttattggatctcagaattggcgacaatggcatgacattatccggagggcagcgccagcgattatctttggctcgactgtttttacgtcaacctaaaatcatcattttggatgaagtgacttcatctcttgatatcattaatgaaagagaggtactggaaaacatcaaagccgcttatccatcttctatcgtgattaatatcagccatcgacgttccaccttcgattactcagatgaaatcatcgtgctggatcaacaaggcattgcagataggggggagctgtcctcattggctgatagaaacatctatattcaatccattctgcataaaaatacattggacgccgctgtctga

SEQ ID NO: 430878 - DNA, 792 bp, Serratia marcescens
atggaaaattacgtaatacaaggaaaggtcattaaattactacgtatggactaccccaaagttaatcattttcatacggatacacgcttacttttagacagaacacaagtattgattcagaatacatcctttgaatacaagcagttactggaaaatgcaaaccaggtaattgaggataaaaggatccaaccattacagcatcgcttaagcgcctatgtggatctcgatatatttcccagcgaaaactcaacaagccagaacgaagccatcttctatcatcagttttaccccactctttccgacatcgttaacaataacctatcatttatccaattcattgaaaaaataggaagtgaaataacgagacgcgcgacccccgttaggaaagaaaatataagaactgtccccgataaggatggaagctacactgaattcattgatatttcactattaagcgaatcactctccaacctgcgagagtacgcaaagggaaatagcgatgataacaaattacttcatgctatcattttcgcagtcatgtttatgcatatccaccctctgcaagatgggaatggacgcgccgccagaatcctttttaatctcatgttacaaataaagccgcttagctacctccctcttactgagctttgtcattttgcacgtagtggttatgtacttagcttacgcgaagcctttttattttccgaatgggacaatattattaagttttattgtaattgcatccacctgctttacggctctgcaacgagtgagttaactagcatgcagtaa

SEQ ID NO: 430879 - DNA, 1620 bp, Serratia marcescens
atgtcttcacgcgctgttaccccacaaaccctcgctcgctacggcatccatcaggccgccgacatcgtctataaccccagctatgaattgctgttcgccgaagagacccgcgccgacctgccgccgctggaacgcggcaccctcacccaactcggcgcggtcaacgtcgcgaccggtgagttcaccggccgttcgccgaaggacaaatacatcgtgcgcgacgacaccacgcgcgataccgtctggtggtcggacaacggcaccggcaaaaatgacaaccagccgctctccccggaagtctggcagcatctgaagacgctggtgggcaaccagctctccggcaagcgtttgttcgtggtcgacgcgttctgcggcgccaacgccgacacgcgtctgaaagtgcgcttcatcaccgaggtggcctggcaggcgcacttcgtgaaaaacatgtttattcgcccgagcgacgccgagctggcggattttgagccggacttcgtggtgctgaacggcgccaaatgcaccaacccggactggcagcagcaagggctgcactcggagaacttcgtcgccttcaacctgacggaacgcatgcagctgatcggcggcacctggtacggcggcgagatgaagaaaggcctgttctcgatcatgaactacctgctgccgctgaagggcatcgcctcgatgcactgctcggccaacgtcggcgagcaaggcgacgtggcggtgttcttcggcctatccggcaccggcaaaaccaccctctccaccgatccgaagcgccagctgatcggcgatgacgagcacggctgggacgacgacggcgtgttcaacttcgaaggcggctgctacgccaagaccatcaagctgtcgccgcaggcggagccggaaatctatcaggcgatccgccgcgatgcgctgctggaaaacgtcaccgtgctggccgacggcagcatcgacttcgacgacgccagcaagaccgagaacacccgcgtttcctatccgatttatcacatcgagaacatcgtcaaaccggtgtccaaagccggccatgcgcgcaagatcatcttcctgaccgccgacgccttcggcgtactgccgccggtatcgcgcctgacgccggagcagacccagtaccatttcctgtccggcttcaccgccaagctggccggcaccgagcgcggcatcaccgcgccgacgccaaccttctccgcctgcttcggcgccgcgttcctgacgctgcacccgacgcagtatgccgaagtgctggtgaaacgcatggaggccgccggcgcccaggcttacctggtcaacaccggctggaacggcagcggcaaacgtatttcgatcaaggatacgcgcggcattatcgacgccattctgaatggcgacattgagcaggccgagaccttcacgctgccgatcttcgggctggaggtgccgaccgcgctgccgggcgtcgatccgtcgatcctcgatccgcgcaaaacctacgccgacgagtcgctttggcaggagaaagcgcaggatttggcgcagcgctttatcgataacttcgccaaatataccgtcaccccggcgggtgaaaaattggtgaacgccgggcctaaacggtaa

SEQ ID NO: 430880 - DNA, 126 bp, Serratia marcescens
atggaggtgcccgaggttaagcgcctgaagtcgcttgaggaagagaacgccagactcaagaagctgcttgccgaagccatgctggataaggaggcgcttcaggtggctctggggcgaaagtactga

SEQ ID NO: 430881 - DNA, 825 bp, Serratia marcescens
atgtgtgatgcgaccggtctgtcgcaacgtcgtgccagcaggcttacaggtttgtctctgtcgacctgccgctacgaagctcagcgtccggcgactgacgcgcatttatcggggcgcattattgagctggcactggagcgcaggcgttttggctaccgccgcatcaggccgttactgcgccgtgaaggccttcaggttaatcacaagcgcgtgtaccgcctttatcatcacagcgggctgggcgtgaaacgcagacgacgtcgtaaaggactggcaacggaacgtctgccgctgctccgcccggcagcgcccaacctgacctggtcgattgatttcgtcatggacgcactggccaccggtcgcaggataaagtgcctggcctgtgtggacgacttcacgaaggagtgtctgacaattacccccgcattcgggatttcaggcgctcaggtaacgcgtattctggaaagcattgcactgtttcagggctatccggcgacgataagaactgaccagggaccagagtttacttgccgcgcactagatcaatgggcctttgagcatggtgttgagttgcgcttaatccagccaggcaggccagcgcagaacggatttattgagagctttaacgcacgatttcgcgatgaatgtctgaatgagcactggttcaacgatatcgttcacgttaggaaaatcattaatgactggcggcaggattataacgagtgtcgtccacattcggcactgaattatcagatgccatcagagtttgcagcacggtggcgaaatggaaaatgtgaaagtaaacaagccgacattgctaactga

SEQ ID NO: 430882 - DNA, 888 bp, Serratia marcescens
atgaatattttactgtttggtaaaaatgggcaagttggttgggaattacagcgtgccttggcgccattgggacaggtggtggtgctcgactacaatactacagaatattgcggtgacttcactaatccgaaagggatcgccgaaacggttcggcgtgtaaagccgcatgttattgttaatgccgccgctcataccgcggtggataaggctgaaaatgaaacggagttggcagagctcattaattcgacatcagtcgccgctttagctaaagctgcagaagaagtcggagcgctgctggttcattattctactgattatgtattcaacggccgcggcgaatcggcttggacggaaaacgacccaacatcgccgctgaatatttatgggcaaacaaagttgagtggggagcaggcgattcagaagtatgcgtcacgctacctgattttccgcaccagctgggtctatgccgcaaaaggcaataactttgcgcgtacgatgattcgtctggcgcaagaacgtgattctctttcggtgatcaacgatcaatttggggctccaacgggagcagagttgctggccgactgcaccgcacatgcgattaaaaccgccatgctttgccctgaagtgagtggggtgtatcatctgatagcttctggcgaaacaacctggcatgcatatgcttcgttggtcatagattatgccagaacaaaaggtgttgagtttaaggtttccaatattactgcagtaccgacaactgccttcccgacgccagctgcacgtccattaaattctcgtttgtgtacagaaaaattccaacaaacatttggcctgacattgccgcattgggagcttggtgtgaagcggatgcttgacgaaatattgcggtag

SEQ ID NO: 430883 - DNA, 546 bp, Serratia marcescens
atgaaagtgattgctacagcgctgccagatgttttgatttttgagccgacagttttcggtgatccgcgtgggttcttttttgagagtttcagtcaaagagtttttgatgaggtggttgggcgtcatgtcgattttgtgcaagataaccactcaaaatcgacgaaaggagttttacgcggcctccattatcaactgaatcctgatgctcaagcaaaactggtacgctgcgttgaaggtgaggttttcgatgtcgcggttgatattagacgtcattctaaaaccttcgggcaatgggtaggtgttaagttaagcgctgagaataaacgtcagctttggataccagaaggttttgcccatggtttcttgacgctgagtgacactgcggaattcgtttataaaactactaattattatgctaaagaaagcgagagaagtattctttggaatgataaagatatcaatattggttgggaaaccaataattgcctgctttctgataaagatttatctgcctcacgatttattgatgcagaggtttttgaatga

SEQ ID NO: 430884 - DNA, 720 bp, Serratia marcescens
  misc_feature (681)..(690): n is a, c, g, or t
atgaaaacaatagtaaaaacgacgttagaccttttcggcacaacctttaaaaataagcgtttaatctatacgctaactaaacgggaagttatcagtcggtaccgtggttctgtgtttggcctattgtggtcgttttttacgcctattttaatgctagttgtttatacttttgtatttagtgttgtctttcaggctaagtggagtgagggacaaacgtctaagtcggcttttgcattagtgctattctccggccttatcatatttaatcttttctctgagtgtgttaatcgtgcaccgactacgatccttgctaattccaattatgtaaaaaaagttatatttccgttagaaatattaccatgggtgaatatgggggctgcgctatttcacttctttattagttgttctgtttggttggttttctatatttttgaagtgggtgttccacatgctacgattttgttacttccattcattctcttaccattggttttaatggttatggggcttagttggattttatcttcattaggcgtgtatttgcgagatgtgggtcaactagttggtataattaccatggtattaatgttcctgtctccgatctttttccccatttcagcattgcctgctgaaataaaaccgcttctttcgctcaatccgttggcggtttttattgagcannnnnnnnnnagatgttatgtattgggggcgcatccctga

SEQ ID NO: 430885 - DNA, 1338 bp, Serratia marcescens
atgtcatctgataatattattgaagtagaaggcctcagtaaatgttaccagatttatgactcaccgaaggatcgcttactgcagatgttttttcgcggaagcaaaaaactatttcgtgagttttgggcgttgaagaatgtctcatttagcttaaaaaaaggtgaaacggtaggcattattggtcgtaatggttcaggtaaatcaacgttacttcaaatgatctgcggcactctgacaccgacagatggtacggttaaagttaacggaaaaatagcggctctactggagctgggtgccgggttcaaccctgagttcacagggcatgaaaatatctttatggcggcatcactgtatggtttgagcaatgagcagatccgcgagcgttatgaaagtattctggcctttgctgacattggcgaacatattgatcagccggtaaaaacatactccagtggtatgtatgtccgtcttgctttcgctgtaattgctcatgttgatgccgatattcttgtagtggatgaagccttagcggttggcgacgctgtctttacgcaaaaatgcatgcgtttcatccgtaagtttaaagagaatgggacactgcttttcgttagccatgataccaactccgttattaatctttgtgataaagctatctggcttcatcaaggagaaatggtcacttcaggtaaagcaaagagtatagctgaaaagtatttgcagtatactctccaggaagtttatggcgacgaaacgaagttggatagccttaaaaaagaaacaattggggatgtcgatgacaaacctcaaacggtagaagttactgctgataaatctatcattaattacaactctcagtatggcatgggagaaaatttgtccgaggctgaaggttggaaaacaggggccggcgaaatcctttctgtttcattttcagaattgacaagtggcaatacgctacatgtctttaaaggcggagaaaaagtcaagctgactattgaagctgttgcacatgagttttttgatgcacctataatcggttttttggtaaaagaccgcttggggcaggtattatttggagaaaacactctgccatttacacagagtgagccaaaaaaaattagtgcaggagagattttctccgcgcattatgtgttcacattgccgatgctgccaaatggagaatacgcaatgatggtatcgttggcaaatggtgatataaataaccatgttcagcaccattggatgcatgacgctgtcatcattaacgtttcatctagtgaggtccgttgggggctcgttggtattaaatttgatgaagtgaagctggaaattaaatga

SEQ ID NO: 430886 - DNA, 1146 bp, Serratia marcescens
atgcagattgcggtagccgtcgccaaagcccacgccgtgctgcgccagcgtctcgtacagcgcatcgatatccgccgccgcgctgcgcaggcggaacgccgccacgtccggcgggctgtagcccccgtcgccctcggtcagcacctggctgcgacggctgccggcatactgctcgccgccgccgttttcgatcacccattgctcgccgtcggcgaggcaacgcaccacgtcaccctcgcgaaccaccagtggctgagtcatggtgatatcacgcacctccacgccggtcgccggcagggcgccccggtactgcagcaaggcggcgccggcgatcatcgtgatgtgactggcggccggcaccagcacctgaccgccgatgcgatgatcccgccacagggaagccagctcggcgttcagcgtggcggcaaagccgcccgcgtcgccgcggctgagcagcgggttgggcagacggcgccacggcaggaagtggggagtatagcgggcgcgcgggtacgtatcgcccgatggccgttcgtaggactccagcaccacgtgcgcattggtgccgccgaagccgaacgaggagaccccggcgaccagcggacccttgccgccgagcggcaccggctcggcggagatgatggcgtcgaagccgtccagatcgattttcgggttcagcgtgcggaagtgcacgttgcccggcgcctggcggtggcgcaacacttccaccgccttgatcaggccgacgaccccggcggccccttccaggtggccgatgttggtcttcaccgcccccagcaccaccggcttactgcggtggcggcccagcacgttcttcagggcgcccacctcgatcggatcgcccaacggcgtgccggtgccatggcattcgatgtagtccacgtcctggccgcgcagcccggcttccgccagcgcccgcgtgatgacggcctcttgagcgccgccattcggcgccgtcatcgtcgcgctgcgtccgtcctggttcaccgccgttccgcggatcaccgccagaatagcgtcgccatcggcctccgcgtcgctgaggcgcttcagcaccaccgcaccgacgccttcgccgcggcaatagccgtccgcagcctcatcaaaggccgcgcttcgtcctga

SEQ ID NO: 430887 - DNA, 348 bp, Serratia marcescens
atgaaagcagatttaaaagcattgtggtcggacacatgtctgctagagaattatcagcctatcgagcttgataatttctcattgtggattgaactatctataggcagtcatggcgaggatggagcagactattttcggctacgtgtgtgtactcctgagtggctctgcaagcaccactggctaccggaattaatgcgtcacacacttctggtacgtaaatacgatttggatgagatcaccaaaaccatcacagattacatcgaacagtgcgaaggggaagactggatggaaatagcgcaaaaactctcgcgcgcctttgcctgggaatatgaagactaccagccataa

SEQ ID NO: 430888 - DNA, 228 bp, Serratia marcescens
atgctctctctgaccaattgccgcacgtcttcgactgaccactccgcctgcgcatccgcgctcgatgtggacggcgtcgccatcgctgtcataaaggaagaaaaacgtggggataaatgcgagagctttcgccacgcaatcggggaagcacagatgacgccacggctgcgtgactgcagcaaccgcgacaagagcgatattcccgattcgttatcaagcagaccatag

SEQ ID NO: 430889 - DNA, 1167 bp, Serratia marcescens
atgacaatagtgtctgagaatgtacttcttgagaacagtaagtgtagtgagtctttttatctaaaaaccttacggtggttaatagcactatttataattgcaagccctttaagtccctttgttgctaatacgacgatttatttgtggattccgctagtattttttgattatcaatatataagatctttcagggcggtctcaaaggctgtcttgctttgtgtctttatttggttaagcatgtgttttttattctttagatatgatttggcgcttaagtcttttgttcttatcttgggggtatcttatctagtcaaagtaggaacacctattaccaataaagtttattgttgcatgttaatatcgatagtatggtgtgtaatacaattcattgcatatcagattaatccctcttattctgctgcgattggcccaggctccatatcgaagtttttctggggcgagtttgcaacgatgacttttacgaatcaatacacgcttttcctgtttccccgcatgtcaggtttatcacgagaggcgggtttttttgcttctctgctaattatttctttcatgatacgcactagggataataaactcaattttatcgagaaatcactttttcttcttggttatcttttcagtctctcgaaatcttcgattacactagttctcttctttattctttacccgatgagaaaattattgagaaaggtcccagttattgtcacctttatcgggtttattgtcattttcgtgtcactagcgcaatttttaaatattggggcaccgagctactttatggttaatgactccatagctcaccgcttatcagcatcatatcttatgctccatatgaacattggcaatcttctctatggctgcaacacagagtacaattgcattgtagactaccagcccctggtcggttaccttactgatcaaggtctaattcctgctgttggattgtccgggttaattatggacatggggttacttggatttgttggagtgatatttgcttttttgatacttaaactggatagttatgatgttgctattgtagctatatttacagcaacggtttctttctttacggttgacagttttataatacttacttatttttatatcataactaatcataaagggaaaaataattttgaatag

SEQ ID NO: 430890 - DNA, 330 bp, Serratia marcescens
atggaaatagggcggaaagtcaaaatagattttgccaagataaaaacgctggatgatttttatactgagttgtctggtttatttgggtttcctgatttttttggtaggaatatcaatgcattaattgattgttttttcagcttgcgctatccgcaagatgaaatgacgaagattcatgtagcagcttctgagtatttattaatggagcttcatcatttctctttagcttcagaggaaataaaggaaacattaatattcactattgaaaatgtaagcttaaaatgcaaagaaaaaggccaggagccttcgattgttttattgttgaggtag

SEQ ID NO: 430891 - DNA, 930 bp, Serratia marcescens
atgaataatgagtatggtgtattaacttatgaaagtgaagtatatgttaagcgaaattggattaaccttggtgactatgtccaaagtacagcggctaaacaatttttccctcatgtagataaattcatccctcgtgaccatatgaattcatatgcaggcaataaagccaaaatgattatgaatgcctggtacatggatttacctgaaaatttccctccatcagataatgtctgtccgctatatgtatcgatacacattaactcgacggttgcagaaaagatgttgaccccggcagcaatcgagcatttcaaaaaatactcacccataggttgtcgcgatttctacactcgtgatttgttgcaaaaaaaggggattgatgcatactactcaggatgcatgacattgaccttaggagagtcatacaagagaaataaagttactgatgatgtatatttcatcgacgtaatgtatgactccaaaacgttacctgagctaattcgtcagcctcttcgattcggtaaacgaattctaaatggacgggcatttgaattcacccatcgtaaaaaaatactaaatcagtacttcgatgcagaattattagagcaagccaagtttgaaacacaaattataccgtatattgatgcgaaggaagggtttaagttagccgatgatttcctgcgacgcttggctaatgcaagaccagttatcttcgttaatggcggttttaagaataaggtcgacaattgtcgatttgatggtctgtttgacttcttcaatagaattgatgttgatgataaagctgagtcgactacaaactttgagtattctggtgaaaaaatagggcttagaactcttatcaaaaacaaagacattcaccttcaatatgcaaatgaattgatagcaaaatgcaaagattttgcacagagctaa

SEQ ID NO: 430892 - DNA, 156 bp, Serratia marcescens
atggaattcagtacccattaccatagcggtagcatcagccatattaagttgatatatatccgcaatcttttttccctgcgttccacgcagaggtcgaataacaaacacacctgttgcatcagcagtgttttgatccaagccagcagaattgcctaa

SEQ ID NO: 430893 - DNA, 561 bp, Serratia marcescens
atgatatctggtgctagtcctaatattggtaaaacttttgttagcattaacttagctgctgttattgctcaaacagggcaaagggttcttattatagatgccgatatgcgaaaaggttattcgcatagtttgctgggcttcgaagggacaaatggtttatcagatattttagctgggaaaataggaatagagagctcgataaagaaaactgacatagaaggaatggacttcatttctcgtggccaggttccacctaaccctgctgaactattgatgacctcgcgctttggagaccttgttgattgggctactaaaaattatgatctcgtgcttatcgatacgcctccgattttagctgttactgatgcagctatcataggtcaccacgttggaacatctttaatggttgccagatttgcgatgaataccgttaaagagatcgaagtaagtatgaggcgttttgagcaaaatggcattgaagttaaaggtattattttgaatgctgttgagcgacgggctactaactattatgattattatcaatatgagtataaaagctag

SEQ ID NO: 430894 - DNA, 1518 bp, Serratia marcescens
atggatatcattattgtaccccgagagcaacgtattcctacctcgggcattagtacggcttacctgcatgtggatcgttggaatgacttttcattcattacgatgttttacatgtatctgtttgatcagaaaggtgaacgccatgaaattgggaatgtcaagattggctttcaaggacaaactactgaaaaatcaacttactccacgttagggagcaggtttagaattctcccagagggatatttttccattggtcaggatgtcgactattatcagaaaatttcgaatttaccagaatccgtcaaagtttcgttacttgaggcgctcaaagatatggcttataggccagaacttatagatcttgttaaggatgaggaagtctttaaaacgtctttgcttcggtatgttagtttgtctgttattaaagggcagtttgcgcgagtgcttgagggaaagaatccactgactaattttgagtttaagttcattcgccctgcacaagacaaaatttccgatatcgaattatcatttaaggtgaaagtaggagaaaaaccaagtaccaatattcatgcgatcataggtcgtaatggtgtggggaaaacgacaattctaaacggaatgattgaagctgttaccagtaaaggtacgtcgaatgcaaaattttatgatatggaggggtggagtgatgacccgattgataatgattactttagtagtttagtctctgtgtcatttagtgcattcgatccattcgagccaccaagtgaacagccggatccatcaaagggaacttgctacttctacataggtttgaaaaaaaaaggagagtcgctgaaagggctaaatgatattcatgaagactttctacaagctttgacgctatgctttagccagcttcctaagcgtgaaagatggttgcaggctattgatactttggagtctgatgaaaattttgcaagcatggagctgaaaaatctagcgggatataatggtgatatgctcgttagtaatgcacggaaacgtataaaaagaatgagctccggtcacgcggttgtgttattaacactcacacgtttagtcgcaacggtggaagaaaaaacgttagtactaattgatgaaccagagagccatcttcatccaccgttgctatctgcttttattcgtgcgctgtctgatttgctacttgatagaaatggtgtttctattattgcaactcactcacctgtggtacttcaagaggtccctaaacgatgtgtttggaaaataaatcgttcaagattgtctaccgaatctcgcaggccagacattgaaacatttggtgagaatgtaggtatcttaacaagagaggtgtttggtcttgaagttgttaaatccggttttcacgatttattagtccaatcagtgaagtcaggtggaacatatgaggagatagtcgatgagtatcgtaaccagcttggtgttgaagcccgagctctattaaaagcgcttgtcacacacagagatcggagtgttaagtga

SEQ ID NO: 430895 - DNA, 858 bp, Serratia marcescens
atgttgaaacttaaacaacctgcttacacatatgccgatatgctgactagctgccgcgaaggcataactggtaatccgggcttgttactgaaagtaaatgaagcaataactgatttgcaaacactggcagcttcatatagcgcatcggcatcagctggtgaactttatacaatacaaccactgcaaaacaaagatgaggaagaccccattgttgtaggtcggttaaagaaatctgactttgttaagctttatggaaattatgttgttgggaagaaaaagcctgctcgagctatttatgatgccctgatgactgctgctaatgaaaaatgcccattttgtggtgggattgggcgccctcgaaatttagatcattatttgcctaaagctcactatcctcagttttctatattgcctgttaatctggtgccagcttgtcgagactgtaatatggatggtaaaggggaggtttttgcaagaaatgaagcagaacagatcatacatccctatttagacgataactgttattatgatgaacagtggatatcggctagatacttggttggcaaaaatgatgagcccggagttattgagtattttgtttctccgcctgctggttgggatgatgcacataaacaaagagtggaaaaacatttcaacgattttgatttatctttaagatactcgaaagaagctggtgcgaggttagttgtgcttttagctctatataactcagtgctaccactctccggagataaaaatgctgctaaagatcttatatttcaaacaataatcaataatacgccttttgtgaatcactgggaacgggttatgtgtttggctcttatgtcagacttgtag

SEQ ID NO: 430896 - DNA, 912 bp, Serratia marcescens
gtgccgagcctgatttattcctttgcccaactggaagccttcaccgccgtggccgagcacggcagcctggcaaaagccgcgctcaaactgggcaaagaccgcacgacgctgcgcgatttgattgattttctcgaggatggcttggactatgcgctgttcctgcgcgaggggcgcagcctgcacctgacgccggaaggcgaacagctgcagcgccaggcgcacctgctgatgcgccaggtgaaagcgtttgaggcgtttgccaaagacgtgccgaagagcgcggcgcaggaaatttctctggtttacgatcccttcacgccccgcgcgttgctgcaggcgctgattggtgccatggcccaacgcaacacgcgcctgagcctgattaacgcctcgcgcgatgaggcagaaagcctgctggcgagcggccaggccgatctggggatctgccaggcacgccatcgcagcgtgggcgacgccatggagtggcgcgccttaggggcgatagagatggatttttacgccgccaaaacgcttttccccggcgcggaacagccactttcgctgctagaactttcgctcacgccacaggtgatcatgcacccggattctgacgaacccgtggcgcgccgcctgcaaatttccgggcacactatcttcaccaacgagctggaaatgctgcgcgccctgctcgaacagggctgcggctggggattcctgccgacgcacatgcatgctgaacagtggaaaaacgtcaacacgctgcgcaccgaagtgggcagccaggggatcagccaaaccatggtgaccatctggaagccgggcaatgaccgacgagcgctgattgatgagacgttggcgctgttgccggggttgtggcgggggttggggggtgaaaagtcgcggctagattag

SEQ ID NO: 430897 - DNA, 2100 bp, Serratia marcescens
atgaataaaggtagaatcaaaaaaatcctggaaaaactcgatattgggcttaaccaccgtgttccggttatacatcaaacagagtcttccgaatgcgggttagcgtgcctggcgatggtttgcggctactatggcaaaaatatcgatttaatctcgctgagacagcgattcaacctgtctgctcgcggcgccacccttgcaggcctcaatggtatcgccacgcaactggggatggctgcccgggccgtttccttaaaccttgaagaaatcgaggcgctcaaaacgccatgtatcctgcattggaattttaaccattttgtggtgctggtcagcataagacataaacgcttcgttctgcacgatccggcgcgcggacgcagaaccgttagcctcgacgaaatatcgcaatactttaccggcgtggctctggaagtatctcccaatagtgaatttacagccgaaacggttaagaatcgccttcaactgagaacgttgctcaacagtattcacggcattaaaggtgcgctaggtaaaatattccttttgtcgttagtgatcgagaccatcaatcttgtcatgccgatcgggactcaactggtcatggatcatgccattcccgccagcgatcgcgggctactgacccttatctgtataggcctgttcttctttattctgctacgaaccgcagtcagcatggtacgtgcctggtcatctttaatcatgagcacgttaataaatgtccagtggcaatcagggttgttcaaccacttgctacgcttgcccttaggctattttgaacgacgcaaactgggtgacattcagtcgcgattcagttcattagacaccctgcgtacaacgtttacgaccagtgttgtcggtgccatcatggacggcatcatggtcgttggcgtcctcgtaatgatggtcttgtacggcggctatctgagttgggtcgtattaggatttactgcgttatatattctcatccgcctgttaacttacggttattatcggcaactgtcggaagaaactttggtgaaaggaggcagggccaactcatattttatggaaacgctctatgggatagccaccgtcaagatacagggaatgggcgctcgacgaagtgccaactggctgaacctgcaaatagacacgatcaacagtgggattaaagtcaccaaaatgaacttttttttcaatggggtaaatacgtttattaccgcttgcgatcaggtcgtcattttatggttaggcagcagcctggttattgataatcaaatgacgataggtatgtttgtcgccttcggcgcattccgcgggcagttttctgaacgagtggcctcattaacgagctttgtgctgcaattgagaatgatgagcctgcataatgaacgtatagcagacattgcactgtatgaacgtgatgctcaaaaaccggacatcccatatcaggcaacaatgcaacccatatcgctggagagtcgaggtttgagctatcgctatgacagccaatctccccccctattttgcgatctcaatatccatattgcgccaggtgaaagcgttgcaataacaggcccttctggagccggaaaaacaacgttaatgaaagtgttgtgcggcttattcgaacccgatgctggcatggtcatcgctgatgggatggatatccaacaattgggattaaataatttccacaaaatgattgcttgtgtgatgcaggatgacaaactgttttccggctcaatacgcgaaaacatctgtgggttcgaagaggatatcgacgaggagtggatggtcaaatgtacccgcgccagctatatccatgatgtcattgtaaaaatgccaatgggttatgaaacgttagtcggagaattgggtgagggactttcagggggacaaaaacagcgtctttttatcgcccgtgcgctctatagaaaaccagggattttatttatggacgaggccacaagctcactggacaaagacagtgagtattatgttaacgaggccatcaaacaaatgaacatcacccgagtgattatcgcccacagagaaaccactatcgccactgccgaccgcgtgatttcactggcttaa

SEQ ID NO: 430898 - DNA, 1020 bp, Serratia marcescens
ttgaatacttcatcctttacatcctttcaaatagaaaagataaaatcactaatcagaaaaaaatcacattcaattaagaactattttgaagttttaaactccgatgttaaatatgcgattactgctctaattcaacttaaaaaagaatgtaaaaaaaagtcatccgaggaaattgaatcatttaatcgaaccatattgaatatgagaaatatagtttttattttttcagtatatgcaatagcaatcatcggaattacattaaaaaccaataactactctgatgactttttaaaaaatttccttgtaaatgctaactcctccattctcgacttccttattcttggtgttattctttattatttcgaacacaagcggcaaaacaaagaggttgttaaagaactcctcgaagacctcgaaaaccttgcaaaacattcatctgccgagttaaatataatgaagattaaaatcataaggcaattaaacggtaaaggtgtttttaacatcaacattcaacgaatagaactgactaaattatccacaataaaatacctgagatttaaaaatgctaatataaaaagcttgaacatgtccgagtcttacattcgcgactgctccttcgttgattgtgaaattcaagccttaaacatcaatgataatagacttaaaaatgtaaaattcacaagatgcgacctcaagaatattaaagcaagtaatacaaaatttcaaaatgttgagttcgagggatgtaacttctctggcgggttttttaataacagcattttgaaaagctgcattatgaaaaactgcgacttcaaagatgttacatatgaaaaagcgattttaacaagtgcaaatattttaggtgcaaaaaacattaacacagagagaatgattgatgctgaaaatttagactatattaagtgttcggatgagatcaagatcgcactcgaggagaaacatgcaggttttaaattcgcaaaaggaagatcggaggttagggaatcgaaccctactcagtga

SEQ ID NO: 430899 - DNA, 2625 bp, Serratia marcescens
atggcaagcattgtttctgagtatcaccgatttctcgcatatctcactcaacaagacgtatccgacgacgtccgacggcttgcgcacctgatatccattaacctgcaacctctctccgaggttggtgcggctcgcaggggacgttcagttcgcctagcccctctagccgtcagtaaaatggtagacatgcccgttaattacgaaggcaatgctgacgcttctgaaacagcagcccgacttggtcgcttacaccggcttgaggtgggaccattccgtggtttcatgcgacaggaggtctttgacctgacccacgatatcacactgatatacggcgccaacggcaccggtaaaagcagcttttttgaagctctcgaagtagcgatgctgggtactatcagcgaagcacagttaaagcgagttgatcaaaagctgtattgcaacaatgcacgtattggtcggcacgatgcgccagtgcttattgcgggtgaggctgaggcgacacagcccgtccggcctgatgaatccgaataccgattttgtttcatcgagaagaacaggctggacgactttgcccgcattgcttcgagaacaccaggcgaccaacgacagctcatcgcaacgttatttggtgtcgatcagttcagtgagtttgtacgcggatttaatccgtctctcgatcaggatctgatgctttccggcccaatggccgcgcaactggttgaacgtagaaaacaggtcgcctcgtcagaacaggcgatggcggaatacccgcagaaaatatctgatattgaattgcaggaaaatgtgctagcccagcgtatgtctcccggtgcgacctataagtcatgcgttgaatggctggaaggcacacctcttcagcagggacgtcagccatacgttcaggctcaacttgatgcagtgccgccaccagtgcatgggattacacaatcccgtctggaatctctgatcgatgaggaatatcggttgcaggggagctggcaagaggcttcaggagagcttgctaaacgggcaaccgagatttcctttgcaaaactctacgaggctgtacaggcctttgccgttgatgcgagcacctgccctgcctgcggtacctctctcgatgcagtaacggaggatccgtttgcgcgtgcgaacgccgggctggaagctttggcacagttggctgaattacagagacgagagcaatcattaagagctgagctcaccgagtctgtccgtcaactgtgggaagaaatgcgacgcaccatcacagccgcgatgactgcatgtccagaagcgcttcaggctgcttcgcttcctgccttgcctcaaacatcagttggcacttggcttgagagctgggttgccgaagatcgtcaggcatggagagcgcttctgagcattgcctcagcgattgagcaggtcgatatccagtccagcgctatcctgaatcaacgcactgcgctgactcaggaacgcgaccgcctgattcagtttcgatatgaaattgaaaggctccgtacgcagcgcagggctgccgacgttgagctggccgcagcgcaggctaccataagccagttcaatgaaaataaccgggacttgcttgcagccattgaggcagaagaacccattgtacagttaaatcagcgtattaagttggcatacgacggcttcctgccagaacttcagcaatacatggctgcgctgccaggcaaattgctacagggattgggtgaacaggcccgaaatctgtataacgcatttaaccgaagcgatgcacccggcgatctgctgtacgccctccacctgccggttgctgaaaacggcaagattgaagtcgaattcagggggcaaccaggcactcgttacgatgcgctgattattttcagtgaaggacacatcaaatgcctggggctcgccatactcttggccaagaatattgttcagggctgcccggtcgtgatctttgatgatgtggttaacgcgattgacgatgaacaccgggacggtatctggcgcactttttttgaggatgggctgctggatgacaagcagataatcttgacctcacatgccgaggaatttttaatccgcattcaacaggagctgggggcagcacgagctggaaccatcaagcgttacaaattcctgcctcacacaggggaacacgaattgcgggtagacagccatccgccgacgaagaactacgtcctgctggcacagcaggcgctggatggggatgaaaaacgtgaagcgctccgccagtcccgtcctgcacttgaaagcctgactgacagtctctggtcctggatgggcaggcgtggggacggacgcattgaaataaagctcagcggaccgcgctccccctgggagctgaataataaatgctctaaattaaaatcggccgttaatcgcattgcagctcaatatcccggcgcaccggatgcagttgcagctttagagaggttgctaggcgtcagcggtgcgagcattgaatggggatatctgaacagcggcgtgcatgattctcagcgtgatcacgagttcgaccgcgccacagtaaggatcatcgtggagtcgatcgtgtcccttgatgctgcaatcagcgcaatgagaaaccgatag

SEQ ID NO: 430900 - DNA, 363 bp, Serratia marcescens
gtgagcgatgacgtcacgctttccacctactcttactcatttgtgtttttatactttttcctgtcagttgtagtttttgtcgggctgtatcacctgaaacagaaagttaacaataaaaaatcttactctctttttgtgatagttaccatagtaaatctatttgcaagcatcacccaaggtttaatatttaactatggttctgagatactggattcgatgctcaatataaaattccaagattatgacgaggtatggtacgccagtattatattcgccctaatttacttgtctcaaccaccgactaatctctattacaagaaaaagggtaagaataatggtagcaatagcaaaggcatcacctga

SEQ ID NO: 430901 - DNA, 1281 bp, Serratia marcescens
atggcacaagtaatcaacactaacagcctgtcgctgatggcgcagaacaacctgaacaaatctcagtcttctttgggtactgcgattgagcgtctgtcttccggtctgcgtatcaacagcgcgaaagacgacgctgcgggtcaggcgatctctaaccgtttcaccgcgaacatcaaaggcctgactcaggcttctcgcaacgccaacgacggtatctccctggcgcagaccactgaaggcgcactgaacgaagttaacgacaacctgcagaacatccgtcgtctcagtgttcaagctcaaaacggttccaactcgactagtgaccttaaatcaattcaagatgagattgatcagcgcctgtctgagattaaccgtatttctgaacaaaccgatttcaacggtgtgaaggtactgagtagcaatcagaagttaaccatccaggtcggtgctaacgatggtgaaaccattgatattgagctgaaagatgtcaatgcaaagaccttgggcctggattcattcagcatttctgataagaaaaatcaggttggtggtattgcagataaggctcaggcttctatcgctttggcttcggtcgaagcggatactgcagcaacaaataaactcacttcagcagggctggttagctattccgataaagatggtaatacacaatatgcggttaaagttgctggaactggcggtaaagatgacagctactatgccgcgactgttgctaaagatggcaaagtttcatgggatagctccgctgcaggtgcaaatgttactacttccgttagcaactcgaaagatgttgcggtaggtgataaggttcttcacgatgttgcaaaagcagatttgaccttggctgatggggagtcattgcataaatttactgatgcaagcggtaatcaatccaacattatcaaagataaagacggaaaatattttgacaccaaatttgatcctgcaactggtaaaatgacaaaaggtgcagaaaatacggcagcatattctccgttggacaaactggacaaagcactggctcaggtagatggtgtgcgttcttccctgggtgcggtacagaaccgtttcgattctgttatcaacaacctgaacagcaccgttaacaacctgtctgcttctcagtcccgtatccaggatgctgactacgcgaccgaagtgtccaacatgagccgtgccaacatcctgcaacaggctggcacctctgttctggcacaggctaaccagtctactcagaacgtgctgtccctgctgcgttaa

SEQ ID NO: 430902 - DNA, 204 bp, Serratia marcescens
gtgaagagtgcagaactgattgcgttgctagaaagccacggttgggtattgcggcgggtaaaaggtagccaccatcaattcaaacatcccgattttgcgctgatcatcaccgtaccgcacccaaagaaagatctaaagctgggcacgctgcggcagatacttaaagacgcgggattaagtgcgcttcacatcgccacgcgttaa

SEQ ID NO: 430903 - DNA, 183 bp, Serratia marcescens
gtgttgaaaggccgcacctgcagcgcctacccggcctgtgcgccggaagtgcggctgggcggcggccattatgcggagatcggcatcgatcaggcgcacatcgacggcaatctggtcaccgccccggcctggccggcgcatccgcagtggctggcgaagttcgccgaggtgttggagcagtaa

SEQ ID NO: 430904 - DNA, 381 bp, Serratia marcescens
ttgacccattttgcagagtggcttcgccaaatccaggcgcttgaggttgaactacatcagcccgcgacacgttgcgatccgaagcgtgtcgcggcactgctgcatgaagactttgaagagattggccgctcaggtctgcgctatgacaaatgccaaaccgttgcggcgctagagatggaagcggattatccgcagattttcgcacaagcttttaagctggcgcaaatcagtgaaggcgtcatgttgctgacgtataaaagttttcagcgcgacgcgcagggccgcgccgtgcgttgcacagagcgttcgtcgatttggatcctgacagaaaaagaaggttggcagatgcggtttcatcaaggtacgccgactgatgagtga

SEQ ID NO: 430905 - DNA, 1716 bp, Serratia marcescens
atgcaacccgataacgtgattggcgaatttcattatcaacaatacccggttcggctgccgccgctggagggcagccgcgaaacgcgccgccatcaggtggttatcgtcggcggcgggccggtcggtttggccaccgccctggcgctggcgcgacagggcgtcgcttcgctggttctggagaacgacacccaggtgtgcaccggcagccgagcggcctgcatttcgcgtcgcagcctggaaatcctcgataaactgggcgtcgccgccgcctttgtcgacaaagggctggcctggacgcgcggccgcagcttttatcgcggcgaacaggtgatgcgattcgacatgctgttggatgacaaccagcagtttccggcgatgatcaatttgcagcagtactacatcgagcagtttctgttggacgcagcgatgcgttgcgacgatctgatcgaaatccgctggggttcggaggtgcagcgtatcgtgccgtcagacgagggcgtcagcgtgtcggtgcaggcggcgggcgtcgattatcagctcgaagccgattggctgctcgcctgcgacggcggccgcagccgcatgcgggagcagctgggcttgcatctgcagggccaggtgcataaagggcgtttcgccatcatcgatatcgaattggaaagcgatacgccggctgagcgtcgggtttggttcgaaacgccgctgcggcccggcccgatgtggatgcaccgccagcccgacaatatctggcgcatcgattacctgctggaggatcatgtcagtgacgaagagggtctgaaaccggaaaacgtactgccggtggtggaagattttctgcagatggtcggcgaaacgggacaatggcggccgatctggatcagcatgtacaacgccaaggcactgtcgctggagcgttaccgccacggccgggtgctgttcgtcggtgatgcggcgcacgtagtgccgatcttcggcgtgcgcggcctcaacggcggcctggacgacgcctacaatctggggtggaaactggcctatgttctgcaaggacgcgcgccggatcgcctgctggatagctactcccacgaacgccgcggcgcctggcgcgataacgccgatcaagcgagccgcagcgcggaattcatgtgccccgctacgcccggcggcaccacgctgcgcaacgcggtgctgtcgctggcggcccgtcatccgcagttttcgtcgctgatcaacccacgtcagacccacagcatccgctatgcggactcgccgctgaataccctgacgccgggcgacgctctgcccggcccggcagtaggcgcggtgttggccgagtacccgctgttgcgggatggccgccctcacgcgctgaccgggttgctcgacgcgcgcagcttcaccctgctgcgtttcccggcgcgagaagaacatggcgacacggtacgggaacggcaaacacgctatccgctgcgcgtcgtcaccgtcggtctgccggggcagccgcagcccggcgacgccggcatgattgaggatccacacgggcggctgcatgccgcttacggcagcgcacaaggtgcgctgtatctggttaggcccgatggccacgtgtgctggcgctgggcgcaggcgcaaccggccacggcccaacaaatcgagcaggccctgatgcgcgcctgcgctcacctgagcggcgacgaggagacaatcgatgaacgctga

SEQ ID NO: 430906 - DNA, 225 bp, Serratia marcescens
atgaacgctgagctgaacgaccgtcaacgcgatgagatctatcgtcatttcgagcaggccgccggccgcttcagcggtgaagacctggcgctgtttttggcgcggctgaacctgttgctgctggaggcactggcggatgaacaaacggcccgggcgttgattaccgaggctgctgagctacagccagaaagcgctcagcctccggccgaaaaagcggcgcgctga

SEQ ID NO: 430907 - DNA, 2325 bp, Serratia marcescens
atgacgctcgccgacgcctcctggcagctcgacaacggtttggccgtcaaggcgataagcgatcctgccgccgctagcaccgccgcgctggtgcgcattgaagcgggcagttttcaggcgaccgccgcctggccgggcctggcgcacctgctggagcatatgttgtttcgcggcagcgcgaacttcagcgcgcaagatggcctgatgggctgggtaccgtcggtgggtggccggctgaatgccaccacccaggccacgcaaaccgcatttttcttcgaggtgggcgccgagcatttggcgcaggggctggcgcggctgagcgatatgctcgccgcgcccctgctggcaactgaggcgatcgtgcaagagattgaggtcatcgatgccgaatatcgcctgttgcgcgccgatggtgaaacccgctgcgaagccgcacagcggcagatgttcgacggcctggacgcattgcaccgttttcatatcggcagccgcgccgccttcggcaacgacatttccgccctgcagcaggcgttgcggcagtttcaccagcgctattttcgcgcgcccaacatgacgctgtggctgcaaggcccgcagtcgctggcgcagttgcatgcgctggcgcagcgctacggcagcagtttgcctccgggcagcgccacaccgcacgaagcctcaccgctgctgaccgcggcggaagatcacaccctgtttcttcccggcacgccgcagctgagactggtgtttgctctaccgcgttcccattcccgcggttggctgcggcggctggagcgcctgctgctggacgaagcccccggcgggctgctggcccgcctgcgcgctcaggcgtggtgcgatgcggttcggctcaattattcacgctgcagcgagcacaacgcgctgctgagttttatctttaccgtcaatcacggttcagccgctgaagccgcccacatcgaaagcgcgctgctgacgtggctgcgagcgctgcaggcgctggcgccggctcagcttgcgcattatgggcagttggccaatcgcgatttccaccgtttggcgccgctcgaccagctgcgcgccagggcgtttgggctgccgccggcggaggagaacgacgattggtcacggcatattacggcgctgattaacgcgccgcgtcgccgcctggccgtgcggcccgaaggcgacagtgaaacccgtgaaattcaggggctgccgctggcgcttggccccttcgccggcgccgagctgaattctacagtggaacctttccgctttttctcctcctcggcggcgctgccgatcccgtcattgccttccggccaggcgccgctgcggcacctgctccccggagaggcgcagccggtgctgctgctgcggccggcgtcgtccagcgccttcagcgatgaacaagcctacggctggcaggcggcgctgcgcgccggggcggcagagctggcgcatcgggaggggcatttaagcttcgaacgccatcagggcgtatggctgttgcagctcgcgggcagcaacgcgatgatctgtcacggactgagcgtagtgaaccgggcgctggcggcactcacgccgaccatcctcaacgaggcagcgagaaatctgcgccatacgcagctgaaagagcaaaacgatatcgccattcgccgcctgttagcccaattgccgacggcgctcagcgcacccatagccacagcgactcgctggcacgccaccttaatcggcggcgatagcgagttaaaacagcagctgtcgcacctgctgtgcgacttcccctattccgtggccgctgagccccagatgccgacacatcagcaccatcgtccctacacgctgacggaaagcggtgccgagcacgccctgctgcagttttatccgctgccaaacgaggaagccgaaggacgttgggcgctgcgcgtgctggctcagctttacgcaccgcgttacttccagcggttgcgcgtggatcgcaacgtgggctacgtggtgcaatgcgctttccaccgctgtgccgatgccgaaggcctgctgttcgcgctgcaatcccccacgttcaacgttgaacagttgcggcagttaaccgacgaattcttactgcagatgcgccatgagctggcacacgttggcactggcgagctggagcaaacgcaacaagcgctgcggcaaagcttgcagcgcctcagcgccgcgccgctgcagcgcgcgcgggaaatcgcactggagaatcgccccgcagtggcgcgggtggctacaatgacggcggtgcagctgcgaagctggcagcaacggattttccggatcgagagcgcttaa

SEQ ID NO: 430908 - DNA, 339 bp, Serratia marcescens
atgaggttttttatcggtgatgacgattatccatctatagaagccaatagtgattatagaatactagctgactttataatggatgatatccaaagaagtttttatggtgtcaatgagtttattgaagcctgtaaacttgtgaggtccggagtcctgcctttttgggaggagacgggaaactctcatactataactattaaacctaatggcgtggagatttttaatgaatacaccgaggagtctatgactgtttcaagtatagatgagtttgaggggcgccttgaacaatggaagagtttattttttaatatgggtgattttttaaatgaaactaaataa

SEQ ID NO: 430909 - DNA, 267 bp, Serratia marcescens
atgaataaatatgttgtttttataaagaacgatgaatcaagggtgctgagaaaggaagtggtgacacgagaaataattaaagatatgaagcaaaaggggttcagaaagcatcatgttgaagtagacgctgagaacgagaatgatgccattaacaaactaaataagaacagcaatgactatttggactcattgagaaacttttccggcgatttattgctctgttctatttttgtcattgctatggtcatggtttatttattcagatga

SEQ ID NO: 430910 - DNA, 462 bp, Serratia marcescens
gtgagctttatcagggaacgtaagccgggtgagagtcaattcagtcaatacgaaaatttgggtttcgctgtcagttgcatgctaatgaacaataactacagtttatatcacattaaaacgctgcaactatggactcaagaagcaatcaatcaaaaccaattcaaaatattgttcgatcacctgaatacccctttggggtacatcacctgggcctatttgaaagacgatactttgtctcgttttattaacgatccacaatgtctccttcatagttcggaatggaatgaaggtggaatgctatgtatcttagatttctgttgccaacccggtagcgccagattgtgcatggattatcttgccgatgcttccccgattagggataacgacaaggtggcttggctatcgaaaaaatcaggcaagcttatgatcgcgaaaaacaaaaataaaaaaccaatatcatag

SEQ ID NO: 430911 - DNA, 1581 bp, Serratia marcescens
atgaaaccaagcaagagtataatcgcactgcgagaaaaaatcattcatagcagcaaatttgagccaagcaaatcaggattaaagcatgcaaatgaaattgaagttctgttggacatacttaatatagtatatattgatataattccaaagtcagcgaatactcaaaccatcgacaacataacgtcagttgcaaatacatttagcgcttgcgttgaagcgtatgagtctggaaatttaaaatccatatttaaaaatcttatttttgtcgaagaattgattgaaaacatagaacataactttataaatacaccgaccaatgaaattagagacaaactggaagttttgtattcggcgagcaccaagctgacacacaataactacttaaccaacaatataattcattttgtttggattggttcaataacaaacgagcgccttaaatatcttgagttgtgggcagagtgcaataaaggttttcgcatcatgctgtggatcgaccctctcacatacctggcggacacgctattaaaagaaaaaaaaagggtattacaatgcgaaaaaaacgaaaggaaggcactaattttacaaagtgaatgttggctattttcgcaaaaaaacacaggaacaaatgatgaaaaaatagtcaaatacttcagtaaaaatggcacagaattagatcttaaattttcatcccacatttctaaccaagcactgtccgatctttcattacgacacaccaacatagaagtcatggatatcaacatcttgatagaaaaagaagaatattgtcatgaaaatgacatctacaatttcgagatattctttagaactaatttagcagcggcatcagatgtcatcaggctattaatcctgtacgagtttggtggcatttacatcgatattgataccttaccaaaaataaacaaaagcctcatcgacggcgacttgcctcccgccacgcctgatacttcatgcaacgaaaccctcgaagtcatgaacaatatgaggatagttgaaaaatactggaaacaaaaatcaatagctattaaaaaactcaatgaaatcgacactcaccctgacacacattcaatttcagatgtgattggcacaaattcaaaagtaatatgccatgaacagtttttcgacacgctaggaaagataacaacaccgtttgacctacctttaattagcagaagacataaagaaaagaatgtttttttcagtaatgtgattattgccaatagtcgctccataaccatacgattagcaatgcaaattgtaaagaaaaactacaaggaactcatccacctcatccagttcaatcacttaaacgattttgcaaccagttatgctttcgacggatatctgaatgactcaagaataacacttaacctatcgggtcctggtgtattgctaagagccattttattatcaataattgaactattagagttaccagaaaacatatctgaaaatgctttgttgggcttcgtaaacacccatctttcatttgtggatcataccatggatacggaaatgggattaacgtcgtcgtggataaagaaaaaagcggagtcgtaa

SEQ ID NO: 430912 - DNA, 1287 bp, Serratia marcescens
atgcgtgatttgtttcgacaggaagccacggatcatcagcgggcgaaatgggcgggtaaggccttattgataaacggtttgcccgcctggtgctttggtcttttatcgtttttatttattcttgttttcctctcttttcttatattcagtcattatacgcgccgcattaatgtttatggtgaaatcaccaccttcccccgttcagtcaatgtgtttgcaccccagcagggttttatctcggaacgcttcgtcgaagtgggcgacgtggttaacaaaggccaacgtctttatcagattgatgtcagccgggtgacggataacgggaaagtgagcgccaatacgcgcctggcgctagaaaaccagttaaaacacgtcgacagcatcattcttaagttgcaagacaacaagcgcatgacgctggaaaatctacgcgcgcaaaaaaaacagtatgaattggcgcacatgcagtccaaacagctgttggataacgcacgagaaggggtggcatttgctcaggaaaacatgcgttcctataaggaatatcagcaacgtggtctgattaccaaagatcagcttagcggacaaacctattcgttttatcaacaacaaagcctgttccaaaacctgcatagccaacatattcaggaatcgttgcaaattacgaatttggaaagcgacatcgttacgcgcgcggcagatttcgataaccaaatttcacagtaccagtctcagggtaatgatttgcaacggcagttagcggaagccgatgccagcggtgcattgatcgtgaacgccccgagcgatggccgcattgagtctctcagcgttacgccgggtcagatggtcaatagcggtgacagtctggtacagattattccacgtaatggcgcgatttatcagcttgttttatggctgcctaacaccagtgtgccttatgtttcagcgggggacgccattaacattcgttatgatgctttcccctatgaaaagttcggccagtttcccggcaggatagaaagcatcgcttatgtgccggcctccgtgcaagaaatgtcaacttacagcagttctcccgtgcatcagcccagcgtgcaaacggcatctttttataaggtgaccgtttccctggatgaaacgcatatcagttaccagggcaaagcgttgcagctcactaatggtatgcgggcccaatccacgctgtttttggaaaaaagacctttatatcaatggatgttctcacctttctacgatatgaaaaacagcctgatggggccaatcaatgactga

SEQ ID NO: 430913 - DNA, 903 bp, Serratia marcescens
atgcaacgtcattttgacgatgttcaggtgggcagcatcgagctgttttgcctgaccgtcgagaccggcagtttcaccgccgcggccaatgccgccgggataacgcctgcggcggtcagccgttccgtcgcgcgcctggaggcgcggttgcaggcgaagctgtttatccgcacgacgcgccagatgcgcgtcacagatgccggccaaagttattatctggagtgtcgcagggcgctgagccagctgatcgaggccgaagcgaaaatttccggcgagcggcagaaaccggtcggcacgctcagcatcagcgtaccgacgctatacgcacattttaggttgttgccgcgcctgcccgagtttgcgcagcgctatcccgaactcacgctgaatctgcacgtcagtaatcaaaatatcgacttttccgaagataaattcgacgttgccattcgtggcagcgaactgaacgattcaggcctggtatcgcggcgattggaggaggccgaactcatcgtcgtggcgtcaccgggctatttacagcgccatcctgcgccgcttacgccggcggatttggcccagcacgactgcattcagtatgcgttgcccagcaccggcaggaaaaccacctgggcctttaacgtgcagggcgaaaatagcaaagtggaaacccgcgggcgttggctctgccaggaagattatctcgtcacgctgacgctggtgaaaaatggtgccgggttgatgcaggtttatcgctttagcgtcgaacaagagctgagaagcggggcgctggtggaggtgctgaaagattacgccggcgcctcacgccccttcattctgctttatccctatgcgcgttatgttccgcttaaagtgcggaaattcatcgattttctgacggaagattag

SEQ ID NO: 430914 - DNA, 741 bp, Serratia marcescens
atgaacaaggtaaaaacggtcatcgtaacgggggcatcgagcggattgggctttgccattgcgcaagcctatctggcacgcggttatcaggttgtcgcaaacgcccgttcgcttgaacggctgcaaacggcggcggaccaactcggccatcaggccaatctgctgctggtgccgggagacattgcgctgccggaaaccgccgaacggttgttcagcatggcgacacaaaggtttggtcgggtggatattctcatcaataacgccggcatatttatcgccaagccgatcgccgactattcgccggaggatgtcgaggccatggtggcaaccaacctgaaaggcttcttctacccagcgcaggccgccgcgcggcatatgcaacaattcggcggcggccatatcgtcgctatcaccgcgtcgatcgccatgcagcccaacagtaaagtgcccgccttgctgccggtgctgatcaaaggcggcctgaatcaggccgtacgcgaactggcgttggagttggcgccgcataacgtgatggtcaacgccgtggcgccaggcatcatcgccacgccgatgcaccagaacgatgagcagaacctggcgcagatgcggcaactggcgccaaccggccgcataggtcaacctcaggatatcgtcgacgcggtgctgtacctgaccgattcccattttgtcaccggcaccgcgatcgcggtggacggcggggcaaccgccggggtctggtga

SEQ ID NO: 430915 - DNA, 243 bp, Serratia marcescens
atgccatacgtcaacattaaagtgaccgatgaagggatcagcgccgagcaaaaacgatggctgatcgagggggccaccgcgctgctggaacaggtgctgaataaaccacgccacaccactttcgtggtgattgacgaggtgcccaccgacaactggggcgtcggcggagagagcgtaaccaccctgcgcgccaaagaacggcgcggaaaacggatgattcattatgtgaatgtattgtcgtag

SEQ ID NO: 430916 - DNA, 384 bp, Serratia marcescens
atgaaatacatcgtagcgttaactctgcttttagccagcggcaccgcagctgcacaatgttggcagattgaaaatctgcgtggctactcggcgacggcttcgggcaagtacaagttcgttgaggacggcttcaaggggaaaatcttctccgtcagcattatcgccaaaaatgcgtcgctgaaaaccaacggtaccggctcggatctggactatattccagtctaccccaccgtgatgatcggcacccatgcgtttaaccggcgacaaaccgtcgagacttggatgatcaacggcaataaggcttttatgacccgcgttctgcagggccccggcgaggctgacgccacgatggcgtttgtcggcgacgtgacggggacatgctga

SEQ ID NO: 430917 - DNA, 354 bp, Serratia marcescens
atgaccaccctgatcattagcgagaacggcgatattaccttgacgccagagcaagcaaaggcgttaacgaaagtggcgattggcggcaagttcgaaaatgcggttttactgaacaaataccttgggcgcatgtcggtgccgatggcgccggaagcggagttcgatgaggtgttgaataccgtggccgcttattcactggttatctcagtcgaaggccgttgtttttccggcgtagacgtaccgacggtctcagcgtcaggcgacagctgggaatttaaaaatccgtttttcctgttggaaagctatgcagagcaggtaacgacccagcatgttgctattgcgcaaccgagctga

SEQ ID NO: 430918 - DNA, 222 bp, Serratia marcescens
atgatgaatggcgcatcgcaaaccgtcaccattaacagcgccgtattccgttttgttgaccgggatgacgttcagggcattgatactttaagctttgccagaaccgttgacggtgtaaccagctgggtgttcgtgaacatggcatccagcgatccggttcttctcagcattgtgagccaaaagaccgtgttgaaatttatgtgcagtgcttacaaggcgtag

SEQ ID NO: 430919 - DNA, 588 bp, Serratia marcescens
gtgcataccggcatcaggcaggcggacagcatcgtggtcaccaccttcccggcggatgtggtgcaggatctgcaagactttatcctgtggcagccggatgcgacggagattggtgtagaggccatctatgtgatggtgagcaagccctatggtgaaaccaacgccaggggcaaatacagcggtcgtgaatacaacaccaataaagctggaggccccattcagaatctggattggaaaggggccagcatcgaccgtgccggcgtggataaggtgaagctgcatactgggcgttttacagagtcagacgctaacaaagtgatgatcggccgcctggaaaagatcttgaagggagaactgcctcccaccgatactgacaggcgattttatacacatgagatcagggaattggagcgttatcgcaatttgggtattagagatggctcggtgccagataatcaaggggaagtgtggaataatacgcatactgcgacgttggaagattatcaattaggcaacagcgaggctttgctctatacgcaggaggctttagacgctgctgaacaacaagagttgaggatgctaaaatga

SEQ ID NO: 430920 - DNA, 258 bp, Serratia marcescens
atgcctttaaaagatatcgttaaaaatgaaagtgtagaagatgtgctaacttttttggggccgacctctgattaccgtaaattggatcgtctatatacctataatcgctttgatgcaatttccagcggggaactctcttctacttacgatgcattattccaaaaaggggtgcttcaagatcaaaatggaaaagtagttaaaggccccaattggaaagagccgaaattcgtaaccgagaaaaaatacggtatcgaatag

SEQ ID NO: 430921 - DNA, 576 bp, Serratia marcescens
gtggtcaccaccttcccggcggatgtggtgcaggatctgcaagactttatcctgtggcagccggatgcgacggagattggtgtagaggccatctatgtgatggtgagcaagccctatggtgaaaccaacgccagaggcaaatacagcggtcgtgaatacaacaccaatgaagctgaaggccccatccagaatctggattggaaaggggccagcatcgaccgtgccggcgtggaggaggtgaagctgcatactgggcgttttgaacagactccggaaaaccaagtgatgattgaccgtttggataaaactttgaaaggggagctacaacctactgacactgataggcgattttatactcatgaaatcagagagttggaaaggtacaggaatcttggcataaaagatggtgaggttccgcacagtgttcaagaacagaaggccgtatggaataatacacatactgctacgcttgaagactatagaataaatgaaaaagaacaggcactttacacagatggggccctacaagccgcatatgaacaggcgctgaaagatgctatgggagggaagaaataa

SEQ ID NO: 430922 - DNA, 231 bp, Serratia marcescens
gtgtataatgcgctggaaaccggggttgaagctgtccacgtgatggtcagtgatccgttgggctcggggcgttttacgcgtcagcaactggataaaaagtacaagcacgcgagtgactttggtgttgcggataccagaaaaaacagagagactctgactaaataccgcgatgcgctcgaggcccatttgaatgataaggacacggttgagaaagggacttatagacgataa

SEQ ID NO: 430923 - DNA, 255 bp, Serratia marcescens
atggggctaaaattacatattcagtggtttgaaaaaagctctgaagaatttcaaggtgaagagtactccaaggatttaggggatgatggttcgatcattgaaagtttggggataccgttaaaagataacattaataatggggtctttgatgttgagaaactgtgggtccctttgttacagccttatttttataatgggattgtgctggatagatatttatatcaaatctctttcgattataatgataattggtag

SEQ ID NO: 430924 - DNA, 909 bp, Serratia marcescens
atgagcggacacgaagtcatggcacaaaggataaccactattgtggcagagctttatcagcacggtttcgtatcacgtctgaaattaatggatgaattcaacatcagcgaacgtacgctttatcgtgatcttaaccgtcttggggatcgcataatccatgatggaaacggaatttataggctggctcctgcttacgctaaacctctatctctgaataagttaaaaaaccttgttagcatctttggtatggaggatgtattccctacaaaaaaaatatactcacagccagattttacctcattaaatatacgttcgttaccaggtgatcctcaagcgaagcgtatgctcgaatgcaattatggtctgtttgataaagctattcgtgagaatcaaatttgtgagttccactataaagaaaaacagcggagcgttgcgccctataaactcataaacacgaagggggtttggtatctgggagctgtagagaacgggaatgtcaagggattccaactagctaaaattcactggcttaaattgaaaaatgaatacttcacaccagagccaagcattgccaaatattttgtcgaggaagatgacgtctggttctctatgaataaacagattgtgcatgtcaaaatcgcggctgatgtaagctattattttcaacgtcgaagaatacttcccgcacaaaaaataatcaaccaagaatctaacggtgacttaatcgtgcaaacagaaatggcacatgaaaaccaattatttccactgttacgctactggttgccaaatcttactattatttctcctgttgatatgcaacagcgtttctatcagaaacttaaccaacaaataacagagttgaaaacacagtgcaatggaactgctttcgacaaccagcggcaggaataa

SEQ ID NO: 430925 - DNA, 1578 bp, Serratia marcescens
atgttacatgacccagataaaaaagaaccattatctccttctaatgcagataaacaacaacgtaacagagtgcaaatcgagcgcgatcggaaccgtgttgctactgcccttgcacaggatgaaatcgttaaacgttacgggagcgctagtgctgaatttattaaaggctatcgaggtgttgataatgaaacagggcaacgctttgctaaaggccttgcagacgtctctgcacataaggtaaaccccgattacgccacacagaatattaaacaacaagctggcttctctgccgagattgcaactaccagtcgcgataatgcagaagcaattataaatggcgatactgcacgaacgtggcgtagcgatgatttacctgagtttggccgtaaccataacgttgttgatcgtgtgatgattcaggatggcgtgattgtagaagggtctcagagccagatgaaatttgtaggtaaccgcgaccaactttttaaagatatcacaaaagatgacggtaaattttcccgctatcgaggagttaagctagaactcccttctgaacaatacaaaggagcagtagaacactgccgtaagcaagccgctgatctaagcaagcaagcggataaggttgaggcttcaggaaaacatgatattgcagataagctccgccgggaagcagacaattacgagcaactggctgacaatgtgattgatagcggtttaacaacagaacaagccattttttaccgtgagcatcctaagatagcaacagcaatggatattgcacgtaccagtcacagagcaggtatcgaaggggctaaaacaggagctgttgttggcggtgtgatatcattggttatcaatatttttaatgtcgctcaggagaagaaagcactgggtgaagcaattgaagacattactgttgacagcgcgaaagcagcggtgctgggctacggtactgcatttgcaggatcagcgataaaggcaggtttgcagcaatcagagaagcaggcattacgggcgatagccggaacgacagccccggttctggcggtcaacatttgcctatcgcttggcatgtctattaagcgttacatcaataatgaaattaatgaagctgaactgcttgatgagataggtgaaaaaggttccggtatgctttctagcggaatgatggcggcgctaggacaaattgcgattcctgttccagttataggggcggcaattggtggtatgattggttacacgctctcatctatgttttatcaaagtgctcttgaggccgcacgtgaggtgacactttcacgtgagcgcctggcgcatattagcgctattgagagtgaatctcgaacacaaatcaagcagcaacaaacattgcttgatgagtttactgctcgggaaattccacaactttgtaaagacacccaacatttctttaatgttatttcacgtggaaccgataatattgacgatctggcttttgccgttaatgattttgccactttactcggtgcacaattacagtttcagactatgcctgaattcgaagaattcatgggttcagacaaaccattaatgttgtga

SEQ ID NO: 430926 - DNA, 564 bp, Serratia marcescens
atgctaattagaatgctgcctgatgagaaaaaggtcctactcgtggaacttgccaagcttataacgttatctgacaaccaattaatatggaatacaaaaccgaaggatgaactaacattcgactctgatctaaataatctaacaattcagaagaattcgctggaaacagagtttctggaacaaatgaaacagagcttttcaggtggtttcttcggtgacgtattagatggtcattctactgaacatcaattaaccgagaaactgaagacctatccactttctcaaattgatgcgcccgaggctcgtattcaggcggcgacatcagtattaaaaccactacttaatgatcaaaaagttgataatcccgcaacagcaagaataatcattttccagcttcttttagtcgctctgcgggatggccatatttccagcattgaatggagcctattgaaagagatccagttacacttcaagatcccggattttatttttaaagatctcctggaccgtgccgaatccttgagcattgaaatgagtaaaacactcgccctcgtacttgaatga

SEQ ID NO: 430927 - DNA, 1029 bp, Serratia marcescens
atgcctatccctattattatcggagcagtagccgctgccgctggaatttatggtattgctaaaggtgttggtggtgccaaagatcacagcaatgcaaaaaacattaatgaaagtgcacaaaatatggttgacgatattagttcgcaaatcgagtcaggccgcgagataacaaatagcgttattgaagactatggacagcgtaagcttcgtgcgtataacggcgttattaatgatttcattgttaattttggacgcctcaaaaatgttgaactaactaacagtgctgaactggaaaatctcaacgcgggcgattttaccagtactaccttgtcagcgctgaaacaggattaccagattctgaaagatgccggtttgggtattggggcagggatgggaagcggcgcagcgctagcttttggtgcctacaacggcacgatgctacttgctacagcaagcacaggaacggctatctcctcgctatcaggtgtcgcggcaactaacgcaaccctggcttggctagggggaggttcactagccacagggggttttggtatggcagggggaatgatggtgttggggggaattgttgcaggcccggcactggcaattttcggccatatcatgggaaataagggtgaagcagcgttgaataatgcacgtagcaacatggaacaagcgcaaacgatttacgaagaaggcttattaatggtagggaaactccgggccattgaaaaggtaacaatactcgcaaataatgcattctctctgacgagtggccttcttcgtaacgctgttcatgatatgaagaatgcgctggaaagctacggtgaaaacttccctgacttcccacaggaatgcaaagatgccgtgtttatgtccgttaagtatgcccaattattgaaagcaatgattgatactccgatccttgatcaagaaggaaacctggtactttcaactgaacgaagaattatcaatattacagatgttgctgaaggcagaaaggacaaactggacgatattgacgcataa

SEQ ID NO: 430928 - DNA, 840 bp, Serratia marcescens
atggcgatcgaagaccctattgaagccgctatgcttcatgtttccagcaaggtggagggggatgcgttaccggcaaatctgtctgttacccttaatttccaccctgatgcgatatgtcgcggaatgttgatgcttgaggtattagctgcggatggggtttaccgctcacagtttgaaaccctgaccagcaacggtgggttaaccgcgtacccgggtggggagcgttggatgtgggaaaacgctatttttggcggggcgtatgagcatgccagcccaaacctgcgcccgaaatatggggcgcttaattaccggaacagaatcactggcggctcaccgcgctttgggtcatcacattttcgaatgtgccgaagcgtgctggtcagaaccacattctgttacccggatagcttttttgaaccgtcacactttggcactgcggaaaagtgccagctgattagattagccgagcgtgaacgtacaacgacagatattttggataactatatagaagcccatatacacggcataattaatattgaaaacgacgttgaagctctcgtattggatagctgttataaaggcactgagattgaaacgctagctcatcggttagcttgcccggttgaatggcaccctggctaccggttgcctgaaagtcgtatatcaaattgcagcgattatcgggggccagaaattgccaagatagcgcgaaaacttgtaaataacggttttattacgccctatgatattgggctagcccgcagggaagattacgatcctcagcatctaaagaaggtatggcattgtactgccaaatacggcagccccatcccagagtaa

SEQ ID NO: 430929 - DNA, 948 bp, Serratia marcescens
atgtctcatgaacagtccgttgccttccgacataacacctggcaagttgctgccacagtccgattccctgatggatttgatgcaaaccaaaaatacccagccattgtctgcgctcacccgatcagcagctgtaaagagcagacttcaggcgcgatttatggccaaaaactggccgaagcgggatttattactctggcattcgatgcctcaacgcaaggtgaaagcggcggagagccacgctttagcgaaaacccgtcggtccgagtggaagacttccggtgcgcgatagattacctcgtgacattaccctatgtggatgaggagcgcattggggtgttagggatctgcgggggaggtgggtacgccgtcagcgccgccacgacagaccaccgcttcaaggcggtggcaaccgtggtcgcggctaactacgggcgcatcatgcgtgaaggagacttgagcgcggatgcggcgctcaagacaattgaggcgcttggcaaacagcgaaccgctgaggctcggggagccgctccgctggtggttggctacatcccggccaacgttcaggaactggcacaaacgggcatcaacgatatcgatatcattgaggcggtagattattacaccacggttcgcggacaacagccaggttcacccaacaagttgcggtttaccagcaccgtttctgcattaaactgggatgcttttgcctttacggaaaaattactgatacagccgctgcatattgttatcggtgatgttcccggcggtttcggatcttatcgcgacggtcacgaactctatcagcgtgcgcgctccgctgaaaagacgctccaggtggtgaaaggtgtttctcactatgatctgtacgatcgtcctgaagccacggcaaaagccctggagcagctaattcccttctttaggaagcagttaggaacatcagtggtttaa

SEQ ID NO: 430930 - DNA, 759 bp, Serratia marcescens
atgatgaaatatacccttatcaccggtgccagctcagggatcggtaaagcgcttagctatcagttcgcatcacgtggccacaacctgattatcaccgcccgacgtcaggacgaactgaataaactcaaagaggatatagaagggaaatatgcggttcaggtcatgacaaaagcctgcgatctggcacaggaagggcatgccgaagatctgtatcgccagcttcgtgactatgatctcaccgtcttgatcaacaatgccggttttggcgatttctccatgccctgggacatggatttagcaaaagcaacgcggatgctggatttgaatattaaagccctgaccacgctttcccttctgtataccaaggattatgccgatcgggaggcgacgttgatcaacgtggcttccgttggcggttattcggtgtttgatattgccgttacctattgcgcgaccaagttctttgtcgcggcatttaccgagggactggctcagaatctacaggatcagggcaagaagatgcgcgccaaagtgattgcgccgggcccaacgcagagtgaatttgtcgcccagtcttctgacaacagcggcatcaatggcgatggcttgtttgccgaagattcatttattaccgcggaaaagcttgctgattacgcctggcagctgtttgaaagcgacagcacggtgggtatcgttaatgccaatcgtcgcttgatgcttaaaccgcctgtctatccttatatcaatgtcccgcattga

SEQ ID NO: 430931 - DNA, 909 bp, Serratia marcescens
atgatgaagtccattcgctttaccaatgccgaaatcacaatggcggggagtttgttcctccctgagaactttaacgaagcggaacgctaccccgccttggtcgtcgtccacccaagcggcggcgttaaagaacaaaccggaggcctctatgcacaaaagctggcccgtcatggctttattaccttggcctatgatgctgcgtatcaaggtgaaagcagcggagagccacgccagctcgaaaacccttaccaacgggcagaggatattagcgcggcgattgactatttggtcgcgcagcattgcgttgatgagcggcgaatcggcgttttgggtatctgtgccggtggcggttacgcgattcatgccgccatcatggatcgtcgagttaaagcgcttggcaccgtcagcgctgttaattatggagagatgtaccgccttggctgggaaggcgatcaacagccttcatcgtctcttgaactccttgaaatggctgccgaacaacgtactgccgaagcaaaaggcgccgccaccggctatctgccaacgacgccgaattccatagaagaggcgccaaataaggattttgccgaagcttacgagtattaccgcacgccacgggcgatccaccgcaacgcccccagcaaattgacgacccgcagtctggcgcagcttgttacctacgatgcattcaatcacgccgacgtttttttgactcagccgatgcttgtgattgcaggcgctgaagcgggaacgcgctggatgacggaagaaatttatcaacgcgctgcgagtcagaataaaacaatgcatatcgttaatggcgccacccatatcgccatgtatgaccagcctgactacgtgacagaggcgataagcaagctcgcccctttcttgaccgaaaacctgtaa

SEQ ID NO: 430932 - DNA, 897 bp, Serratia marcescens
atgaaagagaacctcaacgatctcatcaccttcctgacggttgttcaggaggggagctttacgcgggctgccgtgaaatcagggacatctcagtcggcggtgagtcagaccatcagtaacctcgaggctcgtctgcagctgaaattgctgaatcgcacgactcgcagcctgacgctaacggatgctggagagcgcctgagacagctcattgggccggccatcgaagagatcgccgaggggcttggccagctcgccgaactacgggataaacctgtagggcgaattcgcatttccgctgatgaatatgccattcagcacgtgctgtggccaaagttagcgccggtgctgagaaatttccccgatatcaatctcgaactcatcacggattacggcctggttgatattgccaaagagcgcttcgatgccggcgtgcggcgaggcggtctgatcgcccaggatatgatcgccattccgattagcggggaacaccgcatggttgtggtggtatcgcctcattgcccgtctggcttcaacttgcctgaatcaccggcagaattgctttctcggccgtgtatcaatttgcagttgcccacgcacggccaaaatttaccctggacgtttttgatggacgggcaggagcaaaaattacgggtgaaggggcaaatgatcgttaacggcattaatcaggttcatcaggcctgccttgatggttacgggtttgcttatgtcccgcaggccttagtacagcatgatatcgctgccggccggttgctcaccgttctggacgacttcactattacctatccgcgatactatttgtattacaccagtcgactgaagtcttcggctgcatttaatgtcatcattgaagcacttagagataacgctgaacgttaa

SEQ ID NO: 430933 - DNA, 150 bp, Serratia marcescens
atgctgaccgacacattcaccggtaatgatggagattgctttccattccgcattgccgatatccatcgcagcgtttttacccgtcaatgtgactcgtgtaccggcgatgagccgacaaataagggcatcgggcgcttcaatactaactga

SEQ ID NO: 430934 - DNA, 453 bp, Serratia marcescens
atggatacggttgaagaattaggtggaacatatttttttgatgggatgataaatctcgacaaaatcgagctactttactggatcttcattgatgaggctgataagcagctcgggggcgtcaaagatattcttgccctagcagccatgatcggcggattacccatcattccggtaaagggtaaaatcgatgcagtaaaagccacatcgggcaccagcccaatttctaaagcatcgcgagcactcatcaaacatcggttcaaagaaaggaaaaaaacgctcacttggaacaacatgatccggggtaaatggacatacacaaagagcctcggggcatttgttgggcgttggatcccagtccttggcgttacaatcttggcctatgacatcaccatgatcacgacaaatgccatcaggcgctataacctaatagtaaaaccagaggataaaatctga

SEQ ID NO: 430935 - DNA, 312 bp, Serratia marcescens
atgggtgtagagcagcaggttaatgaattaattgaaaagcatttttgggaaatgccaggaaccgcgtcgttaagcacaggtgaccaacctgtcgatcccgaggatgcaatggatttcttccaggaatactttgataagctccatgtagaaccgaacggtttcgaatttagaaagtatttccccagtgctggaataccatttttgcctaatgccatcctgcctaaatatttaaaaaccgatcatcataagccccttcccctgaccattgatatgttaactgaatcagccaaagcaggccgatggttgtactaa

SEQ ID NO: 430936 - DNA, 1983 bp, Serratia marcescens
atggaacagaagttttttcggatcccatttgccagtaatggcgataagcagcagataccggatgacaaaaacccagaggggtttgtaagtttcatcgagggttggggggaagattatcaaaaagatctccttactgacgcgcatgctaaacctgtagaacgcaaggcaatgaacagcattttaaatgctatcacactggcgttgcgtcaatatcagactgatggctttcctgagtgggttaccgcagcaaataatggcggcactgcatatccctatgctaccggggttgttgtgcgccaccgtcagagcggcggggcatttatatcttatgtttcattggcggataacaacacgactgaaccgggcacaaaagatgctaaatggcaggcatttatttatcgccgtgccacgcaagatgaagcagatgcgggtaaagatggttcattgattattacgcccccaacgcttcaacagtcgatcaaaaatgctcttggcgacataactactgaactggcgccattcctgctgccggttggcatcattgctgcgtggggtagctctgtgccccctgatggatggattgaggcaaacggtcaggcttttgacgtagtgaagaaccctaagcttcatgcagtatacccctctggacaagtccctgacttacgcggtcgattcattcgtggatgggcgcacggttcgggtgaagacccagatccgggccgtggggttacgagctatcaagatcagagcgaccttacgcactatcaccatgttggccgattcggcaacaactgggggccagattcggacgatggctattttccgcagcgtaaagaggaaaatgcgtgggagggagaatcataccggggccgtgcgatttgtggggataagcagtcgattttagaagcacaaatccctcaagggctgactggtccagcatcgcgaactttctcaacgagtaatcagcgataccttgcaaccggggaagtatcgacgcagcccgacgtccatccgaaaaatatagcgctgatgtatatcgtcaagaccgatcaggctgacaacatcgcgccggaaccgacaccgacaaacattgttgttacgccatcgacgcttagtattggcgttggggagactcaaaaatttacggcgcaggtgttcccgatagatatcgctgaaaaattcccagtatcgtggcttagtacaaacaccgccgtggccactatcgacagcaacggacttctaaaagctgttgggccagggaataccgacataattgctagtgttagctcgggacttagcgtgcgcgtatccgttcaagttaacatcctgctgacgaatatcacgatgggagctatccctgatatggtcgccggggatacctatcggcttgtgatcgcaaaaacaccatcgaatgccaccgagccgttgatctattcatctaccgacgccgcggtggcgagcgcaagcggggatggtcagttgacagctgccggggaaggcactgctacgataaccgtcgaaggcgctttgtcaggtaaaagtgcaagacgagttgttaaagttacggcagctccagtggtttcggagtttttggctatcaaaaacaacctgtcagaaattgctgacgcagggacaaaggcgcaggaggaatcgcagaaaaacttgggattggggaaactggcggccaaagatgcgatcactgcgaaggatgccggtgcggtgcctgttgctgataaaaccctaccagcaggcacaaatttaaacgctataaccgaaccaggcgaatacttccagaacgtgaccagcaacgccacgctggccctaaactacccagaggctgtggctggcgcactaaaggtgtttcgaactggggttgacgttggtgcgtgccgccaggtgtatatgccgtacaactcgacggttgaacaccgccgctatgcattcggcgatccgctggtgttctctgcatggaaggcgtattga

SEQ ID NO: 430937 - DNA, 1632 bp, Serratia marcescens
atgacgaaaatcaaactgtcgtcaggcagcactacgcctatttcacgagctgcacagccgttggacgagataaaatcattaaacgataataaatcatccagtgttgaaattagcgcattgccagatgcaacagatttacatggtgaaaacctaattccagttgttcaaacgataaacggggtgaaggacaccagaaaggcaaggcttgacgagcttgttaaatttatgccgatggggctacctccattaaacgcgcagttgaatggtgggagaaaaaccacagaggaaatgaagcaagaatacgctaaattcttggatgatagttatgtcgaaccagtatcatattattactccgtagtgagtagcgatgattctgtttcatactcacagctgacagcgtatccaactgatggtgggttttatgtattcgcaaatggggttggcattaatgggaatgataatgttgttttgaagatcgttttcaaaggcgataaaaacgggttcccaatttttgttcaggacttggaacttagccatggggatggcggtgggattgttgacctgcctaatacgacagatttgaattcggtggttgagcctggtaattattttgttaacggcacagataaatggtcaagtttgggttacccattcagcgttgccgttggtaacaaggttgttatgagcgtttccactgtgcggagcggaaagtttgataccgtatgtcaaacattctttgcgacaaatttaagctttaaaccaggtccacatgcccgaattctaacggatgctgggtggagtatttgggacggaatagcgaactttagctatttagatgttaactttttaaaaacgccagtactggaacaacttgatttaaaaatcagtgaagctatcggcgataggccaacaatatatagctataagaaaccaacgaatgatggaacaggcccaaatgttgaatttacaccatcagccaatcccggagtggtaatctctttaccgtggggtttcaaaagtcaaaaccaaggaacgtttggaggattggtttttgctggtgattcaatcggtaatttctacgtcaatgttgatttgcaaaagccagatgctcctgcctcctggaagcgttttgcatttgatggcgaagccactgttaaattagacccaaacaaaaataacctgctgtcaaatagcagtgacggattgttacttgataggtataaagcaccaaacgtgggaataacgggcacatatgtcagtacaaatcatggtcctgattttaccggagataacgcctttagcacaactggtggggtttggagggttaaaaatacactcatgcttagccgtgttcctgctaaatatagtggggcagtaattgtagatatctccctgggtaaaataccgtgtgatagctcgggaataccgatgcaatatacattgagcacgacaacaacaagcaagcaggttagcggtgtttggcgtcaacattctgtaatgatattggctattgttggtagtcctgaaaaattgatggatgtcgcttcaggggcattagaagattacaaagacggtattgcatggaacgtcagtgttaaatatacattcggcgaaatggcaccaagcatttga

SEQ ID NO: 430938 - DNA, 855 bp, Serratia marcescens
atgtttgatcataaggcgaaacaattatcgcgtgtctattggcagtataaaaattctcccaaattaattcagtggttattgatcttgcctgacatcgctcaatcaaaaattgaagcgcagttgaaaaaaatccacaacatgctgaatatcgatacggctgagggggagcagctcaacatttgtggccgcattgccggatttcgtaaacgaccggttggcaggttttatccgtcatgtgaagtagcagaagtcgatgatgtgctattccgcaagatgattaaggccaagatttgcaaaaataacggcattgcgacactggatgatgtgaaagccgccgcagactacattttagagatcgatgccactgtgcttgatggtcaggacatgacaatgcggcttgtgtggcaggatgatagtgttagcgtcgctgtgcagcagctggtggctgattatgacctgataccaaggccacagggtgttgggatgcggaaacaccgtatcgttaaatacaggccgtttggattcgggccatacaatgctaatttcaatcgcgctccattctggtatggggatggaattccgccgatgaattattatggtggaatttctctcagatggagtggtgtgactctttcaggccaggtttcagttaatgacctacctgtagacgatctggatgtaacgttatccattacagatacctctggtgcggttatacagcgatatgctgtaaccgacggaatggggaattttgtagtcgaagatatacgcaacccatcgaagattgtcgctaaaacaattctcgtgacaccgctttgccaaacaattgagctggtcggtacactcataatttaa

SEQ ID NO: 430939 - DNA, 1206 bp, Serratia marcescens
atggctgaaataacaaaagatggcgccacgggaacgacgctaagtgaatatctggacgttatgcgccagaagtatttggacatcgatgatggctgggatattgacccggaatctcccgacgggcttgctattgctgcatggtgtgaaacattggcaaatctggatgagggggttattggcgcctatcatgcagcggatccgaatgctgccattgggcgtgcactcgaaaatattgccgagtttgcaggcataaaacgacgagcagcatcgttttcaaccactgttgcgcagtttggcggggatggtttgatcgaagtgccggccggcacgctcatacggcatcgaattaacgatacgttatgggcaacggataacgccgtaatcacgagctctgctggcgtggtctctgttggtgtgacctgtacccttccgggggcacaaggggctaacataggcactttaacccgcattgctactccgatctctggcatcagaaccgtcaccaatcacgatgtcgcgtctttggggctggatgaggaaaaagataacgcttttcgcgttcggcggactgagtctgtcgcattgcccggcaataaccaggtcgacaatatttatgcggcattggtgaatgtggcaggcgtaaagcaggtaaaaattttcgagaatgtggaatcagagccggacgaacatggaatttacggccactccatggcgttatttattgatggtggtttacccgaaaacatagccagtaccatcgcaacccacaaaaaccccggatgcgggcttaaccggtataatacgatccccaataaggtgacgttgaacaccttaaccccgaagggacagccgtttaccgcaacgtttttccggcctgattacatttcaatctttgttcgagtggagatatctaccggcacactgacagaggacgacaagccgaaaattaaggcggctatcgtggattacaccctacaggggttcgatgaaacggcgggctttgcaaagcgaggttttcgaatcggtgaacgcctggcagccggccggctttacaccccagttaactattttgttgccggacatgattatgtcgcagatatcacaattggtactgaggctgggaaagtggacaaaagtgttattgcggtggcgtttaatcagcttggggttttcgatgtgggcaacatcgaggtgatctatgtttga

SEQ ID NO: 430940 - DNA, 603 bp, Serratia marcescens
atgatcgaatcaaatccactatatagcgccatgatggcgatgaagccgtttctcatgcgcgacatgatgatcggcatgccggggcaggttcttagctatgacccagacactcaacgcgcagtaattgaatgtggtgtgcaacgccacacaggtagcggcaattatcgaacaatagacccaatcgaaggggtgcctgttcaattttccggaacggcagaatggttgttgtttcacgagatgccaaaggggaccgaaggtttcattcacttcagtcagcgtgccgtagatcactggttgaactccggcggcccggcagagccttttagtgcgcggatgttcaacgccagcgacgcattttttgcccccggctaccgttcaatgaaaacggttatccccggactacctaccaacggcataggaatgagcaacgccagcggggatgtgcggcttcatctcgaagatggtggtatagagctgaaggtcgggggagaaaggctgtcgttgtcttctgtagggctacgacacaacggagtgaatattggtgccactcacacacatggtggcgtagaaaccgggggcggaaataccgacgttcctgaataa

SEQ ID NO: 430941 - DNA, 900 bp, Serratia marcescens
atgagtaaatattttgaccgtgactatgagcttactgttaccgcaataaatggtgaggtattaacataccggccgccgatggaaatacgcttcgcaattgacaactccccgcaaaatgctaatgcaactgcaaggatctccatatatggaatttcagcatctgcgcgtgatttaattcaacgctatgacgagcaacaaaaacgctatggcaatgtgattttgaaagctggatacaaagggaacgtagggacgatatttagcggcaggataaataatatcgaggtaatgaaggacggcgtaaatacttgcctgaggctttactgttggaccgttgggcttgagtggaatcagtcgatattcaaaacatggggtgcgaatactccagctattgatgttttaagggatactgctgcggcatttggcgcaggagtggaagtgattggcgatttttctgatctgccgagaaatccacggccatacccatccggcggccggctgtgccgagatattttaaacgaaatgatgcagccatggcgttaccgttggcgattaaccccatcgcgcaccgtactcgtcagagatggtgcatctcgcgattgggctacacacgacatcacctacaaaaacggcatggaaggggtgccgcgctggtacctcagtacgatggaactggatgtgaaattgaatcaccagatacagcctgatgacgtgatcaatgtgacatcaagtttctggaccataaattttagcggtatgtatcagacagacctacaagggctttctgagatacaacgcaaacagcgcacagggcgttttaacgtgctcagcacctatcatgagggggctttctggggagatacctggaaaaccacgctgatcagcttgtggcgctcatcatga

SEQ ID NO: 430942 - DNA, 699 bp, Serratia marcescens
atggctattactgggctttttacacgaaatcggccaaaaataggaaatctatattttgatgccacgttgcgagaaaccactgagctgcgaaccgaagttagcgaatttccattggagactgcggaagcagcacatgataacgcagttacccgacctctggcgctaaccatgacgatcggtgtgtctgataactggtttcgtgagttgatggctcaacagcaggacagtttggcgggcatgctgggggttggtgcaaatatcacaaccggtatggcggcctctatgctgggcggccggggttctgcattggctgggattggtgccagtgtggccaccagcttttattctggtggcttatccacatcttcacgctctcaaaatttgctcgaacaactcagggagttgcaacgatcacacacaccatttgaactggtggccagcaggggggcaacttataaaaattgcctgatcacaaatacccggactgaaaacagcaaagaaactgagggcggaatggagatcgttgttgatttattgcaactgacgattattcacgacactgtggcggaaactaatgcgaatcttccatacggtgatactgctgctactcaggggcagcgggaattctcatatggcgaggtattagtgcaggaggtaaatagtgaatctttcccactcccggcctatccaaaattataa

SEQ ID NO: 430943 - DNA, 1575 bp, Serratia marcescens
atggcagagacaattgattccctgttggtttcactcggccttgaaactgatgcgaaaagcttccaaaaagcgaacaatgcaataaagggggttaaggacggcgttcttcaattggcagcggctgctggtgtaggattcggatttaaagcactgacagctgatctcgctaaatcaacattagagatggatcgactcagtagaatcactggttttaccttaaagcagattgatggtctaaggtatgctatgcggagagtaggactaaatcctgagtctgctaatgttctagcacaaaagatacctgcgtggaagcaggcggcagcgcagggagaactcggcaataaggcatattggaatgggaactttaacccgacagaaatgatcgggaagtccaatcaggaagcactcgaatacattgctgaaagttatgaaaaaatgaataacgatcagcgtagaacgctcagaacggggttgggactgggtgataatgacgatatcacccgattattcgagggagggctgaaaggacttagggctgcagcgactgagtttgataaattataccagccattggatccttcacttatcgattcagcaaataaattcaacaatgaaatggctacattagcaactaactttgataatttgcaaaggcaaataggtggcccattactaaaaaatataaatgagctgattggaaagataaatgaatttgctggggagaataaggaaggtatttcgacagtcgttgatagtgtaatgactggtagctggtatgatgatcttatggatgatgcagaaagaaaaggaattgaattcaggaataaccttcgtaaaaatgatgcgattatgcgctcgttacttggcccgacagaaacgttcaagcctaaaaggggggggccggaacaacatgcacaaagttcaaataaaaataattcatttaattctttaatcgataatccaaatgcaaggcgatatttagatgtaattgcaaaatccgaagggacggcgggttatatgaataatggatataacacgatgtttggcggggatcaattcgcagaaatgagcgatcaccctaggattttaaaagaattcactcaaacggatggaaagaaaaataaaacatctgcggcagggcgttatcaatttacgcaatcatcatgggatgaagctgccgctgcgcttggtctaacggacttctctccaagaagccaagatatggctgcattatatttgatccagcgtgctggccagttagataacgtggtgaatggcaattttgaaggtgccacagctggacttggtggggtatgggcatctttaccttcgtcaacatatgcccagccaaaacatagttatgatgcgatgcaaggattttacgatatgcagaatacaccgccggccatagctggtcgtagtggtggttctgggccggtaaccgtgcatcaggaaaataacgtcacaattcacgccccaggggctgacgctagcgagatcgataatcgattggccagtgcatttaccgattactccaggcaggctcgtgacatgatggatacggagcattactga

SEQ ID NO: 430944 - DNA, 399 bp, Serratia marcescens
atggggcgcaatatttcggtagaaattaacgatgtaatttacagcggtgccactgcgccggcgaaagatcaggttgagatgttgcagcttgcttcgcgatgcggcctgctaccggcgatttcagacactgtgacaaacatggggttggcggccagcttgtcggcggtggacgctgccagctttaatcggctgaaagtgctgtgcctgacgaacggtaagatcgttcgagaggtagacaatatcccggtcgctgaaaatttgttccaggatgaaatccattatttcatggtgctggtagggagggtgttaaaggagaatattggccctttctggcgactcagcaacgacgaaaagggggaaggaggcgacaacaagatagcggcggaagttcaagggtaa

SEQ ID NO: 430945 - DNA, 405 bp, Serratia marcescens
atgacgatgcacagatatggtgcggatggcgccaatttgacagttttcggcatcccgttggatgagtttggcgacacagatcctccgatcacgattgaagacctggagccgcgtgccgcgctgaaacgcggtatcggtggcacatccgttcgactcgacaacaaaacgcgcgccaagcgccttacagtcaatctgttgccgggatcggtacaggtgcgccagctgctcgctgccgaaaagtcaggcattgatgcgacgttcacattttcccagagcgggacggatgaatattgggccggttttgacggcgtaatggtgaaccgtgggcaggctaccagagcgggtaaaagcagcgtgtccgatgagcagtttgtctttgaatttgcagatggtgaggaaacctga

SEQ ID NO: 430946 - DNA, 1251 bp, Serratia marcescens
atggcctatccagttgacgaaattatcccgatcaatttgatcctcacatcggcgggcctcggctacgccaacttttccagcgcctttatttttgctgacgcggatgatcttgctggcagtgttccgcctggcacgcttctcacagaggaaaaaaagccgttaaaaacggaggacgacagatttcttgttaaagaaaatgcggatcctttggtgagaaatgctgattttgagccagacacctatcgcgattatgccgacatcgacgagctgcgcatcgatttcaacgtcgacagtgacgtttacatcatcgcgaagcgctatttcgctcaaattccgaagccgccgcaggtttcggtctggatgaaaaatccgaaggacgaatcgcttgaagtgacggcatcgaaagcgaacgaagccgcttggcggtatcactacttctttaaaaataaagatctgaccgacgttgcggtgctcacagctatgagcgactggagtgatgcggcagaacacccaatttggttcacgtcaggggatgacaaggcgcttgatccacaagctgatgatgcattggcgatgttggccaaaaagggtaatcgccacatgttcggcggttacaaggcaaaatcgtcaactgacccatcacaggcgtatgccatggttcagctggccgcagccttccataaattccgcccggtaggaaccaacacatcgatcactggtgaatatcaggtgttgccaggcatcaccggcgacgatttgaaaaccacgggttatacggcgttgaaagccaaaaaggccgttttcttcacgcaaattgaactcgccggccaggtagataacagccgcgtaatcaacagcagatcgatgtcgtcttacgatgaatttatcgatgatgtggttaacctcgatgtactgaaaaatcatctgcaggtagacggttataactacattgcgaatgtcggcacgaaacgtgggctgacgccacgcgagtttggcggcctgttggatgctctgggtaaaacgtgcaaacgtttttacgacaacggcgtattgggcacaggttcatacaccgacagggatgatgggttagaaaaggtggcccggttcggcttcattatccgttcaaagcctgaggacgttttaaaactcacctcagcgcagcgcaaaaagcgtgtttacccaccagccgatattctggtgatcttgtcccgcgccggccatgtcgccgaaatcaacattaccgtggagtaa

SEQ ID NO: 430947 - DNA, 537 bp, Serratia marcescens
atgcgcgaaattgacgatatgagggtacagattcaggcgctggtggcgatggcagcggggatgagcactgatgccgtgattctcgccgatcaggggcgctctgctgatgcgttcggcctgtccctgtacgcaacctataacctgataccgatacgggcgtatggccaggtgcgaatccaacgcgaggtggtagcgccgattgaagaagtggatccgtcactgggcgatgattggacagatttcaatgaaaccgcatgctcagcgcttgaattaatgatctcggttaatttctttaatgctggggcggcgcaggcagcgatgatgttgcaaaatgccaatttccgcttacccgtcagccaatacctcttccaaaacaaaatagcctggcgctatgccagcacccccagaaatctcagtgcgctgtaccaagccgggatccagcagcgctaccaatccgatattcagctttttgtagagcactcggtttcgtacagcgtgttgcgagccgcgggcatcgaaattatcacccacgaataa

SEQ ID NO: 430948 - DNA, 420 bp, Serratia marcescens
atgtttggtaatgggctggacatgcgcggccacgttgattcgacatttaattcgaaaatagccgggggtgttcggatcattcgccctactgctggcgggttcaatggtccgggcggtgtatgggaggacggtgatgcgagcaaaatcgaattgttgcgcgttaacgtccagccggcacgctggaaagacatgcagtttctgatcggtcagggcggcactgcaaatccccaggatgcgcgtgtagtgcatatcaatgacggggtgaactacctctacccggacgatgcagggaaattttccgacatgctggagttttccgacggattagctgtgcggctttggcgggtaatgagctgcgacaaccggccttggcgcaatttctgccgtgcgatcgttgaacgttatcgaggggctggctga

SEQ ID NO: 430949 - DNA, 468 bp, Serratia marcescens
atgagactgcgaactgaggtgcgcggcgggaataaaatcgcgcagaagttgcggcaaatacaggcccgcgtgatggcgaaacgccgggtgctggtggggatacctgccggggccggggtgtatgaagatggtgcgccgatcgctgttattggtgcagtgcaagaatttggctcagctgacggccgggtgccggaacgctcatttttgcgtgtcccgcttcgacaaaatcaggacaacattaaaaaagcgttttccgcgctggcagggcaagtgacacgcggggaaatatctgcattccaaatgctggatcaggttggggcgcgcgctgccggctattgtcaggaagccattgaagccggtatagcacccgccaacgccccatcgacgattaagcagaaaggcagctcaacgccgcttatcaaccaaggcattttgaagggcgccatcactcacgtcgtggaggactga

SEQ ID NO: 430950 - DNA, 423 bp, Serratia marcescens
atggaaatcagtgcacagattatcgcggattttaggacgtactaccccgaattcaaagacaccacgaagtggcctgataacgaggttaaattggcgctggaagaaggtgactcggaaaccggcaagcgctggttagggtactacgaccgccccgcatcgataaaaaagcgcggcatgttcgcgtttgcagctcaccgcctgatcatgaggcagagggcgcagggtgacgatggggaaaatggtgatgtcggggcagcatacgccatttccggtaaatcagtcggtgacgagtccacatcatacgccgtgccgtccaccagcatgcaggatcaggaagttaatggtgatcttccgctgaccgtgtacggggttgaattcttgcgcctgcgtcgtcgtgcagggacgggagccttgatggtatga

SEQ ID NO: 430951 - DNA, 342 bp, Serratia marcescens
atggccgagctgatgaactggaccaacgcgccgattgtggtgactgacgagcatggtaagcgtcacacgatcccatcgatgggagaggcgaccattgacggtgatttttcaaaccatccctatgtgaaatctggggatctgtctctcgatggcgctgtcgtggcgccaaccgctgaattcgcaccgaaaggtgatgaattgcagcagctgagaacacgctatcagtcgattttcggcaagccagctccgtcggcggcaaaagcggaaacgttgcgtaaacgcattaaggcttggcaagacgagcaagatgacgacaacgacgacaacaaggacgaggattaa

SEQ ID NO: 430952 - DNA, 939 bp, Serratia marcescens
atgccaagaactacgttcgacatgtcgcctaccgccgcactatcttttttggtgcagcaggccgcatacattgaggccgaggtataccgcctcgaatatccgcaattcaactacagtggtctggtgccactggacgacagcgcgccagactggaccaaacaggttgttttccgctcggtagatgcacgcggtgaactgaaattgtttggcccgaactctaccgacgtgccaaccgttgatatcgccatgagccagggtttccacgaaatcaaaaccgcagcgttgggttatacctactcgctggaggaaattggttttgcggcgctcaatggcgtcaatctggacgtggaaaaaggccaggcagtgcgtgacatcgtagaacaggggctgaacaagatttatcttctgggtcatgacgatgttggcgaaggcctcttcaccagccaaaacgtctcgaaagaagccgcgccggcgacgctgaagcaattggtggcagagattccaacgaagggcactcaaccgatcatcgatctgttcggtgctgcctacaaccaggtctatctgagcaacaccaaaactgtgcaccgcccatccgactttgttctgccgccggagcagatgcagttgctgatgcgtaccatgctgaactcggcgaacgcctctaactacacgctgctgcagttcctgcgggaaaacttcaaagacatggagtttaccgacgacctgctgctgacaaaggcagatggcggccatgcacaagatcgcctgatgacctataagcgcgatatgcgcgtggtgaaaggccatgatgttatgccactgcaattcctggcaccggcaaccgccgataacatcaacttcaaagttcctgcgttgtgccgtaccggtggtaccgaatggcgcattccgaaagcggctcactatgtggagggtgtgtaa

SEQ ID NO: 430953 - DNA, 528 bp, Serratia marcescens
atggcgattgcacaaagcgaattcaatttgttccgtggccgcggttatgaggggcaggtatccactatcgaagtggcagatatcaaatcccgcatcgtgactggcgaattcatcccctatggccgcgcggtggttcgtgggcctgaaaaacgatcctgcgcgccggtatcggtaagcagcaaacctgaagacatcatcggttttaccgtccgttccatggctgaagccagcccaactccaccgagcgaaaacgccgaatatgccattggctacccggttgatcatgttgcatcggtaatgcatcgcgggcccatgtatgccctgtgtgttgatggcgctaagggcggcgatgcggtagtggtcatcaccaaggcgggggaaaacctcgggcggctcactgctggcggtgatggcgtgaaactcgattttgtgaagtgggtggatgacgtggcggccggtgagattggggaattccaggctgacggtatttttgctgcgcctgaagctggcggcggtgcgggcggttaa

SEQ ID NO: 430954 - DNA, 1185 bp, Serratia marcescens
atgcggatcacacttcatgatcggcagtcctttcctattaacacccaacgcattatcaccgaaaacggatatctgcgagtaccggggcgggttgcccgtaccggtgtacagcaatatctggcgtctgagcttgggttaacggacaggccgccaaatagcatcgttaacgtgtaccggccgccggaggaagtcttttcgccggccagtctcgccagctatgacaacaccgatgtaacggtcgagcatcctgacgatcttgtcgactccaccacttttaaacaggtttctgtcgggcatgccatatcacaggggcgtcctgatgaagacgacgatagctatgttgtcgttgattacctgattaaggatcaggaggccattgacagcattaatcggggtaaggctgagctttctgccggttacacctctgagtacgtccaccgccctggcatcgcgcctgatggcaccccgtatgagttcgtgcaaacgaacatcaccatcaaccacaccgcgctttgtgaccaggctcgcgctggccgcctcgcacgactgtttgacaaaaaaaccacggagaaaaaccccatgccaaaagtaactttggacaatggcgtcaaagttgaagttgccgatgaggcaacgcagacattgattcagaccacgctcgatagcatgaaaaagcgtgtgaaggatgcggaagaggccgcacaaaaggccgaggaagaaaaagaggctgcggaggccaaagcagacgccaaagacgaggaaatcgaggaactgaaggaaaaaacctcagaagacgcgatctccacccgcctggcggatgtcatttccgcgatggattctgctgtgaaaattgcaggtaaagaattcacgagcgattccgtcaatccattaaccatcaaacgccaggcgctcgatgcggcgggtatcaagtgcaaaaaatacgcttcgtgggataaggcgccagatgcgtatgtgaatgcctattttgacgcggaggaagaacgcaaagaaatcgaagacgaggaagaggaggaagaacgcaaggaagcgaaagactccgtgcgccgcctgggtggtgagttgggtaaaaaagtgaaagtcggcgatgccgaagcacaacgtatagccactcgtcaggcgttcctggataagcgttatggccgtaatcaagagggcaaaaaataa

SEQ ID NO: 430955 - DNA, 858 bp, Serratia marcescens
atggcgacggtaccaccaagccggcgacaaccgatccgggcggtggagcagaatagggatttggagagattctataacgggcaattacgcgcgttaattcgtttaatggccagttcggtagaatcctcgttaattcccgttttacgtcgaaattatactgccgacagctttctgacagacctgataaaaacagcacttaatcaggcgagggcatggttttattctcaatcgctcaattcacaatttcaccgattggcacaaactgttgtcagccgggctgagtcagaaagctcggccgcttttgttgagcaaattaatcgcgcagtagggatcgacatggaatccctgatgtcacgggaaagcctgggcgattattttgatgcctctgtcgaaagtaacgtcgcactgattcgatcactcacggatgattatttcgatgatattcagcgtgaagtgatggatggcattatgcgcggggatagcgttacaaccttaacgcgaaaccttcagcaggttaccggggcgacgtatcggcgggctgaactcatcgccgtcgatcagacagtgaaaatccgcagcgatattactggccgtcggcaacagtcggccgggatcactcgattccgatggtctacttcgcaggatagccgggtaagcggaaaccctgtcggaaaatatccaggtgcgaaaataaaatgcttcgttattgcacgcactgatgtcgggtacggccccggcgtttatctctggtctcgtggcgcccattttaatggcgaaacggggctattccccggacgcgcgcacattcgttgccgctgcaacgcaattccccaaattcaggggcttgattacaaatag

SEQ ID NO: 430956 - DNA, 1248 bp, Serratia marcescens
atggaatccgcgtatatagaaaactgggtggcgcgcgccatcgtggatttccctgtagaagatgccacgcgagaatggcgtgaattttcttctgacgatgccacgttattacgggaggccgaaacaaaatacggcattcaatctattacgcaggaggcgtttaaatggtctggtgtttatggcggtgctggtgtcctgatgattaccgatcaggacttggcaaaaccattgaacatccagaagataaaaaaaggctcgttgaaaaaattgagggttttggatcgcatgttgatcagcggccaaaactacaacgtgacgaatattttggctgataactacatgcggccgaatatttaccgggttaacggcggcctgcaagatattcaccacagtcattttattactgcgcctggcgcttcattgccgttgcgtctgcaactgcttaatggcgggtgggatgacagccaattaaggcgttgcctcgaagacatcaaggattctgtttcagcaaagggcggtatcgcctcattaatcctcgaagccaacgtcgacacgatcactcgccagaacttgagcaatgatttgtcatccggtgacatggatgaagctatcgccaagcgataccgtcttttcggcatgatgaaatcgctgttccggctggcgctgctcgactcgaatgaagagtttgatcgcaagccgataacgtttggtgggttgggggaaatcctgtcggtgttgatggagtggacatccggggcggctggcatccctatgacgcggctatttggcgtgcaggccaaggggctgggggattcaggccagggcgacatgaacaactacaacaacaagatccgagggctgcaaaaatccagttatcggccattcctcaacaagcttgatgccgtctggatccgctcagcgctcggtgcgatgcctgaggggtatgatttcgaattctcgccgcttgctcaaccgagtaatagcgaattgcacgatcaacgcctggctgatgcccagactgatgaaattcgcttgcagcagcgagtcgttcgcccttctcaggttgcacgtaaattaatggatcaggggctgtatgctatcgatgaaaaagacattacccgcatcgaaaaagacgagctggccgaacaggatggagactatcagttccggttgggacaaactgaaggccagaatggcgacggtaccaccaagccggcgacaaccgatccgggcggtggagcagaatag

SEQ ID NO: 430957 - DNA, 1641 bp, Serratia marcescens
atgcgaatactcgagtgggaggatctcgattttccggcgcgggtagctctgaaagcgaaatgtgaaaaaagcttcttaaattttacccgcctgcaatttgaattgcagagtggccagcgaatgatggtcaattggcatcatcggctgatggcctcgaaaatcgatgatttgataaaaggccggctgcaaccgcgtaacctgatcgtcaatattccaccaggtggcacgaagacagagtttttctcaattcaccttcctgcctacgtgaatatgctggttcagacagcgcagctacgtcgattccgcaacctgaatatttcgttcgccgacacgctggtaaaacgaaactcccggcgcacgcgcgacatcatcaatagccgcgaatatcaggaattttggccgtgtagatttggcgttaaccaggcggaagaatgggaaattgttgacgctaaggggcgatcgatcgggcaaaccgtatcgcgttcaagcggcggtcagatcaccggcggccgtggtggttacgctgggcctgatttttcaggcttcgtctgcttagacgattacaacaaacccgacgacatgttttctgcgtctcgccgggatgccgccaatcgccttctggtaaacaccattcgttcacggcgcggggacaagtcgcaacaccacccgacaccattcgtcagcattcagcagcgcctgcacatgaaagacgccaccggcttcatgcttgctggtggcatgggtgtggattttcatcacgttgaaattccggcattggtcagcgaagagtttatttcgtcgctggctgagccatggcgttccatgtgctggaaccaggtgaaaaataccgaaagcgtcgtggtaaatggcgttcggtattggtcatattggccgcaaaacgagtatatcggtgacctgctgaaattgtgggaaagcgacgaatacacgttttggagccaatacatgcagcgcccgcgtgcgttgacaggcaacctgatcgatacgggttggttccagcgttatgaaaccctgccaatcctgacgcatcgcgccgtctatgttgataccaactcggggaaggtcgaagactacaacgactatacggtgttttcgctggtgggtgttgaccgagaaaaaaacctgtatctcatcgatagcgtccgtggccgctgggatccagaggatttgctgaaaaaggccgttgagctgtgggataaatggcgcccgtttaacccgcgtcagcccgcccctcttcgcaatatggcgattgaggataagcaagccggccaggggctgattaccacgctgaaaaagcgtaagagcatccctattttggaaattcctcgtggggctggtcagaacaagttgatccgctgcctgaacgtcattccgcaaataaaaaccggcaaggttttcattccggcaattatgagggatgacggagagaaaatttcgtatgtgaaatatcacgacggccgaatcgcagcaacgacggactgggtattacctgcactggctgaatgtgcggatttctctgctgatgacagccacgcgaacgacgacatgctggatacatacatggatgcgatagacatcgagctgatttcctccctgggtatttccgaaaaagattgggtataa

SEQ ID NO: 430958 - DNA, 996 bp, Serratia marcescens
atgagtaaaccggattgggcggcaatcgcgcgagaataccgtgccggccagctgtcgatccgggcgctggctgaaaagtatggaataagtgacacagccattcgcaaaaaggcaaaagcggaggattggccaaagcctgagaaggttcgcaaagttggttcgcaaaccgggaatgcgaacccgcgaaccgtaccatcaaaaaaagcgccggcgaaaatggaaaaccaattgccggaggcatcgggacaggaaactgaatttcagttcgatccggcggattacgggctttctgagcagcaggcgttattcgttcattggttcctgctcacgaaaagccgcgtcgacgcatacaggaaagccgggtacaaatgccagggcaacaacatctacccggccgccagccaggtatatcggaatattaacgttcagcgggcaatccgggacggcctggagtgccagcaaaaacgctatggcgccgagctggacgaaatcgttcatcaactggtttctatcgcccgcgcggatccgaatgacctcgttcaatatcgccgggtaaattgccggtactgctggggcgaaaatcatctctaccagtggcgagatattgccgagttcgacaaggcggcagaaaaagcgaatgacgaagggaaacccgcgccggattatggcggcctcgggttcgtggaaaatctcgatccaaaccctgaatgcccgatctgcgggggagagggggaagggcatacattcatttctgatacgcgaaatcaccttggcagtgatgcccgctggctgtacgccggtataaagcaaactcagcacggaattcaggtaatgactgccgatcaagacgctgcgcggcgcaatctgattcagctgatcactgcacgaagttcaggtagccccaccaatgagcgtccgccggccaatagttacacccctgacgattatcgggctgcagctgcatcactggacgatgaatttgaggatctggattaa

SEQ ID NO: 430959 - DNA, 258 bp, Serratia marcescens
atggaaaagccgacgctcgacaaaatcgaggcattggcggggcgtggattgacggagcagcagatcgccgacgcattggggatcgacattgaaaaactgcgcggggataaaacagagatctcggcctaccgcctggcaattcgccgggggaaagcaaaggggattgctgatttatcgaatgcgcttttcaacaaggccaagaagggcgacacgcgagccatgattttcttgctggagcatctaaaaccgaaagcgtga

SEQ ID NO: 430960 - DNA, 615 bp, Serratia marcescens
atgacaactctcaccgttgattgggcgacgcacaaagcagcggcgcacgcctgcctaaactggcattacgccaaggcagtcccggtagggaaactggtcaaggtcggggcctgggaggatgggcgatttattggcgtggtgattttcagccgcggtgccaataaccacatcggccagccatacggtcttcagcaggatcaggtttgcgagttaacccgggtggcgttgcgggatcatgtgtcgccggtcagccagatattggcgaaggcgataaaattcctcgccactgtttgccctggattgcgcttgatcgtgtcctacgccgacaaagaccagaatcaccacggcgggatataccaggcgacaaactggatatacgaagggctgtttggtgtcggcacgctgggcgcattcattgtgaagggaaaaaaagtccacccacgcagcgttgcggcaaaaggcgtgaaacaaagcattgaagccgttcgccagcaactggatcccaacgcccaagaattcaagacatcagggaaacacaaatacctgatgcccctcgacaagaagatgaaaaaatcgctgctcccgcgccataaaccctatccgaaaaggacatag

SEQ ID NO: 430961 - DNA, 510 bp, Serratia marcescens
atgaccatagtaaaaaatcaggaaaaacttgagatcgtttataaatcgctcaacatgatgatcgtttacgcaaaaaacgcgcgaacgcactcgcctgagcaggtagaaaaaatcgttgcgagcatagaacggtatggctggaccaatccgatcctgctcgatgatgctggggaagtgatcgctggccacggcagaattttggcggcggaaaaaatcggttatgacccggtgccaacgatcaccctgtctggtttatcggatgcagagaaaaaagcctatcgcatcgctgacaacaaattgccgcttggtgcgggttgggatctggagctgttggcgacggagctgaacgacctgctggccgacgaattcgatctttcgctgacgggcttcgatagtgacgagatcgatcaaatgttgaatgtcgattttgcgcctggtagcgaagacgatcagggcaaattggacgagctggaagaaaagttgtgcccgcactgtgggggtgttctatga

SEQ ID NO: 430962 - DNA, 1020 bp, Serratia marcescens
atggcagggtttgatgtgaaggctgctgttgaactggatccgcatgcagcagccacatttcaagcaaatcatggcaacacaaagctattcgttcaggatattcgctttgtcaaggggcgagatatactcgatctggttcctaacgagcagttggatctcctttctgcttgcccgccatgtcaagggtttaccagtctcactgcgaagtacaagagagaagaccctcgtaatctgctgatcaatgagatgctgcgtttggttgaagaaaccaagccatctgcgattatgatggaaaatgtgcctggacttgcggtgcgagggaatcatctgctttcaccggtcattgaaaagctaaaagagttgggttacaccgtgaattttggtgtacttcaggttgctgattttggcgtaccgcagtttaggaagagatttgttttacttgcaggtaaaggattcaacattcctttgcctgagggaactcattcacgggaagggggggagaaaactaaatgggtcactgtaaaggagaccataggtggtatgtccagcccgctaaccctttctcaggcgaagaagcaaggtaagttccctttgtctagttggcatgtggtgagagacctttctgaaatgaatgtgaagcgcttaaaggccgctgtaccaggtatgtcttggcaatgtataccggaggaactccgcccagattgtcataagggagattacaaaggtttcggtaacgtatatggccgtatggcgtgggatgatgtgtcaccgaccattactggtggttgtactactctgagccgcggtcgttatggacaccccgaagaggttagaactatttcagttcgtgaagctgctaaacttcaaacgtttccagacgattatatttttgatacagcatacatggataaagtttgtgtaatcattggcaatgctcttccatgtaagtttgctgaatttttagccattcactgtaagaaatttatagctgatgcgagaacagatggtttgattccctag

SEQ ID NO: 430963 - DNA, 2112 bp, Serratia marcescens
atggctcggcaatatgaaatgcaaatatcaaggatgaccgtagataaactgggagtaaaactttatgacagggcttatgctgtcattgctgagttagtttcaaatagttacgatgcggatgctacagaagtagtaattaaagcccctatgggacagtacctcgcagtaaaacaagatggtgttgttacttctaaaagtgtaactatagaagtgtatgacaatggtgttggaatggcacctgacgagctgcaaagtttttatttggttgttgggaaagaaaggcgaagagacccaaaacgaggcgaaacatcaaagatatttcatcgaaaagttatggggagaaagggggtcggtaaacttgctccatttggtgtttgcaaacgagtggaaattattagtgcaggtggtgaagtcgtttgtcgaggagataagaaagggtatgaaattgctcatattctcttagataaagaaaaaataatggatgatacggcaacatcatataaacctgaaactgggaacttggacggtacactaagtgacaaaacctatactagaataattctaagtgactttgaatataggaaaattagtgagataaaagagttatctaggcagctttctcaacgatttggggttaaaagtaaaaattggaatgtgaaactagtcgatacatctaagacgagttctaatcctgattatgaggttcatgttggggaatttagtgttcctgtaatgccaaattcgaagattgagtttcgttcattatcaggaagcatagctactgattcatgcaaaaatttgaatgattatacagcagtaaaccccgatggtacacgttcaacaattgttaaacccggatttgaacatgaaggtaaagcttatccaattcagggatggattgcttatgcaaaagaaccttataaagatgaactcatggcaggcgtaaggatatattgccgaggaaaatttgctgcgcaaacaactgtttttaatagaaaggctggctttactggagagcattctattcgttcgtatttagtaggtgaacttcatgctgattggttagatgagaaggaagatcttattcaaactgataggcgtgatattctttggtctgatgatttaggatctcaattccaaacgtgggggcaggaagttatattgcacgtagggaaaataacaagagaccctttgcgtacaaatatgatgaatcagtttttcgaattggcaagtgtagaggataaagtagagaacgcatatcctgggaaaagtcagaaggatatgcgttttcaagctaagaaaattgctaagcttttggggcgttcattgagaggtgatgaattacatgactctgaagcattggagaatttagttcagttaagtattatgctggcgccattgcaatcattagatgaaaagttaatcgaggcttctagtaaagctgatacgccattaaatgtgcttaatgatatcttggcaacagcacaattggctgaaactgtaagttttggtcaaaaggttaaaaaaaggcttcagattattaagcgattggagtctttaaaagatgcgactgatactgcagaggatgaattgcaagatctcattgcatcagccccatggctcgttaatcctcaatgggttcctgtaacggcgaacaaagcattaaccactttgaaaagggagttccaaaaattttataagaaaaaaacaggtgatgaaattttcttgatagacttcagtgataagacgaagaggcctgacttcgtactctttagccaggatggtaaattacagataatagagattaaaaaacctcatcatcgtattacgaatgatgaaatggatagaattattaactacttcgatacattcgaagagttccttaacgatgaaaggcacagtgatttcaaatctatcgctgcagacttccatgtaactcttgtgagtgatggcgagcgcttgagtggtgcacgtcgtaaagcttatactgcttacattgaggagaagaggctaactcctgttgattgggcaggattcttgttaagaacaactcaaactcatcaagaattccttgatgaagcggaacagttaaaagcgggtagtaatgagtga

SEQ ID NO: 430964 - DNA, 387 bp, Serratia marcescens
atgagtggttggctgcaaaaactgacgcagggcagtttagtgctcttgctgctggtggctattagcctgggtggctacagctcattgctatcacatcgattggatctggcacggaggctgtcggcggagcagcagaagacgctggcgcagcaggcggggttgatcacctcattgcgcacggatgacgcccgcaatcgcgcattgatggcagaacaacaacggagagagcaacaactgcgccagcagggcgaaatctatcaaaggaaatacctcgatgctatcaaaaatgacgaatgtgcccgccatgctgctcctgccgctgttcttgatctcttgctcggaaaggataccgccaccaccggagcctatcgttctgttgccccctga

SEQ ID NO: 430965 - DNA, 258 bp, Serratia marcescens
atggagcgccaacgtgaaatgttacggaccagaaaaagccaaacgctgaaaagccgccacttgactgggcacgcggtggatgtggttgcatatttgggcgacaacatcagctgggaatggaagtattacgagcagatcgctgcggcgtttaagcaggccggcaaagagttgggcacggtgatcgagtggggcggtgactggaaaaccttgaaagacggcccgcatttccaactttcagtgaaggatttcccggcatga

SEQ ID NO: 430966 - DNA, 321 bp, Serratia marcescens
atgccgcataaaagccccgaatggtgggccgctttcacagactggatctcgtcagtcaaagagcaggggatcgccgcagttctcgccggtgtcatggcgtatttgcgcagtaaatacgaaggtgatggcggctggaaatcattatttgatgcgctaatttgctcgatttttggatggttcgttaaagacggcttgacagtaattggcgttggtacggattgggcatatctcgccagtgttttcgttggattcctcgggactaaatatttcagcaatcggataaaggaaatcgccgataagagaatgggaggcaaaaattga

SEQ ID NO: 430967 - DNA, 651 bp, Serratia marcescens
atgaggctcaaatacgctctgacgattgccgatccaaaatcagcccagattgttgcatatcaggcacgatcaacgggcaccagccatctgacaaaagtcgatgtgatgacagcgttggggatgactcaggcacgccaccgtggagggctttgccttctctatgcgaaatacacgaaagatgcagaagcaggcagaacagcgctgcgtgagctgacgaaatacgcacaaactcaggctcgaaagtatgtgggaaaaattcccggcaggcgcggcgcagtcgctgtaaggacattggctatgctggtgctggaggaatattgccgtactgcagacacgccaggcgctaagtgccggtgtggtggaagcggtgaagtgtgtgatcgaaaagcgactgaacgcagcgggaaattggtgatcatcgagtgcaaaaaatgccatgggactgggttgaagcctatcacgcaaacacgggcacaccacgccattttggcacttgtgcctggcgtatccagggcaacgtggtatcgggtatggtcacgttattacgaagcgctgttggcgtggtgttattcgcaagagtcgatcgctgaagcagaatatcagcgcatcaccggcatgtcggaattaaacaaagaaacggttgcaaagtga

SEQ ID NO: 430968 - DNA, 288 bp, Serratia marcescens
atgagcaaactcacggaagaagcgcgcgggcgcgactgccagatcaggatccccggcatttgcaatttcaacccagaaaccactgttgcggcgcattaccggctacccggtacgtgcggcacagcaataaagccgaacgactcgcaggcagcatgggcatgtagtgcgtgccatgacgccatcgacggcaggaaaaagacggaatattcgcgtgacgagctgcgattgatgcatgcagaaggggtatttagaacgcaggaagcgttgagaagggagggcaagctatga

SEQ ID NO: 430969 - DNA, 597 bp, Serratia marcescens
atgacacagttatcatttattaaaaccagtcatgacacactgactccggccacgtccgaagttagggattttctgcataacaaagttaagatcggcgcagtactcacagccgattttaagcgtgtccgcaaccccagatttcaccgtaaatatttctccttgctcaaccttggctttgagtattggacgcctaccggcggcgcaatttcccctgaagaaaagagcctcattcgtggctacgtccgtcaccttgccgagttcgctgggcatggtgaaacgctgaacagcttggcaaaaggctacctgcgaaaagtcgctgcgcagcgtgcggatcgtgtgacgttgctaaaatcgttcgatgcatttcgccggtgggcgacgattgaggcgggatattacaccgaacaggtgatgcctaacggggtgatcgttagagaacccacgtcgatatcgtttgccagcatggacgacacggagtttgctgagctatacaagcagacgctcaatgtattgtggcaattcatcctgaacaaaacgttcacgtcgccggctgctgccgaaaatgccgcgtcgcagttgatggagtatgcatcatga

SEQ ID NO: 430970 - DNA, 216 bp, Serratia marcescens
atgaagaaagaatttacatacgttttaccagccgaactcccagctaatggatgcactatcgtgtatacaaagaaccgcgttgtgatcgccgtagaagtgatgcggccggggcagtttgtctgcacaatccccggttttatcgagttggcggaatcagtcggatacagggttacgcgacctaaaatcagtaagaacccgcgtgccaacgtgttataa

SEQ ID NO: 430971 - DNA, 2289 bp, Serratia marcescens
atgagtatgtggccgacagaagttcaacagagcgcatcgtcagtgataccggcgcatgctctgagcaatgatgaacagcaagaagttctcaccaaaataaatcagatgttcctcaaccgcgtcagcccgcaggaaatccagaaaacggcacacgcgtgggcacggcagaaacagatcgtcgatttccgccctgacgctgttgataacggtttggttgtggttgggttcgcaggcggtggcggcagttgcgaaggcatcaagcaggcactgggtttcgagccgcacatcgcgatgaatcacaatccggtcgccatggcgatgcatgcagttaaccacccgcgcacgctgcactacgcagaagacattttcagcgttgatccgaaaatctccaccggcggcctgccggtgctactgggctggttttcaccggactgtcgccatttctcgaaagcgaagggtggaacgccggtgaagaaagaaattcgcggtcttgcctgggtggttctgcgttgggcgctggcggtgcgtccacgctatctaatgctggaaaatgtcgaggaattccgctcatgggggccgctgaaagcagataagaagggcaatttgtaccctgacccagcttatacaggcgaaacattccgcgcgttcatcggcatgctgagcagcggcgtggcgcaagattgcccggcgttggctgaagcctgcgaattcttgcagatcgatgtcgatagcgacgacgctcgccgtttggttgctgggctgggctataacgtcgatcacaaagagctacgcgcgtgtgactatggcgccccaaccatccgcaagcgcctgtttgtcgtcagccgttgcgatggtgaggctgttgtatggccggatccttcacatggagcgccggacagtgctgaagtgctggcggggcagctgcagccgtaccgaactgccgccgagtgcattgactggtcaatcccgacacgcagcatcatggggcgcaaaaagccgttggccgataacacgctgcgtcgtatcgtgaaggggttgaaacgttacgtcatcgactgcccagacccgtacatcgtgcagatcgggcaaacgggtttcggaggcgacggccgacaatatgccaccgacgcaccactgactacggtcacaagcaaagcagaacatctgcttatcgaaccgttcgccgtgaagtgcaatcacacgtccaaccgaaccaaatacgactgtttccgggggcagtccggacgcttgccgttgcagacggtcacgcaaacccacggcttcgccgtggctgcgccagtggtggtgcgacagtttgggaaaagcactggccagcgtgctgacgtgccagcaggaacagtgatgcctggtggcggtggaaagatgcagttgggcagtgcggtgctggtgggcgcaggtggcccgacgtactccggcaaaccgcgtagcattgtcaggcctatggcaaccataccaacggtatcacatgccgcgctggcatcggcatcgttaatccagatgggctatggagagcggaaagggcaggcaccacgcattctgaatattcgtgcaccgttgggaaccgtcgttgctggcggcattaaacatgctgtcgtcgccgccaatctgattaagcactacggcggtaactacactggcgcaggcctcggtatgaatgaaccagcacacacggtgacgcaagtcgatcaccattcgctttgtacgtcgcatttggtgcaactgcgcggtacatgcaaagacggaaagccatcaaattcgcctgctccaaccctcacagctggtggaaatcacataggccatgtgcaggcattcataacgaaatactacggcacggctacggctgtagggtgtacagagccagcccacgcaatcacgaccaaagaccgcatggcgttggctgaggttcaatgcgaaccagagccgcttactgacgagcaacgatataacgcctggtgctgtgtgcgactgatggacgaattcagcgaagatccggacgatagccacctgttcccagcaccacgcccactgttcatccaggtcggtgagtacatggttgtcgatatctgcatgcgtatgcttgagccgcgcgaactgtataacgccaacggtttcccacgcagctatattatcgatcaggacatcgacggcacacgttggccgaaatcggaacaagttgcgcgttgtggaaatgctgtgccaccgccgttcgccgaagcgttggtgcgagccaatatgccagagctatgtgtttggcgattggctgcgtaa

SEQ ID NO: 430972 - DNA, 366 bp, Serratia marcescens
atgaaatttatctcagccggtgcaactcgctatgtgctgattgtttgtggctacgcgttgaaatttcctcgagctagcagctggcgcagcttcttagcgggcttgctgcacaacatgaatgagcgggcattcagtacgatgagtatcgatctgctctgtcctatcgtcgccagcgcgcctggcggcttcctcaatgtcatgccagtgtgccaagtattcgctgattgcgagtcgcttcgcatttggcgttcagcagcagagcagcatgaacaagcagatgttttactgggcatcgtcgaaatgaaaccggactcggtggggttgctgcatgggcgcctcgttgccgttgattacggcacttattaa

SEQ ID NO: 430973 - DNA, 594 bp, Serratia marcescens
gtgaaattatcagctgaaagacttcgtgaaatcgctatcgatggttttttagaacacggcgacgccaaattaatggcgcgcgaactcctggttaaccgggaggcgcagccagtacaggttaccgatgggatggcgcttgattttcaccacgcgctaactgatagcgacattggtaaagatgacctggaagaaataaaaatcgggctgagggctgcgctatgcaatgtcaacgccctgctaacaccgcgtgatgcgcagccggcggcctggagctatgagtgggcctcatgcatcacctgcgaaggcccgcagaattttaaacccgttattgagcgcgaggctccaccgcaatgggcaatcaacgaggggcaggctaggaatgtcactctgctctacgccgccccgccagcgccagccaatttacagccagtagcatgggagatgcgttactggaacagcggtcacggttgctggcatgactgggaacgaatcacagaagaaaaatatgccgaactgagcgttgccttcgcaacggatagcgatcacgagttccgcactttgtactctgcacaaatggaggtgatgcgtggataa

SEQ ID NO: 430974 - DNA, 426 bp, Serratia marcescens
atgtctttagaaattaacagattaatcaacgagcgccggatcgggcttgatgacggttgcgattatggcgcctcaattctcgacacgatgaatgctgcagcgcgagcaagaacgaaatcgtgttatcagctaccgcctaagccgctggccgtcagcaaaccgatgtgggaaacagggcccgtggtgaaaattggcaaccgcaatgtttatggccgcaaagttatcactggggtttatcagctgcatctttccgggcgcacaccggtgcaaatcgccagattattaaaaatgccggtattcagggttgaacacctgcttaaacgtggcaccagcgtccgccgggagatatttcgattggtttcaacacaaccgttgccgaccgaagaagaaatattgcgccgcatggctgctgagtcgaaagcatag

SEQ ID NO: 430975 - DNA, 399 bp, Serratia marcescens
atggaaacgagaaatatcagccgcgtagtcgcatgtgattactgcggaaagccggcgaagctggtacgcgggtttgtgatttatccgcaccggaaggatctggccgacggctattactggtcgtgtgacccatgcggggcgtatgtcggttgtcaccgtgacagcgacgctgtgccattggggcggttggcgaacatccagctgcgggcggcaaaacgactggcacatgcggcgtttgatccgctttggaaagaatttgggatgaaacggccggaggcttacgagtggttggctcaacagttggggatcccatgttccgaatgccacatcggaatgttcgatgttgatatgtgccgccgcgtgcagcggttggcaacggattttagaaaaaatctgtga

SEQ ID NO: 430976 - DNA, 936 bp, Serratia marcescens
atggcatccagttggataaaaatcgaggtaataaccccggataaacccgaggtattccagcttgccgaaatattggacatagaccctgatgcagcgttgggaaaacttgtgcgcctttggacttgggcggatcaacaaaccatagatggtaacgcaagaagtaacgctgcgagcgttacaaaaaatgcagtagatcggatcacgttcattcaaggatttgctgatgcgcttattcgtgtggggtggttggcggaggaaggagggacgctcatttttcctaacttcgaacgtcataacggaaattcctcaaagaaacgtgcacttacaaatgatcgtgtcgcaaaaatgcgtgatttgaaacgcagcagtaacgcgaatggtaacgctaatggcgttacaggtggagatcaaaatacgttaccagaggaagaggaagagaaagatataaaagatccccccttaccccccgaggggaaagggaacgcaaggaaattcgatcctttgaatgttgaacttcctgagtggttggatgctgagttgtgggctgaatgggttgaattcaggaaacaacttaaaaaaccaattaagacgaaaaaaggaatcaccgagacgctaaataatcttgctgaattcagagctaacggacacctaccggaaattgttattcggcaaagcatcgcaaatgaatggcaagggctgtttgaacccaagaaaaacggctctcaagtttcatcgaatatcgattttgaaggggcattttatcggcttgtcctgcaaggatgtgagccacaaaacgaagctgaaagaaaagcgctaaagcaagcgcaaaacgccggactacggcgtcgcaatgaaatccaggctcattccgcatggcggggttatctgagccaggcgtaccgagaaacaggcgagcagccgtacacaggaggttag

SEQ ID NO: 430977 - DNA, 189 bp, Serratia marcescens
atggctaattactgtgaagactgcggcacgaaaaaatatagcagcggcttttgcccaaattgtcaggaggaatcgtgcatttatcacgaccaatacatgaaccctgattatctcggcgatggggaaatgatggcgccacccgatgctgattcagaatttatgcggaaggttcgcgaacaaagcatttaa

SEQ ID NO: 430978 - DNA, 465 bp, Serratia marcescens
atggaaatcaaacatgagcaggtacgcaacactctgcgcgcgtgggcggcagagatagggcagcgacgagttgccgaactggtaacggcagcataccaccggcgcaacatgaccacgccgcggcttggcgttatcgaacgtgccgacggcactatcgactttgatgcgtggcacaacaacaaacagcagcttttccgctggcttgatggcgattcagccagggtgcagggatatatcgctgatctgctaccggcaattttggatgctatgccagctccgttgcgcgcccagacggtcgcagggaacagcattgagtatctcgctacgcgggcactgaaagaacaccaggacgcgatcgctgctgcactgctgcatgcgccactcgccgtattcgatcgcgagtgtgacgaggcagagcgtgagtttgcacgtttccggcaggtggccagaacacatttgcactaa

SEQ ID NO: 430979 - DNA, 174 bp, Serratia marcescens
atgcaacaactattattcgcattagttgtgtcggtatgccctgcgcatgagatatgcaaagacgtggtttatgaagtttacgagtcaaagcaggcatgcgatgacgccatattcgaaaaccgaatttttaacggcaactgctatgaagtggaagccataattcatcaaaaataa

SEQ ID NO: 430980 - DNA, 234 bp, Serratia marcescens
atggctatcgacattaccataaaaatagaaagcatcggctcaattgtaaaaacaggatttcgctcagatttggaggtagaacttaaatccgctgaattaacagatgcggtcgacgcgaaaaccattgtcggtgaatacgataaggacgaattgcttgaagcaattggtgaagaatatgtccagaaatggttaaaggaacagggattcacagtttcttatggtgatgccttatga

SEQ ID NO: 430981 - DNA, 729 bp, Serratia marcescens
atgaacagaaaacaatttataatcagtaacggtgcaacatgtaataactggacctggagttggtcattcgttaatcacgacaaaaagatagtgatttttggtgcttgggatgtagagaatgaacaggaaagatcagtaatactacgtgagagatgggaaaaagtactaacgaatggaaaagataaacggcaacccggatatactcaggcagtagagcatataaaactaatagagcagggttatcagctttatacttttgacatggtgcattcggaaagagaagacaatcctaatgtatcagtaattgaaggttttactcctgagcttaagaggagatacttacggaaagaagggcaaacgtggtacgcatattatgatgctaacccatatcctgatgacttaaacacacaggataactacattgaaggtgctaagaagcgtataaccgtgaatgcctatgaacgtgatccaagagcacgagcggcttgtattgcttatcatggtactacgtgtaaaggttgcggcttcaactttgagaaggtctatggtgaacacggcaaaggctttatccacgtacaccatataaaaccaatacatactcttggtgcggggtatgaactggatccagaagagcatctaatacctctatgtcccaactgtcacgctatggtacataaaggcgataaagtacttagtattgaagcactgagagtactaatcaaatcgtga

SEQ ID NO: 430982 - DNA, 771 bp, Serratia marcescens
gtgagaaagataaagattggggagagctcaataactattgagctatataatgaaaatgcaaatggaatgcctgttgttatcgcacccggatatatgaccgatggtgataaatcttggggggaaaaattgagtaaaataatacactctccaattatatttgttcagtggaggtcgtccaatatttgtgggcttttaagtgagctggggataacagcagttgagagaatttttcaaccatttagaactacaatactacctgcttccttggcaataaagatacatgaatcatggtcaaaaagctctaaaaaggcaaatgatgcgggggattgtcttgcgagatttctaaatgatgtatgggatatggatgataaggctttgtttatcggacattcacttggcgttcgcgttattacagaggcaatgacacagttaaataatgcaaatgtactttcatcagtatcgattgcaggagccattctccagccgcagtatgacgaaaatattagcaatgcaaatcatgttcattctccaatgcatgtaaatattcatagtgaaagtgattgggttttaagctatctttataaaattggtgaggtaagcttcgaaaatccagttggaattactaagtcacatttagggaatgtagaaaacataaacctagatataggtcacatatcatatctgtccaacaaaaaattcatgagatatattgctattcactataaacaagctagggcaatgtactatgcaagaggttatggggagcattaa

SEQ ID NO: 430983 - DNA, 321 bp, Serratia marcescens
atgaagggctgcgcctgggcaggctgcacgctgttgctggtttgggcatcggggagccaggcttctttaaacagtgcccgccccgacgtcacactgggggaaaggggggcggtgacctgcaacgcgcgggtggttgagcaggctgattggggggacatcgccgcggtggtgcaatccgcccgcctttgcctacggcggggcgacgggcggcaatggtctgaacgcgcgccggtttacctgggcgtcggcctggttcggcatggcggcgcccggttgtcgggaaccctcgccgcacgggcgctggcggaaaaaacgccataa

SEQ ID NO: 430984 - DNA, 873 bp, Serratia marcescens
atgaaccagcgtttgtcgatagatgccttgcgtgcgctactgtgcgtgattgacaccggcagcatgacccgagcggcgcagcagcttaatctcagccagtcggcggtcagttggaaaatcaaacggctggaggcgcaactggggcgcacattgctggatcgccagggtgtggcattggccgtcactgcagacggcgaggtgctggccgaacacgggcggcgcattttgagtgcgcacgatcgggcgctggcgcattttgcgccttcagccctgcagggcgcggtgcggctcggcgccacggagcagacgccgttgccgccgttggcagccctgttggcggcgttcagcgatcggcacccgcaggttgacgtgcagttggttatcggccaaagccagtcgctgcgccgcggattggcgcagggagagctcgacctgatcctgcaccagaggtttgacggcccgcatgatgaggccgagacgttactcggtagggaacgtttgcattggtgttcgtcgcccggttggcactatcggcagggggaatccatcaaattggtgagctacggaccggactgtttttatcgtagcctggcggagcggttgctgagcactgctggcataggctgtaaaataactctggaatgcccttcggttaccgggatgttgacggcgattgccgctggcatgggggtcggcgtgcttaatcagcgatgcctggatcggcgagtgcgaatcgataggacgctggaacgtttgctgccgctgccgacggtggtgaatgcgctgcgtatcggggaggggccccggcgttcgctggcgcaaacgctggggagcgagatcgcggcggcgttgcaaaccgacaccgcttcctga

SEQ ID NO: 430985 - DNA, 843 bp, Serratia marcescens
atgaatgcttttcccaatctgcttaaccaacaccggatcatcaacggccatcgcatcgccgccggcgtccacggcgcgggggaaccgctggtgctagtgcatggcaccccagcgcacgcgatcgtctggcggcacgtgctgccgtcgttgattgcggcgggatttcgggttcatctctacgatctgctggggttcggcgcctcggagcggccgctgacggcggatacctccatcgccgcgcaggcggaactgctgctcgcattgctggatgactgggagctggaaacggcgcacatcttcggtcatgacatcggcggcgcgctgtcgctgcgtgcggccttcagccatgccgcgcgttttcgctcgctgaccatcgcggacatctgcagttacgactcctggccttcaccgtcctggcgcgacatgcgcgatcattatcaacactatgcggtcatggcgccggaacagcatgaacaggcgatgacgcggcaactgaaaatggcggtgttcgacaaaacgctgatggagggcgaactgctacgccactatttgacgccgatcgtcggcgtcatcggccaaccggcgttttaccggcatcagatcgcccactacgatgcccgttataccgccgatttttccgagcgcttaccggcgctgcgcctgccggtgcagatcctgtggggagccgacgacgagtggcaaccgctcagctacgctcatcggttgcaaagcgatattcccggcgccaggttgcaggtgtttccccaggccgggcattttctgatggaggatgcgccacaggcggtggcgcaggccgtgatcgactttattcactcgctctga

SEQ ID NO: 430986 - DNA, 1014 bp, Serratia marcescens
atgcatacgctcgctgtcggcgcgcggtttcttcctgccgtttgcatcccagcacagccagccgatcgccaacattttcagcgacggcaccatgatactggcgatgaaaatcaccatcgccaccgggtaagagccacttccccacagcaggatcacccctgccatgatggtggagttcatcttgttgcccagtgcctcggtcaccatgatcggcatcaggttggccggaatatacagcatgacagaggtcaccagcagcgccagcgtccactgcaggctgtggcggcggcgcacatagccgggggtgtgacagcgcgggcagcgcacctggttggccggcaggatcgccgtgcagcaagcgcaggagcgcacgccctggcgcatgccggtacgccccgccgtcagcgggcggtcgaggcgcggcgccggttcgatgtcctgccacagccaacgcctgtccacgcactggaaagcgcgcacctgcagcaggcagaacaggcaatagggcacgaagctgctgccgatgccgatatcgccgtaggccatcagcttgacgaagctgaccagcaccccggcgagaaaaatctccaccatgcaccaggtcttgaactggaacagcacccgggccatccacgctttgagccccagcggcaaacgcactttggcgcacagcagaacgatcgccaccatgcagaacgccgggatcagctgcacgaacaccataaacagcgtggccatgctggcgtagtcttccgccaccatgacttccgggatttgaatcagccggatctcgttgccgaggccggcaacgcgcatgttgataaacgggaaaatgttggccagcaccagcatgaacaaggcgctgagcgcgtaaccgatcggccgcttgcgcggctcgtcccagcgggtagtgagcgtggttttgcagcgcgggcagaccgctttgctgccataggccagcggcggcagcgccaccagcatgtcacactgcgggcagagcgtcttattctgtga

SEQ ID NO: 430987 - DNA, 711 bp, Serratia marcescens
atgaaccagaacaccaatgacattttcaacggcgaattttcccgccggtatgacgccggcaacgcgcgcttcaatacgattagtgacaatcttcactttttgattgcgctgctattgaaggatttgcccgtcaatgcccacatcctgtgtgttggcgtaggaaccggtaccgagatgatccatttggcccgccagaacccgagctggcgtttcaccggcgtggatccttccgccgacatgttggcggtgtgcgctgccaagctacggcaggcgaaaattagcgaacgctgcacgttggtggagggctatctgcaggatctgccgagcgcaccagattacgacgccgtactgtgtctgctagtgacccattttattctcgatgacgcacgtggcggcctctatcgccatatggcgtcacggttaaataccgcaggccaggtggtgattgcggaaatttccggtgatacgacggcggcggattttgaccagcacctggccagctgggccgccatgcagtctcttgacggtcaaactccgcgcacgccggttgaactccgagcccagttgcagcaacggctgttgctgctgccgccagaacacaccgaacggttgatcgccgaagccggattttctccgccgcagcgtttcttccagtcgttgctgatccacgcttggacagcccgtaaaccggcaataaaaaaccccgcctga

SEQ ID NO: 430988 - DNA, 381 bp, Serratia marcescens
atgactcccgtatcggcttcagatctctcggtatgcctgatgatcgcgctggcgtcggccagtatttccatgaccctgacacaaaccgaactcttcacggcgctgcgggcctgggcggcgcgcaaaaatgctctgttgggccatttgttccaatgcttttactgcatgagccactgggtggtgattgcaggaatgctggtttaccgcccggcgctgttgcacagcgacatcggcccgatcgattgggtgatgaccgccttcatcgtgctcaccgtcaccacctttatcaacggcctgctgtttaaagtatttcaggcggctgtgcgcactcatgtaatgaaacacgaggcgcagcagatgttgaattcgcatgagcagtga

SEQ ID NO: 430989 - DNA, 477 bp, Serratia marcescens
atgcgtcaggacaacaaactttcgcgcatgctgcacgtgttgctgcatatggcgcgccacaagggggtttacacctcggaacagatcgccgcgatgctgggcaccaacagcgccgtggtcagacgcaccttggccggcctgcgtgatgccggtttcgttgcgtcggaaaagggccatcacggagggtggcgtatcgccgacgatctgcggaacatcagcctgctcgatatctaccgggcggtgggcgttaagcagctgttcgccatcggcggtggggaacagcatccggaatgtgcggtggaagcggcggtaaatcaggcgctgggcaacgtgctggatgaggccgaacaggcgctgctggcgcgctttgccgaaatcaccctggaggatctgaaggatcgctttgaccgccatttccctgtggggacgaacgaaaacgcggtggcctgcattgacggcgacggtaccgaagcgtaa

SEQ ID NO: 430990 - DNA, 735 bp, Serratia marcescens
atgacggattttatggcctggctgcgtggccatctggctcaaggggcagtggcgccgcgttatattcagctggcggcggcgatagaaatcgcgatcaggcagcaggtgttggcggcggaggcgtttttgccgccggaacggcagatggcggaaggtctggcgctgtcgcgcgtcaccgtcagcaaggcgatgaagctgttggaggaaaaggggctgatttcgcggcagcagggcgttggcacccgcgtggcgatgcgcatcggctattccctcgataaggacagcggtttcaccgctcaggcgctgcgccacggcagcagcgtcagtaaccgatggttgctgcgcacccgggtcggcgcgccggccaaggccgcggcggtgctggggctggcggaaggggatgaggtgatcaaactgcggcgtttacgcttgctgaacggcatcccggtctcgctggaaaccacctatattccgccgcgctttctgcccgaaccggggcagctggaacattcgctgtatgcgttatggcaatcgcgcggcatcgtgcctgaagataaacactttctgctgaaggcggtgtcttgcagcgacgaggtcgccgagctgctcaacgtgccgtgcggcgcgccgttgttgcacatcactcagaccagccgcaatgcccagggtgaggtgctggagttcagcgatatcttgtgccgcagcgacgtttatgaattcgaagtgaacggttag

SEQ ID NO: 430991 - DNA, 1443 bp, Serratia marcescens
atgcttgagcatgaaaaaactgaaccagtacacccgatagagtggtttagattaagtggtgttcatggttataaagatctactgatggaaatgaaaggtagaactactatttttgtttcagagaatggtgccggaaaaacaacagtgcttaatgctcttagagctgttcttgaaagggattttcactcattaaagttgataaactttaatgagataacgataaagtttcaaggagtaaaagaagtaaagataaaaaaagatgaattaggctcctattctaaagaagacttgaaaagcttcattgatgaggaactgtctttgaattctgatttttgggatacaaatactcttgaagcagttataaattcaatagttaccagtaaagattataattacagagacgataatgttcttcatgaagcatatttaaattcaccttatatagaaaacgattttataaaatctttagaaaagctaaaaataaagataaactttggggctaattttaatgatgagtcgaagataatcgaagaggctatgcttggttatgaggtgatttatttaccaacatatagacgagttgagaaaaactttgacaaaaataaagcgatgttagcaaaaaggcatccatcaagaagaaatgttgttaaaaaactacaccatgatggcatttcatatggccttcgtgacgtagaggaaactcttagtgaaatgactttggaaatagaaaggttatcaagtacagggtacagaacattaagcgcaaaaatgcttgatgacttaataaaacttggcgatagtaatttcgaattcgcaaataatgatcttccatcaattgatgatctcgaacgtttcttgaatcgagttgaaaatccactgcatacatatgcaataccagggccctttgaaccgaaaaagaaagaaaattcactcattacaaaacttaaaaacctttacgacgaagataaagttaaagaaactggatatttgaattattttctttcgaagttaaatattgtaatacaagaaacaaaagaacaagaatataaaatagaacagtttgtagaaatatgtaataaatatttaacatcatccggggattctaaatcattacgttttgatccatcaaagttagaggttatcgtcaacgatgactttactggttcaagaatatctcttaatgatctttcctccggtgaaaaacaagttatttctcttatggcaatcctttatttgggtggggatgatcataaggttatattaattgatgagccagaactttcattgtctcttaagtggcagaaaatgatcttgcctgatatagataaagcaaagaaggtaaaccaggtagttgccattactcattctccattcatattcgataatgagcttgaaaagttagccacatcaatgaaaataaaaagggctatcgttgatgaatag

SEQ ID NO: 430992 - DNA, 870 bp, Serratia marcescens
atgaatagtacagatcttcttgatgatttaatcaaggctaaaaattcaaaaaatccgttaaagcaagagattttgatggctaaatctcttgttgacaatatttatgtttttgaaggtgtggatgattttcctgtctacgatgagtggttgaagaataatgaacactacactaagtctagtcatattgtagcaaaaggtaaaaagcagataatatcattatacgagcactcatctcttatagatgatagagaggttttagattcttgtattttttatgtagatcatgattatgatttggaaagtcataatgattactgtataacaacattaaattgttactcaatagaaaactatattgttaatgaaagggctattggtaattatctatgtgatgagttccgattggacgcaaaacatattaaattgaaaaaagacttaatcgatgacttcaggaaagatctcgaagagtttaactttatagcacgaaatgtttgtaagcctctatttataaatcataatatcttaggtaaaacggagttctatgaaaagatatcaaaggtaattaatattggttacaaggatatttatctaaaggacggaattgaaattaaaggttatttagttgatacgagtagtcaggagttttctgaactttctgaagtatttgatgctttatcagactccatggctattagaggtaagtatgtttttgagttcataaaaagctggcttagctctttaaaagatcatttaaccaaaagagacgacttcgagattaaggtttctaagaaagatccattaatgatcgagatgaggagattagctagttctacgttgataccagaagaaataaggctgtctttgcgataa

SEQ ID NO: 430993 - DNA, 1164 bp, Serratia marcescens
atgcaaaacttcattctgcataccccaaccaaaatcctgttcggcaaggaccaaattgccgaagtggccggccagatcccggcggacgcacgcatcctgatcacctacggtggcggcagcgtgaagaaaaacggtgtgctggatcaggtgtacagcgcgctggccggccgcgacgtgcgggagttctccggcattgagccgaacccgacctacgaaacgctgatgaaagcggtcgaggtggtgaaggcggaaaacatcgatttcctgctggcagtcggcggcggttcggtggttgacggcaccaagttcatcgccgccgccgcccgttacaccgccgacggcgacgcctggcatatcctgcagaccgtcggcagccacatcgccgacgcggtgccgatgggctgcgtgctgacgctgccggccaccggttccgaatccaacagcggcgcggtgatcacccgtaaaagcagcggcgacaagcagcacttcttctcgccgctggtgcagccgcgcttcgccgtgctggatccggtggtgacctactcgctgccgccgcgccagatcgccaacggcgtggtcgacgccttcgtgcacaccctggagcagtatctgacctacccggtcgacgccaaggtgcaggatcgcttcgccgaagggctgctgctgaccctgctggaagacggcccgcgcgcgctggccgaaccggaaaactatggggtgcgcgccaacgtgatgtggagtgccaccatggcgctgaacggcctgatcggcgccggggtgccgcaggactgggcaacccacatgctgggccacgagctgaccgccatgcacgatctcgaccacgcgcaaacgctggccatcgtactgccggcgctgctgcacgagaaaaaagcgcagaaacgcgaaaaactgctgcagtacgctgaccgcgtctggggcctgcgcgaaggcagcgaagacagccgcatcgacggcgccatcgccgccactcgcgccttcttcgagcagatgggcgtaccgacccgcatggcggattatcagctcgacggcagcagcattccggcgctgctcgacaagctgcatcagcacggcatgaccgccctgggcgagcatcaggacatcaccctggacgtcagccgccgcatttacgaagcggcgcgttaa

SEQ ID NO: 430994 - DNA, 558 bp, Serratia marcescens
atgaaactgaataaaatcatgctggctgccgtcatggcgtttggtgtttcttctctggctcatgctgcagttaaagaccaggggcacggtaaggtgaccttcagcggttctattatcgatgcaccatgttctattgcacctgagtcgatcgatcagaccgttgagctgggggctatttccaatgtggctttgaaagatggcggtaagtctatgccgcgtcctttccagattaaattggaaaactgcgatctgactgtggatgcaaatgatccatctaagaacaataacaaagtttccctgaccttcaccggttccgcttctgaagcggacagcgccctgctggggattacgggaacagccaaaggcgcgggcattgcgctgactgacggaaacggtaaaaacattaccttaggcacggcaaccgatgcgcgccttctgcagaatggttctaacaccctcagcttctctgcctatctgcaaggtagcggcgcgtccggggcgcaaattgttccgggtgaattccagtctgttgctgactttaccctggcttaccagtaa

SEQ ID NO: 430995 - DNA, 582 bp, Serratia marcescens
atgctatttgcaagaatccgttatttcacgggaaaaataatgaagcgtcagataaaaattttaggggcgttttgcctattgtcgttaccatttttctttgtttcgcaagctattgctgcttcacaaggcgaggggcgcgtcaatatgcaaggggccattaatgatgccgcttgtgcgattgctacggcaagccgtgaacaaattatctatatggatgttattcccatctctgatattgctcgagatgggcaggggaaaaacgttcctttcagtattaaattagtgaattgtgttttggatagagtggataaaagtttgccggggtggaagcaatttcaagtgacttttgatggccatgccgatggtgagatgtttggtattagcggccaggcctctggcattgcgttaaaaataagcgatgacgatggcaatgtcgccaggccgggagtgccattaccgttaatgaaaatccctctggggagttatcggttgaattacgtcataaaacttatagcgaatcatcaaccattaacggcgggaagttacttttcatcggtcagattcaaaatggattattactga

SEQ ID NO: 430996 - DNA, 846 bp, Serratia marcescens
atggtacaagcagtgtatgttgacggcagattctccgattggcgctgggaggggcctccgccagaaccagagactcaggcgcggtgggcagagatagattttcattattctaccataatgttcgatgactatgacagagcatttgctaatggaaaaacagttcgttgtactaaccaaggatgtaggcttcgattatttatttttaaccatgcggctgcgggagggcatagcattacattcagtgctgcttttgccccgggaggcgctgtattaacctcttacgaagccaatcaactaattaggcgtatcttgcctttctcgagtaaggtgaggtttctttacgcgttgcataatccgcagtgtatgtatcttgatttagctgacggtagtttcgaacaccgattaggttctacttgtaacggggtacttccacctctgccgccaaccacgccacggccaccggagccgctttcttgcgcggtgacgtggcaaagcagcggcgagattgattttggcgtgatgaccgcgggtgaaaataaagtgaagggcattgccgccaaacttgcctgccagggcgggacttcgggaaaagcccgcctcagatttaccgatgtcaatcaggtgggggcaaatacggtaacgcttcgtaagagcggcacgaatgatgaaataaaagcgaagttgtcgattggcgagtccgattcgtctaatgagcaggtgattgacgtatcacccggttttaatgcgacctatgcgtttgtcgctaaattggacggcacgcagctgagcggtgtagatgctggcacattttctggcaatgcgctgattgtgtttgaagttatttaa

SEQ ID NO: 430997 - DNA, 765 bp, Serratia marcescens
atgaatatctctatgcaatataatttcgcgcgagccgtgccggcaatggcattaattggcagtgtttttttgccgatgtcgtcacaggcggccatcgctttagatcgcacccgggttgttttcgatggtggcctgcagtcggtgagcctgagcgtcagcaatcagaacaaacagctgccttatctagcgcagggctggctggaagacgagcaaggcaacaagattcaaagcccgttgaccgtgctgccgccggtgcagcgcatcgaaccgggtaagcctagccaggtaaagattcaggcgttgccggcggccaaacagctgccccaggacagagaaacgctgtactacttcaacctgcgcgagatcccgccgaaaagcaacaagccgaactcactgcagatagccctgcagacgcgtatcaagctgttctaccgcccggcggcgatcgccccggagcgtaacacggcgccgtggcaggagcagttgaccctgaccaaacagggcgacaggtacatcgtcaataacccgacgccgtactacgtcaccatcatagatgtcgccagccgtaaaaatgcgtcggggccgcagaattttgaaccatttatggtgccgccgaaagggcaggccgccttgacggtgaatgccgccagcgtcggtagtagccctgtattgacttacataaacgactacggcggtcgcccacagctgagtttcagttgcaacggcgattcctgctcggtggtgccggagaaaaagacatcgtag

SEQ ID NO: 430998 - DNA, 657 bp, Serratia marcescens
atggcaaagagcaaggctaataacggcgaatggcgatatgcgctgagtgaactgcgttactacgtcgtgctgtgcgggttggtactgatggcgccactcagcctggtagccctgttgtggatgctgccggccgcgcaggcggcggacaactgggatgtcgaaggtgttaacggcgtgctgcacattaggggcgcattgacggaaagcgcctgccggctggagatggacagcgcccggcaggatattcgtttaggcgaagtggcgacaggatggcttaaacagataggggcgcgtggtacgccggtggcgtttgagctgcgcctgcgtgattgcttgcgcagccaggccgccagccgggatgagcgtacgggagcgttaagctgggcgccgggccagcccgcggtcagagtgagcttcagcgcacgggccgatcaggatagcccacagctgataaaagcgcagggtgtgagtggcatggggttacgaatgctggatgagcatggccgcaacgtgcgcttgggcagccgtggtgaaccgttatggctgacgccggggagcaatgtgttggtttacaggatcatggctgagcgtaccgcgcagcctttggtggctggcaactattacgccgtagtggattttcatctgagctatgactga

SEQ ID NO: 430999 - DNA, 495 bp, Serratia marcescens
atggaaatcaaagtacgacaggccgcgattgcgttgcttttgtacggtagtggcgtgatggccttcgcgcaagcggcaacagtgaaagtcagcgtgacggtgatgcagcccttgccttgcaccatcaatgatggacggccgattgaggtagattttggcgatgaggtgatgacgacacgcattaatggtcacttttatcgcgtgccgataggtttttcgtttacctgcaacaatccctataaaaatgccatgcgcttgcaggtacatggcggcgttgccaatttcggccaggggatgctcagcaccaatcgggatggcttggctattctcatcttgcagagacagactgggcagcaactggcgctgaattcttggctcaattttacctatcccaatccggttaagctggatgctgcgctggtaaaacgggctggcaccaatctggagacgggagaatttaccgcatccgcgactctgcgaattgactatcaataa

SEQ ID NO: 431000 - DNA, 531 bp, Serratia marcescens
atgaaggctttttcaccttttcctgtggcattggcattgttgattgcatttacaccctgctcaagggcagaagataacctgtattttcatggcgagctggtggcggagccctgtgtgatcccgccgggcagtgaaattattccgctcgactttggcacggtgatcgataaatacctgtatagctatcaacggacgttaccaataccgctgtctattcagttagcggagtgcgatctaagcctggggcaatccctgacgctaacctttgtcggtagtgaaaacagtagcctacccggctatttaaccttgggtgctgatagcatagcccgtggtgtcgccattggtttggaaagcctggaaggcgaggcattgccattgaataagcgagggaaaaagatccctttggtaagcggaagtaatcaaattcggcttcaggcctatattcgtggtgaaccattagcacttaaaaacaagagcatagttcatggtgatttcagttctgttgtcactttcaacctggaatacgagtaa

SEQ ID NO: 431001 - DNA, 540 bp, Serratia marcescens
atggaattaatcactatcgccatcgatgatgataacaattactttgcggcggggttgcggctcagtatcatggaatatgcgcaagaatatcataagacggtgaggtttttgactcaggaggatgatgtacggcccgacgtggtgattgcctcatcgacatggcgagcgcatcgctggtataaaaggaatacccaaacgacggggaggtctattgtaacgattaaggaatataggtttggcaaccttaatgaaaacgatagcgtactctatcgaacggatagccgcagccggttgtttgagttgctgacgtcgcgtataaccaacgttcctaatgatactctgtcttccggctgtatgttgaccaaccgggaaaagcaggtggttgactatctcaaaaaaggttttgatcaatcacaaacagccaggtttttagggatacatgttaaaacagtacatagccataagcgttcggttatgaagaagttgatgttgaatcggcaacgagaattcacatattggttaatatcgcaagatgtctaa

SEQ ID NO: 431002 - DNA, 480 bp, Serratia marcescens
atggaaattacagtatgtgatgcggctgacattcctgaactggcacgtttgttcgtagaaatggagtcatattattttggcgagggaagcatcaattatgaagagacgctgtgctacctttcggaaaaagttttttccacctactccgcagtaacgattataggcgctcgcaatgaagacgcactggtgggattcgccactttcagcctattatttcccgctccacgctgcagtggccaggcatttatgaaagagctttttacgtccgaaaaagccaggggtaggggcgtaggcagagcactgattcaattcattgcaacctttgcccttgaacatggatgctctcgtctcgattggacagcagaagcgtcaaaccccaaagccggagagttttatctttccatcggcgcatccctgatcgaagacaagcaatacttccgcatggagggcaaggatttgaaagcatttgccgtaggctga

SEQ ID NO: 431003 - DNA, 627 bp, Serratia marcescens
atgaagatcgttgaggtgaaacacccgctggtaaaacacaagcttggcctgatgcgcgaaaatgacatcagcaccaaacgcttccgtgagctggcctcagaagtgggtagtttactgacctatgaagcgaccgccgatctggagacggaaaaagtcaccatcgaaggctggtgcgggccagttgaagtggatcagatcaaagggaaaaagattaccgtagtgcctatcctgcgcgcaggcttgggcatgatggaaggggtgctggagcacgtgccgagcgcgcgcatcagcgtggtgggcgtttaccgcgacgaagaaaccctggagccggtgccgtacttccagaaactggtttccaacatcgaagagcgcatggcgctggtcgtcgacccgatgctggccaccggcggttcgatgatcgccactatcgatctgctgaagaaagccggctgccacagcatcaaggtgctggtcctggtggcggcgccggaaggcatcgccgcgctggagaaagcgcacccggacgttgagctgtacaccgcctccatcgatcagtgcctgaacgacaagggctacatcgtgcctggcctgggtgacgcgggcgacaagatatttggtaccaagtaa

SEQ ID NO: 431004 - DNA, 1434 bp, Serratia marcescens
atgtcagccgcaacccataacgtcaaaaaagtcgctgaacatcgccagcgcattctcactctgctgttgaacaataaggaattggtcgacggcattctcggccggccaggggatgaacacaccctcagccaaagcgaactgctgaaccagacggcggaaatcaccggcctgttggacgacatgcacgccgccgacctggcggacctgctggaagcgctgccgcaggatgaacgaatggcgctgtggcggctggtgggcaacagcaagcgcggccaaacgctggtggaggtcgccgagccggtctgggacagcctgatcgaggaaatgagcgacaaagacctgctcaaagcgatcaaaacgctggacgtcgacgaacaggcctacctggcgcaatacctgccgcgaaatctgatgggccggttgctgacctcgctggagccggagcagcgcgcccaggtgcgcgagatgagccagtacgccaaagacagcgtcggctggatgatggatttcgaactggtgacggtgcggccggacgtcacgctcggcgcggtgcaccgctttttgcgcatgcgcaaaaccattcccgacgccaccgataaactgttcgtcaccgaccgcaaaaataccctgctgggcgagctgccgctgaccgcggtgctgctgaacgatccggagatcccggtgcgcgaagtgatggacagcgatcccgccacctttcagcccgaagacaaggccgatgaagcggccggcgcgttcgaacgttacgacctgatcagcgccccggtggttgacgccaagggcaagctgatggggcgcctgaccatcgaagagatcgtcgacgccgtcaacgaagagagcgacaccaacctgcgccgcatgggcggtttaagcccggaagaagacgtgttcgccccggtcagcaaggcggtcaagacccgctgggcctggctggcgatcaacctctgcaccgcgttcgtcgcttcgcgcgtgatcggcctgttcgaacacaccatttcccagctggtggcgctggcggcgctgatgccgatcgtcgccggcatcggcggcaacaccggcaaccagaccatcaccatgatcgtgcgcgcgctggcgctgcaccagatcgaagtcggcaacatctcgcgcctgatgcttagagagctgggggtggccatcatcaacggcgtggtgtggggcggcatcatgggcgtgatcacctggctgctgtatggcgacgcggcgatgggcggcgtgatgacgctggcgatgctgctcaacctgctgctggcagcgctgatgggcgtggtgatcccgatgaccatgctcaaactgggccgcgatccggcagtcggctcgagcgtgctcatcaccgcgttgaccgacaccggcggcttcttcatcttcctcggcctcgccaccctgttcctgctgtaa

SEQ ID NO: 431005 - DNA, 1203 bp, Serratia marcescens
atgataaataaaatagatataagcaaactaaaagtagtccctacaaaacagttagcaaatgaagcactacaaaaaagcagaagaaaactgtctcaaacgacttggattttgagagaaaacataagagccgttgatttttactgttattttaatgtaaggtttggctcccctaatggattatttacagcgctaaaaaataaacatgactctgataatttaattcattgggattatacctttgattatgaaggccataggattaatttaatttgtaaaaattactatattgaaatcatgaaagagatatctttcgaaaatgaatctgaagccaagagattattcattgagcaaattcgtaatgacttcaaaaactatggtcgtcagctttctgagtttagaaaaagtttagaaccatggctggtttttgttaatcctttcaaacgattaaagcaagtaatagaaaatcagctaactaaacttgaagagttagatattagtagcattaaacctaacaacatatcagaccccagaatgaaagctacaagggaagacctcgaacactggcagaaaaatgcggaacagataagtgagaaatatgtcgaagctacttcactaggtctatcaataagcatgttgcttcctgtatacgctgagtcttttgtgaattttttaatttttattttggctaaaaaagaaattaaaaacaacgttgaacagtacaacaaagtactaagaatgcgcattaatgagcgtgttagttctttacacgttaactgcatcggattttaccaacctatagattataatgaggttgccgcgtgcaaggcttttcattcgataatgaacaagaggaatgaagttcttcatggtaatattaaccctatgaattatgcattcgactctatttattttgaatatagaacaccattatttgaaaacttccgagatattgaatatgatacttataaagcctcaatccgagggatagaatttgaaaaactagaatgtgattatcagcatgtgaaaaattttatatcttatattttactttgtcttgacgagaaagtattaagtcatgttaaaactataattgatacagtccaccctggatggaataaaaaaacaaaaaggcttggtgtgttatttgctaattatggagtggaaaatgtaatgatgtatggagatgatattaacttttgctga

SEQ ID NO: 431006 - DNA, 558 bp, Serratia marcescens
atggctacagatttaattaccacacagttgattactgttggtggtaccattggcggagctttactcacaggaattgttacgattgcaagtcagcacattaacaaaaaaagcaaagaaaatgaaatcaaacaacagctcaccttcaaaatcatcgaagaggacttaaaagaaagaaagtcattaattaaaccgatattacaatatattgactcctttaacttacctgaacatcaagaattttacgatgatagtggtgaatggcttgaaagagcaatgattcgctcttatcctaaaataaaaaaagagatcagtaatttcatattgaattacactttatatatgaatgataagattcgtgattgcatatgggatttaacaacagctattaatgaactatctgaaatagaggggcgattatatgacacatcaaagagccctgaagaaaatgatgatgtagtatatatgaactgcaaacgtgaaccaacagaggtctggattaacttgcagaatctgagagatattctttgtgccgagataaatattcaaaaaataatataa

SEQ ID NO: 431007 - DNA, 183 bp, Serratia marcescens
ttgcctgccgagccggaaaaagtgctaactctttcggatgcgtgggtaatgtacaacgacgaaaaggggcgtaactggactaaatcgatttcaatggcgaatgatcgttacatggaagcattgctaactgtcttggaaggcgaaactgctgtaacgatgctcacaaagcaggacattaagtag

SEQ ID NO: 431008 - DNA, 1170 bp, Serratia marcescens
atggctaagcctggctttgtctgtttgtattgcgggcttaataagcctaagagtgaagaaagccttgagcatgcgatcccacaattcatgggtggcgagtttgctccgcaacaatatatgcttcgtaatgtctgcaagcagtgcaataaccggcttgggttgttcgttgatgcttcctacgcaaaatcatggtttgtgacgaatggcctgagcattgctgcacatcggttatacacgagcttgaacgatcaaccgatacccttggtctgcattggccagagcaagtttgccgggctagttcttgacgaggggcaagttgccgagcattgggttggcccatcgggggagacgatcatctggcttcgtacggatgacaagcgactccatggttattcgggggggaatcctatcgacaagaaaaagaagccatcgacagcatatctattcctgacgagtcaagaccctacccgctgggaaatcggtattgccagtttcttggaaatgttcagatccaccaaagtccggaaaatcctttgtgcgagagtagttgaatccggtgagagactgcttcctggtttcgatgcttggtcgatagatgatgagtcaaatattagcgttgtcatggctgcccttaaatcaggaagcgttagggggcaaattgatgtacatgtacattttgatcagcgcttccttgcaaagctggcaatgggggtgggttgctcactgtttggcgagttatatctggatactgatatggcgaaagaggcacgcaagacctgctggccgaaggatggggagtctggacagacacgcggtagcacgactttgagagcgccagagaatccattgttttctaaattcattggttaccgaggggctgtcgtgtttaccgtggtgaacacgggcacctcttatacgctgagtggcactattgatcaggctattccgtttgttgtggaactggctccatcgactttatctagcccattcattaactgcgaagagggttacgcattggtgttgtttccgtcgcttggtaaaaccatagagatgacgttggttgaactgatagcccattcttctggtgtaaaaaaacacccagagctggtggcgatcgattcgcgtattgagaaatccgtcgagttttggagccaacttgcttctctgtga

SEQ ID NO: 431009 - DNA, 864 bp, Serratia marcescens
atgtctgaagaaaatgataatgccactcaattagatttggatccccctttaaatgtgaaaagatggctgattgcatgcgatgaatctggcattgatggacagaaatattatggttttgggagcctatggatgttatggcaaaggcgaggtgattttcgtcgtgagtttgaggctatactcgcaaataaaggttttcgcaatgaagtaaaatggaaaaaagctcatagcgagagcatgtatagagtgtcagaggatttgattgatttcttttttagaaaacaatggcttgcgtttcattgtgttgttgtgaagaaatctttagtaaataaaaactatcatgatggtgactatgatttagctcgaaggaaacattttacaatgctccttacaagaaaaatgaaatatgttattaatgcgcaccctaattatgatcatgagtttagattttgggttgatccaatagcctcaagatacaagaaagccgatgaggaggctgagaaaatatcagttaatattcttaataaggagattataggtaagagttttcagggaaaggtagtaataacagagcatgattcaaaatcgcaacctgccattcagttatgcgatttccttttgggtggcgtcatgagtgctttccaagaaaaagcggagagcgaaagaaaggttagtactcaaaagaatattgctaaatatttagggtgggatgatttagcatcagataccttcccacgtgaaaggaaatttaatatttggcactttgatgatgctgaattgttaaagaatggagtaagacacttttcaaaaacaagaaaagttaatttattacatccattacaggataggaacttacagaaaaaatga

SEQ ID NO: 431010 - DNA, 1158 bp, Serratia marcescens
atggattttaatttatcaagcgagcaacaggccctaagcgaatccgctcagcattttgctcgcgaagtgctggatcaggatgcgcatactcggctttcacagcaggtattcagtctggatttgtggcgacaggccgctgcctatggctttacccgggcccccgtggcggtctcgttcggcggactgggcatgggcgcgctcgataccgcgctgatgattgaagctctgggtaaaggtagccgcgatctcggcctctccttctcactctgcgcccatctgtgcgcctgcgtgatcccgctttcccgcttcggttccgaggcattaaaaacgcagtatctcgacgcgttagcgaccggaaaactgatcgcggcgaatgcagcgacggagccggaagccggctccgacatttatgcaatgaaatcgaccgcgcaaccctgcgatggcggctaccggctcaacggaagcaaaattttcatcaccaacgcaccgattgccgacatcttcatcgtctatgcgaaaacccatcccgagcatggttttatgggtgtcagcgcatttttgatagagaaaggaacgccaggcttaaacgttggcgcagtcagcccgaaagattgcctctccaactgcccgtggagcgaactgaccttcaacgacgtcttcatcccagaggcccaacggctcggtatgccgggcgccggcggcgccatcttccacgattcaatgatctgggaaaagggctgcctgtcggcgctgtttatcggcgcaatggagcgtgtgttcgaatgcgcactggactatgccaaacaacgccgccaattcggcaaagcgatcggccaatttcagtccgtctccaaccgcatcatcgatatgaaactacgtctggagcaatgtcggctgatgctataccgcgcctgttggaaacacgatcggggccaggacgccgagatcgacatcgccatgagcaaactgttgatttccgaatacgccgtgcagtccgcactggacgcaattcaaatcttcggcggcgccggcatggatcaagaactcggtctggttcgccacttgctcaacgtaattcccagccggatcttctccggcaccaacgagatacaaaaagagatcgtcgcccgcaagctgggcctgcggggaggcgcatga

SEQ ID NO: 431011 - DNA, 2013 bp, Serratia marcescens
atgatcatccaacgcatttttgccgtgctttacatgttggccggcctggcgaaagccttccctcagttggaaaacgtcgccgatattctgcaacaggcggctgtggcaaaccaggggacctggtacgccggggcgacagcctggctggcggcgcacggcgcagcggttaacgtgctgaccggcgtagcgctgtttgcctccggcatagtcttgatgttcaacccgcgttggacgacgctggttatctactgccagctattgatgatggtggggtttgtcacgatcctgcaccgtgcccagccacaggtcatgttgctcgatgcgattttcgcgctggcggcgctgtacatgctacgccagcaacaccaccgtaaacccaagccacgcactttccccacgcgcgacttttccacgcccacgccggcggcaggcggcccggtaacgcccccgctagacggtgtgtatgacgtggtaatcatcggcggcggcatttccggtttggccgcggccagcgaactgaccgatcgccgggttttggtgctggaaaaaagcgcctccttcggcggcaacgcccgctatagtacggtgaaccgcctgaggtttcctatcgccggcgtctgcttccaggaaccgctgccgaattctttcatgtcgcaactgctgaagaaaatcggtctgagcggcgcctataaatccaatgaaaaggacacgctggtatttttcgacacctacttgctgctccgcagcctgggtgaagtcgtcgtcggttttatcaaacaaccggtctacctgctgaaacccgccgtctggcgcctgacgggacaactgttcctgcatgctttgatcggcaaaccttacgtcatcgcggcaaaacagctgggcgatccgatctttgccgatctgtacgccttcctggataacttctcgccgagcggcgagcggtatcccagcctgccctggacgccagaaagcgcctggagcgaagcgcatatgacgctactcgacaatatcccgctttacacttatctgttcgaaccgcacaagctgggccagatcccggcggatctgcggccaccgagaaaattcggcaagctggtagagaatgccgtgagcaccacgctgcgcgtggaatgtctcgatattcgcgaagtctccgcctatgtcggattgcacttcctggtggggtatttacgcggcaatctggtcacgctgccgggcggtaacggcagcatcagcgccgggctgctcgactatcttgaggagcaaaacaacgtcaggctgcaaagccgcgtacagcttcaaagcatcacgcccggcggcgacgaaacggtgatccggttcagcgtcaatggcgcggccagcgaaatcagagccaaacaattgatctgggccgcccccaaaacgcatttgcccacctggttgcccaccctgcccaaagagcaattgacggcgatccgccagatccgccatgaagattactacctggcgaacgtgctgttgaaaaaaccgatcctcgaacgctcgttcggcggctatctgatcgagccggaaaacacccgcacaccttactattggagcaaagccggcacctgcctggtcgccaattggatggacaatcacctcagcgcggaagccggggtattaaccctgctcaaaccaaccactcgtccagagcggcaaggtcgcaccgcgcaaaacgagttcccggcgctgcagcaacagacctatgtcgaaatcgccaaagtgctgggcaacatgggcattgacgccgacatcattgaagacattcaaatctggttctggcccgcgggtctggtgacctcggtcgccgggcaacaggcccagggtgtgtttcacctggccagcaggccgtttgaaaatattcacttcgccaatcaggacagcgtgggcatcggtaatgtcgaaagcgcggtgtgggccgggcttaacgccgccaaagcggtgaaagaacgcctcgcaatgcccgcaacacctgcggaggtaatgccatga

SEQ ID NO: 431012 - DNA, 2667 bp, Serratia marcescens
atgaacgcgaccctggtggttgaactttccggcgataacacactggctccccatagcctgggtggcaaagcccattcgctgaatcatttggttcaggcgggcttgccggtaccgccggcgttttgcatcaccgcgcaggcttaccggcagtttatcgaattcgctgtgccgggagcgctgctcgacacggccgcaccgggtaacgtacgagatataattttgagcgccaccatccccgatccgctcgaccgagcgatccgtcacgcctgcaaacagttgggcgacggcgcctcgctcgccgtgcgctcttcggcgctggaagaagacggcctgacccactctttcgccgggcaatacgatacctacctgcacgtgcgcggggatgacgaggtggtgcgcaaggtgcaatcctgctgggcgtcgctctgggcggaacgcgccgcccagtatagccgaacatcggcggcgcagagcgatatcgccgtcgtcttgcaaatcatggtggatgcagacgccgccggcgtcatgtttacccaagatccgctgaccggcgatgccagccacatcgtcatcgacagctgctgggggctgggggaaggcgtggtctccggacaagtcaccaccgacagcttcattttggataaggcgagcggcgagatccgcgagcggcaaattcgtcacaaaccgcactattgccaacgcgatccgcagggacgggtcacgctgctgcaaacgcccgaagccagacgagacgcccccagcttaactccggaacagctacaacagctcgccaggctggcccggcaaacgcggatgatttgcggcacggaattggatatcgaatgggcggtgaaagacgatcgcgtgtggctcctgcaggcgcggccgatcaccacgcaggccaaaccggttcagatgctttacgccaacccgtgggaaaacgatccgacgatcaaggaacgggcctttttctcccggatggacaccggcgagatcgtcaccggcttgatgacaccgctggggctgtcgttttgccagttctaccaaaaacacattcatggcccggcgatcaaaaccatggggctggcggatatcggcgattggcagatctatatggggtatttgcaaggctacgtctatctgaatatctccggatcggcctacatgctccgccaatgcccgcccacccgcgacgaaatgaagttcacgacccgctacgccaccgccgatatcgatttcagcgggtacaaaaacccctatggccccggcgtacagggatgggcttatctcaagagcgcctggcattggctgaaacagcagaggcataacctgcgcagcgccggcgcgaccgtcgatgccatgatcgccctgcgccagcgcgagacgcgccgctttctggctctggatctgacgaccatgacacatcaggaactggagcgagaactcagccgcatcgacggttacttcctcgacagctgcgccgcctatatgcccttcttccttcagtcgttcgcgctctacgatgcgctggcgctgacctgcgaacgttatctcaaaggccgcggcaacggattgcaaaatcgcatcaaggcgtcgatgaacaacctgcgcactatcgacgtcacactgggcattctcaacctggtggagacggttaatcgtcaaccggcgttgaaggccctgttcgagcgacacagtgcacaggaactggtcaccgtcctgcccgccgagcacgaatcgcaaaccttctggcaaagcgacttcagtgccttcctgttcgagttcggcgcccgtggccgccaagagttcgaattgagccttccgcgttggaacgatgatcccagctacctgctgcaagtgatgaaaatgtatctgcaacatccggtggatctgcacaagaaactgcgggaaacagagcggctgcgccaggaagacagcgcgacgctgcttaaagcgatgccctggtttggccggatgaagctgaagttcatcaccaaactgtatggcgtgatggccgaacgccgcgaagcgacccggccaaccttcgtcaccgaaacctggttctaccgccgcatcatgttggaagtgctacgtcgcctggaagcacaaggtttcgtcaaaacggccgatctgccctatgtggacttcgagcgcttccgcgcgtttatggcgggagaacagtcggcgcaggaagcgttcgccaccgatatgatagagcgcaatcgccaccaacatctactgaacctgcatgcggaagagccgccgatggcgatcgtcggggggtatcagcccaggatgaaagcacctacggcggaaaacgccgccggcatgctgtacggcttggcggccagccccggcaaagtggtagcgaaagcgcgcgtcatcaccgatctgcaggcgcaagccggcgggctgcagcccaacgaaatcctggtggcgcgctataccgacgccagctggactccgctcttcgcgctggcagcgggcatcgtcaccgatatcggctccgcgctgtcccacagctgcatcgtcgcacgcgagttcggtatccccgcggcagtcaatctcaagaacgccacccaactgatcaacaacggcgacaccttgatcctcgacggcgacagcgggacggtcattattcaacgcggagaacgtgccgatggctag

SEQ ID NO: 431013 - DNA, 2604 bp, Serratia marcescens
atgacgaccctgacaggacatgcaagactcaccaactccgccgcctacgagcaagtatggcaagcggagcgccaggcctgccgcaccgacgcagactccaacaccctcacggtcggcgtggtggtggtgacgcgcaacccggactttttccaaaccggactcagcgtactgaacgatatccgcgattatgttttcaaccgcgtgcatatccagtccgagctgccgctgaaactgttggatctggcagcggactcgctttatctggcagcgcgcgaaaaagctctgcactttcttaaaggccaaaacaaagcgatcaacgttcgcatcatccaatgcgccagcctggccgaggccaccggcaagatcatctatacccatgcgctggagcagcgtcccgaatttcatttgggcatgctgttctacgatcagaccacgccggccggcgtcgatgacagcatcgaacagatcgatcgcgatctggacgccttttacagcgccttgcaacacagcgggattcccgcgttttacacaaccttctccaccgtcgcgtttattcgccaactgcgatcgcccttccgctatctgccgcagcaatatcgcgaaatcgtgcgcagcgaagatccggcggtattccagaccgagcttttgtgcctgtggatggacttctttgaaatgaattacaccaaccgccgggtcaagccgatcggcgctctggcgctgcacagcaccctgggtgaacagctgattcagttcttcgaacgcaccgccgccgatcgctggctggtgtcctattacaccggctcgatcatctccaatctgatcggctatctggatcgccatgcggaggcgcgcggcgcgctgatcttgcgcggccctaacgaacacgccatcgcctgcggcgccatggccaactggcagttgtaccgcatgccgttcctcggcgtggtgacctccgggatgatggatgaattcaagggcacgttgaccaacctcaaggaaaccgccgcccaaggcatcatcgttgcggcggaaaaccgcagcaatcagtggtacagcttccagggaacgctgacgccaacggaagacatgcgtgaggtgcttatcgcccgccgcatcccgttcgtttatatcgatgacgtcgaagcgatcggcgccggcttgacggaagccttccgcctttatcatcaaggccaaggaccggtggtgattctggcgacacaaaacgtgctggagtcgaccctgtcgctggagggcaccgcctgcgatccctcgccgatcccggttctgtcggcggacgatccactgccgatgagcgaaaatctggcgcaggcgatagcattgatcaacaacgggccagagcggctggtgtggcagttgggcccggtcagcgatgatgaatacgccctgatccacgacatcgccgacgccgccggcatcgccctggtggactcgctggctcatcccggctcggcgccgaaatattatcagggccggcgcaatccccactacctgggcaccttggcgatttacggctacagcccgcgcgtctacaacttcctgcacaccaatgacaagctcaacgccatgagcgagcagagcctgtttatgatcaaaagccgcgtcgctcagatcaccacccccttctccgacggcaggctggagcgcaaggttcatctggtgcagctcacgcacgatgatcgccatctgtcgccctatgccgatctgcacctgcacatgaactgtctggcgttcctgcgcacggtgaaagcgcatctcgacgtcgatccggcattgcgggaaagacgccgcgcgttgatcgccgcctatctcgattcgccttccgacgtggtcagccagcttcccagtctgcccatgtcggccaactacttcttctgccagttgaaccgagtgattgaagagttgatcgaaacggaggggttcgattttaccggcgtatatgacgtcggccggtgcggcatctccgccgcgcgcaacgtcgccaaaacgcgccgcggcttttccggctggtatggccgcgccctgatgggcgacgctctgctggccaccggctacctggcttacaccagcccaagccacgtgatggcgtttatcggcgacggcgctaaagggatcgtaccggacatcctgccggcttttatcgacaacattctcacccatccgcagttgctgaataaaagcatcaccgtcttctatttatgcaacggcgggctgtccgtcatcaatacctatcaggaacgcattctgttcaatcgcacctcgcggcaaatgcggttggtgaacgtcgaacagccggacgtcgaacaaacggtcaataacttccatatccagagcaaaacgcttacgcatttcgacgaagacgtcattcgccaggcgctgaccacgccgcaccgactcaatctgttctccgtggtgctggggcacaacaatgaaggcgacggtatctcgctggccaccgccaaaggctggcagcgcgatccgagcgaccacgacgccctgcaggagcgcaaagcctgggcagcccaacagcccgaatcgaccagcaccgccttcgaccaagatcctacacaggaagccacctcatga

SEQ ID NO: 431014 - DNA, 2562 bp, Serratia marcescens
atgaaattcggattcatcgctcatcccacctcgctggggttgaaacgttacgtcaaaatgctcgatctgctgcaacgcaactcgaccgagcagcacagcggctatacgcgtgaactgtgggaacgacaaaacctggttccctttatgaacttcgccaggatcacctcggcgaccggcgccacttgcgaaggggtgatcaaatacatgccgctggtggcggatgaaatgctggccgacgcacgcggtatcgccgccagggtggtccaaggcatcgaagagctggccggcgatggcgccgaactggtcggtctcggcggttttacctctatcgttgggcgacgcggcgaagccaccgcggaaaagtcgccggtgccggtcacctccgggaactctctgaccacctacgccggctacaaggctgtgatgcagatccagtcctggctggaaattcgcccagaacaggaacctgtcgccatcgtcggctatccagggtcgatctgcctggcgctaagccgtctgctgctggcgcacggtttctctctccatttgctgcaccgcgccggtaaccatgatcgcagcgaactgctcagccatttgcccgaggagtatcactcgcgcgtcaccctgaccagcgatcccgaagatctctacccgcgctgcaaactgtttgccgccgcgacctccgccggcggcgtgatcgaccccgccagactgcaacccggctcgatcttcatcgacgtggcgctgccgcgcgatatcgcttcggaaacgcgcccggcgcgggatgacattctgatcatcgacggcggctgcgtcacggccaccgatgcggtcaagttggggggagaatcgctcaacgtcaccattaagcaacaattgaacggctgcatggcggaaaccattgtgctggcactggaaaaccggcgggaaaacttttcgctgggtcgttatctggcaccggaaaaagtactggagatcggcgaaattgccgagcgccacgggttcttcgcctatccgctggcctcatacggcgagcgcatcgatcgacagagcgtgactaatctcaagcgctactaccaccatgacatctatgccggagaaccggctgaggcggcgctgcccgcatcacgcctggcgtttatcgacgccgtcatcgcccaaacaccggccagggaagacaccctcgaccgctatcatcaatacatcaaccccatgatggtggacttcctcaagttgcagcactgcgacaacgttttccgcagtgccgccggtacccaattgtatgacgatacgggcgaggctttcctggacatggtggcaggctacgggtgcctaaacctgggccacaacccgcagccggtggtcaacgcactgaaaaactatctcgatgaccaaggccccaacttcattcaatacatttctatccccgagcagaccgccaagctggccgaagtgctctgtcgtctggcgccgggcaacatgggccgggtgttcttcagcaactccggcaccgaagccgtcgaggccgcgatgaagatcgccaaggcctcgacgggcaagccgggcatcgcctatctgcgcaacagttaccacggtaaaacgctgggcgcgttgtccatcaccggacgagacaaacaccgccgctatttcacaccgctgctggacgcgatggtggaggtgccgttcggcgatctcgccgcgctgcgggaagcgctgaaccgtgaagacgtcggcgcgctgatgatcgaaccgatccagggcgaaggcggcgtgcatatcccgcccgccggttacctgcaggcggtgcagcagctctgccgcgagaccggcgtgctgctgatggtggacgaagtgcaaaccgggcttgggcgcaccggcaaacttttcgcctgcgaatgggacggtatcgagccggacgtgctgatgctgtcgaaatccctgtccggcggcctgatccccatcggtgccacgctgtgccgagccgatctttggcaaaaagcctatggcacggcggaccgcttcctggtgcacagctccacctacggcggcggcaacctcgcctcagtcgtcgccctcagcgcgctgcgcgagatcctggcgcaggatttggtcggccatgccgaacggatgggcgcctactttaagcaggcactgagcgagatcgtcacccgctatccgttcgtcagcgaggtgcgcggccgcggcctgatgctggggatccagttcgaccaggcgttcaccggcgcagtcaacgcctccgcccgcgaattcgccacccggctaccgggcgattggcacaccacctggaaattcttgcccgatccggtgcaggcccatctgcgggcggcgatggatcgcatggaacaggcgctcggcgaaatgttctgcatgaaattcgtcaccaagctgtgccaggaccacaagatcctgaccttcattaccgccaacagctcgacggtgatccgtattcaacccccgctcatcatcagcaaagccgagatcgaccgtttcgtcggcgcctttgccacggtgtgcgaggaactctccacctttttagactag

SEQ ID NO: 431015 - DNA, 1017 bp, Serratia marcescens
atgcctttaaccaagcaagatgccgtcaatcagatgatgggctttttccaggccaaggcgctgaccgccgcgctggcgctgaagctgttcgatcagttgcgcgatcgggacgccgacgcggcgcacatcgccgcgcggcttgactgcccggcgcgttccaccgagcagttgctcatcgcgctgcgggccatggggtatctcgaccaacgagacggcctttatcatttgcccgccgcccaccgggcttttctgttgagcgacgaaccccagtggctgggatggctgggccgccacatcgataccttcctgtatccgctgtggggcgagctgaaaacggcggtgcgaaacgatgcccaccagcgccgcacggtattcggcgatgaccgcagttggttcgacattctgtaccaaaatccggacgacgtggcggacttccaggaatttctcggtaaattcgccgcgccctttatcgccggctttgttcgcgattacgacttctcgcaacaccgtgcgtttttggacatcggcagcgggatcggcagcctgccgatggcgatcgccgacgcttatccggggatcgcactcgcgatctgcgaactgccgcaggcctcggcgttcttgcgcgacaagctgacgctgcaaggctatggcgaacgcattgacgtcgtggagggcgatgtcatcagcggcgatctgccgatcggcggctatgacctgatccacctgggatggatgctgcacgactacgccccggaaacccaactgaccatcctgcgcaacatctatcgggcgatgccgaccggcggtcgcttcatcgcttccgaaacgccgctgaacgaagacaaatcagggccggaatttaccgccctgctgtcgctgaacatgctggtctccaccgacggcggcatagagagcagcgcgcaggaatacctggacagattccgtcttgcgggattcagcaacgcgcgcatcatgaaaatagccggcccacgcaccctgatcgtcggcgaaaaataa

SEQ ID NO: 431016 - DNA, 264 bp, Serratia marcescens
atgttagaaagcaaattgatccagcatatcgccacccagtatctggatggcgatcacgacggcctgaatgctcaaaccccgctgtttgaactgaacgtcgtcgattccgcctccattttcgatctggtggattttctgcgtcaggagtctcatgtcgccatcggcatgcatgagatccatccggcgaacttcgcctcggtgcaggcgatggttgcgctggtgcaacggttgcaagcgcaagtcgccgcagggggtgtcgcatga

SEQ ID NO: 431017 - DNA, 1947 bp, Serratia marcescens
atgagcgttcacgccgtcgatagcgccgcaaacgcgcatgaagccgtccggcagtcggtgctgcacaccttcgcccggctgaccgagtatgaaccgtcggcactggccctgaccagccatctggaaaacgatttgggcgtcgactccatcgcgctggcggaaattgccatggtgctgaaccgtcagttccaattaaatacgccgctggcgatccaggagatcaaaaccattcaggatgcgctcgacggtattttgcagcgcggtttcacgctgccggcgccgaacgccgacgcgcaacctgcccccgagacgcctcaggcctggttgagcgctctcgtgcgccaggtgttcgccacccacagcggatatgaagtgcgtgatctgacccccgacgccgccatcgaaggagacctgggcatcgactccgtagcggtggtgatggcgcgcaacgagttgctcaaaacgctgggcctggacgataacgcagcgctggcggagtgccgcacgctggctgagctggagcacaacctggcggcgcggctggttcaggaacagggcgaagcgtggttcagccgctttggccagcacaccgccgcgtccgccgcgccgcagcccaccaaggcgcccgcatcaccggacgcacgcgatgagctcggagatccgcgcaccatgcgggacttcgtcggcatcgagcacccggatttgttccataaaacgcgtgaattcggcgctttttaccgcgataaaaaacagcgtcagctttactggtacggcatgccgcttgaaacgccgtgcaaaaaccgcgcggtcatgttcgacgaggtcaccggcaaaagccgcgaatttctgatgttcggctccaacagctatctgggattgtcgaaccatccggaagtgatccacgccatccaggacgccgctggcctgtacggcgccaccaacaccgggtgccgcatcatcgccggcagcaacgtgctgcatctggaattggagcgcaaactggccaagctcaaagggcgcgaagactgcatcgtctatccgtccggctactcggccaacctgggatgcatctcggctctgaccagccgacacgacctggtgttcaccgacgccatcaaccacatgagcatccaggacggctgcaagttggcgggcgcgcagcggaaaatttatgaccactctttgaccagccttgagaaatcgctggccaaatacgccgatcaccccggcggcaagctgatcgtcaccgatggcgttttcagcatgcacggcgatatcgtcgatctgccgcgcctgatgaagctggccgaacgctacggcgcacgcgtattggtcgacgacgcgcacgcgaccggcgtcttgggcaaaaccggctcgggcacggcggaacacttcaatatgaaaggccaagtggatctcgaactgggcaccatgagcaaggcgctgtcgggtttaggcggcttcgtttgcgccgatggcgaagtggtcgaatacctgcgtttctactccaactcctatgttttcgccgccaccatccccgccgcagtcgccgccggcgtgatcgcctccatcgacgtgatgctgcgtgaacctgagcgactgaccaagctgtgggacaacatctactacttccgcacgctgctgcttaaagccggttttgaccttgagcattccgactcggccatcattccggtggtggtgggcgacgacgccaaaacgctgctgttcggccgcgccgtccgggcgcgcgggctattctgccagaccgtggtcttcccgggcgtaagtgtgggtgacgcccgcttacgcatcagcgtgaccagtgaacacacgcgtgaagatctggatgaagcctacgccattttggtggcggcggcgctggagaccggcgtgccggtcaacggcgatgcccagcgggaagagcgcgcacgcgccgccgaggtctga

SEQ ID NO: 431018 - DNA, 1476 bp, Serratia marcescens
atggcaaccttcatttcaccgatactggaggccctgttccggcacgcccgccaagcgccggaaagcaccgctctgctgtgcggcgatcggcgctggagctatcgtcgcctggccgatcgcgcctgcatgatggcggcggcgctgcgacatgccgggttgaagcagcaggccgtgctgctcaacctgcagaaagggcccgacgccgtcgccgccatgtacgcgtgttggctgagcggcaaccactatgtccctatcgatttcagccaaccgacggcgcgcatcgaacgcattatcgccgccgcctcacccgcgctgatcgtcgatgagggctggttgagcgcgctcgatgaccgcaccgatctcgatggcgcctggccggaagcgatcgccgcgctcggctctcccctcgccgccattctctatacttcaggctccacaggcaccccgaaaggggtgcaaatcacccatgacatgctgacgtttttcatcggctgggccgtcagcgatatacaactgacggcgcgcgacgtgctggccaaccatgccagtttcgcctttgatctgagcaccttcgatctgttcgccagcgtttgtgccggcgccgcgacctggatcgtgcgcgaagatgaacagaaagattgccaggctctcgttcgcggcttgcaaacgcacggcatcaccctgtggtatagcgtgccttcgattttagccatgctggaaaaaagcgcgttgctggcgccgtcgacggtgaaaacgctgcgccaggtcacgttcgccggagagccttatccggccgccgcgctgaggcgcctggttgcgcatctgccggcccggtgccgcgtcagcaactggtatggcccgacggaaaccaatgtctgcaccgcctacgcactggatcgaacgcagttggcgacgctggagcagatccccatcggccatccgctgcccggcttgacggcgcagttggtcgatgagcaggggcgtctgcagccgattgacggtacgccgggacgacgcggagaattgctgatcggcgggccgtgcgttacccccggctacagcaacgtcgcctcatcgcggcaagcgcaatggcatccgcgccaatgccacgcgaccggcgactgggtggagacgacggcgaatgggctggtctaccgcggccggctggacgacatggtgaaaatcaacggctaccgggtggaattgggggagatagaatcgatccttcatcaccatccctcggtcagccaggccgcactgtatgtcgagctcggcgagctgaagcaaaaactgatcgccgtgatcaccctccatcccggcgcgctccgccccaacctgctggagctcaagcagttcctgcagcccaggctgcccgcctatatgctccccagccaactggtggtcgccgacagcctgcccaccaacgcgaacggcaaggtggacagaggacgtttgtccgaggtgaatgcgcgatga

SEQ ID NO: 431019 - DNA, 2289 bp, Serratia marcescens
atgaaccaggaaattcatgccgcgccgctggcgctggtcggcatcggctgcgcactgcccggcatcgatcgtatcgatctgtccaacggcgccgcctggtcggcgctgttcgacgccccgccgccgatgccgtggagcgatgcggccgcgccgatccgcggccgccagatcgacgacgccgcgtttgatttcaaaaaattcgccatcccgccgctgtttcgactggcggtcagccgcgagacccgcctggcgctgcaggccgcctccgccgccatgcagcatctgacgttatccgacgcgttgcgcgaccgctgcgatcaattttgcgccacccatttgggcagtgatgcggcctatcgcaacgccaccaaaatcggcgcgctgcgcaggctggccgaacggcttgacgctcaggggctctcaccggcggcggtcatgcgccggattgacgattacaaacagccgctggcccaggcgttcggcagttcatcccacgatcgcgtaggggaaatggcctccagcattcccgcgcgcatcgcccatttcgcccgcacgcgcggtaaatgccaaaccctcgacggcgccgatctgggcggcctgcgcttgctgcagctggcgcaagactgttttcgccatgccgacagccgcatggcggtgctgaccgccgtacaatgcttccaccatcaacctcaggcggacatgctgttggcgcagggcgtttcctcttcggcctgttggctggagggcgcgatcagcctggtcgtttgcccgctggacgtcgctcaggaacagggatggccagcgatcgcacatttgtcgaccctgatcgccgaaaggcaggatgccgcgccgagcgccggctattttgccggcgccaatcaggttttctgccatctcctcgacatgctgttgcaacggcaacaggcatgcgccggccactcgttcaccggctaccgctggcggatcgacgcggcgtctcccccctcattaaaaccgacggcttcgccacgcatcagcatcatcgactatcagcctatcaccgcgcaggggctggataaagcgcgtttctggcaggccttgcgcaacggggaggacgccctgtgcgatcacagccccgagcagctgcaccccggcgccttcgtgcgacccacgccgcaaaagctcagcgcctacaccgctcacgccatgtgcttcccaacgcacgatccggtgcggcttgagctgacgcggcctatgatgccggccaaaaaacagcgcctcgacgtcacacaactgcacgccctcaacggctgcgcggcgtggcccgacagcctgcgacgctttgaacgcatcgccattatcgtcgccagcaacctgtctttgagcgccgatcgacagcaggccatgcgcgccctgtggccggtgttgcctcccgccggcgtctccctttcgccaccgccccaacccgcgatcaaccgctggagctggcatggcgcctgcggcctcggcaccgcgcagctgttggcgcaacagctcggcgtcgaggcggactgctacgcggtcgaggcggcctgcgccagttcgctggccgccttgcacaatgcggtcagggcgttacaggccggccgctacgatgcggtgctcgtcggcggcatagaaacggcgacgctcgaacgcgatatggtgctgtgcagcgcgcagatgatgctttccgcttcgcgtatgcgacctttcgcccgacaagccgacggttttactcccggcgacggtggcggcttcttcattctgaccggccaggcgacatcgcgggccatcgccaccatcgaagcaatatcgggatcttgcgacagctattccatgaccgcgcccgatcccgagggccaggcgttggcaatcgaaaaaacccagagcctgagcaccgtcgaagcgcgccagatacagtatctcgaagcgcacggcaccggcaccgaactgggcgatcgggcagaagtcgcgtcgttgcatcaggggtatcgccgcgccgcgcgcgcccctttgtacatcggttcggtgaagtacaacttcggccactgtttcgccggcgccggcgcgctcagcctgtgcaaagtgctgagcgctttcgaacacggtcaaatcccgcccacgccggtggcgacattgaatgccgaactgccgctggctgcgatcccggccgaaatcccgcaaatcgcgctcgactggccacacggtgaaggcggacgtcgggcggcgatcaacggctttggcaccggtggcatcaattaccatttgcttatccatcaacccgtttaa

SEQ ID NO: 431020 - DNA, 315 bp, Serratia marcescens
atgcacattatcgtccataagattcggctaaaagacatcgcccaccgcgccgcgtttcgcgactgggtggagacgaccgattaccaggcttgccgccacctcgacgcggtacgcgccttcgatgtcatcgaagtcagcccttcggcggaggcgccgtttcactttatcgaaatcattcagttgaactcgctgaaaatgttcgagcgcgagatgcaaaccccactgtttcaaagcctggttgaacgctttaatcagttggcggaagtcgttgacgaaatcagcggagaacgcatcgccgatggttatcgagcttag

SEQ ID NO: 431021 - DNA, 648 bp, Serratia marcescens
atggttatcgagcttagcgtggcaccacgtatcgttatcgcgctgagcggcccccaccgctgcaccgccgttcgaggattgcggcatctgtcggcggtgaaaaaccacgcgcgggcacaggccgtcgcgctgctgaaccggacatggtgccggggggacgagaccggctttacgctgcgccatgaggcgagtggacaaccgttcggcgaacacctcctgctgggacgccgccacgtttccctcagccattcacatacctggtacgccagcgctaccggcgatattccgctcggcattgacctacagtattatcggcccttctccggcaccgcgcggcgctgggcctttagcgaagcggagcagcaattggggtgcatacaggcctgcgccatctgggccattcgcgaagcatttttaaaaagccacggccgcggcctgccctacgaattgcggacgatcggcatcgactggcacaccgggttggtctcaagcgccgacggcagtttggcgagcagacgcttctggctgtggcgcagcctggactgggcatgcgcactctgctttccggcggaggagagcatgtcgttcagagcgaacgttaccgtattttccctgcccgccccttccgctttcggagccttatcatga

SEQ ID NO: 431022 - DNA, 1059 bp, Serratia marcescens
atgacccaagaccttttcgccgcagcgctgcaacaggcagtggacatcgcgcggcaggccccctcctcacacaactgccaaccttggtctctccactatgcccccgcagcccgatgtggccggttggctatcgaccgccatcgcgccttacggagtctgccttctctggaacgcgagatgctgatgagctgcgggatcttcttcgagtacctcagcgcgctgctcaactatgcgggtatgcctcttacctggagctgggaaaatgcccccacgtatttactgagctttgcgcccgccgcacccgccgcacccgatcgcaccgcccatcgccaacttacgcagctgatcggcgatcggcataccgcacgagctgcatatcagcctacaccaatcaatgaagcgcagaggatgcagctgcaaaccttgttcgacggaaccgcgagctcactcagcatcgcagatgatgaacacgctcgccgccgggtcgctcagctcattgctcgccacgccgcgctcgatttctcggatcgacaagcctggcgggaaacctatcagtacatccgtttcaacgaacggcaacctaccgaagacggtttccacctgcatcacctgtttggcccggtatcccctgcattcaagcgcttcttccaattggcgtttcaccctcgcttaagcgggctggcgaccgggctgcgcttgcccgcttacatggcccaagggttggcacagcgcgtcgcggaaggcccgcaatacctggcgctgtgtctgaacgacgaaagtgccgagaacctgttcaccaccggcatgcaacttggacgcctgtggctcacgctgcaacactggggttggggattgcatccgcttagcgttctggtgcaacacgccgaggcgcagtgtgagctcgcagcaaccctggagctcgacgctcccccggttttttttgcccgtttcggccacctgcaacaactgggcagcgcaacacccagacgcagttggcaaagcattctgaccgcaccgccttccagtgagtgcgtgcacccggggaacgattccccttaa

SEQ ID NO: 431023 - DNA, 729 bp, Serratia marcescens
atgaacgtatggattgctttagccgttgttttgttggtccttgcgctgctggcatttatcaccagccgcggcgcacaggacacccgcccgatgttcttatgggggttcaacgctatgggtccggttaccctggtctattgctatttcggcgagggcgatctgagccacaaagccctgatccttgttatggtcggtctgtacctgctacgcatgaacatcgtgctgacacgctggtacggcaacaccgccgccgccaaactcaaagatgtgatgcccacgcagcaggtaccgtggctggcggtgatgatggtcatgatcttcggcggcctatattgcctgcccttctactgggccagccaatttcaagggccatggggcgcactgcaatggctgacccttggggtctacctgataggcacgctgttccacttcggcagcgattaccaaaaaaggcgcttcaaacaggatccaaacaataaaggccggctgctgaacagtggcttttgggggttggcgcgtcatccgaattatttcggcgacttcctgattttcatcagcttcgggctgcttgccggcaacctgtttggccttattgcaccactgaccaacctagtacaatatttcgccgacgccattcccaaaagcgagaaaatggccgagaagcgctacggcgaggtctggcgcaactataagcgccaagtgaaatgctttatccctttcattctataa

SEQ ID NO: 431024 - DNA, 729 bp, Serratia marcescens
atggttaacattcgagatgaatttactgaaaaagtaaagaaaacccttcaggaaagagtcgctaatcgttgctctaacccaggctgtaactgcctaacatctgggcccaattatgatgaggaaaaagctacgcgtattggtgttgcggcacatataaccgccgccgctcagaatgggcctagatttaatccatttatttctaatgaagaacgtaaacatatatcaaatggaatatggttgtgtcagaattgtgcgaaacttattgatagtgatgaaaaaatctatacagaagttgtgattcgtgaatggaagagtctaactgagagtaaaattagacaagagcttgaaggtagacatttagaagatgaagggccagaaccccctggatggtactgtggccactgtaattcttttgttgcccacggtcagatggtatgtactggttgccaagcagaagttgcgtatgaggctacaaaacatgaagttactaatgccagggtacggggaggaactcttggagcactcgtggggggagtaattagtttcggggtcccaagtttttttaattctcactttaatttttccattccggatggatgggggctcggtatatattcactgtatattattgcagtgccagcaatgctgggggttattttattcgaaaactttgaacgaaataaatttcgtaataagcccccaaggttttttcggcaacgcaatatttaa

SEQ ID NO: 431025 - DNA, 2004 bp, Serratia marcescens
atgtttgatggccttattcgcgaacaggatattgcttgggcagtagcactgatgggagtgggagccgatgggtttgctccggtcggcgatgatgatagtcggctaaaagcaatgctaaatctcgaaacgaccgatttcgaggcatgtccgggaagtggtaagacaacattgcttgttgccaaactagcggtactagcgatgcgttggccataccgccagcaaggtatttgtgtactttcacacaccaatgcagctcgtaacgagattggcgctaaactcagcaactcagctgctggaatcgcactctcacgctacccacactttgttggaacaatccattcgttcgtcaatgagtttctggccctgccatggctacgctcgaagggtataactgtgcgctgtgttgacacgcaaatcgcccttatgaagcgctggaatatgcttccgaataatacacgttgggcgttacagcagaatcgattaacagaagcatgtctaatctacacacagcccgaatactctggtggcgctactggcagattcgggccacagactccgacttatcaggcgatacttgaggctcgtcgcactattagcgagcaaggttatttctgtttcgacgagatgtttgtgtgggctaatgagttgttggacaagaatcctgaggcagcaatggatctacgtcggcgcttccccttagtattcatagatgaagcgcaagacaatagcgaggaacaatcggcactattgcatcgtatcttctgtgctggcgattcaccatcgcgacggcaaagattcggcgattcgaatcaagcaatctattcgcgagcgggactcgaaggtgctagtaccgatccatttcccggctctgtcgtccatgttcttccgcgaagctatcgcttttcccaagacatagccgataaagtaaagggcctcggcgtcgcgccgcaggcattaattggcgctggtccaccggcccgaataaatgccgaacccaaagccccaacaatctttctcttcgacgatgcatcagtgcaattagtccttccccgctatggcgaatatcttattgaatcctttgatgcagcagctttgaagtgtggtgtgtttactgcaatcgctggggtccacgagctaaaagaagatggcctcgtaccccatgccatggggcattacgtacccacctatgatccctgtagcgtacgaaaggaagcaactccgaacagtttcgcgcaatatcttacacgagcatgtttcgagattatgggcaataacaactgcgaaaagttggtgaatgcaacagcctcagcattgctagccgcatgtgagttgtcaggtagtatatacagcagaatatcgcgaaaatcaccgcatcgtcgagttgttgatcttttaagcgagaccgaggtaatcacaagctatagggcgttgcaagagatgctcctgacaagccgtggaaatattacacaagatgattggaacacagaattactcccattaattgtgtcatgcgttaagcagttgagcggctcttcagtacttggcagcagtgtcactgatttcctcgcctggccacaggtcaatacgttgcaagggggggaggcaattctcacgcagagcactaattttgtatcttatccaaaaacttctcctcaagtacaaatccgactagggtcaattcattccgttaaaggcgaaacgcacactgcaacgcttgtacttgatagcttctacttcaatcatcatctgtgcgaactaaagccctggttactaggaacgaaggccggtggttcgagagttaataagagagggacaacagtatttgaggggccacgtatgcttggtcgattgaagcttcattatgtagccatgacccgcccaactcacctcttgtgcctagcgatgcgcaaagacgcgtttgtagatgaagaacttagtgtgctcgcaggtcgcgggtggaacattatcgattgttgtgcttctataatccctaaagactattga

SEQ ID NO: 431026 - DNA, 2022 bp, Serratia marcescens
atgtacatatcagaaattcgaattgagaactttcggttgtttggagccgccgaaaacgcctttgtactaacactaaatccagggctaaccgcattggttggagagaatgatgcaggaaagaccgctgtgattgatgccatccggttagtgctaggtacacgtgaccaagattttctgcgcattgacaccagtgattttcaccaagccactccgcactctgaacgcgcggatcaaatagtaatccgactgacatttagtggacttacggcggcagatcgtggtgccttttcagaatttctgacctatgaaacgattggggaggcagtcgaaaccgtactcatcatcacttgggtggcaaaacgcaatactaaagaaggaagctcacgccgggtgcttccacccgaatggcgtactggcgctataggggatggaccattgcttgatcttggagcgagatcgctattgacggcggcttatctacgtccccttcgcgatgccgaacgtgcgatgagcgcaggccgaggatcacgattatcgcaaatcctacagcacacaaaggaaatacgtgaaacaggaaatgctttcgaccgacatatcgatccgccagttgacccgaaaactttgagtattctcggacttggagattatgccagctatttatttggtgagagtgaaggtattaaacaagcacgcaagcgtctcaatgaagaatatcttgctccactgtcattcgccaacgatatgctgctagcacggataggcgtcgccagcacacaggaagataacctccgattacgtcaactactcgaaaaacttgaacttaccttgactggttcggccgaagtcgataaccatcatagtaggggacttggctctaacaatctgctattcatggcttgtgagttacttctgcttgcagccgaaagcgacggttttccattactattgattgaagaaccagaggctcatctccatcctcagcgccagcttcgtcttatgtctttcttgcaagaacaagcaaaaaaagaacgcactgaccatcaacatatccaaattatcgtcacaacacatagccctagccttgcctcagaactgcatcttgacaatatagctttagttgaggggggccgagcctttccactatgtaaaggtaaaactcagcttagcccatcggactatcgcttccttgaacgcttcctcgatgtgaccaaggctaatctattatttgctcgggccgtaatgattgttgaaggcgatgccgaaaatattctattgccagtgttagcaaaacttctcggccgcgatttccatcaccacggcgtgtcagttgtaaatgttggtggcgtcggtcttggtcgctatgcacgaatcctcatgcgccaagatcccgagaaggacggaatgattaacattccagttgcatgcatcactgacatggacgtaatgcctgatttagcaccatggatcgtcggcaagctcgaggaaggtcaacaagtaccagttataccgccatcgcaacgacaatggcgaattaaagcagattttcccggtaatgcactagagcagcgccgcattaatcgacgagctaaagcgtcgggtcagaatgtcgagagcttcgtggcggatgaatggacactcgaatatgatctcgcttttcacggcctcggtaagcaaatgtatcaggctgcgttgctcgcactagctgacgatagactcaacgctggtacagtcatcaaagccgacattatcaatgctgctgacgcagcctatgagactatcgtggatagttctactgaccgagagatactcggttcgcatgtctatgcgttattcgagtcgaatggagcatcaaaggcaatcgctgcacagtatatggcagagctattagaaaatgacattgaatcaggcaggatggattcgaacagtctgcttaatcaattacctccttatatcattgcagcgatctcgcatgtaactacaccattcgatatagcgatcaatgacactgcaactgaggactga

SEQ ID NO: 431027 - DNA, 543 bp, Serratia marcescens
atggataagtcagtaataattagaagggcatttgataacgatgctgagacgttaggtgtggttggtcccgcagcttatgcagcggcataccactacctgtggagtgacgttgttgccctgactcatcagcttaatactttcagcaagtcagcattcttagcactgttacagcgacctgactcgagggtgtgggttgctgaaattgagggtgaaattgttggctttctaacaatgttaatcaattcgaaaaacccaattacgcatgatactggaggggcagaaatttccagggtttatctacttcctggatgtcagaaaatgggaatagggcagcaactattgaatactgctcaagaatatgccaaaaaaattgaactgacgcatatgtggcttgatgtgatggcctccgcaacagcagcaaggagtgcatattgtaaatggggtttttcagatatgggacgtaaaaaattttctcgccgagtaaaagaagatttatccgaaatggttgttatgggcttaaagctaaatgctaaagatttgtga

SEQ ID NO: 431028 - DNA, 405 bp, Serratia marcescens
ttgagtaccttaaagataaaagatttgtttgagtcggtactgttgcaatgggcggaaaaaaacaatatcgactatacgttggcaaatttccctgttgagggaagtgcggtgttgcatcttgagccatttattgttcctgcagtcaatcagggggtcggtgtttctcaggatgtgacgatatacagcggtaattatcaggtcaatattgtgatcaaaaaaggcgaggggagccatgatggctatctgttagcggagcgggtgttgtcactttttcccaatggtgctgagctttccgatgattatttgagctgcagtattaataccccggccagtattttacctgctattcaaaaagaagatagctatatcattcctgttagtatcagttattggtctcagtcatga

SEQ ID NO: 431029 - DNA, 807 bp, Serratia marcescens
atgaataataacccggttggctacggtccggtttttatcactggaggaccattcaaaggaagggtcggactttatgaagatgacactatttacgatagtgagattaaagaattatgctacttcaaaggaaggaaaaattcagaggtggcgatagtatattttggtgattattttatttcaccgaattacttctatgtgaaccccaaggatatgcgctttgtaacaacacatgatttgttaacaaggcgcgagtgtttatataagttattatctaaatactcagagcctatatatgaaaacatggatgaagacttgtatgaactagatagccatgaaagcttgcaagaactacattttatagatttgttgttatcggaaaactatctttcagtaaggtttaaaaaagatatgataggaaagaatatttttatatcacactcgtctaaagataaaccttttgttcggaaggttgctaccgatataaagttgtttggtcatacgccatggcttgacgagtgggatatcagagtcggggaatttatccctgaaaaactgtcaattggcattgaaaatgcggactttattatcgtggttctttctgaagcagctatgaaatcaaagtgggtagaacgagagtggcaaacaaagtattgggatgaaataagtaacaacaagatacatattttaccgatactttatagtgattgtaatattcctacgttgttgaagtctagaaaatatgccgactttagaagtgattataacgagggtattgaaggtgttttggatgctataaataatctttag

SEQ ID NO: 431030 - DNA, 195 bp, Serratia marcescens
atgtcatcgaaatcccgcgtaacccccatagcctcccatactgaccaacagcacgttaaggaacagcgcctgaaagaaatgcgagccttccacgaagagtggtgggaacaaaggcgccgcgaatggtgtgaacgcggcggtgctgaagccagtgaagcgcccgtcagtggcatcgatagcgaactttcatcctga

SEQ ID NO: 431031 - DNA, 2169 bp, Serratia marcescens
atgtcagaaaagaaccgtgtgaatctttcaggaagtgataaaaccgaagaaattgatctggggcgtctatttggggagctgttagataaccgctggctcattataggcgttacctccgtgtttatcgcccttggtattacttatagtctattcgcaactccgatttatcgggctgatgcaatagttcaagtagagcgaaatgtgggtagctctttacttagtaatatctcgcaaatcttgcctaatgggcaacctgaagccgctccagaaattgagttgcttaaatcgagaatgattttgaacaaaacgattgatgatctgaacttgagaacaatcgttaaagaaaagcattttccgtttatagggaaaggtttagcccgcctgacggggcagccggtatcaaacttagatgtggcagagtttattccttcagattcgtgggatagcgattctcatttagaacttgtcgtattgaataaaaatgattttaccgtgtctttgggtgatgggaagtctgtacagggaaaggtggggaacgtactaacgatcgatggtaataccattttagtcgaacgtattgacgctaagccggatacagtattttctataacaaaacaatctgaacaaaaagcattcagtgggcttttggacagatacaatgttgttgacaaaggtaaagacaccggggtacttggtctaactttaacagggagtgatcccgccaaagtagaagcaacactaaatagtattctgcagaactatgtttatcagaatgttcagagaaagtcagaagaagatgcgaaaagtttagattttctacgcgtgcagttgcctaaagtacgagtctctcttgatacttccgaagataaattaaataaattcagacagaaaaatgaatctgttgacctttctcttgaggcgaagtcagtcttagattcgattgtctcagtcgatacacaactaaacgagctgacatttaaagaagctgagatttctaagctatataccaaggaacatccctcatatagggcattgctggagaaacgcaagactctggagatcgagaaagataaactcaataagcgaatcaatggaatgccgcaaacacagcaggaaatattgcgtcttagccgtgatgtcaaatcagggcaagaggtttacatgcaattgctaaacaaagagcaagagctgaatatttcaaaagccagcaaagtcgggaatgtaaggattatagattcagcaattactcaagaagatcctgtaaaaccacagaaggcagttatacttttcctaagcttcttcttcggtattattctttcagtcttctatgtgctgattagagcctatttacatcgcggtattgaaaatccagaggagctggagagtattggtgttaacgtttatgcaagtgtacctctttcagagtggcagcgtaagcgagatcaagagtttactgcaaaaaataaaaatagaaatgcagactcaaatacgttattagcatttggtaatccagctgatttagcaattgaagctattcgaagtctgagaactagcctgcattttgcaatgatggaggctaaaaataatatacttatgatctcaggtgcaagtcctgggattggtaagacatttataagcgcaaacctggcggctgttgtcgctcagactggaacaagagtgcttttcattgactgtgatatgcgtaaagggtatgcgcatgagttgttgggggttgacggaaaaaatggattgtcagatgtcctatctggaaaattgaccgtcgatagtatcatcaaaaaggcgaataattttgacttcatagctcggggaatggttcctccaaatccatctgagctgttgatgcacaatcgtttcccagagcttcttacatgggcatcaaagcattatgacctcgtagttgttgataccccccctattctggcagtaaccgatgcagctattgttggtaaacaggcgggcacgtcattaatggttgcaaagtttgagcaaaacactgccaaagaagttgagatcagtataaaacgtctcaaccaaaatggagtggaaataaaaggtgttatactcaatgctgttgtcagaaaatcttctaactattatagttatggatatgattattatgattacagttataaatcatcgaaaaactga

SEQ ID NO: 431032 - DNA, 1149 bp, Serratia marcescens
atgttcaaaataatttcttttcttgcagtattctttttttcattaagtacatttagttatagggctgcagctcttggatatttttttctttttctgtctatcgctccattttggaaaaaaacgttggtagtaaaacgtagagatattttttattttttgcttataaatatctcagttattgcatgttcgctactacaaaatatctactggatatactatgtcaagtttttggggatgatatttttcgcatcaactctctatgtgatgtacacaagtaacataattaaaatttctgatatcgagttttattgcaaagctttaatcattgtcaatctcacatttttccttattcagctaattgcatatcaagcatttggccatttcatcgattttaacaatatggtaagggaacaggaaagtacgacgctgtatgcatcgagagccttgaatggtttcatactttcgataagagctaccggtttgtattcagaaccttctttttatagcatgagcgttttctgtcctacgatgattctcatgttgttaaataagaaaataaataaatatgttctactggggttgtttagttgcgcattaagtttatctatagcatcactggctattgttgcattggcaatgattattcttttctttagattaaagaaaaactatttattaaaaggcgcggttatcgctgttattgtactttcggctccttatttaggtgatttttacacaaaaagaataaccgatgattctgattatgatgctatatcatcgaggcttttaatccttaaagagttcgaagcacgcgattttatcaacgatatagttggcagtggatttttttgggccgaggatgaaccgattggtaaaattgggttaaaaggatatcatactcgtgattcatcgttctatccctatatttatttctctggtggtatatttggcctgcttttattattcttctttttgtcacggctgggactgaagaatcttgacatcctctatggagttataattacgctactatttaaattcaatatattatcttctttcttttggatatttatcgtgttctgcaaagcgttggctactgaaagaagaaaaaatcgttcaaatttagagggtgaacatgaaatcacataa

SEQ ID NO: 431033 - DNA, 1203 bp, Serratia marcescens
atgaaatcacataaagaaataagtatctgtgttatagattacgcgttggccggaagtttcttcttgcgtttagctgcctcagacaaagatagagagtacatctttgtatccacactgttaagtacatatttggcagcgcgaaaaaaacatgacgcttacttaatatcgaaagtaaacaaagtacaagaaaaagataaagttactagtcttcctgtcaatagagtgagagagcttggcttaaatatttttcagcatgaaaatgcaatggagttcgcctctgtattacaatcttcaataagaaaaatattggataaaaataaaaacaaaaaggtaaatttactgacgtggaatggtgataatgtaataggtgctgtaatgcgtcaagctaaaaaagcagacaatacggttagcctgcttttttttgaattgtcaaatttaagaggaaagatatttgttgatcctgagggggtaaatgctgcatcaagtgtgtatttaaaacctgaagtattgcagaatattccatccgtcgatgaaggcattcatgatggctggctgaaagatttttttgaagaaaaaaaagggaataaactactaccccaagcatctaaaggtaaagagataacacttaggcatctaattgattttgtctatacaaaattctggggttttcaaacattccctaagagctcgataagcaataggattacaaaaaaaagaacacatgaaattaatgacgataaggttattcctgatgagtacatttttttccccatgcaggtgtcgacagatactcagatagtactaaatagcgatgttgacaatgttgatgtactaaatcatctcattgaaaaagagattttacctatcgtaactaaacctcatcctgctgaatcgaactttgactatatatacaagattaaaaatgagaaccaagggaggttgtttatctcgcagaagaatacttacgagctaattaaaaacgcaaagtgtgtatatacgataaattccacagttggaatggaatcgatgttatttgataaaagggtcgtatttatggggcgttctgtatattcaaatatgggacccactgaattaaaaaaatacttacataattaccttgtagacatagacttcttcgatgaaaatttcactataacacctaatctcattgatagtgtttattcaaggcgaaataatggataa

SEQ ID NO: 431034 - DNA, 543 bp, Serratia marcescens
atggataaatatatagttgcattaaaggtggtgtattctggctgtcgagttctactaagtaagcttatttttagacgacgattttcaacagaaaaaatatttttcactacagatcttccacatattagatgcagaggaaatggacgaatatacattggaaatgtgaaatttagaaatggctgtagaatattttctgatggaggcatgatctcaatttcagacggttgtttcattaataatgattgctcattcaatgcaaagggtaggattgaaattggtgaaaatacacttttgggcgaaggtgtaaaaatatacgaccataatcatcgcatcggaaatagctatgttgtatccaaaattaagtttgatatctcagatgtaattataggccgtaattgctggctcggctcaaatgttacgattttgaaaggggtaaaacttgctgacaatgtgataattggagctggtagcgtcgttacaaaaaatatttctgagcctggcgtgtacgtaagcagtaatggagggttgaagaaaataaaatga

SEQ ID NO: 431035 - DNA, 975 bp, Serratia marcescens
atgccaacgctatttaaagtaacagctatagccaggatcgctggcatcctggccttattattttccttttcagcccaaagtgagggcgattgctatgcgatatggcatcatccgctaaaaatcgagcaatccggcattaccgtcccggcaggcgctaaagtcggcgatgttatcggtcgtggagaatcttacttttccgtcaggctgttggctaatgccatacagttctcctttggcgaacccggcgatctggtgttgcaagcctatacccacttgagtgcgacagcattacaataccacggtattcccgtctatcagactggttggcagggggtcggcattgccatgtcgctcaatgaccaaccggagctttgggatatttatgcgccgcgtaatacacccgtgaactatgttcttggcggaaattttaaatattatctggtcaagaccggcgacatacaatctggtgccatgcctgcattttcccctttctcctttaactatacttgcttgagagcaaccaacgccagacggctgggtgagacctattttcctgccgtcaatatcgcagtggaaggttgccgcctcagcacgccgtcgaaacaggtttttctgggaaaaatcaaccggcggacgctctctggtatagggggcactgcgggaaataccccttttaacatcacgatggagtgcaatgtcaacactaaagtcgatctggagatacgcggtgacatggttaatggcaatcgtcaggtattggccgttatcccatcaaaagaggcggccaccggcgttggtctgcagatactgtgtaacggcattccctttgagttggggacgaaaaccggcatgctaaaccagacgctggtaggtataaacgaaatcccgctcagcgtgcaatattatcaaacggaagaaaaagttacgccgggagaagtcaatgccgtggcgcagttcaccgtatcctatcgctag

SEQ ID NO: 431036 - DNA, 990 bp, Serratia marcescens
atgataggaagaaaattattaaatagagcaaagttaatattgaacggaagtatctcgattgctctggtgtttttatactcagaaaagacttatgccggagatgaagactgtcgggcaatgtatcatataccgccatatattagccagagtccgatcgttgttccggcagatgcgccaaacggggcggtgctggggcaaggcgaattcaatttttccgttaaagtactgtcaaatggcggagcgattctgggatacggccattttgtggtgcaaccgttcacctacctgacctcaaccggttttaaacacaatggtatccctgtttataaaacctcttgggaaggcataggcattgcaatgtcattaaataatcatgccggcattccagagttttctgggcctaatccaacgccgccttattatatactttcggctaattttaaatactacctcgtaaagataggagatattaaatcgggtgtgatgccgcagtttgagccatttctgatgaactatgcatgcttgcggattgccggcagagcatttagactcgggcatccaaagtttcccgctaccaacgtctcagtagaaggttgtcgattaaccacaccaaccaaatacgtccatttgggagaagttaataaaaaagatttctccggcattggaagtaccactggcgaaacgccattcgatatgactttagagtgtaactcaaataccaaagtagacctggaaatcaaagggcaaacggtgagtggcaacagccaggtattggcgattaatcatactgacgaagcggccaaaggcgtcggattgcagattctgcacaacggcgttccatttgatttaggcaacaaaattaatgcattagatacaacgctgctcggacagaattcgctttcttttctggcaagattttaccaaacggaggcgaacataacgccgggagacgtgagtgccatcgcccaattcaccgtttcatatcgatag

SEQ ID NO: 431037 - DNA, 210 bp, Serratia marcescens
atgatgaaagcagccgtgattatttacataatgatgttcgcatctgttctgttgatattatcaaatataaacacttactggttttgtgagcaatcttgcaatcccattcaagacaaaaaaaatgccccacaggagttcaatagagacaccatgtcagccgaaccgttgttatcttcatcactgcatggtaaacgcttcattagcggttga

SEQ ID NO: 431038 - DNA, 2472 bp, Serratia marcescens
atgattatgccaagtatcgccaacaacaaaaagtcggtgctatttttctgttttttatcctcaccggttgcactggcagaggactactttgagccttcagcattaaacagaaattatcagaaaattgctgacttatcccatttcaacaatccgagcgatcaattgcctggtgagtattgggtggatatctatttaaacaacgttttttttgttaatcaaaaagtggagtttttccgcgttgccggtgctttgcaacctcgcatccatcgaagtgatcttgaaaatttcggcatccaacttgacgcattgaaagtaacgacgagcgaaaacagtatagcctctcaccctatcaatgagatgattccgggcagctatgcaaaatttgacttcaatcgccaaagattagacttaaacattcctcaggcttatcttaaaaaccagccgcgggattgggtaaacccgacgctttgggatgatggcataaacgccttcctgatggattacagcttcagcggcaccgagtcttggcaacatgggaatgcgaaaacgggtgacaatcaatatttgaacctgcgcagcggtgcaaacttcggtgcctggcgattgagaaactactccacctactcaagccaaaacagcaccaaatggaaaagcatcaattcctatgctgagcgagggtttagagacagtaaaagcactttgaccgtgggtgatagttcaacctctggcgacgtctttgacagctttcaatttcgcggcctgaaactcgctagcgacccctcaatgatccctgacagccaacggggcttcgcccccacggtgcgaggcgtcgcgcaaagcaatgccgaagtcattgtgaagcaaaatggctacatcatttatcaaactcatgtgcctgcaggaagttttgaaataacagatatttatcccaccacttccagcggtgggctgcaagtaatcatcaaggaggcagatggttcagaacgcggtttctttcaacccttttccgcagtgcccatcatgctgcgagaaggcatgaaaaaaaatgaattaacgctaggcgagtaccgcactgcacaacacgataaatctaaatataaatttcttcagcagtcattaatttatggtcttagagacgataaaacgctctatgggggcgcaatcatctcagaaaaacaccagggaatctcttccggcatcggcagcagcttgagaaagctcggatcattttcagccgatgtcacccatactaaaagccggctcattacgggcactgcccgttcggggcaacaatatcggatccagtacgcaaaaaaccttgaaaccacgggtactaacttcacgcttgcaggatatcgatactcgacatcaggctatttaaacttttctgaatttagcgacatgaataccaaccttgagaaaaagtggcttgcgcgtgacataaaaagaagcaagctggtactcaatattaaccaacccattcgcgatttcggtagtttctacctcaacggttatcaacagaactactggcataacagcagcgttgagaagaattttctgcttgggttttcaaccagtcagcgcggcattagctacaatcttgctttgagttacaatagcggcccttatacggataaacccgacaagattgccacacttaacgttcagatcccgctgaacaaatggcaatcgaacagctgggctaactataccgccagcaagaacagcaagggcaagttcaatcagcaagtaggtctgagcggaacggctcttgaatataatcagctcagttataacgtctcggcctcacaaagcagtaccagatccggaccatccggcaacggctccgcttactatcgcgccgggtatggtgaagtcggggccggatacagctttgatcaaaatatgcagcgggttaattacagcctacgcggcggcgccatcatccatggcaacggcattacattatcgcaatcgctgggtgatactgttgctttagttaaagtacccaatgcccataatattgaagtgattaacagtgtcggcgtcaaaactgactctcgtggctatgcggtagtaccttacatcagcagttatcataagaatcggattgccttaaatccgcaaagctttggcgacgacattgaaatagcaaagaacagcaagattgtcatcccgaccaaaggcgctgttgtaactgcccactttaaatctaacatcggcaatagaatcatcttaaagctgcaacacaacaccgacgcaatcccattcggcgccgtcgctacgctgcaaggagaaaacgaaacgacggggatcgtaggaaatgataatagcgtttatatgagcggcatgcctgactcaggaacggtgttggttcattgggaggggaagcaacgctgccaaggcaattatgctattacagctaaagagtctgaatcaaaaataaaaatgctcaatatgatatgtaaataa

SEQ ID NO: 431039 - DNA, 684 bp, Serratia marcescens
atgataaaaaaaagaaacttttactttctgctattattttctttttctttcaatactgtcgccagcgtaaccctgggaggaacgcgagttatttatgaagaaaacagaaaagaatcgaatatttcagtaagtaatcaagacagtaactctccggtactcatccaaacctgggcggaaaattatctctccggggacaacagtgaagtcccattcattgttactccgccattattcaggttggaaccggaacaggataatattattagaatcatccatgccggcaagctcttgccacaacatgaagaaactgtatattggcttagcgtaagatcgataccatcaacgaaaaaaaacaaggaaaacaaactactcatcaccgtacaaaacagaataaaaataatctaccggcccagcgccctgtcaaaaaaagaggcaagtgacgcatacaaaaaaatcaaattctcacgagaaaaaaacatgttgattgtgagtaatccaacgccattttatgtctcattttattctctcgttgttggcgaaaaagagcttaaggaagccgatatggtcgcaccaaaaagtaaaaaacaatgggccataccaagcggaacgcgcagctctgaaataaaatggcaagccattaacgactatggaggcgtaacccaggaaataaaagcatcgttataa

SEQ ID NO: 431040 - DNA, 531 bp, Serratia marcescens
atgaaattacgcatccagagaaccatgctgttagccggagcctctctagtcatatcatctgcatcatacgccgcagacggtactataaactttaccggcacggtgacagaccaaacctgcacggttgaggcgggcagcgccaaccagacaatcccaatgggcaatgtcagcgccaaagcgtttagaagcattggcgatacagcgctaccgacaaaattcaatatcgccttagtcagttgtccggacacggtcaaaaaagcgtctatcaagttcgatggtatttacgcagatggcaacacaactctgctgtcgctcaataaagaaactaacgccgctacaggcatcggcgttgcgctctatgaggccgatggcacaacgcaaatcccagtggcgtcattctctaatgcgcaaagcgtgcaaaaagacatcaggaacgtctttacttatgtcgcaaaatatatgtctacatccggcacggttaccgtcggcccggcaaatgccacgacacaattcagcatctcatataattaa

SEQ ID NO: 431041 - DNA, 1065 bp, Serratia marcescens
atgaaaaaaaataaaaatatcgcaattgttggtggtggcggggtaacggcggtgatgacggccttggcctgtgcgaggaaagggatctccgttgatttttttctcgatgagatggattacgatgagttcaagacctctttgggcaaccattgtctatggcgaagcgttcatgaagataatctgcgcctgagtcgatttgcggcccagtctcaatggatatgggaaaagtttattttggcttctagcggtgagtttggccgcaaagaaagaatggtacgcgtggttgagcgtgcggaactcaaccagctgataaaattgtatgagctgtataatttaccctatgaagtgaaaaactgtggtgatgatgaatcaattgtattgccacctttccttgattgtaagaataaatttgccttcgtgagttatgattctattttacttaacgttgctgaaatattttcatattttagtgatgaattggcatttttcacgagtgtgaatgttttcagaaataaaaatattggtggattaggtagcattgaaggcggtgtgatttttgttgacgaaaagaaacatctgtatgatatcgtggttaagtttacaaatgattttaaaatcaatgagatgagttctttcgaggccgtggatgtcgagactaaaacgatttttaaagatttttatctgtcagacaccatcggtcatttaacacagcccatatggatttctgaaaatgagtttaatatatcgctcgtaccctctgtcgatggacgtgttatcaaggttggcatggatgttcacttcccccaatcggcagaggtattggtgcggaatttaaacattgatgcttatttatcaagaagtaaaattgacgtaatgtccagttcgatattttcaattagctcatgtggcgtctcttctgaagatgccaggtcagtgattccatgctggacagtcagtgatgacaataaaaagatagtcgtcgttgaaagtgtggactcctactacaatgcctcacctgctgttgctgaggagatcactacgctattaacgctgattatcaactga

SEQ ID NO: 431042 - DNA, 1275 bp, Serratia marcescens
gtgaatattagtgtgttaaaaaacttctcctggatggtcattgaaaagatcgtatcagtttttggactgatttttgttacgtcttatgtcgctaagtatattgggccatccgcttttggtacaatagcttttgctatctcagtttttggaattgttcaagccgtgtccttgtttgggactgagacgatactttttaaacgaataagtagcaatgagcgctccggtattcggctcatgctgtcggcaaaaaaattgaggcgaagtatcttctctgtgctggcaacggtattaattatctatttttatttcatgacagatatattgacgtttgttttttgcctggcggcgagtattgctgcctattttttttcgcaggatgttattgccatttataacgatgctgctttgaattctaagtttaatgcttttgcgaacgttattgggttaggtgtcagcctgttgcttaggttggttgttgtgcatgccaatcttgatataaaatttctggcaatccctattattactactgccgttattccttattatatcaggttgtctttttttaaaatgagatatagaggaatcaatgggaatagatttagggataggcgctatattatatacatgctatatgctggactaccattggcgatatcaggaatatcaatttcgatatatactcgtctgtcacaggtattgctggctaagtttggaacaacggctgaactggggctgttcgcggcagccaatacgttagcctcctcttgggcatttattagcctggcgtttattacctcctcgtttgccatcatttataaagagagtgacagagaaaaatccattaatgaagcggcgagattgaatggtatcgtgctgttgttttgtcttgttactgttacattaattatcatttttggtcgattttttataagtgtgctttatggtgagcaatatagggatgcctaccctatcatgattatattggctgtcgccaccgctttttcagctatggggccagtagcttatcgttatataattaaggagtctgggtataaattcatatcatacaaaacattttttgttttcattattaatttcccgttaagcatgtttctaatttctcactacagtgttttgggagctgcatatagtatgttaataacagagtttatttcattgacggtgttgaattacttattcaatcaaggggttgtggccagaatacatattaagacattcaatccttttttgtatttaaaaggaaaggtgcgttaa

SEQ ID NO: 431043 - DNA, 381 bp, Serratia marcescens
atgcgtacatttaaaactggttggtttagcaggaaggctcgggctcacggcatcaccgataaggcgttgtgtcgggcagtaaaagatgtacaacgcggtttggctgtggatttaggcggtggcgtatttaaaaaacgtcttaatcataatcgcgaccgtgcattgctattagcgaaaaacggtcggcattgggtgtttgtttttttgtttgccaagcaggcccaggccaatatcacaggggcggaattacaagcttttcgcaagttagcgatgcagtttggcgcgttgagcgacgatctggtcgagtccctggttgtgaaaaaagaatggatggagatttgccatgacgcagaaaaaaacgttccggagcccagtttttga

SEQ ID NO: 431044 - DNA, 1137 bp, Serratia marcescens
atgagaaaaaatacaacgccaatattcattggcggcgtcttgctgtcggcgttatccgccggcgcacaggccgagatcaccattctggataaaaacccgcagagcaatgtgttgctggcgccgctcagtataaaagtgggcggcagcattcgccccgagtggatcttcaataacggcccggagccgggctatgacaaaaacggccacgacggcggcacgcgttttcgcttcagcggcgactatgcgctgacgcaggatacctcgatcatcggctattacgagtggggcgtcgatctggcgcacgcgctcagctgggacgggcactataacaaagacggcaagcgcgactatcagcgccagctgtacgccggtttcaaagacgatcgttacggcaccctgacctacggccatcaatacggcatctattattcggtggtcggcatcaaaagcgacgtctgggataacgatggccatgcgggcggcaccggcatcggtatttccggcgactacgacggcggcaataaaccgaaaaacagcatcaagtacaccaatgatttcgggccggtgacgctgtacgccaactatttattaccggaagacgatctgcacactgcggataacctgatttatcgccgcaagggcgggggcgggctgggcttcgattataaggtgacgaaggatttcaccttcagcgcggcctacagttatactgacgcgaagatcaaagacaatctgtacagcgaaaaggattatcaccagcagctgtccggcaccgcgttgacctggcagccgaacaactggtacatcgtcggcaccgccagctactacaaagactatgtgccgagcacccgccagcgcacgctgtcgcacttcttcgccggtgacggctacgggctggaaggcttcgtcggttacaccttcaatatcgacaagccgttcctcaaatcgatccagccttacgtggcggcggactcgctgcggctgaagggtgacgaggcgtatcacgccaaccacgtttacctcggcgcgggcaccaccatcggttacggtctgtcggtgtacgtggagcgtacgctggccaacagcagcgacaacgagccggactccacctggattacggtgttctacgacttctga

SEQ ID NO: 431045 - DNA, 801 bp, Serratia marcescens
atgtcgtttaccgtaatcgcagaaatggatgagtcaaagtgggatgataagaccggtgaggagtatcacttccctaaacgttataccgctatgcttactcccggtactcgagtggtgtactacaaaggtaagttgagagataagctctaccgagatgaacgaatgacggatgaaccgcattactttgcggtagctactattgcccatgtttattcagatccaaatgcgcagaatggggaattatacgcgatagtcgaggattttcagcctttcactaaaccgctgttggcaaagaccgccacaggttatttcgaggtgatcccggcaagtcgccaatcgaactactggcgtgatggcgtgcggccaatcactaaggacatctatcaggcaattgtggcacaggcggtacttggcccggtgattgagtctgtgattgaagaagaggattacaaccaaagtctagaatctgcggacactcatcaagaaggggcaaagattggttatttcaccaccaaatatgagcgtaatcccaagttaagacgtgcagccctgaaattacacggttcaacttgctgtgcttgtggtttcaactttaaggccttttacggggactatgctgaagggtttatccatatccaccacgtggtaccggtctcggaatttggcggaaagaaaacagtagatcctcaaaccgatctggtgcccgtttgcgctaactgccatagcatcattcatcgtaaaaaagataaaacgctttctattgatgagcttaaagaaatgattgagcggcagaaagtatag

SEQ ID NO: 431046 - DNA, 921 bp, Serratia marcescens
atggctatggttgggctaacttgggatcagactctacgttttcgtttgcttgagatcgtgttgcaatgggaggggcggttgacgactaaccacctttgtactgcttttaatataggccgccaacaggcatctcgagatatcaattggtatataaataattatgcgctgaacggcgtagagtatgattctaagctaaagggattcaggccgaccgcgcaatttgcaccaaagttcagtgaagggaaagttgatgaatacctgatgctgttgcatcaggaaaaacagcagacgaatgaatgctttgataagggagctactctgccattaatggatcttcgatatggtcatatcgaaatcttaagtgtcccatctcgtcatgttgacccaataatagtacgcggattggtgcaggcggcacgttatcaattgagagtggatgttgattatgtttccctcaattctggggagaaaagtggccgcaacattgttccgcacacattggtttatgatgggattcgttggcatgttcgagcctattgtgagaaaaaagggaattatttggacttcgtcatgagccgttttcgcggtattcctgaattgcttgatgcctcggacagagggcgggataaagatagtgaatggaacacttttgtgacagccattgtcgtaccgaatccagagctgaatgttaatcaacgcgcgattattgccagtgattatgcgatgagagatggtaagttattgattactcagcggatgcctttgcttcattatgctttggagcgtttgcaggtaaatttcaccggggaacatagggaaaagccgttgctacatccgttggtactaaaaaaccgccatgatttggtcttgcaggggtgctatttcaaacttactggcagaaatttttccatggaggaatag

SEQ ID NO: 431047 - DNA, 912 bp, Serratia marcescens
atgagaatcgaacgagcttatagtattgaattaggaagagatattacagcagaagaggctgacaaattattcgctgaaaagatcgtagcatcaaagcatctatttaaatgctctgaaaaaaattgcttagctcaagtcacatgtgccaacctggacagaccaaaacgactgcgcaaacgtgatccttattttaagtttgtttccgaacatagccctggttgccaacttgaagccgaaacggacgaagacctacgacgagtgaaatcagtcagagaagaccctgaagcccttccttttatacgagatgatattgttgacattgacttatctccactaaacatacgttttatccgtgatattccctcttcaggggatgaagaagacataacaaaacgccaacgaaaaatagcgggtgaggagcaagaaaataataaccaacgtcgtcactccagaaaacgactttctggtttggttaatgcgtttattgcaaaagaaaatttcttcctaaatacagccgaaggtaagctccacttaagggatttcttcatcagtattaatgacagaaaagacttaagcacatatctcgatgagccacgaatttactatggtaaagcgtggattaaccgtaaagatgactactacctggtccgtttcgataatgcgatgaaagcaggaaagataaaatataaaccaacattttttatcccttctcgccttgttgatagctccgaataccgtagaacatcacgagagaagctggatgagcttgcgatgaccatgccaccaagacctctatacttatttatttttagcgagttaccgcccgttaaaagcaacgttggtgattatatcaatttcaaattagacgatttaacctatttatattaccttccatggggaaagaaaaaatag

SEQ ID NO: 431048 - DNA, 543 bp, Serratia marcescens
atgaaactgttttcgacagagcaaaccgatgtacatttgctggttggtgaatatgcaaaaaatcttcagctttacttagtgaataatagagctcatctagcgccatacgaacctctacgcgatgatgaatattttgcattagagaatatacaaaatcgaataatcaactctctgaatgattatcaggaaaaaagaagtctgcttcttgttgttactttgaagaatgaccaaaaaattataggcagtatcaactttactaactttgtttatggcgtttttcaggcatgttaccttgggttttcattagatcatgctagccagggtaaaggtttaatgtatgagtctttagaaagttcgatagagtatgttcgtgagaattacggaatacatagaattatggcgaatcatctacctgataacttacgtagtagcaatacattgaaaaatttaggatttaaaaaagaaggatatgcacaatcctacttgaaaattaatggggaatggcaggatcacatcctgaactctctggtattcctagattaa

SEQ ID NO: 431049 - DNA, 831 bp, Serratia marcescens
atgagtttaccaatgccgtggagtttagttgggcgcatcttcaattggggttgggaaaagatcacacgactatggttattgaaaacgtatcagaaatcgcatgaatataaattcaggcgcaatcaattaggagcacactgggagccacttggtgagcatttagagtactcaatgcggcttgtccattcagcagatcatgagtcggttaaatcccgcttggcattccgggcgaaaggggcacttgtggaaaacctctcgctttatttcgaggcgtcagggcatggtatccgttaccagcagaaaattgagctggtcaatctggaccagtccgtgctgattgttaacctaaaccagataccacgtcaggaactcatggagatttctgaacgcggaatttatttttcaattactgaaacacagtttactcagtgcatcgttactcttcccggtggcaaaaaacaaccgtcttttgactcacaacggttttctctgatgcatggctggatgtttagagacacatgggaaaggcgctggggcgtgctctggaactgcagtgcaattgaggacgcaaaaaaagaaatgaagttgtattggcgctggcgactaggggaatacggctatttctcgcttaaccatccgagatttggacctcttactctgaatggtatgtttcgcaagggcctgtgcaaactgcttgttaacccctattcaataacgctgcagttctggctggcaatacacttcgggcgatatgagctgggagacggcaggcttatctttggccgtaagagaattagaaaaatgaagtcacgcaaaacggctaggctctga

SEQ ID NO: 431050 - DNA, 1317 bp, Serratia marcescens
atgagtaagtccaataataaaatgggggtcgtgcaattaacgatcctgaccgccgtgaatatgatgggttccggcataattatgctgccgaccaagctggccgaagtgggcacgatttcgatcgtttcctggctggtgaccgccgtcggctcgatggcgctggcctacgcgttcgccaaatgcggcatgttcagccgtaaatccggcggcatgggcggctacgccgaatacgccttcggcaaatcaggcaacttcatggcgaactacacctacggcgtttcgctgctgatcgccaacattgccatcgccatttccgccgtcggctacggcaccgagctgtttggcgctacgctcagcccgctcgggatctgtatcgccaccatcggcgtgctgtggcttgcgaccgtcgccaacttcggcggtgcgcgcatcaccggcaaaatcagcggcatcaccgtctggggcgtgatcattccggtggtgggcatctcggtcatcggctggtactggttcagcggcagcgcctacgtcgccgcctggaacccgcatcaggtgccgaccttcgaagccatcggcgcctcgatctcgatgaccctgtgggcgttcctggggctggaatccgcgtgcgccaacaccgacgtggtggaaaacccggagcgcaacgtgccgatcgccgtactgggcggcaccctcagcgccgcggtgatctacatcgtttcgaccaacgtgatcgccggcatcgtgccgaacatggatctggccaactccaccgccccgttcgggctggcgttctcgcacatgttcaacccgacggtcggcaagatcatcatggcgttgatggtcatgtcctgcgtcggctcgctgctcggctggcagttcaccatcgctcaggtgttcaaatcctccgccgacagcggcttcttcccgaaaatcttctccaagctgagcaaggccgacgcgccggttaaaggcatgctgaccatcgtcgtcatccagagcggcctatcgctgatgactatcagcccgtcgctgaacaagcagttcaacgtgctggtgaacctggcggtggtgaccaacatcatcccttacatcctgtcgatggcggcgctggtcattattcagaaagtggcgaaggtgccggacaacaaggcgcgtatcgccaatatcatcgccggcatcggcgcgctgtacagcttctatgcgctctacagctccggtgaggaagcgatgatgtggggcgccatcgccaccttcctcggctggacgctgtacggcatcgtctcgccgcgcttcgagctggcaggaaaaaaggggtaa

SEQ ID NO: 431051 - DNA, 555 bp, Serratia marcescens
atggatcattatcaggacgtccgcgtattgcccgatcctgagttcagcgaacccactctgctgtcggcattgttcgccaagttgcatcgggcgttggctgcctatggcaaaggcgatatcggtatcagctttccgcagatgcaacgtacgccaggcgccattttgcgactgcatggcagccacgaagcgctgacggcgctggtgggattcgactggatgaaagggttacgggactataccgacctatcgctcatccaggctgtgcctactgagacggcgtttcgtaccgtcagcagagttcaggtaaagagtagcgttgagcgtatacgccgccgagtcgtcagtaaaggttggctgactgaagaacaggcccgggaaagaataccgatggcgaacgagcagcgcacctcattgccttttattgccttgaagagtctctccaccgggcaacacttccgcttgttcctgaaacagggccaattacaggaaaggccaacgccgggtgtttttagtttttatgggttgagtgcctccgctacggtaccttggttttaa

SEQ ID NO: 431052 - DNA, 993 bp, Serratia marcescens
atggctaaatcaacgattaaaaccgcttcggtgttggcatttgaacgcaaattggcaaactcggacgccatcatgttggcgggtgagtggggcaccgagagttggcaacctatcgtcattaaagaaaaggcggtgcgtgggactatctctaaccgcctgaaaaacgcgattaccagcgatcccgccaagcttgatgcggagattcagaagccaaacctgcaaacggttgatgttgcggcactgccgcaaaatgccgataccctaaaagtggcgttcacgctgcgtgtgttgggcaatctggcggtgccgtcggtctgtaacgatcaggactatcaaaatgcgctgcaggcggtgatcgagggctatatcgccgagcatggttttggtgctttagccgcgcgttatgccgagaacctggcgaatgggcgcttcttgtggcgtaaccgcgtgggggctgaaaaaatcgccgtgcgagtgaccggcagtaaaacctgggaattcaacgcgcatgagtacaacctgcgcgaatttagtcaaccgaaaggggcgctaagcgagctggcggcggaaattgaacgtggcctggtgggagaaagttttgccttattcaatgtcgaggcgtttgtacgcctggggaatgggcaggaaattttcccttctcaggagctggtattagacagtaacagtaagaaaagtaagttgctgtaccaggtagatggcgttgccgcgatgcactcgcagaaagtcggcaatgctttgcgtactattgatacctggcattctcaggccgattctcttggtgcgatcgccgtagaaccttatgggtcggtgaccagccgtggcatcgcctgccgtcagccaaaggaaaagatggatttttatacgctactcgatcgctgggtaattaaagaagagaaaccgtcggttgaacagcagcattacgtgatggcggtgttgatccgcggcggcgtatttggcgaaaaaggcgaataa

SEQ ID NO: 431053 - DNA, 966 bp, Serratia marcescens
atgagccatgtgatcgtattgcgtcatcttcaggtagagaatgccaacgcggtagcggggctgacttacggttttcctgccatcagccacttcctcggctatgtgcacgcgctgtcgcgcaagttacaggccagtcacggcttaacgctgggcggttgtggtgtgatatgccatcggcgccaaattcatgctcattcatcagggcgtgattaccagttcgcgttgacgcgcaatccattgaccaaagaagctaaaaccgctgccttcaatgaagaagggcgtatgcatatgacggtctcgctggtgattgaatgcatcggtgaaattgccaacggcgatattggtttggatcagctgcaagaacacctttaccgcttatgccaaacgcaaaaactggccggtggcagcattacgcgcctgcgtggcgttagcgtgcgtggctatccgcagcagcctgatgaagtgcggcgcttagtgtgccggttgttacccggctttgccctgttagatcgttcagaactgttgcaacaacatttcacggcgctaaaacagcattggccgcaagcggaaatgctggatgcctggctcgacttcgccgcattgaaaatgcaggcggtgcccactcatcaggagaaaacgcccgaagtgggagacaaggctgagtgggaatacgtaggtaaacctcaacccggctatttagtgccgctgatgacgggttatcagcgtatttctcctctctacccggcgggtgaagtgctgaatgcgcgcgatgcgtcaacgccgttctgtttcgctgaagccgtttacggcgtgggtgaatggtgcggtctacaccgtattcacgatttatccgcgctgttctggcgctatcaaacaaccgataacggctattactgccgtaccccgtctgcagtgattccgcaggatgacgaatccgctgactcaattcatctcgacgacttttaa

SEQ ID NO: 431054 - DNA, 1338 bp, Serratia marcescens
atggcacaacaaggactggcttcttttatcgtatcttacgtagcgggcaggcgagagcctaagctcgaagccttcgataaggacgcgcaaaagaagctggcggcagcaacggaggcagaacagggtgtgttgcaacagcagttggcgcaggaacggcgcgatctggagcagcgttatgaggtgcgggcctggttaacggacgccgccgcgcgcgccgggcaaatcagtctggttactcatgccgccaaatacacccacagcgatgccaaaggcagcagcgtatacggcgagggggaaggcgatgagcgttacctgtcaacggcggcgttgccaaagccagcggttgatgcggttggcaatgccgccgcgttggatgtcgcaaaactgctgcaaaccgagcatcaaggcgattctctgctgacctgcctgcagcggcaggatcattcggcgctagccgagctggctgaaacgcctcagcagcttgagctgtgggtcagtggttttagccaggcgctgattaacaaacagcctagctcgcacaagttggccaagcagatctatttcccggtggaggatggttatcatttgctgagcccgctgttttcttcctccctcgcccaggcattgcacgatcgtttgttgcacgtgcgtttcagcgacgaaaccaaagaggccaatcaggcgcgcagagcggggcagtggcatccgcagcagctgacctatttcccgcagacggcggtgatgaatatgggcggtaccaaaccgcagaatatttcctaccttaacagtgcgcgtggcgggcgagtgtggctactgccatgtacaccgccagaatggcaaagtccggataagccgccgtatggctgccagtccatttttgagcggcgcgggccgttcagctatttggtgcgtggcatggtggcgcagctgaggcatttcttgcttggagtgcaggaacgagataacaccgtagagatccgccgccgccgtcaggcttctatcgatcagattatcggcatgctgtttaacgttgctgcagatattcaacgtgaggaatggtgcggctggagccgtaacgagggctgcgagctaaaactggcgcaacagctgtggctcgatccctatcgggctaaagatgacgaatggttttgtgctgagcgagaaaaagatgaatggcaggctgaaattgccgatgacttcgccgtgtggctgaatcgtcagttgagtgttgaaccgatgaatatgggaatggtggagcgccgtgaatggcgcactgaaccgctgttccgccagcggttaagagagctggaagacgcgctggcggaggatctcaaatga

SEQ ID NO: 431055 - DNA, 153 bp, Serratia marcescens
atgaagcaaccaaccggtcacaatttttatctggcatgcagtttggtaattgtgtgtatggttttattaaaacccgtttatattcaaagtaatagtgttgatttttctcaggggagcaataacttcttttctgtgataaccctgaaccgttaa

SEQ ID NO: 431056 - DNA, 3276 bp, Serratia marcescens
atgaatattttactgatttcgcaatgcaataagtttgcgctcactcaaacgcgtaaaatcctcgatcagtttgcagaacggaaaggcgaccgtacctggcaaacggccatcactctgcagggattggatactttgcggcgcgcattgcgtaagtcggcgcgccgaaatacggcagttgcctgccactggattagaggggcgaaccaaacggagctgttgtgggtggtaggcaatccgcgcaggtttaacgcccagggaaccgtgccgaccaacagcaccgcccgtgatgttttgaaaagtcaggatgagaaccactggcacagcgctgaggcgattgccttgatggcggggatagctgggctgtttcatgactttggtaaagcgaacgcgttgtttcaggcggggttgatacaagcaggggcgaaacggtttcagccgtatcgccacgaatgggtttctctgcgcctgtttcaggcctttgtcggtcagcggcaagataagcagtggttggctgcgttagctgaaatcaccgcagaggatgaaccggttctattacagcgcttgtatcgggataggcaagggatgtctgaaagcccgttcaaaactctgccgccgctggcgcaggcgattggctggctgatcgtggctcatcatcggttgccggcatacccccggccagatgatactgaacgctaccgtgataccccagactttgcttgcagcgacagttggttggaaaatcagcttaacgcatgctggaactcgacgaatcaggatcacagtgattgggaaccggaggatttcgctcaggtatggcagttcccacaaggcacaccgctgcaaagtgccttatggtgcgcaaaagcgcaaaagctggcgcagcgcgcgcagcaacttggttcgttggctcaattcggcaatttggggcaacagtttgccgtgcatttggcacgtttgacgctgatgttggcggatcacgtctattccgctgggccggcagtaactgattggcaggcggctgggtatgcggcatgggcgaataccgatcgtcagaccggccagcgtaaacagcagctggacgagcataatattggcgtagggcaaggggcattgcttttagggcgtttgctaccgcatgtgcgcaaaacgctgcccgccatcactcgccacaaaggcttcaaacgccgctctgcgcacgaaaggtatcgctggcaggacaaagcttacgacgtcgcggccgcactgcggcagcgttcggttaaacaaggtttcttcggtgtgaatatggcatcgaccggctgcggaaaaacgtttgccaacgctcgcattatgtatgcgctggcggacgaacaggagggatgtcgtttcagcattgcgctgggtctgcgcacgttgacgttgcaaaccggggatgctctacgtgacagactgcatttgcaggacgacgatctcgccgtgatgatcggttccacggccgttcaacaactgcatcagcttcctgttgccgatgtcggtagcgtttcggcggaggcgttatttgccgaacatcagtatgtccgttacgaaggctcgctggatgatgggcgcctgagccgctggctggcccaggatagtcgcttacataagttgatcagtgccccggttctggtaagcaccatcgattatctgatccctgcgacggaaggggtacgcggtgggcggcaaatcgccccgatgttgcgtttgctcaccgccgatctggtgctggatgagccggatgacttcgatatcgctgatttgccggcgctctgtcgtttggttaattgggcgggaatgttgggttctcgggtgttgctttcgtccgcgacgttgcccccggcgttggtacaggcattgtttaacgcctactgcaccggcaggcgtgaatatcaacgctcctgtgccgaaccgggcacaccgctgaacgtttgctgcgcctggttcgatgagcatggcgctgtcagtgcagagatcgataaagcgtctatgtttttggaagagcacacccgctttgtcacgcagcgtatcggcaagctggaacagtttacgcctttgcgtcaggcggaattgttgcccgtcgtggttgcggggcggcaaaaagagacggtgttggagggggttgctgcctgtttgtactctgcgattattcaacagcaccagcatcactgccagcagcatacaagcggtaagacagtctccatcggcctgattcgcatggcgaatatcgatccgctcgtggcggtagcacaatgcttgatgcaactcgctccaccagccgattaccgcattcattattgcgtttaccacagccagcatcctttggcgatgcgctcgcatatcgagcggcggctggatgccacgctgacacgccaccaacctgaaaccttatgggaggttgaggagatcaagcgggcattagtttgcggcgcggaatcaaatcatatctttgttgtactgggatcacccgtaacggaagttggccgcgactgggatctagactgggcaatagccgaacctagttccatgcgctcgcttatccaattggcggggcgtattcagcgacaccggcagcagccaccggtaacgcctaatctgttaattctcaataaaaatatcaaagcgctgcgcgaacgaaacagtgagcagttggcgtattgtcggccggggttcgaatcccgacatttccggttagccagccacgatctgcaagcgttgttgctccctcagcagtaccaattccccagtgctatcccacgaattcgtgaacggcaaggcgccggtaaggggcccctgttcgagaatttggtcgatctggagcatcgccggttgtgggaaacgttgctgggtacgcagaaaaccacagaaagtgccgctctgtggtggcgttatcccctgagctggaatgctgaaatgcaacggcgctacccattccgtcagtctgcccaagagacacagtattacctgtctctggaggaagacgaagaaagcatggtgtttgtgaatcgcgacgcaggccccagcggcagtaaacagagcggcgattttgactatccgggcctggtattagcggatggcaacagcctttggatggataacgattatccgcggctataccgccgtttggcggatacgctggggatggagtttgcgcagatcagcgagaggtttggcgaaatcaatttacgcaagctgggcgaggacgataccgatacgtggcgcttccatccggcgcttggggtgttccgcgccctcaactga

SEQ ID NO: 431057 - DNA, 891 bp, Serratia marcescens
gtgaatggcggccgcgtcgaatatgtcacggacgaaggaaagcagtctctttactggaacatccctattgccaacactaccgtcatcatgttgggaaccggaacctcggtcacgcaggctgcaatgcgtgagtttgctcgcgccggcgttttagtcggattctgtggtggcggtgggacacccctatttgcagcgaacgaagtggaagtcgccgtctcgtggctgacgcctcagagcgagtatcgtcctacggaataccttcaaaactgggttagtttttggttcgacgaggcaaaaaggctggcggccgcccgaatttttcaacaggtgcgtatcgagcaaattaaacggcattggctgggtgcccgaatgcagcgcgaagacgggtttgtattgaacgaagagcggttgttggcgttggttgaacgctatcagtcaaagctcagcgagagtacaacgcacaatgaattgatgttgcaggaagccgtgatgaccaaagcgctgtataagttagcggcggaggcggtcagctatggcgattttattcgcgccaagcgcggcggcggcagcgatctggccaaccgttttctcgatcacggtaattacctggcttatgggctggcggcaacggcaacttgggtgaccggtttaccccatggtttagccgttttgcatggcaaaacgcggcgcggcgggttggttttcgacgtggcggatctgataaaagacgcacttattctgccccaggcatttatcgcggcgatggcgggggaagaggagcaagaatttaggcaacgttgcctgaatggttttcagcgggcagacgcattggatctgatgatcgataccctgcaggaaaccgcctcacgcttgggtgcgggcgcctcatga

SEQ ID NO: 431058 - DNA, 1008 bp, Serratia marcescens
gtgcccgcagtgcgacatgctggtggcgctaccgccgctggcctatggcagcaaagcggtatgcccgcgctgcaaaaccacgctcagcgcccgctgggacgaaccgcgcaagcggccgatcggttacgcgctcagtgccttgttcatgctggtgctggccaacattttcccgtttatcaacatgcgcgtcgccggtctcggcaacgaaatccggctgattcaaattccggaggtcatggtggcggaagactacgccagtatggccaccttgtttatggtgttcgtgcagctgatcccggcattttgcatggtggcgatcgttctgctgtgcgccaaagtgcgcttgccgctggggctcaaagagtggatggcccgggtgctgtttcagttcaagacctggtgcatggtggaaattttcctcgccggggtgctggtcagcttcgtcaagctgatggcttacggcgatatcggcatcggcagcagcttcgtgccctattgcctgttctgcctgctgcaggtgcgcgccttccagtgcgtggatcggcgctggctgtggcaggacatcgaaccggcgccgcgtatcgatcgcccgctgacggtggggcgcaccggcatgcgtcagggcgtgcgttcctgcgcttgctgcacggcgatcctgccggccaatcaggtgcgctgcccgcgctgccacaccaagggctacgcgcgccgccgccacagcctgcagtggacgctggcgctgctggtgacctccatcatgctgtatatcccggccaacctgatgccgatcatggtgaccgaggcgctggggaacaagatgaattccaccatcatggcaggggtgatcctgctgtggggggacggttcttatccggtggcgatggtgattttcatcgccagtatcatggtgccgtcgctgaaaatgctggcgatcggctggctgtgctgggatgccaacggcaggaagaagccgcgtgccgacagcgaacgcatgcacctgatttatga

SEQ ID NO: 431059 - DNA, 765 bp, Serratia marcescens
atggaaacgcggcgcgaagaacgtatcaaccggctagttcaggcgttaaagcgcgctgacaagatccacctaaaagaagccgccgtgctgctgggggtctcggagatgactattcgccgcgatctgagcgccgaaccggcggcggtggtgctgctcggcggctatgtggtgaccgatccgcgcagcaacggcgtgaccaactacttcgtttccgatcaaaaagccaagcaggtgacggagaaacggcgcatcggcctgctggcggcccccttgatcaatgaaaacgacacggtgtttttcgactgcggcaccactaccccggcgatcatcgacgccatcgccgacgagctgacctttaccgccgtctgtcattcgctgaacaccttcctggcgctgcaggacaaaccgaactgcaaggtggtcctgtgcggcggtgagttcaagccgaacaactacatcttttccagcgtcagcggccgtaacgagctcgatcacatctgcccgaacatcgcctttatctccgccgccggcctcagcttgcagcacggagccacctgcttcaacttcgacgagctggagatgaagcatcgcgccatggcgatggcgcagcaaaagatcctggtggcagaccacagcaagttcggcaaaaccaaaccggcctgcatcggccccctgacgcagttcgatcgggtgatcagcgaccgccaaccggacgccgacttcatggcgttcttcaacgacaacgccatcgctacccgctattag

SEQ ID NO: 431060 - DNA, 1368 bp, Serratia marcescens
atggtcagcgttttcgatattttcaaaattggcatcggcccatccagttcccacaccgttggcccgatgaaagccggcaaacagttcgtcgacgatctgatcgcccaccagcagctgcaggacactacccgcgtggtggtcgacgtgtacggttcgctgtcgttgaccggtaaaggccaccacaccgatatcgccatcatcatgggcctggccggcaacctgccgcacgacgtggacatcgacagcattccgggctttatccgcgacgtcgaacagcgcggccgcctgccgctggccaacggccatcacgaggtggatttcccgctgcacggcggcatgaacttccacagcgacaacctgccgctgcacgaaaacggcatgcgtatccgcgccttcgccggtgagcgcctgctgcacagcaaaacctattactcgatcggtggcggtttcatcgtcgacgaagagcacttcggccaatccgccgagggcgccacgccggtgccctacccgttcaaatcggcgcacgatctgcagcagcattgcaaagacaccgggctgtcgttgtccggcctggtgatgcagaacgagctggcgctgcgcagcaaggcggatatcgacgcgcacttcgccgacgtctggcaggtgatgagcgccggtatcgaacgcggcatcaacaccgaaggcttgctgcccggcccgatgaaagtgccgcgccgcgccgccgcgctgcgccgcattctggtgaccggcgataagaacaatatcgacccgatgaacgtggtcgattggatcaacatgttcgcgctggcggtcaacgaagagaacgccgccggtggccgcgtggtcaccgcgccgaccaacggcgcctgcggcatcatccctgcggtgctggcttactacgacaagttcatccgtccggtaaacgccaattcctacacccgctacttcctggcgtccggggtgattggcgcgctgtacaagatgaacgcctcgatctccggtgccgaagtgggttgccagggggaagtgggcgtagcctgttcgatggcggcggccgggttgaccgagctgctcggcggcagcccggcgcaggtgtgcatcgcggcggagatcgccatggaacaccatttagggttgacctgcgatccgctcgccggccaggttcaggtgccttgcatcgaacgcaacgccatttccgccgtcaaggcagtcaacgccgcgcgcatggcaatgcgccgcaccagcgaaccgcgggtttgtctggataaggtgatcgaaaccatgtacgaaaccggcaaagacatgaacgccaaataccgcgaaacctcacagggtgggctggcgatcaaggtcgtggcctgcaactga

SEQ ID NO: 431061 - DNA, 1146 bp, Serratia marcescens
atggccaagtttgatacgttgaccgttcacgccggttacaccccggacgccaccggcgccgtgatgccggcaatttacgccacctccacctacgcccaaccagcgccgggcgagcataccggctacgaatactcccgcagcgccaacccgacgcgcaccgcgctggaaagtgccatcgccgaactggaaggcggcagccgcggctacgccttcgcctccggcctggcggcctgttccacggtgctggagctgctcgataaagacagccacctgatcgcggtggacgacctgtacggcggcacctatcgcctgctggaaaaggtgcgcagccgcaccgccggcctgcgcgtcacctacgtgtcaccggcggatctcgccgggctggaacaggcgatcgagccggataccaaaatgatctgggtggaaaccccgaccaaccccttgctgaaactggcagatctgagcgccatcgccgcgatcgccaaaaagcatcagcttatcagcgtggcggacaataccttcgcttcgccgtatctgcagcgtccgctggatttgggctttgacgtggtggtgcactccgccaccaaatacctcaacggccactccgacgtggtggccggcgtcgcggcggtggggaataacccggcgctggcggaacagctcggtttcctgcaaaacgcggtcggcggcattctcgatccgttcagcagcttcctgacgctgcgcggcatccgtaccctggccctgcgcatgcagcgccacagcgacagcgcgctgcgcatcgcccagtggctggaaagccagccgcaggtggaaaacgtctactatcccggcctgccgagccacccgcagcatgagctggcggcgcgccagatgacgcgcttcggcggcatgatctcggtgcggctgaaaggcgacgacgcctatgcgcgccgggtcatccagcgctcgcgcctgttcactctggcggaaagcctgggcggcgtggaaagcctgatcagccagccgttcagcatgacgcacgcctccattccgctggaacagcgcctggcaaccggcatcacgccgcagctggtgcgcctgtcggtggggattgaggatgtggaagatctgatcgccgatctgcagcaggcgctggcggaataa

SEQ ID NO: 431062 - DNA, 1374 bp, Serratia marcescens
atgactgagttgacttgttttaaggcttacgacattcgtggccaattggggaatgagctgaatgatgaaatcgcttatcgaattggcagggcctttggtgaatatttgcatcctaaagccgtagttttgggcagtgatgcccgtttgagcagtgaaagccttaaacaatccttggctaaaggcttgcgggacgctggagccaatgtgattgacatcggagtgagtggggctgaggaactctattttgctaccgcttttttggccgccgatggtggtatagaagtcacgggcagccataatcctgaagattacaacggcatgaaattggtgtgcaaagatgcacggccgatcagcagtgactcagggcttcaggaaatcaaggcgttagcggaaaaagaaacgtttacgcacgctgagcattctcgcggtagctatcgacaaaccgataccctggaaagttatgtcgaccatattttatcttttgttgactttgcgcatttcaaaccgctgaagctgttggtgaactcggggcatggtactgctgggcgggtcatagacgctattgaactccgctttcagcagcataaggtaccgttggaattcatcaagattcagcatgagcccgatggcaattttccgcgaggggttcctaatccgcttttacccgagcgccgtcaagacacgatggaggcgatattgcaccatggcgcggatatggggatcgccttcgatggcgatgcggatcgctgttttctttttgatagtaaaggccattttatcgagggctactatatcgtcggtttgttggctgaggcgtttctagccaggcggacaggagagaaggtcgttcacgatccgcgattgagttggaataccgttgagatcgttgagaaagctggcggtattccagtgatgtcgaaaaccgggcacgctttcatcaaagaacgaatgcgagctgaagatgcgatctatggtggcgagatgagtgcccatcactatttccgcgacttctattactgtgatagcggtatgatcccctggttaatggtcgccgagatcatgtctctgaaagatcgctcgttggaacagctggttgcgaaacgtatccgcgcctatccttcttccggtgagattaacatcgtccgagttcctgcgacacccgcactcgatatgatcgagcgccattatcgagatcaggccttagagattgataagacggatgggatcagcatgatctttaccgattggcggttcaatttgcgagcgtcaaacacggaacctttgctccgcctcaacgttgaatcgcggggtaatcgcgacttaatggatcggaaaacagaggaaattcttgcgctagtaaacagccgaatataa

SEQ ID NO: 431063 - DNA, 1077 bp, Serratia marcescens
atggtgaacttaatccctgtcattctggccggtgggaacggcagccgcctatggcctttatcaagagaagcattccccaagcaatttcttacgcttgacggtagcaagcatagcctgctgcagcaaacgctgctgcgcttagatgggttacaaggggttaagatcgcggcaccgattgtcatttgcaatgaagagcaccgttttttggtggcggaacaactgcaagagatcgattgttttaactcgcgcatcattctggagccagccgggcgtaatacggcacccgcggtcgctttggctgctcagcatgttctacaaaacgaaccggatggtatgttgttggtgttggctgccgatcacctgattacccaattgggcgcttttcatgatgcgttgaacaaggcaatcgagttttcactgtgcgaccgtctggtgacttttggtatcattcctcagcaccccgaaacgggctacggatatatcaagcgtggaacgccgctctcctcttactgttttaacgtcgagcgttttgtcgagaaaccgggctatcagaaagcgcaagcatacttagaaagtggcgattactgctggaatagcggcatgtttatgtttacagctaagaagtatttgtgtgaactgaatcgatttcgtccggatatttttcaaaagtcactttttgcgatgcaaaccagtcgacttgaactcaacttcatccacattgacgaagaaacgtttctccgttgcccctgtgagtctatcgattatgcggtgatggagaatactgctgatgcagttgtgatgccggttgatataggttggagtgatgttggctcttggggaactctatgggatttgaccgaaaaagatgctcaaggtaatgtccatcgtggcaatgttatcgcgattaactcattgaataactatgtttcctcaggcaataaactggttgccacgctaggaataaacaacttggttataatacaaactgacgatgcgctattggttgctgctcgtgaagccgtgcaagacgtcaaacagctggtaggtgagctgaaggcgcgaaaactgccgttttga

SEQ ID NO: 431064 - DNA, 1185 bp, Serratia marcescens
ttgactttcttcgcgaagctatggacgagaaaatgcgaaaaggacgttccggttccgccagtgaaagtattttatttagtgtctgctgcaggtatgcctaattttggcgacgatatgctgacgcgattttgggtaacggaattgcggcgacgtttccctggctgcaccatttatctggatgccgttgacgccgtagttgcctcagggttgtttcccggtgtgagatgcgtggattatttatggcggctggtgcaagcgttgggcgatgatggctctctggaagaaaagcttgccgatccgtacacgctaccgttacgtgaacgtttgatgtccaagacgtttacctctgccgacagcattcatctactggggggagggtatattaatgagctctggggcgccaactcgcggctaattgaagtggcggcatattttgccaaaaaataccagctcgcgtgttatgcaaccggactagggttgcaaccgctctcacctgaaaaggccgatcaacttgcaccttacattcgccagtttgaccagtttgatgtcagagatagtgcgagttatgaggttttagcgccatttgggctaccacaactcggttttacaggtgacgattattttgctttttcgtcctatcctgtcgggcacattatagaggatgagtcgttcactttacatctgtgcattcataccgagttgtctgaggatgatgttctcactgggaatttattgggcttgttaggacaagcgacaacgatattcctggagaagcatccgaatgctaagattaagttttatgaatttcggccgggttcagatgggattttcttccgtcaaattcttgaacttttcccccaggctgagtttgtgtcgtttgagcaggtttggcacgatggtttgacattcgctacgcatgatttttgtatcagctcgcgttttcattttcaggtcatcgcagccagctttggcataccaggggtcgcactttcgtggtctgattactatgacaacaagttttccagcctacagagcatgtcaaattggccaatgattcgaccggatatcagcccggaagcattacgggatatcttatcgtcgttttcgtgcggcgactgtcaacagggactgaagcagatccaacagtctaagcaactgttattgactcagttgtacaatttttag

SEQ ID NO: 431065 - DNA, 1899 bp, Serratia marcescens
atgaatagtattaagttatacacttgtcatcataaaccaagtgcttttcttgactccgccttggttcagcctatccatgttggaaaagcgaatagtcttaatgaaattggttgttccggcgataatgttggcgataatatttctttcaagaatcccttttattgtgagctgaccgcgcattattgggtgtggaaaaatgcagagccgtctgattatgttggattcatgcattatcgacgccatttcaatttctcaaaaaatcaaaaccttcaagaggataattggggggttgttaactatgagaaaattgacgaaacttatcataagcaatttggtttaaatgatgacgatatctctcagtgcttaactgatgttgatattgttttgccaaaaaaatgggatgtcagtgcggctggtagtaaaaacaattatcagcactacaaagtttctaattatttgcacattgaagattacgacgcggcattaagaattcttgatgaactatatcctgagtataaggcagcggctgataagttcaataatgcaacgaatggttattatacaaatatgttcgtcatgagaaaggatatatttgatgactattctacgtggctgttttctattttaaataggcttgagtcaaaacttagattcaaaaactataatgctcaagagaaacgcgtggttgggcatattgccgagcggttgctgaacatttatgttgagcatcaagtcaataagcataactttaaaataaaggaattgcagcgaacctttattcagcaggagacttttaccgccgcgctgaaaccggctttctctactaataatgtgccggtggttatttgctttgatgataattatgctattagcggtgcagctctgcttaattctattgtcaagcaggcgaatcctgagctgaattatgatgtggtgatattagagaatggtgtttctttgccgagtaagaaacgtttcttctctatgctctcggagcataagaatttccatctgcgtttctttgacgtcaatgcgttctcagagataaaaagcgtcttcacgcgtgctcacttcagcgcggcgacctatgcgcggctatttattcctaagctgttttccgagtttgaaaaggttattttcattgactcggataccgtagtggaaagcgatctatccgaattactgacagtgccgttaggagacaacctgatcgccgcggtcaaagacatcgtgatggaagggtttgtcttgtttggcgcaatgtcgcagtccagtgatggcgtgatgccagcgaaagaatacttgtcgacctcattgggaatggcggagccagatggctatttccaggcgggaatattggtgtttaacattgagcagatgaatcaggagaatacgttctccagcttgatggccgcaatgaaaaacaaaacctattggttcctcgaccaagacattatgaataaagttttccatggccgtgtgcattatttgccgctggagtggaatgtttatcatggtaatggcaataccgatgatttcttcccgaatttgccatttgcgacctacatgcgttttcttgatgcgcgcagcaagcctaaaatgatccatttcgcaggtgaaaacaaaccgtggaatacgcgtcatgtggatttcttcgataattatcacaaaaatgtcgtagaaaccccgtgggctctggaagcttatgaacgtttggtgggggcgagtatctgctcgcgtactgtgccgcaagttgaaagtgcgccggtggtgctgtttcaaactaaagtgaaacgagccttgatgccaatggttaataaaatggcacctaaaggcacttctcgccgcaattttatgactaagtattattacaaagttagacgtgcaattattggataa

SEQ ID NO: 431066 - DNA, 1158 bp, Serratia marcescens
atgtcatatagcaatgttaatattggtgttgtagcagattggttagttacgtatgctggttcagaaagtgtcattaaacaaattcttaatgttttccctgcatcaactctttacgctgtagtcgattttttaaatgaacgagatcgtgctgaattatttgatagatctgcaaaaaccacgtttatacagcagttgccttttgcaaagaagttctatcaatcatatcttccattaatgccttatgcaattgaacagctaaatatgaaggaacatgatattattatatcgagcagtcatgctgtttctaaaggtgttttatctggtcctgatcaattgcatatcagctatgttcattcaccaatgcgctatgcatgggacttgcaacatcaatatctaaaagagtccggctatgattccgggttgaggggagtgttgattaaatggtttttgcataaaatgagactctgggattgtagaacctctaatagcgtagatcattttattgccaattcgcatttcatcgcaaggaggataaaaaaagtttatggtcgaaatgctgacgtaattcacccgcctgttgatgtctctcaatttgtttttagagagtcaaaagacgattattacatgacggcctctcgacttgtcccttataaacgaatagatttaattgttgatgctttctcgttaatgccaactaagaaactagttgtcattggtgatggtcctgaaatcaaaaaaattaagatgaaggcgtcttctaatgtccatatattgggctacaaagataagtcggagcttatcggctatatgtcacatgccaaagcatttatatttgctgcagaagaggactttggtattgttcccgttgaggctcaaggttgcggaacccctgttatcgcgtttggaaggggaggagctctggaaacagttaggcctcatggtaccggaaaggcaacagggctattctttgagcgacaagatgttaaatcattaatagagagtgttcatcgctttgaaaaaattcaagataaaattctaccttccgattgttataataatgcgctgaagttttcttctgagaggtttgataaagagtttagtgaatatgtcagagaaaaatggctgttattcaatgaaaataaaacgattttttattaa

SEQ ID NO: 431067 - DNA, 1062 bp, Serratia marcescens
ttgatttacattaatgcaagatttctcactcaggaactcactggagttcagcgttacgctaaagagatctctttagcattgatgttactcagagatgatattatttttcttgttcctaaaaacattgtttttcaggagttcactgagtctgcaactattagaattgtaggtcgtaatactggctatctgtgggaacagtatgatttaccacggtacctggagacgctgggaagtcctttacttgtgaatctttgtaatctagcgccggttttttacaaaaataaagttattacactccatgatattacttataagcggtttccaaagagttataaatggcaattccggagcatttataattttgtgaccccttttttgattcgttcttgcaagaaagttgtgacagtgagcaacttctctaagaatgaattgattcataatttctcatgtaatgccgatgatgttgatgttgtttataatgctgtatcgagaagttttatttgcaatagcgaaaccgattctaaaacagaagtgaagtactttctcgctttatcgtcgcctctttatcacaaaaacctacattttttaattggtgtttttttaaccttctcgagaaaatacgatgttgagttgagagttgttggtgatagaaaccatgccaacctttcttttgacagtgataaatttgacgagctaaatgcaagccgcgtgaaatttttaggaagagtcgatgataactctttagcagaattgtatcgaaatgcagtggcgtttgtgtttccatctatctatgaaggattcggcattccacctattgaggctcaggcctgtggctgtccagtaatttcttcgaacgcagcctctatgcctgaggtgttacaagacagtgccttttttttctcgccagagagtaacggcgagctatattctgctatggaactgctaatgttggataaaaatttaagggcagaactagttgcaagtgggcgagagaacgcaagaagattttcgtggagtaaatctgcagaaaagttaaactctcttttggatagcataatttga

SEQ ID NO: 431068 - DNA, 939 bp, Serratia marcescens
atgaatagttggtttttattcgcaaagaaatatttattccgactcataaaaagaataatcagtttcgctccttggtgggttcaagattgtttggtctttctttattattttagacgtttccctagattgagaaacccgataggcttcaatgagaaagtgctgtatagaaaaaataggcagtttgaattgagcgcttttactatattggctgataaatataaggtcagacagtatatcagtgattcaataggggaggagtttcttgtgcctcttctttttcattcaggacatcctgtgaaaccttgtgatttaaaatttggatgcgatgtaattataaaaccaaatcactgtgctgggctttatctgatcgtgcctgaaacagctgatgatttttttattaataaaacctgtaatgaggtaaataagtggctttctatagatttctcacagatccagagagagagacactacagtaaaataccccctaaaatactgattgaaaaactattgggtgacggagtacaggctcctgttgattacaagttccatatattcaatgatactaatggtcgggtaaattacgtattacaggtaatcgatgatagattctctggtaagattcgtagatcattttacgtaaatagtttggaaactttgttttgtaaagaagaaggggcgggtggaatagctgtttgtagcaagctacttgcttgtgcactgagtaaaagcttaaagttggccgccaaatttgattatgtcagggttgattggtatattcattcaggaagtttgtactttagtgaaatgacatttacgcctgccgcagggtttggtacaggcttcggcgatgaattagacaatgtgatggggcgcttttggtctatgagttcattggatcaattacgagcctccacagctggattggagcgctataattga

SEQ ID NO: 431069 - DNA, 918 bp, Serratia marcescens
atgaagattacgctgcgccatattcgctgcgccttggcggtgactcgccacggcaatatcacacaggctgccgagcacttgaatgtctcgcagccggcggtttccgctgcgctcaatgaattggaagagcttatggggaaagcgctgtttgtgcgccagcgagggcaaggggtgacgctcacgccatttgggcgacacgcgatggacaaggcccagcagatagttgccggcgtgcacgagctggaacgcctggccgacgagcgcagaaccttgtccggtgagctgacgttggggtgttttgaagatttggcgccttactgcctgccgcagctgttgcgggggctgaaagaaagtcatccggcgattggggtctcgattcgtgaatatggcttcgaccaaatcagcaagcagttaagcaacggcacgttggacgcggcgctcagctatgatctcggcctgccggatcggatacgcagcaccgtgttatgtgaactgtccgctcatgcactgctgccggccgatcacccattggctgagcaaggtgaggtcagtctgcggcagctctgtaactacccgttggtgttgacgaatcaagcctacagctcacagcatttcctggagttgttccacttccacggtctgcagccacagcgtctcagtaaggcctactccctcgaattgcagcgtggtctggtggccaacggttttggtgtcgccgtggcttacacccgaccctttggcgatcacagctacgatggacagccattggccatccgtcccattgccgaaccgttgccgccacagcgtattgttctggctgagccgcgcgccagcagcgactcgcccctggtcaatgcgctgcgggaacgggcgatgcggtggtttggtgaaagcgcggggttcggctggcgcctttag

SEQ ID NO: 431070 - DNA, 813 bp, Serratia marcescens
atgaaccagtcagtcacctctttggtctcaaaggacgatgtcgccactttccaacgcgatggtgctatttgcctgcgtggtgcgttcaaagattggatcgaacctatcgccgaaggcatagcgcgcaaccagcgtgagccgggaccatacgccactaacgtcgtcaccaccggtgaaccgggcggtttcttcgatgattactgcaactgggaacgcattcccgaatttgccgccgtagttcgtgaatcgcccgcagccggtattgcggcggcggtcatgcaatctgccagcgcgcaattctttcacgaccatgtgctggtcaaggagccgggtacgcagaaaccgacgccctggcatcaggacatcccttattattttctcgatggcgaacagaccgtcagtctgtggctcccagttgaccccgtgcgcgaggcaaccctgcgcctgatcgccggttcccaccaatggtcgcaatgggtattgccgttgcgctggaaggacgacggtaacttctacgaggatagtagccgttatcgtccggtacccaatccggatatcgaacccaacatgtcggttttagagtgggaaatggaacctggcgatgcggtgctgttcgactttcgcaccgtgcacggcgcgcggggcaacctgagcacatcccggcggcgcgtactgtcactgcgctggttaggcgaagatgtgcgctatgccgaacgcccggggaaaacgtcacccccctatcccaaccatggcatgcaacctggccagcgcctgcgtccggattggttcccgcaaatctggcctgaaacctaa

SEQ ID NO: 431071 - DNA, 1188 bp, Serratia marcescens
atgtcgtttcacaccatcctgcccgaagtacacgagctgatgccgcccatggtggcgctgcgccagcacctgcacgcccatcctgaattgagcgaagaagagttcgacaccagccgtttggtcgcggacaagctgcgcgattggggttatgacgtccatcacggcttagcgggaaccggcgtcgtcgcgtcgctgcgcaaaggacaaagccagcgcattgttggcctgcgagccgatatggacgcgttgccgatcgtcgaaaccagtggcctgccttacgccagccgccacagtggcaaaatgcatgcctgcggccacgacggccataccgctatgctcttggccgccggccaatgtctggctcaaagtatcgatttcgacggcaccgtgcgtcttatctttcaacccgccgaggagggattcctgggggcgaagagaatggtcgaagatggcctgttccaacgcttcccctgcgatgcgatattcgccctgcacaattggccaggattgccggtaggctgcttcggcttcctgccaggagccttcatggcctcggccgatacggtaacgatccgcatcaacggccggggtggccacggcgccatgccccacgaaacggccgatccggtcgtcgccgcggcctctctggtcatggcattgcaaaccgtcgtcgcacgcaatctgccgccgttggacatgggcgtcgttgggataggatcaattcatggcggcagcagttctacagtggtgccaacctgcgtagaactggcgatcaccgtcagagcgctgaaggaaaccacgcgccacctgttgttgcaacgcattgaagccctggcgcatgcccaagccgcagcctttggcacaacggccgaagtctctgtcgatgccaatgcttatccagtgctctataaccatcctgaagaaaccgatctggctcgctcggtggcgctctcatggctcggggaggatggcgtgcttcccgacatgcagccgatgacctgcagcgaggatttctctttcatgctgcaggcctgccccggcagctatctgatcatgggcaatggccaagggacggaaggcggttgtccgttgcataaccccgcctatgacttcaatgatgcggcgctgccctatggggccagttactgggtgaggctggtgagcacgttcctcaaacccgccggctga

SEQ ID NO: 431072 - DNA, 1350 bp, Serratia marcescens
atgaccgccacttccaccctctccgcaccgagtgcggggacgaacctgtacgcatcgcgccagcgagtcatcgccggtaccacaattggcaatgccctggagtttttcgacttcacggtattcagttttctgatgctgtttatcggcccgctgtttttccccgccgcttcggcttatggtcagttgttgttgaccaccgccacgttcggcgtgggcttccttatgcggccggtcggcgcgctgctaatcggctcttattccgaccgcttcgggcgccgctcggcgatggcgctgaccctgtttctgatgggattgggttgcgccatgatggctctggcgccaacgtataaacaaatcggcattatggcgcctttgatcatcatgctggcgcgtttgatacagggctttgccgccggcggggaagtcggcgcggctaccaccttactggtagaacatgcgccacctgcgcaaagagggttttacgccagttggcagttcggcagccaatcgctgggcatttttctcggcgccgtcatggtcgccgcgctggttgcaggcctggaccaacaggcgatgagcgattggggatggcgagtgccgtttttcatcggcatgctcaccgcaccggtagggtggtatatccgccgccatcttgaggataccctcatcattggcttatccacccaacaggccaaacaacatgccgcctgccgcagcccgctgcgcgagctgttcggacaacacaaactgacgttggttaaaagcgtattgctgatgctgggcgctatggtttcgactcaaatcatcgctttttatatgccggcctatgccgcccgggtgctgggtctgcctaccacctccagcttgctggcaagcgtcgtcgtggggatcacctgttttctgctctcaccaccggttggttggctggcggatcgctatgggcgcaaacgggtgatcttttactcgcggctgctgacgctggtggcgattgtccccagtttccagtggctgaacgccgcgcccagcctctttaacctactgctgattatcggcctgctatccatactgttaaccctacaaacggtgccgggcattaccatgctgccggagatgtttcccaaatcgatccgcaccaccggcatggcggcagcttacggcattggcgtttcggtatttggtggattcgcgcagttcttcgtgacctggttactgcaggtgaccggacaacccctcgcaccggcctggtacatgatggcgacggtcgccctgtccacgctggcgctgctgtggatacgcgatcgtaccggcgaagatatcgatcgcatcacgagtgaggaattagcgccataa

SEQ ID NO: 431073 - DNA, 681 bp, Serratia marcescens
atgacctctctcaccggcctgatcgccagtcacaagcagactttttctgaacatcccttcctgagttatgtccgagacaaccgcataccgatccagcgccggctggcatttttacccgccatgtcgcatttcgtgatgagtttttccgatctgaacaagtatgcgttgcctttcccccatcctacagatgcgctggaacaggcggtcaacacccatgctcaggaagattcacaccattggccgtggtttttgcacgatctgcaaaccctgtcgttaaatgcaccgactacgctggtcgataacctgcgttttttatggtcagatcaactgcaggccagccgtcgcctggtgtatcacctgttcgcactctgcgccaataaaccggcaaagcagcgcattgtggtgattgaaatgatcgagtccgtcggcaacgccgtgtttaccgtcattaatcaggtggtcaacgaggcgcatattccattgaaatactgcggcgatctgcatctcagcagagagaccggtcacgcgataggcagccacggcgaactgctcgacacgctgacgttttcccaggaagaagaacgggaggcgcgcgcggcggtagagagcggttttcaggcattctcttcctttttcagcgagttggcagactatgccaatttgccgcatccggcacgctaa

SEQ ID NO: 431074 - DNA, 264 bp, Serratia marcescens
atgttgaccgtttccacttccaccccatttaccccgtcgccggtgcttcctggcggttacaccccgcgcgaacgttttattcgcctgccggaagtgctctacaccaccggtctatcccgctccaccgtgtacgagatgatgagtcgccgacagttcccggctcaggtctccctcggcggtaaaaatgttgcctggctggcctccgaggtcgaacagtggatggacgaacgtattgccaaccgtcatcaggggagcgccaagtga

SEQ ID NO: 431075 - DNA, 426 bp, Serratia marcescens
atgaactatcaacacgtcgccgtagcaacatcactgcttgatgaggagcatattcttatcggcaaaggtgttgagctcgcatcgaccctaagtgcaaaactctctttgatttatgtcgacgagaatcattcatattactattctgagctaggtcgccctgtgcagaacttctctgagtctcgcttcgaggagaagataagacgtgagatgatgcctattattaagtctgcaaattaccctatatcagagattattataaggcgtggtgagctaacttttgagttaaaagctgctgcggaagagaaaggtatcgatttgtttgtttttggtcatcaccaagacatatggagtaatctgttctcttccgcgagaaatgctattaatgtacttgaaactgatgttttagttattccattgaagcgctga

SEQ ID NO: 431076 - DNA, 432 bp, Serratia marcescens
atgagttaccaacatattgtgattgcggttgatctcaatggagagaaccagagcatattggaaaaaggcgcagtgttagccaatgcgtacaatgcgaaactgtcattaattcatgtcgatattcatcatgcgccttattattcggcgttgggtctccagacgaaccactacagcggtgaaatgcctgctgagtttcaaattaaaaagcagttagcggatcttgcactctgctcatcttatcctataccggacgtcattgtagttagcggcgagttgcttcctgagttgaagagagaaattcgtgagcgaggaatagacttactcatttttggccaccatcatgatgtttggagtaatattttttctacgacgcgtaaagcgattaataatctggatgttgatattttagtcattccattgcaaagtgaatag

SEQ ID NO: 431077 - DNA, 219 bp, Serratia marcescens
atgagtatccattatcttaccgacaacgatgcacagcagttggatgaaatggagaaagtgctcggtcgatgcgtgattgatctcatcgttcgaaaacggactatcaacacagcaaacatcctgtcacagctagttaaagagatggaaaaaacgccagataaccatcagtttctgctatatcgaaccgctttagagttcgttggcacgttgaccaaataa

SEQ ID NO: 431078 - DNA, 1638 bp, Serratia marcescens
atgcactatctttcccctccggtcggatcgcccgaaaccattgaagcagccaagcaagcgatgcgcctgacgtttttccattgggggcttcatgcctgggctatctatgcaattgtagcgttgattctggcctttttcagctatcgtcatggcctaccgctcacgcttcgttccgctctctatcctataattggtgaccgcatacatggccccatcggccatgctgtcgatatttttgccgttatcggcaccgtcttcggggtggctacctctttaggatatggtgtattgcaggtaaatgctggacttaaccatctctttggcgttccgattaatgagaccgttcaggttatattgatcattatcattaccgggcttgccacaatatctgtggtttccggactggataaaggtatacgcatactctctgaacttaatcttggtttggccttattgctgctgacactggtcttgctattagggccaacagttttgttgttaaagtctttcgtcgaaaatacaggcggctacctttctgagctggtcagtaaaacattcaatctgtatgcctatgagcctaaatccagcaactggctgggcggttggacattattgtattggggatggtggttatcttggtctccttttgtggggatgtttatcgctcgagtttctcgtggcagaacgatacgagaatttgttactggtgtcctgttcgttcctgcggggttcacacttatgtggatgaccgtatttggcaacagcgccatatatctcatcatgactcagggtgcaactgacctcgcaacgaccgtgcaacaggatgtggctctggccctgtttaactttcttgagcactttccattctctaccgtactttcgtttattgccatggcaatggtgattgttttctttgtgacctcggccgattccggcgccatggtggtcgatactctggcttctggtggctcaagcaatactccggtctggcagcgaattttttgggcatcgttgatgggcattgtcgctatcgcacttctggtcgcaggtgggctgagtgcgctgcaaacggtcacgattgccagcgcactgccgttttcggtgatcctgctgatttcaatatacggattgctcaaggcattacgccgcgatcttactaaaaaagagagccaaagcatggctaccattgcgccgactgcagctcgtaatccgataccatggcagcgtagattgcgtaatattgcctacctgcctaaacgctcactagtcaaacgtttcatggatgacgttattcaaccagcaatgggacttgtccaggaagagttgaataagcaaggtacactcagtcacatcaacgacactcatgatgatcgcattcatcttgaagttgatttgggaaatgagctcaacttcatctatgaggtcagactgcgtggctataattcacccacgtttgcgcttgccgcactggataatgatgaacagcaggccgaacaacacaagtattatcgtgccgaagtctatctgaaggaaggtgggcagaactatgatgttatgggctggaatcaggaacaattaatcaacgatattcttgaccagtatgaaaaacatcttcattttctgcatctggttcgctaa

SEQ ID NO: 431079 - DNA, 1263 bp, Serratia marcescens
atgatttctcgctggcgatgggtagtgggacaaacctttaaaaagctatggtttagagcgacgttgttcgccatagccgctattgtcactgcactgatctcgatcctttttaagtcgatgataccaccatcattttcagtaaaagtcggggccgaagccgtcgacaatatcttgaacattcttgcgtccagtatgctggcagttactacgttctctttaagcattatggtgacagcatatggctctgccacaacaaatgtgactcctcgagcaaccaggctggttgtcgaagatgtgacgacccaaaacgtgctggcgacgttcattggttcttttcttttcagccttgtcggcattattgcactcaacatgggggcttacggtgaaagaggcagagtgattttatttgcagtaactctggtggttatcgcccttatcttaataactcttctccgctggatacagcatttaacgtctcttggccgagtaggagaaacaacggcccgagtagagcgggccgctatagaagctttcatttctcgggctcaggatccttgtttaggcgggtatccctggcttgaaagtgacactcaacctgcggggacgattgcagtttatccgaaagatatcggttacattgaacatatcgatatcggtaagctagcctccgcactctccgacagtcccgttcatgtctatctggttggccaacctggcagttttgtgcatccttcgcaccccgtgatgtatgtcaccaacaacgctaacagcaaacttattcctgatgtattgtcaacgctcagcatttcagatgtgcgttcatttaatcaggatcccagattctgcctatgcgtactggcagagattgcctgccgagcactctctccggctgtaaatgatccgggcacagctattgatgtcattggacgaggagtaagagtgctgtcggaatatgggcgacatatagaccagaaaaataccgttcgctatccggctattcatatctctcctctttccaccttcaacctgcttgacgactttttctcaccgattgcccgcgatggcgccgctatgcgagaagttcagctaaggttgctgaaggggatggcgatgctcagccaggcatggccggacctttatgcctcagcagccggtgttcatgccagggaagtgctgcagtatattgaaaaagcgagctatatcagttcggataaagcgcgaattatggaaacctatcaaaagctgtttaactctatgggatga

SEQ ID NO: 431080 - DNA, 1176 bp, Serratia marcescens
atgctcctaactgacatacaaattcgacgttccaagccgcaggaaaagccctacaccctcaacgatggtcaaggcctgtctctccttataaacactgacggaagtaaaggctggcgttttcgctatcgctatgccggaaaagccaagctgatgtcctttggtacctaccctttggtaacgctggccgacgctcgagaaaagcgcggagaggcccgtaagcaagttgctaatggcattgacccagtagccgagaaaaaggcgcaaaagctcgctcagaagctttctgtcgagaactcctttgaagcgattagccgtgaatggcacacgaacaaggctgaccgatggactctggcttatagagaagaaatcatgcgcacctttgagcaggatgtgtttccgtttattggtcaacgccccattgccgaaattaagcccttagagctgctggaagtgctgcggcgtattgagaagcgcggagcattggaaaagacccgtaaggtacgccagcgctgcggagaggtcttccgctacgccattattaccggtagggcggaatataacccagccccagatctcgccagcgcgttggccattcccaagcaaaagcaccatccatacctttcggctgaagagctgccttactttgttaaggacttggaaggatataccggcagcgtcatcacgaagaatgcagcgaagatcgttatgctgaccggcgtgcgcacgcaagaaatgcgctttgctacatgggaagagatcgatcttgagcgtgccatctgggagatccccgccgaacgtatgaaaatgcgccgcccgcacattgtgccgctctctactcaggtggttgaactgttgaaacagctacaaccgatcacaggtcactatccttacattttcataggacgaaacaaccgcagaaagcctataagtaaggaaagtgtgaatcaggtaatagagctgctggggtataaggggcgagctaccggtcacggtttcaggcatacgatgtctactattttgcatgagcaagggtttgactctgcctggatagagatgcagcttgcccacgtggacaagaacggcattcgcggtacctacaaccatgcgcagtaccttgagaaacgccgtgagatgttgcaatggtacgccgattttatctcgggccttgctcgctag

SEQ ID NO: 431081 - DNA, 546 bp, Serratia marcescens
atgataacgaaaataaaaagaacgataccgctgttagcattacttagtgcagcgatgttgacaccactggtgtacgcagcggatggcaatatcaatattaccggcagggtgttagaaagtgcctgtaatatagctaccagttcgaaagatatgacgattgaaatgggggaggttaatcggtcgatgttcagttctatcggtgatggaagtcctgaaaagatattcgatctggaaattgaatgtggggcttcttcgctcgtaggcataagacttgaaggtaaagcttcggatgctaatcccgatgtgtttgcgttggatgagataagtggagctaaagggataggattgaagttgataaccagggtgaatggcgatgagcgagtcgcaaagcctaatggtcgtccgacgtttcattaccaaataccttggaaccaacaacacaataagcagtgggctcgtttctatgctcagtatgtttcagttggcgataatatcagtgggggaagtggcaataccatgttgcaagtatcgctggactatctttga

SEQ ID NO: 431082 - DNA, 525 bp, Serratia marcescens
atgaaaagtatcatcaaggggctgctgttggtcggtagtggactgacgtttagcgcttacgctgcggacggcagcgtggatatggaactgacactcgctcatggtacctgcaatctgaccgcagacagcaaaaacatgcaagtgcaattggggaatatttcccgtgccgagctggcgtcaatcggtgcgaccagcaacccggttgattttactattagagcaaccgactgtgccccaggcttgagtgtcgagttcagatttgatggcgttgctaccagccaaaatgacagagcctttgcattagacagtggctctgttgccgagggggttggcgttcagttgaatgatagtgattatggggggagcaacatcaagtaccctaattacagttatggttatcagagcaatcctggtaaggatggaactttctctaaggcatttcaggcaagatatattgctttagctgagaaaataatccccggtacggcaaacgtcaccacccaactcaatctgacctatgactaa

SEQ ID NO: 431083 - DNA, 558 bp, Serratia marcescens
atgatgagaaaaatagcactgcccctgacgctgctcggtgccgccatgttggcgccgccgctctacgcggcggacgggaatattaatgtgaccggtagagtaatagagagtagttgcgtactggatgccagttctaaaagccagaaagtgaataaggggatgcgggctgcccaagaggtttggggtagattaggaggcggtggcaatatctctgtgcagttggcgggctgcccggacagcattagccaggtacgcatcaggtttgagggaacagcggtaagaagcaatgtttatccaggcaaggtttttgctaccgacaatagtgatcagcctgatgcagctaaaaatgtgggttttctcattagcaatgggcaggggggtaatgataatggctggtttggcgatcttctgagtgttaatgagttcagcccagcgattgaattgaaaaaaggggcagtgaataagcttgaattccgtacgggatataccaccgatagcaaaatgcctactgcaggggttgctcgtgctcgagtgcagtttagcctgatttacccttga

SEQ ID NO: 431084 - DNA, 501 bp, Serratia marcescens
atgaaaaagtatctggtagcttccgcactggcctgtgcggcgatctcttcctccgcattcgccgccgacggcgtaattaacttcactggcaaaatcgtcgacaacgcctgcgtagtgagtccgacgctgaacgtgcagatgggggatgtggcggcggcggcatttaaaaacgtgggggatgaggccgcaggacatggtaaggagtttttcctggagctgaaagattgtcctgccaacctgaaaacagccaccgtgcaactggacggcgaggcggatgccgataataaagatctgtttaagctcaccgccggtggcgccaccgggcttgccttacgtattaaggggccaaatcaggatatcgttccaggtggtaagtcagaagttctcacgttgcaagaaggcgctaatcttctcggtttcggcgcaatctacaagtcaacagataaagtcactgccggtgatgccaacgccactatccaatttagcgtttcgtataactga

SEQ ID NO: 431085 - DNA, 1254 bp, Serratia marcescens
atggaacagattaaatatgttctggtggttgatcccttttccagcggcgctgcttttgccaacagaataaaatctctcttcggctatgaggtcattgctcttatcacaaacgaccgtctccccgccgccgttatggccaccttccggcaggaagattattcgcaagtttttcactatcagtctcatgcggaaacggtacaacagatcgaggccgccatcggtcatgcgcctgactttattgtctgcggctcagaacctgccgtttacgtctttgacaaactctgtaagcaatgggatctgctacctaatgtatttgaacttagtcaggcgcggcgtgataaacatttgatgcagcgccagctcatgctggatggcattcgccacatcccgcattacaaatcgggcgatctgcaagatatgttgaaatggtgcgcagataatccatttgacgaatacgtgattaagcccgtcagttcatttggtaccgagggcgtttttttctgcaggaacacagcagaggttgagcgcgcgttcacggcgttgatcaacacgcttgattattccggcagcagaaatgcagagttgctgattgagcagaagatcgaggggacagagtatgtcgtcgatgccgtcagcagccgcggtgagcattatgttgtgaatattttcaggtatgtaaagcaggaggttaacggcgttcctatctaccgccagatgattactgagccggtggacgaacacgagacgcttatcaactatgttaaatccgtcctgacttcgttgggtatccgtaacggcacatcccataacgagataataatgtccgcggcgggccctgttttggtcgaaacgggggcacggatgcacggcgggttggggcctcatcttgtggaggaatgcaattcccactcgctcattgatctgagcctgatggcccgcattgcgccaaatgagcttgctgacaaaacccacatgccgcccgtactgaaacgctacgccgcagagtattttctctgttcgcctgaggcaggcacgctgaaagcggtaaacattgagtcgcagtgctcattattggaaagctatggtttttccgtatgcaaatacaacgttggcgattatctcgaaaaaacgacggatttggtcacctcgtatgggcgggtggtgcttttcaattctgacagggatcgactgcttggcgatgcccagcgtattagcgatttagaaacggccggtatgctcatcgctatgcaatga

SEQ ID NO: 431086 - DNA, 1029 bp, Serratia marcescens
atgaaacttgtctgcaatgaatcctctttgttaacagcaaagataagattgtttcgcctgaaacccgccggaaacggtgaaattcataatcagtcttgcgctccgggtgaatattttaggtttaacttcagggatgaaaataacagtgctttcctgcgatgctacacgctggtctctgcggaacaggggaagtattacgactttatcattgaagataagggcgcagggagcgcttcatcagtcatcagccggctgctggccgatagaaaagagatcgaagtgacggcccagggaggggaggtcaattttgattccatccggaaaaaaaatcaggtcctgctggtggcggggggcattggcataaccttgccccttgcattgatacgcgaatgcttcaaacattacggatacagcgctcccggcaaacatatcctgctgatgctgagctgtcacgacttaagttcggtcccctgtctgaatgaactattggatcttcactctcgatgtgactggttctcattgcgtattaatgtgacgcgcgcagtgctggataaaaccagcggcgttatcaggccagggagaatagatctggcaaccgccgacatcaattccccgccagaaacaaccgtgatatgcggcagcgtacgatttgccgaggcgatggtgtccgcgatccggctgcgtttcccgcagactcacgtcgccgtcgaggcgttcagctctatgccgccggctgtggacagagccgcagaccagaatgcccggggggaacgcatgacggtaaaaaatgccaaccgtgaaatttctgccgataccgataaaaccgttcttgataacctgatacagcacgatatccctatcagaaatatgtgccgagcgggcatttgcggcagctgtaaattcaggttgagcagcggcagtgtgcgaagtgagcccgatttttgcctgtcggcaaaagataaagcagacaatattcatcttgcgtgctgttcatttcccgagaaagacgcagttatcgagataatttga

SEQ ID NO: 431087 - DNA, 906 bp, Serratia marcescens
atgtctgatgattttgtcgtacccgacagtgaaaacgtcgcgctcatgctgaaaaaactctcgacgctttggaagaaccgggctgcggtgaataaagaccatcctgaatattccgagctggaatttgacgcatcgagaaaagacttcagtgaggcgctgctgccgttcaggcaacacgacgcctggcgggaagccccttcagaggtgaaggaccgttgcctttcttatgcatggggaatatataatctcaaaactatctatattgaatgcgatattgtcacgccggcatgtgaggacataataaaatcgcctccggttaattcgccaaaccgagccgaactccaggacgtcatgtcagaagcccttctggacgaagctctgcatacgcgaatgtcagtaatggcctctaactatatctacgatcgacgcgggcttgagccgctgaaccatactgatttcaatcttattaaatggcgcaggcaaatcctgaaggactgcaacgcggaatggcagagacggcttacccgttttgccatcgcctgcgccagcgagacgctgataacggattatttgaaggtgatggcggaagacaacggcattcaaaaggtctgtcatgaagtcacccgcactcatgccgaggatgaatggagccactcgagcgtattcagttacgtagcctacgacattgtgcgcgatctcagtttaagcgaacgaaaataccttagggataccatgcttaaaacggccgatctctttgccgacaacgaattgagcgcatgggaaagggcattcagccttgccggcatgccttacgcaagagagatcgtatctgaaacgcaacgctgtaatgagatcaatatttatctcgactcggcggagacggtcatttcaaggatcggtctataa

SEQ ID NO: 431088 - DNA, 1185 bp, Serratia marcescens
atgtttggggaaataagaaattttggttcggccgcgcgcagttttctgatcgccacattcctgatggggctgagcaatggcatgttcgacgccgtttacaatttttacctggaagcgcgaggcgtggataaaaccgcgacggggcatatttacgccgtggccatgatgatgatggcggttgcggtcatcccgctgatttttgccagcaggcgaatgtcgcagaaaaagctgctgcttatttttgctttcatctatgcgttgccgtttattctcctgccggttctgacgagcgtctggacgagcgccattacgctggggctgattctttcaggcatgatcgcgcaattgtcgctgggaaattcccttatggggtcgaatatcgacgccggaagcaggacaacgctgttcagctgcttttttgtctcctatctgggggcggcaatggcagggtccgtcgcggttagcctcgttacacacttctcgcaggctgaacccctaaggaattatcaagggattctcgcggcgtcattcttcttttccctgttgatgatttatttccgagttaaatctatccagggcgtcaccgagccgggcagcgatgaccgccggcttgcaggcgcaaagaacatggagtgggggaatttcattatcctgtttatcgccgctgcgctgctgggcgcttcaataacgcttattttccgctttgttaatatcgtcttcaaccttgcctatagcatgaacgtcagcgagatctcactgattatgggcggcgataaaatcgtcagcattgtcggcgcgttatttgcccctctgctggtgaaacgtttctcactgaaacctaccgtgatcgttgccggcgtgctgaccgctgcatgtttgttcgcccagtcattacatgttcctgtggcaatttttatcaccctttactttatcaggcttcttctcaactactgcctgatgccattgcttgatacgttggctattaccggtttttccaaagaaagaacgcttctgtcgaccagcatcaggcagctttcgttttatcttgggagcgcgctgtcggccgttatttatggcgggctgctcgatagcgggcattgggagaaaacgctgattatttccgcgggttttgcccttgctggcgcgattttcatgagtctaatccgtgttcatcacgaacattaa

SEQ ID NO: 431089 - DNA, 561 bp, Serratia marcescens
atgaataccacctatcttattgtccccggttttacgaactcaggcccggaacactggcagtcgtatatggaaagaaaatacagcaacgtcgtgcgtgttcagcaggacgactgggatagcccttcggccgcctgggtcgacaggctcgatcaggtcatcgcagagacgcgcggcgatattgtgctgctcggccacagctgcggcgcggtagccgtgacccagtgggctgcgacccatgcatgcggcagagtaaaagcccttatcctggtggcgccggcagacgtagacgccgaaacggcaattgagccgattaggcaacagcgtccgctgcctgcaaaacagctggggtttagcgcactgcttgttcatagcgacaatgacgaacacctcagcgaggcgcgggcccgttcacttgccgcgttgtgggggtgcgaaacccgccttttccgcgcagcgggccatctgcataccgccgccggctatggtgagtggctggatggcgagcgtctgttcgaagaatttaccggtgtcccgttaattaacgcgataacaaagggttaa

SEQ ID NO: 431090 - DNA, 795 bp, Serratia marcescens
atgaaggacatttccgtgttttttaataggctgaatttacaagataatctttcgcctgatgcgcattgtctcgctgcgctgcaccaggcccatttcttttctattccgtttgagaatttcacaatgaaggatggctttacgaaccagctttcatacgacgatctttccaataaaataatgcttaacaaaaggggcgggatctgtttcgagttttcggtgctgctgcagacgcttttcgatcatgtcggttataaatactgttcacggttagccagggtgcatgtgcctttgatgacgccggcaacccatcagctatttattgtcagcgtgaacgaagaacgatggattttcgacgtcggctttggtgccaaaggcccgcgagctcctttgctgcttacgcaggggtatacccatgagcacagtttcctgtcgtctcgggtcactaaacatgcggaacatggctgggtcgtttctgtaaaagagaacagtaaacccgatgccgtttgggaagatatttattcctttcatgatacggcgaccttcgcgccagacatcaatatggcttatttctacacgcttcattcgccgcagagccttcttaatacaaaccaggtcgcgagccttccgactgaaaacggcagaataagcatacgcaacaatacgttcacggaagttgacggactcacctcctcgtcatttgaaatcactgatagatatgcgctttcggcgctgttgtccgacaggttcgggattgaaattgcccctgaacattttcctgcagagagaaacccatga

SEQ ID NO: 431091 - DNA, 8151 bp, Serratia marcescens
atgtcattaaataaacttacgccggcacagcgtgcaatttgggctgcagccaaacttgatacgggaaactttcgcttcaatgcgagtttctttcttgatttagggcacgatatctgttggaacagcattgactccgcgctgagtcggctgagcgaagaagccgaattacagcgcgtctctgttcaggaaacggaagatgatgttgtccagtcgccgcatttccccgcccgcgcgctaatttttcaccatcgttttgccgaactggaacaagcccggcagtggatggcgcagcaaacccgtcgtcctttcgcgctggacggttcagcaccgctgttgcaatggcacctgatcgccctgggcacggggcaaaccctgctttactgcaagtaccaccacctggtgcttgatggttatggccaatctctgctgcttgcgcgcctggcagaaatatataacgccgcgcggcacaacacgccgacaccgccatccccctgggtcagcaacgatgcctggtttaataataatgatgactacgccgccggcccccacagccagcgcgaccgggctttctggacggcacatctggcgaatgccgaagggccgaccacgttaggaacccgaaaatccacgttcgccagagacctgttacaaatcagacataccctcgacgacgatctttaccaacaaattaccgccttttcatccgcccgcgccgcttcactgccgcagctgcttctgacactcttcgccgcctactgccaccgcctgacccaacaacaacacatccatctagggctggcggtaaccgggcgcgccaatcagattgccttgcaaaagcccgccatgcacgccaatgaagtaccgctgcggctctcatttgacggtatcgacagctttgagcagttggcgcaacacgcacgccaacagttggcgctggcaattaaacaccagcaataccgcaatgaggatatccaccgcgcgttggggctgggggcaccggaagataaactgacccacacgctgctcaatatcatttcgtttgaacaccccctcgcttttggcgatcgtctggccgaatgtcatcagttcaccaccgggccgatagccgatctgacgttgactatctttattcgcccccgcggcatcgaactgctgtgggacgccaacccggataaccactgcggcgagctgctcgaacgccatgccggcagactgatgcaattcatgcgctggtgtctggcccaccaggccatcgactgcccggcacagacgctgttgctgcccgaagaccggcaggccctccagtcattcaaccaaacctcgcgtccgtacgatctgcaactgacgttgccgcaatatattgaccgtcaggcacagcaaacgccgaacgccatcgcgttgcaatttggtgacgaaaccctaagctaccgcgcgctgatccgccgcagcgaaacctgggcgcgtaatctgttggcgcgcggcgtgcggcctggcgacgccgtcggcctgtacggcgaacgctcgctggccatgaccgttgcgctgctcgccattcaaaaagccggggcggcctatgtgccccttgacccggaactgccgacggcgcgtctgcaaacgcagctgaaacagtccgacatccgcactctgatctatctggatatgccgccggcgctggatcccgccatacaagaaatccacgtcggggccttatccgatgaacggccggacatcagcctgcccgcgccgtcgccggaggccgccgcgtatattattttcacctccggttcgaccggccaacccaaaggcgtcgtcgtcagccatcgcgcgatcgccaaccgcattttatggatgcaagaagcttatgcgctcaccccgcgcgatcgcgtcttgcaaaaaacaccatttactttcgacgtctcggtgtgggaattcttttggccattagtcgccggtgcaacgctggtcgtcgcaccgccgggtagccacaaggatccgcgtcagttaatcaccctgctgcaaacggcacagatcagcacattgcactttgtgccgccgatgctggacctgtttttagccgagctgaatggacagccgctgccgactttacgtctgctgttctgcagcggagaggcgttaaaaatagccagcgtcgaacggatgcatcagcatctgccccactgtgcactgcacaacctgtatggacctaccgaagcggctgtcgatgtcagctactggcattgtgcggcctcctcggcgccggccggcagcgtgccgattggctacccggtcgccaatacccagctttgggtgctggacgcgcagcaacgtccgctgccgccgggcagcgtcggcgagttatatatcggcggggttcaactcgccgacggctatatcaatcagcctgaactgagcgctcaacgttttctgccgctgcctgaatcgctaaaatcgctggcggcgcagggtaaaaaactgtaccgcaccggggatctggtctgtctgacggaacaacgggggctggagtttttaggccgcatcgaccatcaggtgaaaatccgcgggttgcgtatcgaattgggcgaaattgaagcccagctggtgacgctgccacaggtcaaacacgcggtagtatcgacgcaccgcagcggcaccgacgccgaacgtctgatcggctatctggtgctggaaaatacggctcatgacccagcgacaacgcagcacattgcgcgccagctcggcaacgtccttcctgagtacatggtgcctgcgctgtgggtgatactgccgacgctaccctatctcaccaacggtaaagtcaaccgcaaagcgttgccggctcccgaacaacaaccggcggtggagactgctgcgctgacggaggaggaacaacgggtcgccgccgtgtggcgacaggtgctgcaacgtgacgacatcgctccggacgccgcattttacagcctgggcggcgactccatgatggcgattcgggtgcgcagtgccctggagaaggcgggctacgccgtcgagctgactgccctttatcgcaaccccagcctgcgtcagttagctaaacagctaacgccgtttcagccgcaacagcgcgtcgctatcgcgccgttctcactgctcagtgaacacgatcggcaaagcatgcctgccgaactggaagacgcctacccattgtccgccatgcaaaaatcgatggcctggcaagcggaagtcgaacgcgacacctcggtctaccgcgttgtcacctcattgaccgtggagcttgcgctggaaccgacgctgctgcaaaaggcgatagaggaaacctgccgacgccacccgctgctgcgaagcagcttcgatctctccaactatagccaacccgtgcagctggttcacccacaggcgccggtaagcatcgcggcggaaacgtcgctgaaccatttaacgccggcgcaacagcaggcgtttatccaaaactgggttgagaaggcgaagttccgtcacctgccgctgaataacgcgccctgcctgacgttccatactcatgcactgcactcgcaacgtttccagctttccgtggttgagcaccatgtggtgctggatggctggagcgacctgctgatgctggacgaaatcgtcgagaattatcgcgagctgcgtgcgggacgccagccgcggcgtgagccgctgcagagccattaccgcgattttatcgcggcggaattgcaaatcatgcaggatccgcaggcagcggcctattggcaaacccaactcgccgaactgaaccccgcgccgctgccgcgtcgggagtcggtatccaccactcggcataaatgcgtacgcgcgcaattgccgccggcgctgacaccagcactccatgcgctggcggcagctcatcagcttcccttgaaagcgctgctgactgccgcacacctcaaagtgcaagccgtgctgacggggcaaacagcggtcgctaccgggctggtgttcaacggacgccctgccgcccaagatgccgacaaaatgattggcgtcttccttaatacgctgccgctagctctggcgctggagacggagtcctttgtcgcgctggctaaacgcatcgcacgcttcgaagccgactcctggcgctggggccgctacccgttgaccgccatacagcgcgactacggccaggaaatcgtgctggacagttacatcaactatatggatttccaccgcagctggggggatgaaaactcggtgatctcccaggctttcggcgtggccgacaccaactttacattggcggtcaactatttgatggatcccgtcagtcagcgcctgtcgctttggttcgactgcaatatcggccaactcagtgaaaccctgtgcgagctgctgccggactattatctgcgggcgctgcaacagatggtcgctatgccgctgcaagaggtgctggccgcaccgctgatgccgcccgctcaggagatgctgctgcaacagtggaatcaaaccgccgtcgattatcaggctgacgactgcgcctaccgtcagttcgaacgccaagcgcaacagcacccggatcgggaagcgctgtgctgccgccatgatagcgtcagcttcgacgagctcaatcggctggccaatgccatggcggcgcggctgcaagacgccggcgtcaaaccgggggacctggtcggggtctgcctgcgccgcagcgttgaactggtggccagcctgatcgccatccataaaaccggcgccgcctggctgccgttggatcccgattatcctgcagaacggctggactatatcgttaaagacgcccgcctgacctgcctggtgacccaaagcgaaaccccggaactgccggtcgccgttcgcatcgagtggcctccctaccgcgagttactccagcagcctcatcaagacccacggccgctggcgcaacgcgatgcgccggcctatgtcatttacacgtcaggctccaccggcaagccgaaaggcaccgttatcctgcaaaaaaacctgaccaacttcctgatgggcatggatggcgcggtcggatgccggcccgatgacagtctgctggcgctgaccagtatctcgtttgatatttccgtgctggagattttctggccgctgacccgcggcgccaatgtggtgctggcgccagagaacctgatcaacaacctggcacaacaagagagtgcccgtgaccgcagcctggatttcagcctgttcttctttggtgcggcaaccaataacgaacggcgtcaggaaggctatcaattggtgatggacgcggcacgctatgccgacgccaatggttttaaagccgtgtggacaccggagcgtcattttcacgccttcggcggcctttatcccaacccttcagtgatgtccgcggcgctggcaagcgtgacccagcgcgtcgagctgcgctgcggcagcgtagtggcgcctttgcacgatagcctgcggctggcggaggagtgggcgctggttgataacctgtccgccggacgcgtcgggctggctttcgcctcaggctggaataccaacgactttgccctggcgccggacagctacccgcagcgtaaaaccgtcatgctgaaaaagctcaaagagctgcgctccctgtggcaaggcggcagtttgcgccgcgtgaacggcagcgggcaagagatcgaactgacggtgtacccttctccggtgcaacgcgacctgcctatctggttcacctcctccggcgatatcgccaccttcgagctggcgggcacgtacggcgtcaatctgctgacgcacctgctcgggcaggacatcgtacagcttgaacaaaaaattgccgcctatcgacaagcgtggcgcagcgcaggtcatccgggtgacgggcacgtaacgctgatgatccataccttcttgctgccggatgaacagctcgccaaatcagtcgccaagggccctttccgcgactatctgcgcacttcaaccggcctgctgcgcgaactgagcgccagcatggggctgacgttccagcaggatctgccggccgacgatctggagtcgctgcttgatatggcggtagaacgctatttcgagcgctccggcctgtttggctcgccggaaagcgtgctgccgctgctcggccagctgcaccagtcaggcgtggatgagattgccgggctgatcgacttcggtatcgataatgaccgagtgatggaagggctacaggcgcttaaacaattacaaaagctgcaccgtaatgaacagcgcgacgcgccattcagtttcgccggcctgctgcaacggcacccgatcactatggtacagagcacgccttcctttatggccgcggtcatggccgaaccggccgccattgaggcgatggcctctttgcgttcggtgctgatcggcggcgaagccttcccggtcggattggcgcagcagctaagccggcggctctccgccacggtatacaacatgtacggccctaccgaaaccaccatctggtcaagcgtgcatccgttacccgccggctcggcgacgtcggcccgacgcattccgatcggcaagccgatcgccaatacccaaatgttgatcctcgggcctggcggccacccaagccccatcggcgtgcctggcgaactgtggatcggcggtgacggcgtgtgccagggctacctgggcaaagcggcgctgaccgccgaacgctttgtggtccagcccgctttcggccgccctttctaccgcaccggcgaccgggcgctgtggaatgccgacggcgagattgaattcgttggccgtatcgaccggcaggtaaaaattctcggccaccgtatcgaactcgatgaaatcgaaagcgccctgtcacgacatccgctggtgaaaaatgtcgccgtcgtcgccgccaggctggaaaacgaccgccatgaactggtggcatatattgaaactcacgccgatcgccggcaaacggacagctctgcggacaatctgatcgcccactgggggcaactgtggaataacgcttaccaggatcgcgccaactatgaggtcagccaagaacaggatcggcagtttgccggctggctcagcagctacaccggtgagccgatcccgccggttgagatgcacgagtggctgacccatacgctgaccaagatccgcgcctgcgaacgcgtccatctgatagacgtcggcgtcgggatggggcaaatcatgcgccacctggcgccgaacagccaatcgtaccatgggctggatctgtccgctgaagcgctggtggtcgcccgtcagtcgttgccgccggcgttgcagaacgccgcgcacatccaactcacccagggcgatgccatgcagcttgccgccatcgcagccaaaccggaggccctggtgatcctgaactcggttatccaatacttcccggatctcggctacttgaagcacgtgctgcaagaggcgctgcgcattacccacgaagggggcgtcatctacctcggcgacgtccgcagcctggatgaactggcggcattccacaccagcgtacagttttttaaagcgtcgccgctggcccgtgtcgcagagatccgtcagcagatcgcccgggatatggcggcagaaaaagagctatgcctgtcgttccgctatttccacacgttcaacacgctattcggcaccgcgcgccaactccgtctggagctaaaacgcggtaaacgggcaaacgaactgaacgatttccgctatgacgtcatcatcggccggcaggaaaccggcgcgccatgcgaagcgctggactggcccggtgccgccttcgacacacaggcgctggcggcgctgagcggccaactgcgtgatatcgacccgcagcggcgcgtcattattcgcaatctgcctaactaccgcctgcagagcagcctcgatctgatgacgctgctggcggcggcccacgaggagcagacccgttgggatatcgagaaacaactgtgggaggtgtccgaccccggacgcctctatccggaagatatcgccggccattttgaagcgttgggctaccaggtacagctgaccctgagccaggaagatggcctgcggtacttcaatctggagctgacgcaacgccagcccctgtcgtccgggcaccgccacgccggcaccgccgaggtatcccagtga

SEQ ID NO: 431092 - DNA, 1725 bp, Serratia marcescens
atggaaaaaaaactgaccatgactttatcacccacactctctaacaacccgttggcgcaagagcatgatgccgaagtcgccagacagctgcgcgaatttattcgcgacgtgctgccggaagcgatggtgcccgcacattttgtggtgttgtctgaactgccaaaactgcccaacggcaagatagaccgtaaacatctgcccacgccgtccagaaacgagcgcggccggcaggcgtacatcgccccgcgcaacccgcacgaggaaaaaatcgcccgtatctggcaggaggttctgtccgtatcgcaggtcagtattgaagacagtttctttgagttgggcggcgattcactgtcggtcgtgcaaatggtgtcgcaagtgcgtcgactgttcgatacgccgatcggcctgcgctacgtgtttaaaaacccgaccgttgccgctctgtccgcctatatcaagggcaagcaccgcacagcagcgagcagcggcttgcaaaacctcaccgacagcgaattgctggcagaagcccagttgccggatgatatccgcgttcaaccggacgctctgccggcaataacacgcgatttccgccagattctgctcaccggcggcaccggctataccggggcgttcctgctgcgcgagtttctcgatcgcgctcaggcgacgctttgggtgatcgtccgctccgatgatcctcagcaagcgcttgagcgcattctggacaacctgcagcagtatggcctgcggcggcccggcgacgaagcgcgcatcgtcggcattcccggcgacgtcggccggccatatttaggcgtggataaaaccacctggcgacgcctgtgccaggatattgagatgattgtgcacaatgcggcgatctccagctacgccatgccgtatcgtcagctaaagcccaccaacgtgttgggcacgctggaagtgctccgtctggcaggcgcgcagcgtatcaagccactgcactatatttcttcgctatcggtgtttcccggcaaaccgggggagcattattttcgcgaagagccgatcgcgcatcccaacggcctagctggggggtatcggcaaaccaaatgggtatcggaacggttgattacgctcgccggagagcgcggcctgccgttttgtatttatcgtccggggcaaatcaccggcgctcagagcagcggcgcctgttcgaccgatacctacctgaatgccgccattaaaagctgcattcagttgcaaacggcgctgccgtttgacgtgatgctcgaaatctcgccggtggatttttgtgcgcagtccgtcgcgcatattgccctctcagccggagagcagaaccaaatttatcacctgacgcaatcggcccccgtcccctggcgcgcagttatcgatatgctgcgcgtctacggtttcaagctggatgccgtcaactatccgcaatggtatcagcggctggccaacgcgctggaaaacggcgaagacaatgccctgggtaaattcttctcgctgtttggcgaagaggtgccgtctaaagacgccggcgatgaaggctcacacccccattatgattaccgcaatctgaatcgggcgctcgcgggcagcgatatcgccgcccggcagctcgatcaggcgctgctcaaccgctacgttgattattttattgccagcggctttctgcccacgccggacgacgcccttgcaacccgcggaggctgctgctcatga

SEQ ID NO: 431093 - DNA, 1752 bp, Serratia marcescens
atgactctcgctgcccctcgttttagcaccttgccggcggcgctggaccatcacgccgccgcaatccctgacgcccaggcgctgatgagagttaatcatccgctgcgcgatgaaaaaaatcgcccggtcagttatcggcagttgcgcgactcggcgctgcatctggctatcgccctgcacgaaacctgcgcgccgggcagccgcatcctgctgccgacgtcggtcagcgaatatttcgccgtcggctttctcgcctgcctgtacgccggcatggtcgcggtgccttccccgctgccaacccaatatcaacatcagcgccagcgcctgaacaacatcatgcgcgatgccggcatcgttgccctgctgtgttcgccggaggacgaagcggccattcgggcctggcttgaacagaccgatctccgttgcccgatacataccatcacactgaaggatgatgccccgtgccagacgctctcgctgccactgccggcgagcgacgggctggcgctattgcaatacacctccggctccaccggcgatcccaagggcgtgatgctgactcatggcaacctgattcataacgccaacagcttccagcaaacgctgggctacgccgacgacacccgcttcggcggttggatcccgcaataccacgatatggggctgatggcgcagctgttgccggcgctgctgctgggcagctgttgttacatgatgacgcccacacagttcctgaaaaggccgctgcattggctgcaaatgattgagcgcttcaggatcaaccactcctgcgcgccaaatttcgcctttgaactctgccgccgccgcataactccggacgagttgggcacgctggatctctcttcgctgcattacctgatcaacggctctgaaccgatacaggccgataccatcgccgagtttaccgactatttccttatggccggttttaagcccagcgccatgcaaccctgttacggcatggcggagtgtacggtgtttatttccggctcgccgccgcgcccgccgcgcatcgtcgcccgccaggaagacgccgctaaagccgcgcgccatttcgtgagctgcggtacggcgcggcactacgaggtgaaaattgtcgatccccacagccgtcgtccgctgagtgccggcgaaagcggtgaaatctggctccggggcggcagcgtcgccaaaggttactggaataagcctcaagccaccgaagagaccttcgcggcctataccgcatgcggtcagggcccctatatgcgcaccggcgacatcggcttcctgcaacatggcgagatcttcgtcagcgcacgcatcaaagaggtgattatcacccacggtaagaacctctatccgcaggatattgaacacggcctgcgccgtcagtttccgtcgctggcgggacgttacggcgccgtcttcggcgtaaatctggcggcggcgcaggaaacgctggtggtctgccatgaattacccggatccttcaacgatgccgagctcgcccagttcagcgcgcaaatccaaagctgggtacaaagcgaatggggcgcgccgctcgccgccgttatcctggtgccgccgggtgaagtcagccgaacgaccagcggcaaaatccagcgtacagcgatgaagcagcgcttttttgcgcagacattgcgcacgcgtcaccaatggctgtccagcgccgccagcgacgcattgggcaaactgcagccggcgcataacgccgccggggaggcctga

SEQ ID NO: 431094 - DNA, 1743 bp, Serratia marcescens
atggagaaactattacaggcgctggcgtcggttcgcgccgcgcccctgagcgccgaggccgcaacccagtggcgtcaggaagcggaacgggcatgcaaccgtgaacgcctgatgcaacaggataaagaggcggccttcccggcagaaacgatcgcgtggttaaaccggcaagacgcgcagttactctatctgccggcgcagtatggaggaaaattgcgcggtcttgagcaaatcactctgctttggcgcgcgctggcgggcatcgatctcaccgttgccgtcggacacggtaagacatttctcggtgccgtcagcgtttggctaggcggcagcccgcagcagatcgcgcagatccgtcaggcgctactggcccatgaaccgctggcctggggcctgacggaacgcggccacggcgccgatctgatggcgacgcaaaccacggcgacccgccagatgtcaggctggcgtctgcagggagaaaaatggctgatcaacaatgccacgcgcggcaacatcattaccgtgctggcgaataccggcggtgcccccagcggcgcgcgcaatttaagcgtactgctggtggataagcgccggcttccgcccggcagctggcgtcatctcgacaaagtgaacacctatggcattcgcggagccgatatcagcggccaacaatggcaggatgccccgttgccggaagaagcgctggtcggcgaggccggccagggacttgaactgacgctgcgcgcgctccagctcacccgtacggcctgctgcggcctgtcggtcggcgcattggacgccggcatcaaactgacccttgaattggttcatcagcaccagctgtatggacggcggatgatcgaactggacacggtgcagacgctgctggccgagtccaggctcgtcgcctggctgtcggaggtgaccgcctggatcgccgcccgccacgccgcctatctcccgcaggaaatgagcgtgatctccgcgttggcgaaagcgtcagtccccaacctggccgctcagcagctgactcgactcgaagaacagatgggtgcccggggatttgtcagcgacctgtatgccggcggcgcatttcaaaaattaatccgcgatcaccaaattgtccccatcttcgacggcagcacgatagtgaaccgcgtcgcactggtgccgcaattaccgacgcttatcagacagttccaaaaaggcacggcggacctggacgcgctggaccaactggcccggttggatgcccctccgccgcaggcactgccgttgacgtcgctgaccctcttttcccgcaacggctgttcgctggtgcaggccctgccggcgttgattgaacgcctgcaacaacagcatggcgaggccacggacgatatggcgctaagcggcctgctcagcgacctcctgctcatcagccggcaaaccgtcgacgagctggcaaggacgccgctatcctggccggcggtgccccaagcaatccttcatgggctgcagcgctacgaatggctgtttatggcggcctgctgcctgctgttctggctcaataatcccacggtgcggaacgcatcccgcgcccactggctgccgctgtgcctgcatctgatcgcccgcaatctgggcctcgccgcaagcccggaacaacacgcaggctggccgtcgttaaagcaatcgttcgccgagcagccatgctgcgccgacgacagccttttatcgcagggagcgcaccatgaacgttga

SEQ ID NO: 431095 - DNA, 1701 bp, Serratia marcescens
atgaacgttgaaaatacgttgaccgtcgcccgtcttgaacgcgagttaacaccggcgggcgacgacgcttacgccgattggtccgccgaggtactggccgcggacaacgccgatacccagtgggcagagggtgaagcccggcttgatgcgctggggttcaatcagtgtctcattccgccggcgctgggcggacagtggcgcggcatggatctcctgatggatctgttccgggtgctgtaccgcaaagatccctgccttgggctgggttacgccggcagcagttttatcgcctgctgcaatatctgggcgattggctcgccgacgcagcaacaggccatcgctcaggccttgcacaacaatgaaaaactggcctgttcctattatgaaccgcaacatggcaacgatctgacggcggtcgccttctctgccacgcggcaggacggacagtgggtgctggacggtgaaaagcaggtcacctccaatattgcccgctgcagctatttcgttgccttcgcacgcacctcgccgcagcccggcagccgcagccacacgcaaattctggtttccaaggcgcagttgcccgccggcgagctgcaagacctgccccgtcatcaaagcgtgggaatgcgcggtgtgcagcttggcggcatccgctgccaacgcgtccgtttgccggccgcggccgatgagcaactgctgatgggtgaggaaggaaaagcgctggagaccgccatgcgctccttccaggtgacgcgcacgctgctgccgggaatgtttgtcggcattctcgactcagggctgcgtctggcgacgcgttttagcctgcagcggcatttatacggccattgtctggctgagtttcccgccgctcggcagattctgagcggcgcgctgcttgacctgctgttggcggactgcttcagccggctgagcgcccgcgcactccaccttcacccggcgttctgctgcctgtatgccccggcggtcaagattgtcgtacccaaactgctgatcggcgccatgaatcgtctggccgatcatttgggcgccagtttttaccaaaccgacggcgcgtacggtctgttccagaagttgcttcgcgacgtcaaacccgccggcttcgcgcatattggccgtcccgcctgtgagctgacgctgttgccactgctgtttatgctggcgcgaaaaaccgctgcggtcgccgaacctgccgaactgtcgccacagctggctgcggaaacgccgattgaacaagccattgatttcgcccgtcttcaggtagcgccaggcggacgcgatccgttgttggacagcctgttacataacgccgcgctgttggatgacgcgctggcgacacgggtcatcgctgccagagctcaactgctgcgcgatctgcaggcgctcgacccgcgcgatatttccgccgccgcaccggtcagccactaccgcctcagcgcactgtacgccggcttgatcgccattggcagctgcctggcctggcaccgcgccatgccgcaaaaattaccgctgatcctgacgcagctgatggtgaaacgccaactcgcgcacctacagctcaacgccgacgacggcctgtcagaagcagaagccgatcgggtgttcgaccatctgcgcgatgcctatcggcggcaggtcagtttcgatttgatgcaatacccgctacagggttgggagaattag

SEQ ID NO: 431096 - DNA, 552 bp, Serratia marcescens
atggcaaagacattccatattttaggcgtttcgggcagcctgcgcgccgcctcgttaaacagcctttttttacgcgccatggaccgcgtatgccccgcgaatctgagctttgaaatctatacgcatctggatgcgatcccattgtttaacgcagataacgaagagacgcgcgatccaaacgtcgttcactggcgcagcgccctggcgcgggccgatctggtgctgctggtcagccctgagtatgcccacggcgttaccggcgtgatgaaaaacgctctggactggattgtcagcagcggcgagctgctcgataagccgctggcgttcccgaatatctccatccgcgcggagctggcgcaggcgcaactggcggaaacactgcaaatcatgggctgccggcagatagaagcctgcagtccgtgcgccactctggaagcaccgtatgtcttgccggacgccagcgagcaagcgctgatcgaacacccgcatatcgggccaaggctgcatgccttgtggcgcgagatcgaccacgcgctatccgcattacgttga

SEQ ID NO: 431097 - DNA, 258 bp, Serratia marcescens
atgaacgctgctgcaaacgacttgaaacactggctgatcgaacgcgtcgcaacctattgccggctggcgccgacggcaatcaaagaggatgccaactttgccgattacggtatggactccgtatttacgctgaccctgatcggcgaaattgaagatcgcctgggcctggagctggatcccaccgccctatgggataacccgtccattgagcaactgcacgcctttttagagcgtgaactgaaaaaaacggctgcctga

SEQ ID NO: 431098 - DNA, 1197 bp, Serratia marcescens
atgaatagcgccccacatctggaatgcttgcccaccaaacgcacctgcccgttcaatccgccggaagagtatcgttttattcgccaagagtgtccggtcgtccgggtgaaaacgccgcgcggtgattttgcctggctgattacccggttccatgatgtcaaacaagcgttgagcgatcgccggttaagctccgatccccgcagcaccgggttcccaacctatatttccggcgaggtgccgccgccgccgggctttttcctccagctcgatgcgccggaccatactcgcctacgaaaatcagtcaccgaggagtttctcaattcacacgttgagcaacttaaaccccgcatggccgccattatcgatcggcagctgacggaaatgctggcactgcagccaccagtcgattttgtgaaagcgtttgccgttcccgcttcggccaaaattatctgcgaattgctgggcacgccggtggctgatcacccctttgtgcaaagccggaccgacatcgtgctggatcgcagtacgccccccgaacaggcggaaaaagcggcgattgagctgatgggttactttgaccgcatcgtgacggaaaaagagctggcgccgggcgaagatttactgggcagactgatccgtaaagcccgcgccgataatcaacccagccatgaagagattgtcggtctggccgccctgctgttgctcagcgcttacgatacgatggctttggcgatggggttgggcgtggtaacgctgctcaataacccgcagcaacgccaggcatttcttgccgatccgtcgctgggcaacgatctggtgtatgaactggtacgttatctgaccatcaatcacgcgggcctgccgcgagcggccaccgcggatctggagatcggcggccagcagataaaagcgggtgaaggcgtgttgatcatgctgagttcggccaaccgtgatgaagaggtgtttgaacagccggatgccttcaacctgcaccgccgcgagaaaactcagctgggctttgggcacggcattcataaatgcctgggaatgcacttcgccagggccgaactggccatcgcttttcgcgccattttcacccgtattccgacgctgtcgatcgccgtgccgcagacatcgctgacctaccgcgacgaaatggtgctatatggcctgaaagcgctgcccgttacctggtaa

SEQ ID NO: 431099 - DNA, 1218 bp, Serratia marcescens
atgcaaggtacaaagaaagttctgtttctggtttacatcgcgctgctgtccacgatcgggctgtttgcctccgatctctacctgccggcacttgccaatattcagcagttttatcagaccaacgccggtaacgttggcctctctctgagcatctatatggccggcttttccttcggccaactgttctacggcgcgctttccgatcagctgggtcgtaaagcgccgctggcggtcggcctggcgctgtttctggccggaacgctgggctgcctgtatgcgaccagcatcgaagttttcctgatgtgtcgcctgatacagtctattggctgctgcgcggcctacgtgctgtggcaaccgatgatcgtcgatctctttgaagggcatgaggttcagaaattattcaccatgatgatggcactgggcggtctttcgccggcgctggcgccgctgatcggcggttacgttaccgccgcctttggctggaaaatggtgttctggttgctgttcgccctgacgctggcgctgatcgcctggacgctgtttatctatcgggaatcgttggctccggctaaccgtagccgtttttctgcctcacgagtgctgaaaagttacggttcattcttgtcgagccgtttctttatggggcacgccggcgcgattgcctgcggcattacccagtatctggtgtttctatcgctcctgccgtttattttgtcggatatcggttattccgccagcgcgataggcttaatgtatctccccattgccctgacattcatcgccggtaccgaagtggctaaacgactgtacccgtcgttgggtgatggcggctgcatgcaggccggaattatgctgggctgcaccggcgccgcgctgctgtttattactccctttttcctccccatcaccaccgcttggaaggtcattgcgcctttctgcctgattaccttcggtaacggcttcctggtgcccaccggctctgcctatctgattaaaaacttcgccagccaggccggtgcctgtgccagttcgctcggttttatggtcacgacggtagcgtttatctccattagcctcgcctcgctgctgactgcatcgctgggtatgatcggcgccatgaccgccacgatactgttatttgccgtgctgatggcactgtcgtttatctggagccgtaaatcacgggcagaacgcgagttagccctgagcgtggaataa

SEQ ID NO: 431100 - DNA, 1635 bp, Serratia marcescens
atggtagactcatcgttatttgataaaaccatttcagatcacggagcaatttcttcccgtggaggatatctttatcaagattacatcgcaaccaactatgtcctagatatgctttccgatagagatttaattggtgtgagatgcgaaaggattgatgatattgatctgataagaaaaaatgctattgagtatgttcaagttaaatcaaatttaagtggcggtatttggaatttaaaagacgtttacaagcttgataagatagagtcgattgtacagaaatctttgtctagcgataaggaatcaggtgtaatatcacaatttagaattgtgactaagacttctgtagggaaatccctgaatcatctgagtatttctcgtactgaaagaaaattaactaaagaacgagtaactcttattaaatcagtacagcgtcatttgaaaagcaaattgtcccctaacggtaatggggctgaatattgggttgataattgctattgggagtatgttcgttcggataaagaggcgatatatggagcacaagtgaagataatgagatatgctacggaaaaaggtatatctcttttttctcacgatgtagatgatatgtattataagatcctaaggttagtttctgaaatcgcctctaggtctaacaggcaatatagtgatgttgagaaaacttttagcactcaagaactaaatgaaatgattagcaattggattggaaaaatagctaatcaaagaaaaggcactagaaaaatttattcaaataattcaaaacctaattgcttcgttaaaattcatgagctggaatcaacagaaataaaatccaaaatgttagctttcttttctaaatatggtcgagataagaaagtcagatacggcagaattgtcgataacttgttcctatggttacctgagtttttactaacgccaagagaattagcagagaatgatagcactgaatgctttaagctatgggcggaaacattagagaaagtaaatcgtgaatttgatggtgttaaaaaacttaggcttttattgtcagagttaatactatatattttgattagagggagctacaaaagcgagcctatttctggaatgttatatgttcatgggctgaaaggtattaagcagtttaataatgtacatattgttgaacaggacttagagcaccatcttctattaggtaatgcttttattgaaggtgatgttagtattacggaagcgccggcatcattagcaaagtttctttacgaaaatcttgatgatgatatatttgacagtagtaaagaacgtatttttgatgcaaagcatgatgactatttgactaaccatgatgtaaatgaattactagaatttaatgcttcggtttcggactatcctgagcgttacagatttaccttattgtacatttataatgcagagtgtcttgctaatgggtatgtgaaagagcatcagtctcttataaaggaagaagtctcaaaaatatttaatattttttgttcagaggtgaagaattccgaggatacttatattaaaaattataatgttgatatttattttctttcgatggaaaagatagatgatctttctgacgagattatgaataggttggggcgaaatgaataa

SEQ ID NO: 431101 - DNA, 2142 bp, Serratia marcescens
atgaataataatcatttaaaagaacaaatttctaattcttctgagttgagtgagaaagagaagttcaaagtgttatcatccattttgactctttttgttaatagaaagacagaaagcctcggcagagagttcactataagagttttagagcaattaaaacattatagtgatttttcaatgcttatacgatctatggtgcgtaaagctggattgttcccttatttaaaaagtgagtttaacgttctcactttgaatgaggagttacttcttagctcttataaacctattaatcgacctgatgattttattttccactcattacaaaaaaaagtatactcctacttactagataaaaagaatgtggtattaagcgcttcaacgagtgtagggaaaagtgctattgttgattctttagtgtattcaagaaagttcaagaaaatagttataattgtacccacaattgctttgattgatgaaacaaggcggagattgtcgaatcttgtaggagctgattttcaagttatttcacatggttcgcaaaaggcgcacagcaaaaatttaatatatgtgctcactcaagagcgtgtgctggaaagagaagatctcgaaagtattgatcttttgattcttgatgagttttataagttaaatattgacagcgatagcgacttcagggccatcacactaaacttagcattttcatttttaatgaaaaattcaaaacagttttatttgattggcccaaatataaagtccattactggtttgagttttttaaacaaaaattatatttttttatcctctgacttttctactgtcgctctaaacattcatgaacataatttacctttagatagtgatgtaagaactgctaaggttattgaccttttaacttcagatgacgcatgcaccttaatatattgccagtctccgcaaagtacagtaaggcttgcaaatgaattgatacttagcaataaattaaaagctagcgttgttaaaagtaatattgcggattcatttatagaatggattaatgaaaattatcattataattggattgtctctaaagctttaagaaatggaataggtattcatcatggagcactgccacgagcaatacagcaggaaatgatcaagctattcaattcgggcaagattaaagtgcttctttgcacatcaactataatcgaaggtgtcaatacctcagctaaaaatgtcataatttatgaccgaaggaatgctaacccagtcgttagtatgtttacttataaaaatattcaagggagagctggacgaatggggcgttactttgttggtaatgtacactgtttggaaaagcgccctgaagaatcagatgatgatagtgatgttgttgttgcacctggagtacaatcaattgactctccattaaatttgctatgtggattggacaacgaaattctaactgaagactctagagatagattgcgtaattttcaagaaaacaacttaattcctttcgagatttttaaaagaaatacaaaatatcatccggggttaatttctgatttggcttcatttattcaggtgagaatgaataatggctggagtgatgttatgtggtcgggtatgcctaatagatcgcaaacttatttcttatgcgattgtattttgattcttgaatcgagatcattaggtagggctcgactgtctaatattgacgaccttgttcctgtaatcattcaatatcttaactctggctcatatagtgactttgttaagtcaaagatagagtactatgaatataaatctgatatttcagatactatagattggttattggcatttttgcgaaactctattgggcataatataccttatgcaattagccttacatctcaattgattggttttctgtgttctttctatggctacaaagatactcatgattatggtcttgttatgcataaaatggaaaattatcatttgccaggtgtttattctgctttggatgagtttggtgtgcctatacaggttgttgaaaaaattgtaggtaatagtccctcagagcttgatcttgatgctcttttaagtgaaataaaggggtgccaatatcaagatctaaaagcaattgagagatatttcttgaggaatttaagttga

SEQ ID NO: 431102 - DNA, 255 bp, Serratia marcescens
atgatgcgctgcccgctgtgcacccatgcgtcctatactcgcaccagtcgctatatcacggagcggacaaaagaggcgtattaccaatgtcagagcctgacctgttcttgcacattcaagacggtggaaagcgtcgataaaatcctgtgccagccgatacaggcacaaccggccgatgagaacgccctgccaccgccggagaaacggacattgaaccgttatcgccgctacaacagcaatccaaccctgcactaa

SEQ ID NO: 431103 - DNA, 726 bp, Serratia marcescens
atgagcaccaccgccttaccgaaatacatcaccgataaactgcaagccctgcgcgacgctcgcgccgcccacgacaaaaactaccaggcgttgaccgacgtcgtaaccggcattgcccgctgccaccaacagaagaaagacaccgaagtgcagagccaggaggcagaaagccagtggcgccccctgtttcgtaaactgcgcggagaaatgacgccggaaccgcaagcgcaacaccacagccggatttccaagcgggagctggcgaaagagttcgacggactgattgaggagatggagctggacaaaatgcagcttcacctcaactgcggcggcacagccccgaaggtggtgagcgcgcacaaagacgccctcacgacctttgcagctcacgcgatgcatcaggccgtggatgcgctgagcaaggcgctaatcagccctgacgttatcaaggcgtgtgcactggcttcacgggcttacggcgtctatgcggacaatccgatgaggatgattgagctacaggtacagggcgcactacaaggccgcattcgcgctaccatggctacgcaaaatatcgaccacccggtgcttaatgagattggcctgacgataccggaagaaaccggcgtattgcgggagcgacaaagatgcccaatgtgccagatgcgtggggcaagagaactggcggaaaaacgccgtctgctgcaagaaaaaggagccaaatcatga

SEQ ID NO: 431104 - DNA, 264 bp, Serratia marcescens
atgttgaccgtttccacccccgccccatccactctgtcgccggtgcttcctggcggttacaccccacgcgagcgctttatccgcctaccggaagtgctctacaccaccggcctgtcccgctccaccgtgtacgagatgatgagccgccggcagttcccggcccaggtctccctcggcggtaaaaacgtcgcctggctggcctccgaggtcgagcagtggatggatgaacgtatcgctaaccgtcaccagggggccgccgtatga

SEQ ID NO: 431105 - DNA, 246 bp, Serratia marcescens
atgatgcagctaacctttggtcgccagcatttcaccctcgatgagcgcgacgcgctgtttgtggcggaagctatcctgttgcagcgtaaagagcctggcgtcgtcttaccggagcaccgcagtgaaaaacacggcgttattcgtctggcgagtcgccaggcgcagccgcgcctgttcagtgccgggccggtgccgctgacctgcgcggcggccgatacccgcaacgacccgcttaccgactgttga

SEQ ID NO: 431106 - DNA, 564 bp, Serratia marcescens
gtgaactacgccattttggacgacaataatttctacactgcaggactgcgctatttaattcagcgcgacggtgaaaatagtcatatcactacggatgatattcggtggcattggaggctgctgacgatggatatcatcatcgttcgatgccgcttctcgctcacggcgagccaacagacgctgctcgacattctatcgaggctgggggccggtcgatggaacggcaggctgtatctttgctgcaatgcacagagccgggccttggctatgcgtatgagcaagcgatatatctcgttagagatccttcttctggacgacggtcaaagtctgcagaaaacggcccagctactggctcaagggtcggcgctccccgccgttcagtgtctggatcccagtctcaccgatgctgaatttaccgtactaaatttattaactcgcggatttccagtacggcgcgtggccagaaccgcgcgcatgacggaaaaaatcgtttcacagcataaatgcaatgcgctgaaaaaactcaacgtcccaaatttactcaggcttttgaatccagcatga

SEQ ID NO: 431107 - DNA, 1164 bp, Serratia marcescens
gtgaaacgtttaattagtctgttcgtgttgttgatcttgtggagcagtcatacgttggctgggggaccggccggcagaaataccagcgtcagcttcagctacgatcggctgacgccgcccgcccaattagacatctggctgcatgagtcgggtgggtttaatcccgcagatccgcaaaagtgggggcgtaataccctgacttgtttgtcgcgtactgatgctaccaatggcgcctgcatgacggcaccggtctggtttagcgctaatcctgcggcgccttatgcgataaccctgcgttttactcatgaactgagcaagaagaccgtggacgtaaaagtctatggtgaaaaacacatgttcataaatagcagagtctttaattttgccagctatgtgaccggtggcaccggagatatcgctctctggaatagcgagccctatttcgacttttatatcgtgaaaagcgagctggaaaaactcaatcagccggggatctggagcgcgaccctaaaacagaacttgcgtgagtgggggagtgccgaatgcggagggaattttaacgacggcaacgtgggctgccccggttacctgacgatcgccaactggcaggcgaatattcgcctcgaggtgattgattcaagcaatcatcagatttatttgcccgctttccctcactccacgccggtggtgaatctgaatctgaatatgagcaacctgccagggcgcccgggcgggagtgaaatcaggggacaatcctcgttggacatgtgcctgtatgacggcaataactccgccagcagccgcgtgatattgcgcttcaccgacgacggtgtggcggcggcagaccgcgcggccggcgctttttccgtctggcggcgcggtggtagccagagcagcgcacgtgaccgggtggattatcaggtctcggtgaccaaccctgtgaccggcgcgacagaaaccgccagcaacggtgtggatatcatctggcaggggactaatgatcggaacattctgcgtcaggtagtgctgcccggcggcagcgagagcgtgctgtgcgtgcctgcaccgataacgctcactacgcctgcgtttgccgccgacagtaaaacggcgggtgactataccggcatgctccacgtgatttatacccccagcaccctgtga

SEQ ID NO: 431108 - DNA, 2739 bp, Serratia marcescens
atgtctctcccccgtaatattctcctttttgccgcattgttacccgcatccattcagcaaccctgcgcggagatggctattccggaggggttcgaggagttggcgaaaaaccagcgcttatggattgaagtgacgctttacggcgactcccttggcctgttcgagacggacatgaacctggagagcgtgcgtttcatacagccggagagtctgctagacgctatcaaaagccgttttaatgatgatccccgcctactttcggccatcagtgcggtgctggccgcgccgatgccccgtaacggcaacttggcctgcagcagcaacggcgaggcgcttggctgtggctatatcgagactgacagcgccgcggtgatttacgatgaaaacaacgcgcgtatcagtctgtttctcgacaagcactacatgccgaagccttcggaagataaacagtggtttcaacctacgcgtgaaacagagaatgcgctcgtccatcagcaaaatatcaactttgtcgccgatcatgattatcaatcggtcaacgtgcagggcaacggtgcgctggcggtgacgcaagatggctatgtgaacgttgactggaactggctggggcaacgctcgcgcgagcagcacatgcaggatgtgacggtcaataacgcctggtttcgtcaggacttgtggcgccaatactatgtccaacttggggagatggatacccgcgatttgttcagcaacgccgggggcaacatcacgctcagtcagttgcctatcggcaagatccgcggcatgcgcgccggttctacgcgcgcctggataaacccagctcaacaatcgcaggggacgccggtcaccgtatttttgtcgcacgacgcgcgcattgacgctcggcgtggtaatcagctgctgggcagtttttacctgaatgccggtgcccagacgttggatactcgagcatttcccgcgggcagttatacggtgacgctggctatttatgaaaataatcgcctgttgcgtaccgaagacgtcccgtttacgcgcacgggagtgaccccctttgaccgtgtggagtggtttctgcaggccggcgaaacggacaatgactcgccggaagactctcgttcacccgtggcgcaagccggcgtgcgtctgccgataactgacaatctggcgttaaccagcggcgcgacggtgactcgtcagcatcgatttgcggaaaacgccctcgactggcgccacggttttaacaccggccctgtcgacggcgtcctgagcactcgctttagctacctttatggcagcgagggtgagcgtggcaacattcagcaagtgagctacaacgacggtttttcgctgagtttctaccgcaacgccctggcggcggaaaactgcgacaaccgtaattcgggattttatggcgttagcggctgttatcgttcgctgtcactgatgttctccgttccggtaggaagctggtacgcctcactgggttattccgacaatcgcaatgaggggcgttatgtctcccgacgcgacttgcccgccgacgatagtcgtcgtgacaacggattgccctgggagcagatatctatgactcgttcgcattcccgctcctggcagtggggcttcagtaattcgttcagcaccaacggattgaacattaacagcagcctcaacctgtttatgcgcagcgataataatcacgatgccaaagacaaggggggctacctgagcgtcagtttgtccctggctcatccgcgccagggtgaaggttccggctatacctcgctcggcgcgacctggcaacaacagcaacgtcaggctggcactctcagctacaacgtggcgcacaactggtatgccgatgctcgcggagaaaatgaatatggcgtgagcgcttccggcatcaacggcgattcgctgaatacctccgtctatacccgtcagggcggacagtacggtaacggcagcctgacgctgagcgacagctgggagcgccagtcccgccaccacaccctcagcagcagcggaaactacagttcgaccttcgcactttcccgttccggagtgtggctcggccgctggggcgatggacgtccggcttctgctatcggggtggatgtctcggcgcccgacgatcagcaaagttcccggattgccgtaacgcttgacagtggggggagcgcagaggttgccgccaaccgccgtgcgctgtttgccgtgccgggttaccagcaaaccacgctatcggtgaacgaatcattggaggtttcccacggcgccggcagcgaaatcacacagggttccggcagccgaacggtctttatggtaccgggcaaaatgctgctccgagaggttcgcacggtggccagctacacctggcttggccaactgctcgacgagcggcatctgccgttgtcaggcagcgtgccgctgaacgtcatcggctggagcgatctcggtgacggcgggttcagcgcgcagagcgaggcgctgatcgacgccttgtatctggtacgcaatcagcagttctatcagtgcgcgctgcaggtcaaaagcacgcgcgacgtcgtgcgctatgtcggcacggtggcttgtcgtgcgctgactttctcggcgctgccggacaacgttcagcgcagggcgcaattaatgatggccggccgtgcacagcctgctggccagaccgccatgaataatcaggaaactacagccacagggagttcacgtgaaacgtttaattag

SEQ ID NO: 431109 - DNA, 507 bp, Serratia marcescens
atgcgtcattatattaaacctctgctgatggctactgcactggccacttctttcagctcacttgccattcaaaaagacatcaccgtcaatgcgagcgttgactcccagctggatatgacccaagcggacaataccccgctgccggccagcatcgatatgcagtatctgccgggacgggggttggagagctatcgcttgaacaccaaagtctggtctaactccgccaccagtaacgtcaaagtccgtctggtcagtgctgcacagttaaccaatgcggatggtgatcagagtgttccgttgacggtacaactgggtgataaggcgctgacgaccaccgacgccgaattcaccggtgccgagttgttcccggggaccgtggaaaacggctctgcggtactgccgctcatcatttcccagaccaccaaaggcattctgaaaaccggccagtacagtggcgttgtcagcctgatgttgactcaggcgaccaccgcggaaggcggtgcgtaa

SEQ ID NO: 431110 - DNA, 744 bp, Serratia marcescens
atgaaaaacaataacgtatcccctgctgtgagcatggcgagaacccttttgctgttattgtgtttattcaatggtgccgcagtggcaaatatgagtgtttatccgatggagctgggtatcgatgcttcaggaactgcgatcattaaagtagcatccaaaagtgatgatattcagtttgtccgggtaacgcaaaagagaattattaacccaggcacgccacaggaaaaagaagtcgatgtagcctcatggaaaagggagggcctggttgtgacgcctgctaaatttgcgcttgctgccggctcaatgcgcgttgtgcgtttggtatcactgttacctccgacaacggagagtacctggcgggtttattttgaaggagtgaaacagcctgacggatttttatccggagagaataaaagtcgtttagcagaagcgaagctgggagtgaatgtgatctggggggctctggtacatattgcgccagagaatccggttgtttcgctggaaattgatcctgctcgcggtgagattattaataaaggcagcgtgagaactccgttaaaagaaattggattttgccgtgccaatgcatcgtgtaaatggattaaagaagacgctaccgtgtatccgggtacgcaaaggaaattaaagtccctgagtgcgaatagtagttcaacttacaaatttcgctactttaactggctgagtaaaaccagtgaggaagctgatttacctgtcgcaaaataa

SEQ ID NO: 431111 - DNA, 765 bp, Serratia marcescens
atgttatttatgttaagcaatgcattaatatttgaccctgacacacaaaaaatcagtcttgcaggccaacccgactcagccgtaacgctgtcagcgcctgctgttcgtttattattggaattcattagaaatagaggaaaagaactcagcagagaaacattaattacccgggtgtggcaggactttggctatacaccatcaggtaacaatctcaacaaagcggttagcgagattcgaaaagcattccagtcactgggagtacacgcatctcctattgttaccgtaccaggcaaaggattttattttgatgctgacgtcacaggacaaaaacgcttatgtaaagctgccactatcgagcccgttcctccaccgcaaaagacaaagccattcaaaagaaggctaagcatctcaacacagcggccctactgtcttgctgcgttagtagtatcaattttaataggaggggggtatttattttcagaatatgcgatgaagtcatcgaaagccataaagctgccaaatgaaaaacttgggcagtgtactgtctggcggataaatgcccctgaaagaccgattactttatctaagctgcctatcctgctcagtgagaacaacctggactgccagcgtaataagtatgatatctattatttcagcactcgtttccctctcactaatgcggatgagatttttattggatcctgtccagaaaacaaaaagaacttatgtaaaacaattcgttataagagtggggttgaaaaatga

SEQ ID NO: 431112 - DNA, 477 bp, Serratia marcescens
atgaggttcagaattctgttaatcaccggtggcatattggcagtgggattactggcaatctgcctttctcgcaccaaggcggtgaaacgggacatgcttgcatgtaccacagagtttatttttacccgaaatgcaggcaaagccagtgaggtaagagtgaatgtcatcacccagttttattttcatcgcgacggaaccggaatcactacctacaaaggggcggcctccagccaaggacaggccatgatggtggatcgcgatgtgaattttacctggaagccgcgcagtgatgcaggaatcattgagctgacatatacgaagacagttcggcggcataacgataatacaccgggcgacgtgtggggtgactttgcccggagcggagctcaatactatctgaccattgcagaggtcgccccgtcgatctggttaattcaggacaggaaatatccaacctacctgtgtcgggaagagtaa

SEQ ID NO: 431113 - DNA, 699 bp, Serratia marcescens
atggaacactttcctgcactgaacgctgattgcttcgatcagctgattgctgaacgcctgcagctccaggaaccgccacgcattctgattttgtatggctcggtaagagaacgttcttacagtcgttttgcagcagaagaagcgggtcgcctactgacggcgatgggggcggaggtcagactgtttaacccctcaggtttacccctgccggatgatgctccggaaacgcaccctaaagtcaccgaactacgcggactggtcagatggtgtgatggaatggtgtggagttctcctgagcggcatggggcaatgagtgcggtgatgaaagcacagatcgactggatccccttaagtgaaggtgcggttcgtccttcacagggcaaaactcttgcggtgatgcaggtttgtggcggctcgcagtcttttaatgccttgaaccaaatgcgtattcttggacgctggatgaggatgttcactatccccaaccaatcttcagtagccaaagcttggcaggaattcgatgagaacgggcggatgaaaccttcgtcctggtatgatcgtatcgtcgatgtcgccgaggagttgtttaaactcacgctgctgctcaaggggaaaacaggttacctggccgatcgctacagtgaacgaaaggagagccatcaggagctttcatcccgcgtcaatcaggacaaaatataa

SEQ ID NO: 431114 - DNA, 1290 bp, Serratia marcescens
atgattttggcagggagtatctttatactgacgctggtcctggtcatctggcaaccgagaggcctcagcattggctggagcgcaagtatcggagccgtactagctctgggtacaggggttatccacattcatgatatccccgtagtctggaatatcgtctggaacgcaacagcggcattcattgcggtgatcatcatcagcctgctgctcgatgagtccggtttctttgaatgggccgcgttgcatgtttcccgatggggtaatgggcgcggccgcctgctgtttacctggatagtaatgcttggcgctgctgttgctgcgctgtttgctaacgacggtgcagcactgatactgacgccgattgtgattgcgatgctgctcgcactggggttcagtcaggcgacgactctggcctttgtcatggctgcaggattcatcgctgataccgccagcctgccgctgatagtttccaacctggtaaatattgtctcggcagatttcttcaacctgggctttacacagtacgcctccgtgatggtccctgtgaacctggcggccatagctgccacgctggttatgctccatctcttcttccgccgcgatatcccagccagatatgacgtttcactgctcaagatgcctgccagtgcgattaaagatcctgagacgttcagggcgggctggattgttctgctgttcctgctggtcggtttctttgttctggagccgctggggatccctgtaagcgcgatagcagcagttggggctgcggtgcttttcgtggtagcaaagcgtggccgtgccattaataccgggaaggtgctgcgcggggcgccctggcagatcgtgattttctcgctgggtatgtatctggtcgtctacggcctgcgtaacgcaggactcactgagtatctttctgccgtactcaatatgttggcagacaaaggcttatgggttgccacgttcggtaccggcttcctgacggcgttcatgtcgtctgtgatgaacaatatgccaacggtgcttattggtgcattgtcaattgacgggagtgctgcgaccggcatcgtcagagaggcgatgatttatgccaatgtgattggctgcgatttaggtcctaaaatcaccccgataggtagtctggcaaccttactatggcttcatgtgttggcacaaaaaaacatgaccatcacctggggatattacttccgcaccggcataatcatgaccctgcctgtgcttttcatcactctggccgcgctggtatggcggctctctgtcactttgtaa

SEQ ID NO: 431115 - DNA, 426 bp, Serratia marcescens
atgagcaacattaccatctatcacaacccggcctgtggaacctcacgtaacacgctggagatgatccgcaacagcggtaacgaaccaaccattatttattatctcgatacgcccccgacgcgtaaagaactgatcaaactgatttcagatatggggatttcagtacgcgcagtgctgcgtaagaacgttgaaccttatgagctgttgggtcttgatgaagacaaattttctgatgagcagttgattgattttatgcttcagcatccgatcctaattaatcggccgattgtagtgacgccacttggcacacgtctttgtcgtccctcagaaattgtactggatattctacctgaagctcagaaaggttcttttaccaaagaggacggtgaaaaggtcattgacgaaacggggaaacgagttaaataa

SEQ ID NO: 431116 - DNA, 126 bp, Serratia marcescens
atggacatgcttaacttattcatcatgatgtatctggccggaacacggcacaaaactatttactatagtcagctcgaaattaattcatttaatttaaaaaaaaaccggcctaagccggttgactga

SEQ ID NO: 431117 - DNA, 2082 bp, Serratia marcescens
atggggaatagcgccaacgctctgccaccggccgctgaggcccgcaatgcatcacagaagggcggcgggcaagacaaggccgaggctcagcgcaaggccgcgcgacaggcacagactctggtggccgctgcccggcctcagaccggcaacgcctacctgagcgccaaaggctggccggaggcagaaacgctgaccttgaacggccagccgctgcgcgtcggcggtatcaccttccagcccggcgacctcttgttgccgttgcacaatacagggggcgaggtggtcaacgtgcagctgattaacgccgccggtgacaagcgcatgctggcaggcgggcaggtgaaagccgcctgccacaccttgaatgggccggacaacgcggttatctggctcaccgaaggctacgccaccggtctcaccgtgcaccgcctgaccggtgagacggtgtgcgtggcgctcaatgccaacaacctggcggccgtggcgcagcagctgcgcagccactacccggacgcacggctactgctggcggccgataatgaccgcagcgacactgggcagagccgcgccgccgaggcggccacgctcacctgcggtgtcccggcgctgccgcccacagagggcgactggaacgatgtctactgtcagcagggcgctgagtccacacgtgccaagctacaggcattcagccagccgacgtggccgagcccgttcgacacgctgagcgatgctgacttaaaagccatgagcgccagcgagaaggccgaactgctggccgagcactacggcaacaccctggcggtgccgccggtaggggaagaactctgccgctatacgcgtggcgcctggcaggtgctgccgcaccggcaactgagccgggagattgccgcgctgttccagaaggtgcgcgcgccgttctccgccgccggtatcaacagcattttggacaccctcaagctgatggtgccgcagatgggcgacccggcccgccggttgattggttttcgtaacggggtgtttgataccgtcagcgggcagtttagcgcccaccggcaagagcactggctgcgcaccgtcaacagcgtggactacacgccgccgcgtgccggggagaacctggctgaccatgcgccgcacttctggcagtggctgacgcgggccgccgggggcaaccacgataaacaggagcgcatcctcgccgcgctctttatggtgctggccaaccgctacgactggcagctgttcctcgaagtgaccgggcccggcggcagcggcaagagcgtaatggcagccatcgcccggctgctggcaggtagtgacaacactacctccgccaccatcgacaacctggagtcggcgcgcgagcgggccagcgtggtgggttactcgctgattatcctgcctgaccaggagaagtggagcggtgacggggcgggtatcaaggccatcaccggcggtgatgcggtcgctatcgacccgaaataccgcgacgcctatgccgcctacatcccggcggtgatactggcggtcaacaataacccgatgcagttcagcgaccgcagcggcggcgtctcccgcaggcgtgtgatcattaccttcccggacgtgataccgctggccgaacgagatccgcagttgttggacaaaatcaccaaagagctggctgtgattgtgcgtcacctgatgcagcgcttcgccaatccgaacgaggcccgcaccttgctccaggcgcagcaaagttcggacgaggcgctgaccatcaaacgccaggccgacccgctggttgacttttgtggctacctgacggtgctcggcaccgcagaagggatgatgataggtaatgccaacatcaccccgccgaacccgcgccgctacctgtaccatgcctacctgtcgtttatggcggcacggggctatcagcatgtgatgaacctgacggcgtttggtctcgcggtaccgcagacgctgagagagtatgagaaaaccctgctcaagcgtaaaacccggctggggatgcaaaccaatgtggtattgagcgaagagtgcgaagcggactggctaccgaagtgcggggcagtgtga

SEQ ID NO: 431118 - DNA, 354 bp, Serratia marcescens
gtgcagtatgtgatagcccagaacaacctgtgggccagcccgctcgatcagcagctgcagcaaacgctggtcaccaacctgagcagcgcgctgccggggtgggtggtctcttcgcagccgatgagcagcgatcaggatgtgctgaacgtgaccatcagcggcttccacggccgctttgacgggaaagcgatcattcgcggcgagtgggtgctgaaccgccaggggcgtttgatcaaaaggcctttcaacctggagctgaaacagggtgaagatggctatgatgccctggtgcgcacgctggcgcaggggtggcagcaggaagcccaggctatcgccaaggtgttgtccccctaa

SEQ ID NO: 431119 - DNA, 2334 bp, Serratia marcescens
atgagcgcccagttcgtttcccagaccgtacgcaccgccaccggccactggccggtgatactcccggccctcggcattgccttgcagccgaacggcaagccacaaccgtgtccgacctgcggcggcaaagaccgcttccgcttcgacaaccaggaggggcgcggcacctggttctgcaatcagtgcggggccggtgacggcctcagcctggtggaaaaagccttgtcactgtctgcccgggccgccgccgaacaggtggccgccgtgatggggaatagcgccagcgccttgccaccggccgctgagaccgctcattcaccacaagacaaggccgaggctcagcacaaggccgcgcgacaggcacaggctctggtggccgccgctcagtgcaaaagcggcaacgcctacctgagcgccaagggctggccggaggtggacaccctgaccctgcacggccagtcgctgcgcgttggcggaataaccttccaccccggcgacctgctgttgccgctgcataacgccggaggcgaggtggtcaacgtgcagttgattaacgcccacggagataaacgcatgttggcaggcgggcaggtgaaagccgcttgccacaccctgagtggcccggacaacgcggttatctggctcaccgaaggctacgccaccggtcttaccgtgcaccgcctgaccggtgaaacggtgtgcgtggcgctgagcgccaataacctggcggcggtggcggagcagctgcgcagccactacccggatgcgcggctgctgctggcggctgataatgaccgcagcggcaccggacagacccgcgccgccgaggcggccacagtcaccggcggtatcccggcactgccgccctcggaaggcgactggaacgacgtttatggccgggaaggggccgaggccacgcgcgcccagctccaggcgttcagccagccgtcgcagccgagcccgttcgacacgctgagcgatgcagacctcaaagccatgagcgccagcgagaaggccgagctgctggccgagcactacggcaacaccctggcggtgccgccggtaggggaagagctgtgccgctatacgcgcggcgcctggcaggtgctgccacaccgacagctgagccgggagattgccgcgttgttccagaaggtacgagcacctttctccgccgccggtatcaacagcatcctggacaccctcaagctgatggtgccgcagatgggcgacccggcccgccggttgataggctttcgtaacggggtgtttgataccgtcagcgggcagttcagcgcccaccggcaagagcactggctgcgcaccgtcaacagcgtggactacatgccgccgcgtgccggtgagaacctggctgaccatgcgccgcacttctggcagtggctgacgcgggccgccgggggcaaccacgacaagcaagagcgcatcctcgcggcgctctttatggtgctggccaatcgctatgactggcagctgtttcttgaagtgactggccccggcggcagcggcaagagcgtgatggcggccaccgcccggctgctggccggggcggacaatacgacttctgccaccatcgacaacctggagtcggcgcgcgaacgtgcctcggtggtcggctactcgctgattatcctgcctgaccaggaaaagtggagcggtgacggggcgggtatcaaggccatcaccggcggcgatgcggtcgccatcgacccgaaatatcgtgacgcctacgcggcgcacattcctgcggtgattttggcagtcaacaacaaccccatgcagttcagcgaccggagcggtggcatctcgcgccgccgcgttattctgccgttcccggaggctatcgcccccgaagagcgcgatccgttgctgctggcgaagatcaccgaagagttggccgtgattgtgcgtcacctgatgcagcgcttcgccaacccgaatgatgcgcgtgcactgctccaagcgcagcagagttcggcggaagccctggaaatcaaacggcatgccgatccgctggtcgatttttgtggttacctgacggtgctgggtaccccggaagggatgatgatcggcaacgccaacatcaccccgccgaatccacgccgctacctgtatcacgcctacctgtcgtttatggcggcacggggctatcagcacgtgatgaacctgacggcgttcggccaggcggtgccgcagacgctgaaagagtatgagcatacgctgctgaaacgccgcaccaagcagggaatacaaaccaatctgatattgagtgacgagtgcgaagcggactggctgcctaagtgcggggcggtgtga

SEQ ID NO: 431120 - DNA, 264 bp, Serratia marcescens
atgaacaccctggccgaccgctattaccgcgatacccattaccctatcccgcacgccgattttctgcgtcttcagcatgcgcacgccactggcgtgctgttcctcgacctgctggacaccctcgacctcggcggacatcgccccgatgccgtgcaacaggcatcgtttgcctcggttattgccctgctgactgaccagctcggccacgtcgtcaacacctgtgaatcccaaatccttgcccgcatggaggccaccgccgcatga

SEQ ID NO: 431121 - DNA, 624 bp, Serratia marcescens
gtggccggcgcagcgcagcggcagggagcgcaatatcagcagccgctgcgctacgccgggcaatatcaggacgacgaaagcggcctgcactacaacctgttccgctactacgaacccgaggtggggcgttttaccacgcaggatccgatagggttgcgtggcgggttgaacctttatcagtatgcgccgaacccgctgatgtgggtggatccgtttgggttgagtattgaatgggttaatccttcgtcgttaaattattctcaagcatatatatctgataacgtaactggatatatacatgatatgtctaataacaattgggattggaatcgaagtggaccattgaatgttgccgaagtggatggacaactagtatctctagacaaccgcagattatatgcagcacaaatggctaatgtagaatctgtaccgattaagagagttaatttatctgaaccgttaccaccaccagcaactggaggtacgtatgggagtaatctcaataaaaaactgaactctaaacctaagaattctgatgttcctagagtccagttgccagcaacaggaacacctaaaaagccaacaattgttagcaagaacaaaaaaacggggagttgcaaatga

SEQ ID NO: 431122 - DNA, 585 bp, Serratia marcescens
gtggccggcgcggcgaagcggcagggcgcgcaataccagcagccgctgcgctacgccgggcaatatcaggacgacgaaagcggcctgcactacaacctgttccgctactacgaacccgaggtgggacgtttcaccacgcaggatccgatagggcttcgtggcgggctaaacctttatcagtatgcgccggacccgctgatgtgggtggatccgtttgggttgacatgtagccattctgctaaaaatcctaagcaggcacatgcggtcattaaagataaatgggggcacgcaatatctaaaagagatatgcgtgagctacaaaacacagttgatagaattaaattaaacaaacctcattattcaaatgatggaacaacatttagcaatacgcactctattggcaactctaatagccagcgtcttaacactggtagtggaccatataaagaatggactgttaagacaccagatgtaggtgggaatggagcgaggcgtgtggtagttgatacgaagacaggtaaagcttattatactcatgatcattatgattcgtttatagagatcgatcttggagggtggaaataa

SEQ ID NO: 431123 - DNA, 369 bp, Serratia marcescens
gtgagcgttacaggatggctacctaaaacggaagtgatgaagctagtaaggagatccgatatatatgtatccacggctaagtgggaaggcatgcctatttctatgttggaggcaatggcatccggagtcccggtggtagcgaagaattgtgccggaaataacgatttaatcgaaaatagaaagaatggttatttgtttgatgagttggatgaggcgatcgcggctattcaacagctaatcgcgaatgatgaaataagaagaagcattatattgactgctctcgaggacataaaaagagagtactcactgactggttatgttaacaagatgcaatgtttgtatgagcgtcgcctggattcgctcaattaa

SEQ ID NO: 431124 - DNA, 621 bp, Serratia marcescens
gtggccggcgcagcgcagcggcagggcgcgcaatatcagcagccgctgcgctacgccgggcaatatcaggacgacgaaagcggcctgcactacaacctgttccgctactacgaacccgaggtggggcgtttcaccacgcaggatccgatagggttggaaggcgggctgaatttatatgcttatgggccaaatcctttagcttggatagatccatgggggctagcgaagtgtccgaccttaacacatggtaaaaatggagcaatactctcagccaaggcaactgtaacaccagcagatctcaaaacaggcactgcagttaatacgagtgctcgtgatgctgcgagggctatgggatatcagacagatgatgcggggcatatattagcaaaagtgctggggggccaaggtggaaagggaaatgtattcccgcagttaccaggagtgaatcgtgggcagtataggacatttgaggactcggttcgtaaatttgtaaataagcaaggtgcggtcgatattgaatggactttcaaatatgctaatggtggtacaagaccaacatcgatacagtacgatgtattccaaaacggtcaaaaagtacttggccgaatatttacgaactga

SEQ ID NO: 431125 - DNA, 264 bp, Serratia marcescens
atgaacaccctggccgaccgctactaccgcgatacccattaccctatcccacacgccgattttctgcgtctccagcatgcgcacgccaccggcgtgctgttcctcgacctgctggataccctcgacctcggcgggcagcgccccgacgccgtgcaacaggcatcgtttgcctcggtcattgccttgctgaccgaccagctcggccacgtcgtcaacacctgtgaaacccaaatccttgcccgcatggaggccaccgccacatga

SEQ ID NO: 431126 - DNA, 336 bp, Serratia marcescens
atgaacactgcatcctgtttaccgattgaagtccgcaccgccgttttccgccgcgctgtagcgcaagcctacctggatacctgcgccttttaccgggtgagtctgggttacacgctggacgagctgcagatgacgattgccctgcgcctggaagggcattttgtgcgtcagtacggcgcagaagatggcatggacatggcgtgcaccatgctgagcgacatggtgcagccggacgttctggtggccgcgccgcgcctgaccgcgctcgggcaaaagatgatggacgagctgtgctgcgaccgcctgtcggcatcgcagaacgccaccgtacactga

SEQ ID NO: 431127 - DNA, 2211 bp, Serratia marcescens
atggccatattgactcttcgaaatgttaaaagttactctgctaataaagacgtaaacattgatttaagtcagccagttacgctcatttatgggcaaaatggagcaggtaaatcaacaatttcagggttcttttcgggttttcagcgagaaaaataccagcattgtcgttttgtaagtagtgagaatctttctcattttgtgtttaatcaggaatatgtagagcataagtttcaccgggaagcctatcaacccggaatcttcacattaaatgaaaggaatgataatcttaacgatactattgaaaataacaagcaaagagttgctgagataaacgacttactggaagcatcagtcgcagagataaaaaacaaaaaagaaatagagcattccatcatcgaaacctgcggtaaagatatttttaatagaactataaatgatcgaaaatcgctggattattttctgagcggagcaaagcgagtaagtaatttctatcagaaaatgaggggggccatactaggaagtcagaagtatacgctgatacagcttacagagagattggaactgttacttcggagtaaaggcacccaatattcagagattatttatccagagattcatggtctacctgacgaaattctgaccctactgaaaagcactttgacggcgtcatccgatacatcattctcagccgttattcagcagttaggtaacgctgactgggttcgtggtggaaccgtatatataaaggaaaatgtctgcccattttgccagcaagaattcgattctcagcaccttattaatgaactgacacacatgtttgataagtcttacgaagatgcactgacaacgcttacccacagtaaagtagtcatttctcatgagctcgaattgttagagtcattccgcgaaaatttacgaaagcatcccgcagttactgacgatcaccaagtctttgccataattaaatccctgcaacaaattctacgtaataacctacagtctcttagccagaagctgctacagccttctcagtccatattacctgaagttatcacagatatgcgccagcagtttcaccagatactagacaatttaaatgatgacatcaaagaaaataaccgactagcagccaacttcagcaaggagcgagctcgcctagaggcagattctctttcatatcttaaagaactgagcgcaccttacctacacagatgtgatgagcaattagatgaaattcagcaacaattgcaagctaagaaaaaccaagtagcattattgaaaaatgaaaagcagaaactttcgaccgagactgctcgcctgatagggcaattatctgctatccaacccactatcgataacattaaccgaaatctgaaccagttaggaattagtgacttcagtatcatttgtcatgatgaaagcctgaaactatatcgcttacaaagactaagccaaccagatgattcacaagtttttaattcattgagcgaaggagagaaaactatcatatctcttctttacttcttggagtcatgtatcggactggaagccaacagccaagcaatacagtcaagactaattgttatagatgaccctatctccagcctatcacataactatatctatgaagttgcttcaatgataaagcgtaaattaattcaaccaaaaattgcgcaacatatcgttatcctgacgcataatatatttttctttcaagagattctactttctgtttataaaagactggcaccagagcgtacaacacctaagaactgttcgttatatcgtatcgttaaaggggaatatagtgattgtatccccttatcaatgcatgaaatgctgaatgaatatcaggcgttatggcaaaccatacgggatgttcgcgatggaagaagcttaccgattgtattacccaatacgatgagaaatattcttgaatactacttcagtttctcttgtaaacaggaaaaactggatgcagctctggataagctggcggttgaatattcagcaggggaatatgactcattttaccgagcaattaaccgccattctcattctgacggaagaaatatcatgccaacaggagtaattaatgtggaaatgtatttccgcctgttccagaagatttttgaagaaacgaaggattctgatcattacaacgcgatgatggggattactgcggaacaaacagaaacgatagaaaattga

SEQ ID NO: 431128 - DNA, 906 bp, Serratia marcescens
atgctcaccctgcgtcagctccgccaatttcttgtggtagcggaaacaatgaatatccgcaaagcggccgagcgtttgcacatggcccaaccccctctgacaaaagcgatccgtcaaatggaagaggctgtgggcacccggctttttgagcgaaccaatcgaataacggcgttgactcccgcaggcaaagtgttgcagaaggaggcggctacgacgctcatgcagatggaaaggtcaatgttgctgacccgacgtgccggcgagggaatgacaggggccttgcgtatcggttttgtggccacggccgtcaggcatttgcttcctgaaacgatcgcccgttttcacttatcctgcccgggagtggttcttgagttgaaggaaatgaccaccgtacgacaggttgcgagccttttggaagacacgctggacgttggcatcgcggttttacctgttcccgaatatgccatacagaaactgtcctgccatcgattttttagctgcccgctggtagctgttttgccgaataaacatcctgccggcacaggcggcgctctgtcgctttcttctctggccacggagccgtgggtattatttccggaacaggaagggcctggcctctatcgctctattattgaggcctgcgaaaaggaagggtttattcctgaagttgttcagcgagccgtgcaaatggaaacgatagtcggtcttgttgcttcgggattaggggtcagtttggtccctgaattcatgcaaaaaagcggatgggtaaacgtttctttttgccggctgagtggagaacagatcccgtatcaggttgcgctgattcacaatccggaaaataccaatcctcacgtcgcggatttcgtcagaaacgcatcccctccgcagccatacgtttccacataa

SEQ ID NO: 431129 - DNA, 279 bp, Serratia marcescens
atgacggaaaaactggcgagcaccattatcccgctttatgacgaacatgccgccgcctgggaacgcctcagacccaccacgctgtttgaacggccgtggctcgatcgctttttgcatctcaccccggccaatgcgcggctgctggatctcggctgcggcaatggcgcgccgatcgccgcctattttatcgaacaggggtatcgggtcaccggcgtcgacggtgctcaggcgatgatcgcgcgctgccggcagcgtttcccgcagcaggaatggcgataa

SEQ ID NO: 431130 - DNA, 1746 bp, Serratia marcescens
atgagagttgagaaactgatcacagaccatatcgatatttggtcctcggccttgcaaactcgatctaccgtcgggcgcggtagcaacggtaaaatcgacctctatggcattaagaaactgcgcgagctgattctggaactggcagtacggggcaaactggtgccgcaggacccgaatgatgaaccggcgtctgagctgctaaaacgtatcgcggctgagaaagcggagctggtgaagcagggtaaaattaaaaaacagaagccgctgccggaaattagtgaggaggagaagccgtttgaattgccggtagggtgggagtgggtgaggttaggggagctatttaactcgatagcgagtggaggaactcctagtaagtccaatcctgacttttggaatggagatatcccttgggccagtgtaaaggacttgggtaaagagaaatatattgcaaaaactcaggattacatttctcatcaaggtttggacgcgggaagtaaattagctgatgaaggtgatattttaatctgcactcgaatggggttgggtaaaattggaatcgcatcatgccccgtagcgttcaatcaagatcttaagtcggtgaaactgactagtggtgtttctcttgattttttctttaatacttattcaacggtaaaaataaaaggaacaggaactacagttgagggtataaaacaagaacaacttcttaattatgttattggccttccatcgggtaatgaacagcaccagatcgttgaaaaagttgacgaactaatgtccctctgtgaccaactggaacagcaatctctaaccagtctggacgcccatcagcaactggtggaaaccctgttggcaacgctgacagacagcccaaatgccgaagtgctcgccgaaaattgggcgcgaatcagccaacatttcgacacgttgtttaccactgaagcgagtatcgacgcgcttaagcaaaccattctgcaactggcggtgatgggcaagctggtgccgcaagatcctaacgacgaaccggcttctgaactgcttaaacatattgagcaggaaaaagcgcaactggtgaaagaaggcaaaattaaaaagcaaaaaccgttgccgccagtgagtgatgaggaaaaaccgtttgagttgccgaatgggtgggagtggtgtcgtatcggtgattgtagtttgtctaccgaatatggaatatctcataaaacatataaatcctctcaaggtgtacctgttttaaaaatgggtgatattcaaagtggggaggttaagttaggtgggcaacaagttgtagatttggatattgaagagttaccatatttgtatgtgaacaatagagatattttgtacaaccgaactaatagtgctgagcttgttgggaaaactggtatttacttgggtgaggataatgtttacacgtatgcttcttatttaattagaattcgcacaataaaagaagggcatatgccagaacttattaatctaaatatgcaggcgccattctttagaattactcaaataaatccatatgttaaacaacaatgtggacaagctaatgttaatggcaccataatgaaaaatatgctggtggctattcctccactcaatgaacaagagagaatactgcttaaagtagtacaactttgtgatatctgcgacaccctcaaatcccgcctccaatccgcccagcaaacacagctgcacttggcagatgcgcttaccgacgctgcgttaaactga

SEQ ID NO: 431131 - DNA, 1029 bp, Serratia marcescens
atgaagaaagaaagttccccacaatccctaggtggaaaagcaagggcaacgaagctctcttcagaagagcgtaaagccgttgcttcaaaagcagcttcagttagatgggaaaaagaaaaaaataagcttcctgtagcaaaaaacgaaggtattctcagaataggagatgctgagttagatgtagctgttcttgacgatggaaagagaattatttctcaaacgtctgtgtttaaagcattagggcgaccgacccgaggcgtcaagtcaacacaagatggcgaggttgttatgccagctttcatggacgcaatcaacttaagaccttttataaatcaagagttaatggattcaataacccgagtaaaatatcaaacacattcgggagtccccctcgaaggatatgatgcttcaatattgcctttagtttgtgatgtatatttacaggcccgtgaagcaggtgtcattactcgcagtaaccagctggacaccgccagaaaagcagaaatattagttcgctcattagctaaagtagggataatcgcgttagttgatgaagcaacaggttaccaagaattaaggcctcgggatgcgttacaggcatttttagacaaggttattagcaaagagttagctgcttgggcaaaaaaattcccggacgagttctatgagaatatttataaacttcgtggctggccatggtcgggaatgagtaagaaccgtttcagtgttgtagctcattatactagagacttagtatacgagcgtttgggcgatagtattttggtggagttagagaaaaaatcacccagggatgaaaagggaaacagaaaaaacaaattacaccaatggcttactgatgatgtaggtaaccctatgctcgctcagcacttacattcaattatcatgatgcaaaggctcgccatttcgaatggatacggatggaataaatttgttaaaatggttgaccaagtgatgccaagaaaaggcggaacgtttgaattgcagctgacagatcctacagaaaaatag

SEQ ID NO: 431132 - DNA, 621 bp, Serratia marcescens
atgtttagggactatcttacaaagaaattttttgcatacttattgtttctcatgattttaattcttggccttttagcttatggatatggtgaaaatggcttttttattgagaatcttgtccctgagttgataggggtatgtgttgagttgttggttattctaaaagtttttgaagtatggcaggctagagatgaaaataggaagcgtattaaagttgagagaagattaagagagtttctcatttttttcttgaaccatacttgcaaagagttcccaagaaattgtcagccgggtcgtttttatggtagtgactttgaaaagaaccaacagacactagcgaaattgatagattacattgatcagaatggtttgtctgaaagtgttatattaactgtgcaaaactattgtagaagtgaaagggatatatttaataatttaatccccgtttcatcggagttagagaatgaccactttaagtcctgggtcaggattgcctactttattaatgctgttgtgactggtgaggaaagaactagtcatgcaatgattaaaatcctagaaaatataatgaggtttgataaagagtctcatgataaacacttatatgtaggcgccaagtga

SEQ ID NO: 431133 - DNA, 252 bp, Serratia marcescens
atggaagatacactagaaaaatattacgctagttttacggagaaatcgcttaaggaacttcatgagggggcgacacgtgcttacgataatgatcgcaatttgactccgcaacaaaaagatagtgccagatacttcggtagtccttttgcttattatggcactgatgaagaaaaagactggcctgaacatgtggaagcaattgagaatgttatgaaagagaagggtatttcatttacaagaataattcgctag

SEQ ID NO: 431134 - DNA, 603 bp, Serratia marcescens
atgactgacttacctgacaacaaagagcgtcaagagcaatttatagcgatcattttgttgaatgaagcccgaggcataatgtctgatctctcggttcaaccaggactgatgttcgcttttatggaaataacagaggaagaatatgagaactgcctgaattatatatgcggaatattatttgcttgctatagaaatggtgagctgaaattcataattaactgtactggtcagaaactaaacggatacgcactgattttcgaacatcctgatccatcgtatccacggtattgccacaagatttatgtttttgaaggatttcgtaatcaagggattggtaaaatattgattaatgggctgctggatgaatcacaaaatattactttgttatgcaatcctagtcttgtatcgttctatgaaaaatcaggaatgaaattctctgggacgtataaaataccagaagatacagttgattttgaatttacaaaagaaatgtataacggattagcgataatgaatggaacaggtgtgtctggaccagcacccattttcatgttaaatgacaatgatgtaaagaaaatgttgtcgattattggtaagatataa

SEQ ID NO: 431135 - DNA, 1344 bp, Serratia marcescens
atgaaagccgttggcgatagcggcatggttgcccgcgcgcaaaaactggacgagctgcgcagcaaaccttattgggcaaccaatgttgaaatggctgctcgttcgtatgagcgctatatcctcgatcgggccgaggccaaaggcatccgcaatgattacttggtcaacctcaaaaaagcggacgagcatggtaaccctgccacctacgcctatccgacagaagcagagctgaataatggcgttcgcgatgctttcgatactctgttcaaaatgctgaaaaccaaacctacagatcgcggcgtagccttctattccaaagacggcctcgatcttggtggtggcaatatcctttctgagggcaatttcgatgtgtccggtgcgaatccggagaagggaatgggggacaaacaggctcagcacatcgctgaccagtgggttcgccgcttcaatggtgctgcaaaaatcaaagttcaggttgttcagtctcaggcagacgccgcggctatgatgccgaatggcatccccaaagagttcggtaccgtgcacgccatttaccagcccgagctcagccgcgtgattgtggttgccgataatattgcggacggtaaacagcttcgcgccaagctacgccacgaggttttagcgcaccatggcttggcctcagtgatcggtgatgtggaatatgatcgtattatccgcgtgcttcaccagacgcgtgatagcaagaacccggaaattcagtctgtttggcgtcaggtgcaaaaggcctacggcaacgagtcaccagaagtccaggcgaatgagtttctggcgcacatggcagagcgttctgaattaaccgggttgggccttgtatgggatcggtttgttgccatcatcaccaatgccttgcgtaatgttggtttcttcaacccgggggatatcactccggcggaaatccgcaatatcctgcactccattgctggccgatttaaacgtaccgcgatgtatgaaggtgagcagccaggcagcagggaatttgacgacacgttcagccgcactgacgcgctttactcagcatctggccggaaggatccgtttaagcctgatagctacgacgccaagaaattcgctgctgaagttgaggatattgccggaatggagaatgcccctcgcggcatggtgcgcctcggtgacaccccggcagtttatcgcgctcttggcgcccggaatctggaaatggttatgctggcctccgttgtgcataaggcgactgatccgacggtacgcgcgcatcaggttatggctcaacgaaacaaactggtgcaacaggcggtagaaagggtgaatccatatttcaattag

SEQ ID NO: 431136 - DNA, 303 bp, Serratia marcescens
atggcgctcaatatcgcccagttctcaacgctcaccgcgctaaaaagccgcattggcgcggaaatgctgaatctgatgactcagggagtgaccatggatctacgcgtcatgaagaccagatcgacgacttcggccaaaagctggaaggcgcagcgaagcataggtggggtaagttctcggaggctatggagcgtgatgctacggatgaacagtatcaaactgaacctttatctaagctattccctcaacctgattacagcaaaatgtctgatggcggtgtgggtcacgataagttggcgctga

SEQ ID NO: 431137 - DNA, 1188 bp, Serratia marcescens
atggcctacgatccgcaacaacagcgacctgaagagcaagcattaaacaacaaccgtgaatcgctgaacattcggcagccaggtgaaactggcagcactggtttcggctgggagcaggtgcgtaaggcgcgcgaggccgccggccgaaaaccagtggttcccgacccgagtattggggtgggggacatggcacgaagcctagcttccacttcactcgatatggttaaagatggagctcagttattccatgctggtaatgaaatccttgaccgaaaagctgctggatatcgctccggggaaaacaagccacttattgacttgggcgttgatcccgaaatgcttaaagtcatgcgggaaaatccaggtaatccattatcgcgcgggggatccgccgcaatcggtgctactggaaagcttgccggttcggcttcgaactcgatccaagatggctatagtgatgatgccaaacaagctgccgcgatgccgttcgttgaagaagatgataagggcaattacaagcttggggctggtttttttgataaaggcgcatggatgatgaatgctataccaacagttgcccagttattgaccggaggtgcagcctctaaactcggagctgcgtctacgaagaacgctgttgagaattctttatttaaccggctgagcaaaaagttgccggaggaaactgccaggcagatagcaaaagagactgcggatagagctgctactgtcgcaggcaaaaccgcttttgtcggcgccatgactattcctgcacaaggaagcagtggttctgacatgcgtgagcagattaatgctttgtcttttaccgacctaatgaaaagtccatcctttcaaaaagcgttcgataatgtcgatttgaaccccgcaaactcaactctttctgacactgaaaaacttaccctggcaagaaatcaggttgcagatcaagccgcaagcgcagtaactgccgatcctaaaatgctggctatcaatattgccgcatcaacgctgggcgatcacacgctactcagtttacttacaaagaaaggtgccgcgtccggtgtgctttccggggctctgatgggggcaacagctgaaggctctactgaatttgcccaaggcgctggcagcgatatgtccagaaccaacagcttatcgatactgcggggcaaaaaattgaccccatga

SEQ ID NO: 431138 - DNA, 1332 bp, Serratia marcescens
atgagaaaaatcgattgccaaacaagatctgattttttaagaggtctccaaaggcatctttatagtatttcgaggaaaagaaaatattatgatcctcgtgaaaataccaaaccggatacagcaaacaacccgctgttatcttattttttcacaatgtcacataggcaatttgatccaagaaaaaaaatgaaagatggatttattgccgtaccaaagaaattcagtttatatgacaaaccagaagaggcgctgacctttattcataaagtcacaactttaatttccaaaggtgataaaaaaaccgttgctttagactactcaaaaaccaccgaatattgcctgggtgcagaatgcttacttggcttagcagttagagaagcaagaaaaaacaatcaaaatattaacggctcagttttagtcaacggcatctacccagtaaatgcgaatcacttagaaataattagagatgttggtgttgtaaaagagataggcgaagctgaggatacagaaattgaggatcactcagaaagagagccagaacaaaagcagcatatattcatcgagactagtattggctatgaaggcccctcagcatttgcgcaagacaaaaagaataaaacatcaagtaattttgctgcctatattaattcctgtctaaacgatcacggtcttgaacttaaagatgaagctagcagacatctgcaatcatgcatggctgaaatgttagataatgcggagagacactgcggtgaaaatgaaagaccgaggtggtatgttcgcggtcatgtcaataacagcctcagcaaaccaacatgtgagttaagtattttcaactttgggaagacaatacctgatacatttaaaaagcttcctaaagatcacttctctttcaatattcaagttaaaccatacatagaaaaacatttaaagaaacgggatatgttttgggatggtctagccacaatagcagcacttcaaggcagggtaagttgcaagaatgttacggaagaagatagttgcggaacagggacaattgaactcctgaaactgttccaagacatgcacgacagccttcaacgattccatcagtttgatgatgtgtcgccggtcatgtctatcctttcaggcgctacacacatcaaatttgatggaaaatacaagctcatatgtaaagttactgacagtaatggagaaaagtttacctacccattcaacaatgtaggccttgaaaaagaacctgatagaggctaccttaagcagatgcggcaggtttacttccctggagtgatgatcaacatacgattcccactcgtgaagactgagaaggtatga

SEQ ID NO: 431139 - DNA, 765 bp, Serratia marcescens
atgaggcacttttctagcaccccaagagctatttttttaaatatcagtttatcattatttttatcaggttgctccgcagagttgtttgcggagcatgctttgttatccccaaccaaagagaatggaattccctgcgcaataaatgcacctgaatccataggtgggtgttcaatatccccatcaaaaatatacgggccattcttaccggcaattacagagagaatattaaaaaaagatgttgatgtcgatagtaaccatataattacagaaacaaagatctataataaaatagacgtcccaccaaaaaatgatgaaatagattggagtatatggatatccttgattgcccttgtagcttccattgggttaccattgtatatacgccatggagataaaaacaaatcaattaatgatgactattggatgcgtagtgtcattttaccgaaaataaatgaactgctatttaatctcacttcatctctaaccagtgcgttccaaaatttcccgggaaattctgcagaattccaaagctatttctctgggcaatacttaagcgagcaaggtgctttaagagactcctttaatatgatatctagtgttattaataaagaaaacattgctgaggagctagaaacactttgtgatgatttagagcagagaatttctgataatctatcaaaacctgcgcacattcgtaaaaaagatgcgcaatggtttatgcaagaagtaataaagaaaatagtaacctgccaaaaaatgacgtaa

SEQ ID NO: 431140 - DNA, 834 bp, Serratia marcescens
atggcaagcacagcaaaaccacgtaagaaattccgcgtcgcagtctccggaaacaccgttgatggccgcgaaattcaaccgcagcaccttcgcgacgcggcggcaaattacgatccgacggtatacggcgcacgcgtcaacattgagcactacctatccccctatccgggtagtgactttggtgcgatgggggatgttgcggcactcagcaccgaagatatttccgaagggccgctggccgggcgcacagctctatacgcggagattgaaccctccgagcgcatgaagcagatgaccgacaaaggggaaaaggtctactccagcattgagttggcgccgcagtttgctctcaacggcaaagcgtatgtcgtggggctggcgatgaccgataccccagcgagcctcggcactgaacgcctgaagttcgcggcgcaacaacgtgcgcaggtcatggccttcaacaaccagcaggcagaaccaccgatgtttaccgaagccattgaggctgaagttatcgaactcgcagcacagcgcagcgaagaaggtaagcagtggttcaaccgtgtcatgggcatcctcggcaaaggcaagaaaaccgacgatgaacgcttcagccaggtgcatcaggctgtcgaagccgtggcgcagtcgcaggccgatttgaccgaccagttcagcgccaccgcgcaggaaagcgccagcaacaagcaggccatcgcgaagttgaccgctgacctggctgcgatgcagcagaaggttgtaaccacggacggtaacttcaaccgtcgcccgccggccggcggtggtggcaatgcgcagttagctgactactaa

SEQ ID NO: 431141 - DNA, 1323 bp, Serratia marcescens
atggctggttatttatatgactttacaaaagagcattcttttcatggagagttttggaacaaccctaatgataacaaaggcagattttcagctaaaatagaatacactccttataatgggttgacattggattattgcatttcagatagtgatagtccaacaacatgccagcgattatatggagtattaaacaccggagaaccatgtactctcattggcccatttgattttcttcatagctcaatacattttggtaagttaagagttttaactggcaagcactatttcaaagcaataatatttaatgggatgtatacagataatgatagcgtcgaatactgtgacctatctctttatggcatgcaggagtttatccaccctcaaggtttcatatctcaactaaagcattcgacaacaccgattttatctactcaaggtacaggatggaagatcgacgttatcaataacgctacatttagtagcgttggggatgatgttttaaatattatcaactgccagaatgaagaagcactaaataaattcaccaaagactttctatccactaaaaaacaatatcctgaagcatttttctcaataagaaaaaatcttaaattttatctacgatatactaataccaaagatgaaagtatcataaaacacattgatgacctatggaaaatgacgggacttttctcaatcctattagacaagccagtcatacctgatgagctaaatataaagttcaaaggacagcaaataaaaaacccttgtcttctttctaatggcatagaacagagaactattgatcttgcccttactaatacaacccatcatctcctgccattaaattggaaacaaattaacatgggagaaattattagcaattggttcaacataagcgatgagtatgattctctttcagttacatatcaatatgaaactgggtatagaactctacatcaagcccatgctgatataatactttttgctactcagttagaatccattaacctaacactctctgcgaaaaactcagacaaatatattggacctataaacaaatatgcctcgtcatccttaaagaacaacttagaatcgatattctcaaaattcaataaaaaaactatcggagaaaacattacaatagttagaggtgaacttgctcatgttggtcgccctaaaaaattaatgaaagtaatgaccatagatgattatataaaaatagggttgtatcttaaagtaacaattacttcacatttactgtctaaacttggtttgacgaaagagcagattgagagatatcagagcaaagttgccccttga

SEQ ID NO: 431142 - DNA, 972 bp, Serratia marcescens
atggcattagatctgagtaatactttggttattggtataagtgctaccgcactgtttgatatgagtgaatcagatcgtatgtttcaagagacatcgctaacagaccccgacagtgcaattgagcaatatcgtgcctatatgctaaagcacgaaaatgaaccacttaaatctgggactggctatccactaatcaaagcattactcgggctcaaccagtataaacaggccgaggataaatcaccgttagtagaagtcgttgttatgtctcgtaatagcccagagacaggtattcgcgtattaaacaccatccgccacgataagctggacatctcacgctcagcattcacagctggagaaacggttgcagattatttagatgcatttgatgtggacctctttctgactacaaatgttgctgatgcgcagaaggtaattgactcttgtttctgtgcggcagctattttgaaagatcctcctgcagattctccagagatccctgacggccaggtcagaattgcctttgatggggatgccgtacttttttcagacgagagtgaattggtctataaaaaaaaagggatggaagcattccacgctcaagagaatgcacagcaagatattcctatgggggaaggtccgtatgctacattgctcaagaaattggcgaaacttcaagagcgtctaccaataagagtggaatactccccaatccgtattgctttagtcacagcaagaaattccccatcagaaatgagagtgattaaaacgctacgtaactggggcgtttatgttgacgaagcgttttttctcggtggagttggaaaagataaagttttaaaagcgttcagaccacacattttctttgatgatcaagatgttcatttggatgcagcagcaaagcttgtgccttcaggtaaagtgccttatgcaagaaattctggactctatttagcagcagataagaagagttga

SEQ ID NO: 431143 - DNA, 861 bp, Serratia marcescens
gtggataaagctttctgtactattgatgaaaaagaatggagcgcggatgcattttacgcattgccgcttagtgagatccaactaaagagacggagtttgctatgtatcgaatgtaagggtgatgcatggttcaggcgatcgagttacggaaatgactcaccgcatttttgtgcacatcaccaggaaaactgcccattggggacctcatatgaagctgtgggggaaggggatgaaaataaaggtttaccagcatcagacgctgacagtggcatagtattggatttgggattaacgcaaagctataacattgatgtcaaaccaatagtggatgattcagatactacccctcatgggcaaaagttttctggtgagaaaaaaatcaatggtggaaatttaaaatatccggcgcattttactttaaaaaacctactttacaaattggtgaagtcaaaagggttatgttataccgataaaaaggtggggtttaaagagggggattttaacgatttaccggagcgtggagctgaactgtttgtcgagtttgtcaatgttgagccatggatggacggtgctcgtagaatcttttggggtttcattagtgatgttgggcagacaaaagatggtaaaatttggttaaatgcaggtaatataaaatctgggttaagtatctgtattaataaggatgtttcagatgatttcaaagagcagtttagggttgaaaagagtctggatgaattagatggatgtcatgcactgattattggtacttgcgcatatgctacaacaggtaaaccaattctgtggtgtggtgatcttagttatattgtacttagaaggtacaaatctgatcaaggtttataa

SEQ ID NO: 431144 - DNA, 942 bp, Serratia marcescens
atgatagacagaatgacgatgatgatggacgcaataaaaaaaccatgcgtattgcgtctgaagttaattaaaaataaaacacctgatcttatcatgttcgtctttgaaggggatgatgattatgatttttattttcatgcattaaacctctgtggatttgacaaaccattttcgcatatcaatggctcaggaaaggatcagtctgtagctttatattctgagctaatggaagagaacagtgatcatttggcaaacacttatttctttgtggatcaagattactcattattctgccactcttcaaacaacataataaccttgccgttctatgcaatagaaaacccattgtcagatgagaaggtcattaggcatttcttgacttcgacgtttaaatttgatgataagaacaagaatatacttgatgctgttatgaataattatactcttgcaaaagagagtttttatagtgaaatgcgtgagatatcaattcatctttatatgtcaagggttcttgggctcaaggtggagtttccttgtaatgaagatgtgtttgataagattaataaagattcagtcgctttaaaactaaatggtataccagaagtaaaagaaaggcttttgacgttgtcagatgatgaaaagtacttctacgatgctatttgctctttggatcgggagcagctaacgagagggaaatatgtttatcacttcgttagtgtatggttgattagaataaaaaaatatattcacagcaggattgatagttacaatgcggaactggagaggaagaaaaacgatgctcaaggagaggagatgagtccgttaaacgcaataaaaaaattaagtaaaactcaatatgaacataaggatcttgtaatcgcgagactagtgcccgcatgtcaaaaaattccagagttagaaaggttcttgactaagatttag

SEQ ID NO: 431145 - DNA, 1455 bp, Serratia marcescens
atgaatatggaattaaaacggttctcgataagaaaactatacggatacaaagatgttgagttgacttttaatggtaaaaatacaatcattattgctgagaatggtgccggaaaaactaccctgattaatgctttaaaatccactctcaaaggcgaggttgatgagttaagaaaagtaaggtgtgagtcaatagagattgaaattggaagtaagaaattctcaattaatattgctgagttaggtttttctgactttctttcaagtgtatttgtaccatcaagctttaacttactgaaaagataccttgaaaattcacaaattgatgaccttcttgcttacgcgcgaagtagacctatacgagaagcaagaaacactgggtggtataatgagatatataataattctccatatacacgttcagatttagatcagatgttaacagaactaaaaagagcatttaataaatactatcattctactaacgatgctgacctgttttcatctaataatcaagaacgaactgaatcaataattaatttagaaaagataaagaaaattacaaatgatattgatgtcatttacttacctacgtataggcgaattgagaaagcgactttgcgcgatagatttaatcgtgaagaaaatgaacgatttgcattagttgatggtgaaatggttaagatgacaaacagccagcaatcatcctctaatattgaatttggattatacgatgttgaaagtaaattaaaagaaattagttcttctattgagcgtcgatcgagcttaggttatagaagtttgagcgcaacaataatagaagatatgatgacggaaaaaataaatgcattaacaaaacccagattgccttcaatctctgagctttcaagattcctaggtagagtggttaacaaggataaagaagaaaataaaaggataattgaagaggttacggcaattatggaaaataaggagcaaatggctaataataaaatgctcaattattttctttctaaactgaaaggagttattgactctactaaagaactagagttaaagattgaaagttttgttgagatttgcaataaatatttacagctgtcagatgattcaaaatcattaaattatgacgtggagagtttgcaggttgttgtaaaggatgtttttacaaacaatccaatagaactagaggatttatcttctggagaaaaacaaattatttccttgatggctcatatgtaccttgaccatactaagaaaaaaattgttttaatcgatgagcctgaattatccttgtcactagaatggcaggaacatgtccttgttgatattgcaaatagcccatcagtggtgcaattgttagctataactcactcgccatttgtttttaataatgagctcaaaaatgaagtgaagactctgaatgtaaaaaaatatgtggcgagtgctagaaaatga

SEQ ID NO: 431146 - DNA, 510 bp, Serratia marcescens
atgaaaattgattatgatgtaagtctttacagagaaatcgcaaattttagtgtaaataaagtagttcaagtatctaatagaaaaggtaggaaaaccactatccatatcacaaatataacgcagctttcgtggcaaagtttgcaattactagtatcaagtggttcagatagatttagtaaaatggtatttctctaccgagagtattcccagcagggacagttttccgagtcagttattagaggtaaacctctttcttcgaatgaaactaaggaaatcaatgagtacataaaaatttatcgagatcatggttgcacgaaacaccacgaagttaacgatatcataaccaaaaatagattgtgggataatttcaaaactattcgctcgttaaacgatcatggtgaatttaaaggaattgaaggtattcagccacaatactttgagattgtttgtaatattcttaaaatttctggagataaaggcttaccacttgatggctatcaaaagtattaa

SEQ ID NO: 431147 - DNA, 303 bp, Serratia marcescens
atgagcattattaaacgtcatatggaagatcagcaggataaattcaatgttgccacaaatatcgcaattgaagctggggtattagaacgctgcgaatactgtgaagctacggtttttcaaggtgacgaggacattgaagaagcctataagcttggtaacactcaatttagtaaaggcgaatttgaaggtttctttgaatctcgaagagagatgactgatgctatcaaagacgcagtagaatcgggtgaccatgcggcagaatgctgtttccattgtcacgataaaatgtacggtgatgactga

SEQ ID NO: 431148 - DNA, 1647 bp, Serratia marcescens
ttgagtacgttaataaaagtacctgcgctttccggcagggcggaaaattggcaccagattaactggggtcagatacaccgtcaggtcagagggctacagatacgaatcgcaaaggcaacggagcaaaagcgctggcgcagggtgaaagccctgcaaaggatgctgacgcgctcgtttgcagctaaagcactggctgtcaggcgagttaccgaaaatcgaggcaaaaagacagccggagtggatcgccagttgtggaacactcccggaagtaagtggcaggcgatcgaccagctaaaacggacagattataagccatctccgttaaggcgtgtttacattcccaagagtaacggcaaatgtcgtcctcttggtataccgacgatgaaggacagagcgatgcaggcgttatacctgctggcacttgaccccgtctcggaaactacggccgaccgcaacagctatggcttccgtccggcacgttcggcggcagatgcgattgagcaatgttttgttaatctcagtcgtaaaagctctgctgaatgggtactggaaggcgatataaaagggtgttttgacaatatcagccatgactggttgcttgccaacattccgttggataaacaagtggttggaaaatggttgaaagcgggattcatggaatccggtcggttacacccgacggaggctggtacaccacagggaggcattatttcccccgtactggctaatttggcactggatgggctggaagcggtgctagaaacccattttgggaagaaaaacaccaaagccagttacaaaaccaaggtcaattatgtgcgttacgcagatgattttatcattacgggcatctcgaaagagttgctggaagatgaagtcaaacctctcgttgaagcctttatggctgaacgggggttgcaattatcaccagaaaaaacggtgataacgcatatttccgaagggtttgattttctggggcaaaacgtacgcaagtaccacggcaaaatgctgataaagcctgctgctaagggattgcgtaaccacctccagaaagtccggcaaatagtgaaacgtaatgcggcgtcaaaacagggtgacctgataaggcagctcaatccgatactacggggctgggcaaattatcatcgtcatattgttgccaaagaaacgtttagctacattgactatcgcgtctggaaattactctggcgctggtcatgccgacggcacggtaatcgcaacaaatactgggtgaagcagaagtattttcactctgtaggtagcgaaaactgggtattccagagtatcgatgcggataacggccggcaaaggttagtatcctgcaaagatatcccgataaaacgtcacattaaaatcaggtctgaggctaatccatatgatcctgttgacgagctgtacttcgaacagcgacaagttcggcgctggaaagaaggaaaaatgcagcgaggaaaactgagactaatttgggagcgacaaggccatcggtgtccgctctgtcaccaactatttaaagataatgatgattgggatgtccatcacattgttagacgggtagatggtggcggtgacgaaatcgataatttaatgatgctgcatcctaactgccatcggttggtgcacagttaa

SEQ ID NO: 431149 - DNA, 1638 bp, Serratia marcescens; identical to SEQ ID NO: 423685

SEQ ID NO: 431150 - DNA, 1815 bp, Serratia marcescens
atgattgatagattggaacttactaaaaacatccagttctataatttgattataccagagggtgatttaaatagaacaataacagatgtggaaatagattcaattttagatgcatcagatgaaaacattgaccctgatggcggttatctaataaatgattttagggtggaaaatagattaattaaagataatatcccatacaagtactcattgagaatttttccatcacttaggcctgtatattttattggtgaagttgatgatggagataactatcaagataaaatttatgcatttatactgattcttgagtttgacaacagcatagcaatcataaaaaaaagctgctcaaatatttcagataaaattgaaaagaattttaatttggtatcgagtgatttattggtaggtacttttaatgattctgaggtttcttttcaaaaaatatccacgagaacaatcactaactcagacaaggcaatacggaatagatcagcagagtcagcagaccttaaaggttcttactctactcatgctgcaggtagatcaataccttattacttgaaactcagacaaggcgcggtaattaagacaatatctggttctggacgactagtagaagcttcacagagagtggatttttatgaaattgcggaatggtcttatactcaactttgtctaataaagcaaggaggcggggttaaagacttcctgagttattttgcaaaacaaaaagagctaggtgaagttttagacttaacgaagccaaatgcattattaattgaaagtacttcattatatgagaagttacaatcagaaggggccgtaataaaatataaattgcctgatggaactgatcatattctaaatgataagcaagtaaatcggttactccgtaaacttgagagagtttaccaaataaaaaaagatctaactattcctgttccagctggtaaggctaaaattagagtaaataacaagacattaacaattgatgcgactgttctgaaaaaattaaaagtttcatcaaatgctaaagacgtaactttgcaaaatttcatatataaaaatggtttctacagcattacatttactgatcctagttatatgtatttcatggggaattgtttcgaagactcttcaggggtatcggaaattgatagcatattagatatgctcaccccccaaaataatataaaaaatgtctcaagtgaaaaaggggtgctttctaaaggaatggtttgttttcataatgattcgatgtttgatgtagtggagaaaattcatgttgatgatgactacatattttgtgatgatctagttgatgagtgggcagatcatataacatttaacaaagctgaatcttgtatttgctttattcattcaaagcatggtgataaaagtacgtcagcaagtaaacttcatgatgttgtaggacaaggtataaaaaatcttggatacatgtattctagtactgatgatttttttgaaaaaataaaaaataagtttagaagtaattacgttggtgtttataaaaaacaatcagcaccaactaaaataaaaagaataagaaaaggtaatacgagacatattaaaaaatatcttgacgagatttttaaagatgcaaagttgcataggaaatgtatcctcagttgttcatttatctctaaaaaagaaataaagcaagagtttactaagttacaaaaaaaagagccggttaagcctcatgtaattcagctgctatggatactgtcatcattttctcatgctgtaaaagaagttaatgcagttccaattatttattgtgatgactag

SEQ ID NO: 431151 - DNA, 681 bp, Serratia marcescens
gtgctggccgacggcagcatcgacttcgacgacgccagcaagaccgagaacacccgcgtttcctatccgatttatcacatcgagaacatcgtcaaaccggtgtccaaagccggccatgcgcgcaagatcatcttcctgaccgccgacgccttcggcgtactgccgccggtatcgcgcctgacgccggagcagacccagtaccatttcctgtccggcttcaccgccaagctggccggcaccgagcgcggcatcaccgcgccgacgccaaccttctccgcctgcttcggcgccgcgttcctgacgctgcacccgacgcagtacgccgaagtgctggtgaaacgcatggaggccgccggcgcccaggcttacctggtcaacaccggctggaacggcagcggcaaacgtatttcgatcaaggatacgcgcggcattatcgacgccattctgaatggcgacattgagcaggccgagaccttcacgctgccgatcttcgggctggaggtgccgaccgcgctgccgggcgtcgatccgtcgatcctcgatccgcgcaaaacctacgccgacgagtcgctgtggcaggagaaagcgcaggatttggcgcagcgctttatcgataacttcgccaaatataccgtcaccccggcgggtgaaaaattggtgaacgccgggcctaaactgtaa

SEQ ID NO: 431152 - DNA, 1038 bp, Serratia marcescens
atgatggaaaagaagatgaaagcggtggttatgaccggcgccaaccggccctgggaagttaagctggtgccgatgccccgtgcagagccgggtcaggttctggtcaaagtgcacgcctcgggcatgtgctataccgacgtatgggcgacgcaaggatatggcggcgatatttacccgcaaacgcccggtcatgaagtggtgggggaagtcattgaggtgggcgccggcgtgcatacgcggcagattggcgatcgcgtcggcaccacttgggtacaatcgtcctgcggccgttgcccgtattgccgcgagagccggccgctgaccgggcaaacggcgatgaactgcccggcgccgcgcaccaccggtttttctgcccagggcggtcacgccgaatatatcgccatcgccgccgaaggtacggtgttattaccggatgggttgtcctacaccgatgccgcaccgatgatgtgcgcaggctacaccacctggagcgggctgcgtgatgctgcgccgcaaccgcatgaaactgtcgcggtgttgggcatcggcgggctggggcacgtcgcgttgcagctctccaaagcctgtggtttcgatacggtggcgatcacccattcaccggacaaacatgcgctggcgaagcaactgggcgccgatcgcatcttcgtttccggccaggcgctgcgggagagcggcggcgcggacattctgttggtgaccaccaatgacttcgactccgcacaggaggcgatgagtggcttgcgggtcgatggtcgcgtcgtgctgtgtgggctggacttcagcaaaccgttcgcgatctcttccgaaggtgtgccgttccatatgatgcgtcagcgggtgatcggctccacccatggcgggcagcaatacctgagtgaagtgctgaacctggcggcgagaggcaaagtgaagccgatgatcgagactttcacgctggatcaagccacggaggcttatgagcggctcgcctctggcaacatgcgttttcgcggcgttttcgtgccgtcggcggcgtga

SEQ ID NO: 431153 - DNA, 912 bp, Serratia marcescens
atgaatgctgcttacccgttcaaacagggcgatctgttcgccttgaccgtttttctggccgtcgctacccatcgcagctttcacgcggcggcggtggaactggaagtgacgccgtcggcggtcagccactcgataaaggctctggagcgacggctcggcgtcaggctgctcaaccgcaccacgcggagcgtggcgccgaccgaagcgggtgagcgcctggcggaacagctgcgtccggcgctgtcgtccatttcgcaagcgttgcacgaagtggatgaatggcgcgccacgcccagcggcacggtgcgcatcaatgccagcgaaggcgcggtcaggctggtgttgcgtccgttgctggccggtttcctgcgcgaacacccccatatccatctggacatcgtctgcgacgggaagctgagtgatatcgtcgccgaggggtttgatgccggcatccggctggcggaagccgtgccgcaggacatgatcgcgatgcgcgtcagcccgcctgtgcgtttcgtcgtcattgccgcgcccggctatttcgccgcccgcggccgcccggcaacgccacaggatctgctgcaccataactgcatccgctttcgcttcgacagcggcacgatttaccgctgggaattcgaacgcgatggcgtgagcgagtcgatcggcgtgaccggttcgctgacgctgaccgatcagccgctgatggtggacgccgccattgacggtatcggtatcgctttcgtgcctgagcatttggcgcttgaagcgctgcacgacgggcgcctggagcgtgcgctggacgcatggtgtccggcttatccgggattgtgcctctactactccggccatcgccacgtttcaggcgcgctgaaggcgttgatcgggtatttacgcgcggcgcagtcctga

SEQ ID NO: 431154 - DNA, 900 bp, Serratia marcescens
atgagcgataccccacgacacgcggacgacgcggcgatcctggccgccttcgcgcagcagcggcggcaaggcctgacccggcgttcggcgctgcatcaggccctgctacaactaatcgccgccggagaactgccctggcggacgcagctgccgccgagccgtgcgttggcggcccggctgacggtggcgcgcgacacggtggaacagacctacgcgcggctggaagcggaggggttcatcagccgaacggtggggcgcggcagctttgtgcgttatcgctgcgacacgctgctcggccgtgaactgctggcgacggcggcggggcaagaggcgcggctggcggagcgcgagctgagcgatcgcggccgggcgctgctggcggtcagccatacgccgcacaccagccgccaggcttcgctgacgccttcgctggcggacctgcgggcgtttcccatcgagcaatggctgcagcaggaaaagcaggcactgcggcggcacggcgagcggctgttggggtatgccgatccgcaagggttgccggagctgcgcgcggagatcgcgcgctatctgcagcgggagcggggcgtgaaggcgacggcggaacaggtgatcgtggtgaccagctctcagcaggcgttggcgctgtgtacccaggtgctgttcgatcccggcgatgcggtgttcgtcgaagagccgggttaccagggggcgaaaaagctggtgcagtcggcggggctgcaggcgcggccgatcggcatcgacgagcagggactggacgtcgggcagttgatgcaggcctcgggcggcggacggggcgtttacatcacgccgtcccatcactacccgctggggtattcgctgagcctcgagcggcggctggcgctgctgcagtgggcgtag

SEQ ID NO: 431155 - DNA, 648 bp, Serratia marcescens
gtgaacaacacagagatagtggaacggatagtaaaagtcattatctccccagaaacagttgtggggctgcttgacggtgcaatgtctgtgcctgttgattttggctatctagctctgggtatttttgacacaagcaatcgtcgcaagatggaagacgaacgcattcgcatgatgcgggcaatgaagtccggtttattgaaccatcatcaagttatcagaacgactaaaatcatcatcgatgcattcaccgcgcacatcccacaagagacgcaagacaaaatatttaggggcgtaggctccgcatccgccggccgaatgcttactacctccctgatttcatctaggatagtgaatagcatcatatcagcaggcggtgcggccatgattactcgaggtacaggcgtagctacaagcttcacgctgatggctggcggaatgatagagcgaagcatatacaaatcaatcggcctcgaacgtatgcatagtgcggtttattacaagcttagaagtgccgggaatttggactttatatactttttagttcaaccctatgttgatccattcatagaagctttggctgtacgtaaaaaccaaggggatgcagagtttaatagattgctgcaaaatattgaggaaaaaatgaaatga

SEQ ID NO: 431156 - DNA, 243 bp, Serratia marcescens
atgagaaaagacagcatccatatccgcatactctcttttttctttgaatttttctatcagttaatcgggggaattgggtttctattgtgtatctattttttctttagcttcgacacgataactcagcgcgtctttgccattttatcgacaatagcaatattttgtatcatttgttggctcggcgacagcctcatcaaaaagctacgaggttatcctccaggaggaaaccgtgacgggacgtaa

SEQ ID NO: 431157 - DNA, 1017 bp, Serratia marcescens
atgccgatcccattcccgttcgacttcaaaaatccggattacactcaggtgttcgaatggcggatggagcgcctgcagcgcatcaggactaatcctgaatcactcccaatcatgaaggctttttataaagacaacccggcccagttcctcattgattggggaatgacggttgacccgcgcaacgtcgagcgcggcttgccggcgcgcatcccatttctgctgttcccaaagcaggaggagtggatccagtggtttgtagagcactggcgagcttcaaaacccggcatcacggagaaaacccgcgacatgggcatgtcgtggctgacggtggggatggcgtcgtcgctctgtctgtttaaccggggcgtcttcgctgggttcggctctcgtaaagaagaatacgtcgataaaatcggctcaccgaagtcgctgtttgacaaggctcgcaactttattggtttgctgccggtggagtttcgcggcagctggagtgctaaacagcacgcgccacacatgcgcatcctgttcccggaaaccgaatcagcaatgaccggtgaggccggcgacggcattgggcgtggtgaccgcaccagtttctacatcgtggacgaatccgcgttcctggagcggccttatctggttgatgcgtcgctgtctgccaccaccaattgccggcaggacatttcaacgccgaacggcatggacaactccttcgctgagcgccgtcatagcggcaagaacgacgtgtttacgttccactggcgtgatgcccctcgcaaagaccaggcttggtatgacaagcaggtagaggaactcgacgcggtcgccgtggcacaagaaatcgacatcaactacagcgcatccatcgagggcgtgctgatcccgtctgcatgggtgcaggcggcgatcgacgctcacatcgcgccaacgggcgtgcgcatgggggcgttggatgttgccgatgagggcaacatccagcgcttttacgtcccgtcacggtttcctcctggaggataa

SEQ ID NO: 431158 - DNA, 234 bp, Serratia marcescens
atgagtagcaagcaaattagctataaggtcaccggtagagataatgagcagtatacttttttggatcgcttggaagatggtacatatcaagtaagggaaggcacttcgacgccggtatctcatatggaatgggaagaaagtttctcaacgtactctctagaagaattcctatccggacatccacaacacagaagtaaggtcgaagagttaattgctgagtttgaagctgaataa

SEQ ID NO: 431159 - DNA, 798 bp, Serratia marcescens
atgtcacaaccggaagaaagatgcctcgagcgcgattactgtgccggtcaactttcactccgcgacctggcagagatatacggcatcagtgaaggggcaatcagaaagcacgctaaaaagcatggctgggtacgcaaaggaaagagcggtacgcaaaaaggtacgcaggtacgcaaaagcggtacgcaaaaaggaaaggtgcgtaccaatcccaaagtcaatatagaagcagtcgccccggataatgacatcaatccttatgtctattatgggaatgacgacacaccggggctagagccgcgcaaatacgggctcaactatatgcagtgccgtttcgtgaatgagtacctcatcgatctgaacaggacggcggcgtacaaacgagcgggcgggaagagcgaaggcaacacggcctatgtcagcgctagccgcatgtatagaaacgctaaggtgagcagggcaatcagcgacgcgctggctgctcgcgagcgtcgcacccagataacgcaggatgctgtccttaaaatgtggtgggacatcgccacggccgacgtcaaccagatcactgagtaccgccggttatgctgtcgttattgttggggctccggccaccattatcagtggatggacgctgtggagcacgaggagtcggcggttaaggctaaagccgcgaaaaagcctgagccatccgacagaggtggttacggctttgatgtgatgctggacctaatcctgaatgccctcgctgcaatggtgctggcgttggccgcgcgcacttccacgactcccgagatttga

SEQ ID NO: 431160 - DNA, 360 bp, Serratia marcescens
atgaaaataattaacatagatagaaatattagtagtgttgagaaggggatgggagatcgttatttagtgcttgaccagaagccctcttatgattggattcagttctttgaacaagctcacaaggaatatttttcaatgtccaaaaggcgagcgaaaattgaagggcaataccttgttgttaattgtccgctagatgaaatacagaatcaaattaatcaattacaagagcagctcgctacggccacgagggattataatgcgtatgtggttcagcaaaatcaggactttaaagcacaagaggcggcattaaaacagaagaaaaacgacgctgaagatatctttaagaacttagatttttga

SEQ ID NO: 431161 - DNA, 891 bp, Serratia marcescens
gtggctggaaaagagttcttcactccgttaagatatcctggtggtaaggggaagttttctaaatttatcaaggacataataaaaaggaacaatctccttgatggtcactatgtggagccatatgcaggtggtgcaggggtggctttagagttattatgcactgaatatgtgtctactatccatatcaacgatgctgacccagctatatattccttttgggtatctgtattggatcatacagatgatctatgccagatgattcgtgctgtgagtgtaaacatagatagttggtataaacaaaaagaaattatttcctcaactgaaaaacatagcgtcctagaggttggttttgctgcattctttttaaatagagtgaatagatctggtatattaaaagctggtgttatcggcgggaaaaagcaattgggaaaatggaagttagatgctagatataataaagaagatttgataaaaagaataaaaaagatctcctcttttcgagataggattaaggtctacaacttagacgcagttgagttattaacgaaaatcgtacctgatttgcctagcaattgcttgatatatctagatccaccatactatgtaaacggtgcgggattatatcgtaatttttatacgcacaatgatcacgttgaaatttgtgatgtattatcaaatgttaatcatccttggattgtttcatacgataacgtttctgaaataaaaaatatttatcaaggttacaaacaagatgagtattttctcagttatactgcccaagtcaagaagaaaggatcggaggtaatgatttacgggccaggtcttgttggtacaaagttcgaaagcaatgtagagaatcataatttagacgttgctgatattgacgcataa

SEQ ID NO: 431162 - DNA, 1458 bp, Serratia marcescens
atgaaaagaaatatccaagaaatacaaatttcaaatttaaaattagacttggaaaatgttagatttggtcaggatacggctagtagtcaacatgaagccatagcattaatgatgagctcagatattgaagcaagaaaaatactaaagctggctgagcacatttctacttatggactcgatccgacggagttacagcttgtttatcaagatgtcgataaaaaatatattgtaatagaaggaaacagaagattaaccgcacttaagttgatttttactccagatgcttgccctattgacaaaatggtgagggattttaggaaggtgcatgagaatactaacctagactcaataagtagtattgattgtggcgttgttaattctcgtgaagatggcgcaatctggttggaactaaaacatacaggcgaaaatggaggtgttggtcgcgtaggttggaaaggtgatatcatcgatgattatagagctcgacaaggaacatctgaatctgtaggtcgtcaaatcaggcagtttgtcaacgataacgaagagttcacagatgaagtaaaagatggcgtaaatcaaatccctgttacttcactgagtcgattgttctctagcaagcctggccaagatgcattccaattgaaaatagttagtaaaaagctaacaccaatggttgatattaattttattgtcccagctcttgaatatgccatttgcctttttgttcaagatggtatgaacgttgacgatatttataacgaccaggatagaaaagacttcatatcaagaataccagagaatatattacctctttcactaaaagagaaggccgacaaatctggagctggagctggagctggagctggagctggagctgatgccgaagctggagctggtgccgaagctggagctggtgccgaagctggagctggtgccggagttggtggtttagatggcgagaaggatgaacccaaggtgcgcccgcgtccgccgagtacagcgagaaaatacttaattaactatccgctgagcattagtcaaccaagagtgaatgaaatatacagagacttaaaatctaggttgctagtggataaagttccaaattctgctgctattgtttttcgagtttttcttgaactgagttgtaatcattatataagttcacaaatgatatccggctcgccagtgttgaggagtgataacaagaaggagttgagtctggctgactcaaatctttcattgaaaatacaaagtgttgccatggacctagaatcgaaagggatctggggaaaaggacaatcaagagccatttgcaagagagccgctggcagggatactttggggtcagtagatcactttaatgaatttgttcacagtacgaccagttcaccaatcccgtcggaacttaaggtggtagctgaagattacaagccactgattgtggcgatttgggcatag

SEQ ID NO: 431163 - DNA, 246 bp, Serratia marcescens
atggccgggcaatcggactatctaccgcccggcctgccatttaatcgaggcgcatggacgcaggaacaacgcgatttagagcagttcggcctgcgcgcctgcggcctggttcgcgatctgttcgcgaggaagatcacccgccccacggtgctggtggcgattgaagaggcgccggagcaataccgggaacatttcagagcacgcctgaattactggcgtgatcgcaaagaggggaaggggctgtga

SEQ ID NO: 431164 - DNA, 1821 bp, Serratia marcescens
gtgagtaagtctaaatttatatctctagataaaaagattaatgagttaaagaagttgacttcaaaattgaaaattgaagatgtcgccaatcctttatttatggatcttattcgtttttctcatatgagcgaaagaataaagcttgactcacctgctagacagatccagtatgtcttagcaattatggcatctcaagataaaatggaaaatactgaaaatctatctgatggcaaattatttcagatctataatcttctgaatgagatatttggtaagtatcttaatatttatcttccctctagagacgatattaaagcgggtttagatgagcggtggtttaaggtaagagctgtcgcaatgccaactttcttaggttacttttttgaaagtgaaaaaatatcaagtgaagagcttaggtatgatataattaatttttatgagaacttctctggtgaaataaaaaaagagcttggcataagcaatgttgaaatgctggaaattaccgatgctataggtgagattttgcaagccaatttcgatagggttaaaaatctaatacttgacatagataaggagagattaaaatttaaagatgctaatatagaaaactatgatgaattaatacgtgaggtaagggctagttgtgggccattggttgttgaatatgaaaagctttcgagggagatttgtcattttagcttttctgagcttgaaggtaaatttgatctaataaccctagataaattcaaagaattatttgtaactataaaagggaggtctcctgatattcattatattacagatgataatccgatatttaaaaaaccaataattacgtcggatatggattcttactgcctatgttcgtttaacttccttttaactgcaataaaaaataatattgatgattgttttaaaaaaggagctgtcgcagaaaaatttcgtaagcaccgtgacgctcaacttgaacgtgatgttagtaatatttttcgtgattttttaccagaaaatgccttgattattgaaagtgcatttgaaaataagtcatcatctaatgaacatgacttggtgataattcatgacagaaaagtgcttatcattgagtctaaagcatctcctcgcagagagccattgagagatccatcgaaagcgtatcagaggattagtgatgactttaatagaaagtccggcatccaaagtggatatgatcaggcacgtcgtttagagttacttttacaaaataacagtgttactaatttgtatgataaaaagggagggcttataacgacgatagggaaagaggattttgatgagatattttgtatatgtgtcactaaagatgattttggtatgctcgctacagatttaactattttgctagaaaaagatgatgacgcaaaatatccgtgggtaataggtatgcataatctaagatttttaattgcatgcttggattacatcggtaaagattgggagttttttataaactatcttcgagatcggataggtgtttttggtaagataatgtctaacgatgaattagagtttgccggtgcctatctgaaatatgatggttttgatttttcacctgactcaccggaacataaagtttttctggatattaatgaatctagagttcttgatgatatatcatatgccaagtcaaatggcgaagaatatattcttgaagttattgagccaccttattctgagctcagtaaagataagctttctaagagaaaggtcccaactaccaagatgaaaaaaatgaagagaataaaaagaacgatggcgaacaaatcaaaacgtaagaatagataa

SEQ ID NO: 431165 - DNA, 465 bp, Serratia marcescens
atgtacggcggcaaactcgacactgagacccagtgcggtttcatggtcagccatacggcgcaattctcggtaaaccgtcaccggtgcgccgccaataaattgaaactggcggatgcgccagcgggctgcccagacggatactgctggggcaacctctttcagctctttgccgctgtcatcgtccagttcgccatcaagtgcgtaaccgccgatatctttcgccagcagttcaatatcaactcgcccagcgtctggcagatggttaaagcggtggcacagggcggcatcgctgttgttatcgaaggcgcggtatttatcactgacgagatcaagccgtggcaatacacgctcaacgaagtttttcgtcaagtatgcattgccccggcggataccctaggattcttccagtttgttgatgtggtagcgcacattgtgttggagcagctgtggttgctgttcaagtag

SEQ ID NO: 431166 - DNA, 1350 bp, Serratia marcescens
atgtctgtcacgaaagaaagtaagttttcgcgaggttttcatactgatgatgatatttttaataggaaaccattgtacgatctaataattcgagtggcaacgaaagcaccagatgaaaacttagttgttgcactcgatgacaaatggggtaatggtaaaacctcatttataaatatgatggagtctgaaataaaaataaatgaaaataaagatgtggattttgtttactttgatgcgtttgaaaatgactatcaatcagatccatttgtagcattatcatcgaaaatatatacattagttagttccaatgatgagggattaaagagtctatctagaaagatgttgcacttaggtaagaaggtgggtgcatcatttgccattaatggcgctaaatttgcagtgagtgcgctcactggcggtcttgttaatgggactaaaatcgaacaagcaaaagatgcaattatagaattaatatcatcgccaatagaaggtttaatcgaaagtaaaataaaatcaggggaggatgagttatatacgatagaggctttcagatgcgcactatctgaaatagctgaaaaaagaaagaagaagataatttttgtgattgacgaattagatagagctaggccagactttgcacttgatttacttgaaaaagtaaaacatatattttcagtcaaagggtttgtttttttattagtaatgaataggaatcaattcgagaaaagtattgagtgtaggtatggaggcataaactcaagactatatttaaacaaattcgtacattattggtttacattaccaaagaaaaatcacctctcagattatgcattaaaggttcatgatagatcaacaattttaagttacttgttacatttggatagggatattaaaataatgccaagggaggggcggcaaatcaagttactatcgtatcttttggaggcgaatggctgttcgttgagggaggcggagcgttgctattctatatttagcattatggataaccctaaggactttaaaaattacaatggtgaaattcataagttggttatagtgcttgttgcttttcttaaaatacataaccaagagttgttggatcaaataatattcaagaccatccctatcgatgaggtgtttggtagattgaacatcaatggtgaacatctaagttcacttcctgagttaaaacttacatctagtgctattaaatatcacttcgctacagaagaagatctttttcgtgcaaaagacactggtatttataaagcaattgaaggggcttatggtgatcgagagtatatctttgagtcggcaatggcatatgtagagtttcttcattttggttag

SEQ ID NO: 431167 - DNA, 1191 bp, Serratia marcescens
atgaacccgcttcagcaacttaaatttatttccaatgaaataaaagagatacctttgttaaacccgccgtttgtgcactctggtaatttaattgaggattttaataaacgagttgataaattctattcactgatgaaggatttatcaaagaacgatgatcttactataatgggaggaatatcaaatagtttaagaagcattgaaacattgaagattggaattatagaatcaataaagcatcatctcagtggtagtttgaatgaatcatataaaagatttgaacgtgcattgagttatacgagaataaacgatcacatatctgataccgctattccattgagtgacgtattgccattttgttctagtttctatagggttaggactagtaataccccccttaccaagcgagaggatttgtttcatatccctttcaatcaaagacatagggttaagactcaacgattttcaatatcagggttgccttgcctttatctaggttcatcaatactggtatgctggcatgaaatgggaaagcctgattttgataagctttatatttcagccttcactacgggtcatgtagaaaaagacatgaaaattatagatttagcattcaacttaacatcaactttggatttcaatttatttgaaagattagagggttcggatgagattttctcaaaagcaaaggcaaaaatatcaaacttaataatatggcctcttgtccttgcttgtcattatagaaaaaagtatgaagatagcttcaatgttgagtatatcatacccaatctgttaatggagtgggtcagtagttccaaagcacaagggatcgcgggtatcgcttaccggaccacgaaattcataaacgggaaaaataaaaaaattggtgttaatctaatactcccaccaaaacatgacgacataacggatgagaaactttctttctgccctgaattagcacgaacattccgagtaactaatccagtgtcctggcaagtgttaaaaacactgaataccaacaatgaaaaaaatcagtatgaattaaaagcacgacttatcccaaataatggaagagtggataatttagatgagtttcttattgataattatgatgagacggaattctcgatttttgaaaagttaataagtaacataatgaagtttgactttgttgataatcaacggagttag

SEQ ID NO: 431168 - DNA, 732 bp, Serratia marcescens
atgacccatgaagcctattctttctggaatggcacgctgtttaacaagggcaaatcgaaggacagacgccgggaaattgacgttagctataaacgcctggccagcggcgtcaatactggctcttattggttcgtgcaatcgtgggcggagccgcatcagtttgaagatggcaccattttccacctgcttgacccgaacattaatcaggagatctacggcgttcccgagtatctttcctcgcttaactccatttggctgaacgaggccgcaacgctgtttcgccgtaaatactacctcaacggcagccatgccggctttatcctgtacatgaacgatgccgcgcacaaacaggaggatatcgacaacctgcgcaaagcgctgaaagagtcaaaagggccggctaacctccgaaacctgcttatgtatgcacctgacggcaagccggacgggttacaattgctccctctggccgaggtcgcggcaaagtacgagtttctgaacatcagaaacgtgacccgtgatgatcagcttgccgctcagcggacaccgccacaactgatgggaattttgccgaacaataccggtggttttggggatgttgagaaagctgcgcgtgttttcgcgattaacgagctggccccgttacaggaacgaccatgtgaacttaacgaatgggcaggggaagatgtgatcagctttaaaccttatgagctacttaaactggatatataa

SEQ ID NO: 431169 - DNA, 915 bp, Serratia marcescens
atgaggatcctgatcaccggcgcaacgggattgatcggcagcagcctgacggccaggctgctggcgctttctcaccatattacggtactgacgcgagacgaacggcgggctcgggcccggctcggcgaccagccgagctattggcgcacgctggacgaccggcagtcgctggatgacttcgatgcggtgatcaatctggccggcgaacctatcgccgacaagcgctggagcgcacagcagaagcagcggctgtgtcatagccgctgggatctgaccgaacgcttggcgcagctgatcaaggccggcagcacgccgcccggcgtgctgatttccggttccgccgtcggctactacggcgatcaggggcaggcggtggtcaccgaagaggagccgccgcacgacgaattcacccaccagctgtgccaacgctgggaagcgctggcgctgcaggcgcagagcgacgccacccgcgtctgcctgctgcgcaccggcgtggtgctggcgccgcagggcggcgcgctggccaaaatgctgcctccgttccgcttcgggctgggcggcccgatcggcgacggccgccaatacctgccgtggatccatctcgacgacatggtcaacggcattatttatctgctggatcacgccacgctcaccggcccgttcaacatggtcgccccctacccggtgcataacgagcagttcgccgcccaattggccaacgtgctcgatcgcccggcgtttctgcgggtgccggcgttcgtcatgcgtttgttgatgggggaagcggcggtgctggtgctcggcggccagcgggcggtgccgaagcggctggaggaggccggcttccacttccgctatctggagctggagcaggcgctggatgacgtgattaatcagcgggccgaagcccgctga

SEQ ID NO: 431170 - DNA, 1206 bp, Serratia marcescens
atgcttgatccagatctaggaaagtcggcatatcatggttacaacttcactaaaggagctttgggtgagctcaaacgaaaagtattgagccgggagattaaagagggtgcgttggtcattgaaaacgttgatagattcagtcgcctaccggagcatgaagctatccgagagttcaatgatctgattcttggtggcattgatattcatgaagtggaaacaggtgtggtgtatagcaagaaaatccccaatacactatcaaaattatctcactcaatagaaagagcgtggggggagagtgaaagaaagtcaactattgcaaaaaaggtatggaaagcccgtagagaaacagtacttgctactggaaaacctttgcctgcacgtactccaaaatggttgaaaatagttaacagcgagtatgttattgataaaaaatattcagatgcagttaatgcaatcttcaagttatacacggaagggtatggtactgcgtatatcgtaaagtatcttaataataatgatatgaagatagatggattatcttggaatactgccgtattgactaagatgtattcggatgagaggttgattggctggaaaagtggcatgaaaatttatccagcaatagtgggtgaggatgtttttaaaaaggcaatggtaattaaaagctctaaagtaatgcttaataaacagaaggttaatagttcgcagaagtctatatttaactcggtggctcgctgtggaaaatgtggtgccgcaatgtgtgttagcgttaatggacacaataaactgtattattggtgttggaaaaaacgtggtacaaaagaatgtgatttatccggctttgtgtacgcttatgcagaactagcgattttgcaacatataaaaaacattgattggaataaagtatatcgcgacagtgatcgtagtaatgagcgttctgaagctataaatatggaattggctgagttaattaactataaattagaaatagatgaaataataaataccactgaaagactacctactgctgtgttacgagcattgattactacagaagaaaaaatttctaaattagaagaggaaatatcatcaataaaagcgtctgaatatccgttagactttgatttcaatgttgatgatattaccaatcaaaacagtatagagttaagacagaagtgtaatatacaaattaaaaaaaagcattaa

SEQ ID NO: 431171 - DNA, 153 bp, Serratia marcescens
atggaaaagaacaaacaaattaacgtgcgtctcaatgaaacacaaatgcagtacttacagcaaatagttgatgccggtaaagcaaagacacaaagcggagcgatggtttatttgattaaccaatatgcgatcctaggaggtgacaaaaagtaa

SEQ ID NO: 431172 - DNA, 603 bp, Serratia marcescens
atgaaaaaaggaaataaactagtagctgggattggtactaatgatctggtttacaataaaacaaagcaaattgaaattggattaataacgcctgaacttcaggacaagtgttggatagcatggaataatcgtctagcagcacaagactgtggtagggctactgttagtactgagtggctgacctactcaaactttgcgatgtggtggttagatacgcatgttgacgactgggtaattgacaaggactgggtagtacagggaaacagggaatatcacccggataagtgcgtttgggtgccgacaaagattaataatctattgggagacggtagaaggaaagctactaatctaccgaaaggcgtctctatggatcgtaagagctatcgagcacaatgctgggttgatggtgttcgtgaagctaagtattttaaaaatccacacgatgctcataggcagtggcaattgttaaagattcaagaattaaacaatgtcctacgtgaatatgcatttgatcaccggttggatgggcgagtaattcaacggatgattgaggttagaaacgaaatccaatgcgattatgacaaaaatattgaaacacaataa

SEQ ID NO: 431173 - DNA, 717 bp, Serratia marcescens
atgacattaagttgggatggaacaaaaaacatagcagatattactaaaataaccatttttgcgtactcatgttatttcttctttaggatgggggaggcagttttttatggctacccatttagttatataagtgtggattcatcgagtttgttttcagtactgataaagtcattaatggccttgttggttgctttctttattataaaggctgggattaaatcatcacaacgtgctatttggaatacttttcttgtacttgttagtctggtggtactttccgtaatgatgtatcttaagaatagaaacttacatgaggtttcttctgtttttgttttttgtgttataatttactattcattgttttccattgccgattcaataagagacctcagtaaaactgatgagggaagcgtgcaaggacatgggcttttaaaagctgtattttattcttgggttatatgtttcgcattaggaaattactattatggtttcgcccctaatgggttatatcaggataaggatggacgtgtaatcatagctcaatacaatgacaagtacataatgaaaaagtgtcaaagcaatggggttatggcaacatatatagttgatattccagatggtatgttaactccagtaccggaaaattattttgttcgagacgttatgaaagcgaaatgtaaagtacaatcaactacgagcgatataaaagttgagtaa

SEQ ID NO: 431174 - DNA, 753 bp, Serratia marcescens
atggaactaggttcattaacagattggattagtgcaggtgctaacatctgtatggctttggttgcttttggtggttatagaatcgctaaagattatttttctgatatggttaaaaaggatggatacgaaataacaaaaaaaatcaatcttgaattactaccacaattagagaaaaccttaaatctctctgtcataaacatattagatactgatatcaaaaattatgtttctgggaaaaatggtgtattccaaaatgaaaacgaagaaagcaacctaaaagaaactttgagtcaagatctagacaatttaaaatacaaactaaaagaaaatagaaaaataactcgtgaagtcgaaggattaattgacagtcttgaggcatatggctggagtatgctcccggaaaaaaaacaggaatatgataactttgcatctatcaacaaggttttattctctaaaatatctaacatagcaaatgttttatcagaaattttatcaagaacccccccagaattttatccaatcgataacgacccgttaattaaagatttcaatccattatcaaaaaacagcccctatgctgcgatggatattcaccttctatgtgaaattctaataagaaataaaaattatctatatgggagttcagatgtactagaagaaacaccttatgataaatctatttctacgtttaagaagtacttccgaaatgggaagtacttaaaaaattacttcgagtacagcccaaagaaatag

SEQ ID NO: 431175 - DNA, 690 bp, Serratia marcescens
gtgaaagttatattgatcataataacggctactgcggctgctattgcgttaccaacctttaatgagaaacatattttggactttggcaatacctcagatattatttcagcattatgcaactgtgttgttgcaggtgctgctgttatggcatttatttctgcaaagaattggatttatcaacgaatgcatgacgatgtatacaaaattgccaaggaactattcacacaagactaccctgagatcattaaattatgtaatgagattaattatattgcacctaatttttcaggtaagctcactggtgatgtaaatagtcttgcagaatcgtacacaacagatgtagagaatagtttaactactattgggaataatctagaggaactaaagtcaaacgcagatgcaaagataaagatactaaaaaaattcaatttccaaccaattgaaaagtacagcctttaccataaggcattaatgatagagttagacttacaaataaaaaccatccgtaatttagtgcttaacatcgataatatgagaactgcaatattacctcaacaagttaaaagttcaattgcaaacattaaaactcatagttcacacgcacaaagaaaacatactcgactaaactcaatttacaatgatatgtatgatcttagggttggattcatggattatttcaaattaatctga

SEQ ID NO: 431176 - DNA, 273 bp, Serratia marcescens
atggaagatgaaaagaagacgcattctatcgatgaaatgatgcaggggttagtttctcacgcaaaaattgttgctactgtcgattttgaaaagttagagtccgaaggtgtgctcgaaaaagttcggggtggttatctcgtaaaaaaatactcacttctacctgaagtggcgatgaaacacttggtgaagtcaataacacctaccaagagcggagtcaaaatattgctttttaaaccacctaaaaatttccttgatctagctaataaaaattaa

SEQ ID NO: 431177 - DNA, 552 bp, Serratia marcescens
atgaagctgatgttcgcctcggatatccacggctcgctgccggccaccgaacgcgtgctggaattgtttgaacaaaacggcgccgactggctgattcttctgggtgatttgctgaatcacggcccgcgcaacgcgctgccggccgggtatcagcctgctcaggttgccgaacgattgaatcgctatagcgacaagatcatcgccgttcgcggcaattgcgacagcgaggtcgatcagatgctgctgacgtttcccatcgaggcgccctggcaacaggttttactgcaaaaaagacgattgtttttgacccacggtcacctttatcatccctcggcactgccgccgttatcccgcggtgacgtcctggcctacggccatacgcatctgccgcaggcggagcggcagggtgagatctattgcttcaatccgggctcggtcagcatccccaaagggggctttccggccagctacggcatgttggatcggggcactttgcgcgtgctgacgctcgacggcggcaaggtcgtcgcggaggtggcgttaacacgctaa

SEQ ID NO: 431178 - DNA, 498 bp, Serratia marcescens
atgaaaacctaccctgcagttttacacctgatgtgtggcaaggccggtgcaggcaaatcgacgctggcgcagcgtttggcgcagcaaccgcaaacgctgttgctggtcgaagatgcgtggctggcgacgctgtatgagcaggagatgaccagcctgcaagactatgcgcgctgttccgaccggttgcggcgggcgctgggcggacacctcgttcaactgctgcgcggcggctggtccgtagcgctcgatttcccgatgaatacgccagacaggcggcgctgggccaaagcgttggcggaggaggccggcgttgcgcactgtctgcattttctcgacgtcagccatgcgcaatgcctgagccggataacgctgagaaacgcgcgcggcgagcacccgtttacactgagcgaagcggagtttgagcgcctggcgcagtactttgttcccccggcggaagaggaagggatgacagtcttgcgttatggcgaacaggactga

SEQ ID NO: 431179 - DNA, 897 bp, Serratia marcescens
atggacgtgctactgacgatgcgcgcctttcgtcgcgtggttgagcgcaacagtttttataaggcggcggaggatctggcgatcacgccggcggcgttgagcaagcagattaagcagttggaaaaccggttggggacgctgttgctggtgcgcaccacccgtagcatgagcctgaccgaagccgggcagctctattaccaggaagcctgtcggttgctcggcgagttcgacgcgctggagcagacggttgccgccagcacgcagcaggtctccggcacgctgcgggtcaatgcgccgctttcgttcggcctgacggtgttgtcgccactgctgccgccgtttatgcaacgttacccgcagctgcaggtggagctgacgttggacgacagggtattggacgtggtggcggccggtttcgatatttccttgcgcattcgccgacggctgccggattcttccctcagcgcccgggcgctgggtgaagtgcaccagcgaatttgcgccgcgcccggctatttggcgcagcacggcgtgccgcaaacgccgaatgaattgcagcgacacagctgtctggcctattccctggcggaaaggccggggcagtggcagttcaccgccggcgaggagagcctgagcgtgacgttcactcccaggttgatcgccaacaacagcctgatgctgcgggatatgctggtggcgggactgggtatcggctcgctgccgtcgttcgtggcggatcccgaaatcgccgccggcaggctggtgcggctgttccctgaacagattgccgacgtgcatcaggttttcgcggtttacccgacgcgccggcatgtgcagcagaaagtgagtttattcaccgaatttgtgcgagaacagggattgatgacggcgaattga

SEQ ID NO: 431180 - DNA, 1089 bp, Serratia marcescens
atgcatgcgctcgctgtcggcgcgcggtttcttcctgccgttggcatcccagcacagccagccgatcgccagcattttcagcgacggcaccatgatactggcgatgaaaatcaccagcgccaccggataagagccgtcgccccacagcaggatcacccccgccatgatggtggagttcattttgttgcccagcgcctcggtcaccatgatcggcataaggttggccggaatgtacagcatgacggaggtcaccagcagcgccagcgtccactgcaggctgtggcggcgacgcacgtagccgttggtgtggcagcgcgggcagcgcacctgattggccggcaggatcgccgtgcagcaggcgcaagagcgcacgccctgccgcatgccggtgcgccccaccgtcagcgggcgatcgaggcgcggcgccggttcgatgtcctgccacagccagcgccgatccacgcactggaaggcgcgcacctgcagcaggcagaacaggcaataaggcacgaagctgctgccgatgccgatatcgccgtaggccatcagcttgacgaagctgaccagcaccccggcgaggaaaatttccaccatgcaccaggtcttgaactggaacagcacccgggccatccactctttcagccccagcggcaaacgcactttggcacacagcagaatgatcgccaccatgcaaaacgccgggatcagctgcacgaacaccataaacagcgtggccatgctggcgtagtcttccgccaccatgacttccggaatttgaatcagccggatttcattgccgatgccggcgacgcgcatgttgataaacgggaaaatgttggccagcaccagcatgaacagggcgctgagggcgtaaccgatcggccgcttgcgcggctcgtcccagcgggcgctgagcgtggttttgcagcgcgggcagaccgctttgctgccataggccagcggcggcagcgccaccagcatgtcgcactgcgggcacagcatcaggttatcctggtgctccgccgaaggtgcggaatgactacgctgctgatgattgttgtgggaacacaccatattcctcctaaataa

SEQ ID NO: 431181 - DNA, 618 bp, Serratia marcescens
atgacaaacgctatgataaaaaatgacaaacgctggattggcgatctgctgggtggttcgttgatggtccgagagagccgaaccattgctgagttgttgctttctgaaccagatgaaacgacctggcagcagcaaataatcaatgaaaacattcttcaggcttcctccaccagtaccgcaaatcgttatgcccgaaccttaaggctgcgattgatgaccttggatcgggagtgctggcaactgattgctgatggcagtgaaagcgagcgtctgcaaatgctgttggttgcattgatgatccagtctccaattgttgcgcagtttgttgctgatgtcgtaaatccggctcgtcaacagtttaaagaaaaacttggtatgaattgctggggggagtttgtggatgagaatctgcgattgcacccggagctggctgctttttctgattcatctatccaaaaaatgggtaacaatctgattaaggcactgacagaagctggttacctggatagcccgcgccgccgcaatttacaaaacgttttccttctaccggatgttgcaacggccttgcatcgtttaaacaaagccgaaatactccctattctggagggtaacgcatga

SEQ ID NO: 431182 - DNA, 603 bp, Serratia marcescens
atgaatgacccgatccttgaatatcgattaaagcagttagaagaacgtatcggcgacgaccgttttttgaaaaaccaaggttccggcaatgagattggcttctggatttttgactatccggcaaagcaagagcttcaggtccgcgaataccttcactttttattcaaaaaactggataaaaagcacacctataaaacgctaaatatcttccaggtcatcgttgacatgctggaggaacgtaagctctttgaccgtatctgccagcgagagcctgaacttggcctagaaacactgaaaaagcatctggcagccccactgagccagaaaaaaatcgcggaatatattgcgcgcactgtcgatcttccggcgcagcaatttgtcattctgacgggcctcggtaacgcctggccgttggttcgtggtcatgagctaatgagcgcacttcaggacgtgatggggtttacaccactgctgatgttctatccaggcacctacagcggatatgatctttcaccactcgctggcattcactcccgtaactattaccgcgccttcagactggtaccagaaaccggaccggcggcgactttgactcctcgttaa

SEQ ID NO: 431183 - DNA, 3615 bp, Serratia marcescens
atgaatattgaacaaatttttgagaaaccgctaaaacgtaatattaacggcgtggttaaagccgagcagaccgacgacgaaagcgcgtggatagaactggatgagtacgtcatcactcgggagctcgatggtcatctgcgtcagttctttgaagtatacgccccagctacgggaccaggcagattacagcttgccgacaaaatgggcgtctgggtttcaggcttctttggttccggtaaatcacacttcattaaaatcctttcctatctgctggcgaaccgcgaagttagccacaatggcgtcacgcgtaatgcgctctccttctttgaagagaaaattgatgatgcactgctattggccgatattcggaaatcggttcagcatccgactgatgtagttctattcaatattgactcacgtgcgaattttgaagatggcgtggatgccatcctcaaagtctttctgaaagtttttaacgaactggctggttattgtggggacttcccgcatattgcacacctggaacgtgagctcgataagcgtggacagtttgatacctttaaagccgcctttgcggatatcactggctctcgttgggaagatgaacgtgatgtttatctgatgataaacgatcagatggctcaggcgctgagtgttgctacaggccagagtgaagagtcttctcgccagtggatcgagcaacttgataagaacttcccactggatatcaaaaatttctgtacgtgggtgaaagagtggctcgacagccaggggaatcgtaatatcctgtttatggtcgatgaagttggtcagttcattggtaaagatgcccagatgatgctgaagctgcaaaccatcaccgaaaacttgggtgttatttgtggtgggcgggcatgggtgattgtgacctcccaggctgacattaatgccgccattggcgggatgagcagtcgtgatggtcaggacttctccaagattcagggacgtttctcaacgcgcttacagctctccagttctaatacctcagaagttatccagaaacgtttgctggtgaaaaccgatgcggcaataccggcgctggaagctgtctggcaggaaaaaggcgatattctgcgtaaccagttggcgtttgacacgacaaccacggctacgctgcgtgcctatacaaacagccacgagttcgtagataactatccgtttgtaccgtggcattaccagatcctgcaaaaggtctttgaatcaatccgaaccaaaggagccgcaggtaagcagttggcaatgggggagcgctctctgctggatgccttccagtcggcagctgtacaaatctccgcagatggtctggatagtctggtcccgttctggcgcttttactcagcgattgaaagcttcctggaacctgcggttagccgcactatcattcaggcctgccagtctccgtcactgactgaatttgacggcaaactactaaagaccctgttcctgatccgctacgttgatgtgctgaaaagtactctcgacaatctcgtcacgctctctattgagcgtattgatactgacaaagtggaactccgtcgacagattgaagccagtcttaatcgtctgcaggctgagatgctgatctcgcgtattgatgacaaattcgttttcctcactaacgaagaaaaagagattgaaaacgaaatccgcaatattgacgtggaattcaccaccatcaataagcaactctcaaccatcattttcgaagagatcctgaaaaacaaaagatatcgctatccagccaataagcaggattttgatatcagtcgcttctgtaacgggcacccactggatggtgcaaatcttaacgatttggtaattaaagtgctcacgccgctggactcgaactacgagagctacaagggggcgcattccaatagcctactgatgacagacagtaaagactgcattctcatttgtctgcctgatgaagctcgcacctggcaagacctgaccatgtacgcgcagaccaaagccttccttagcaagcaaagcggccagcgtccggaacaggcaacgctgttggcggaaaaaggccgtgaaaatggcatacgcgaaaaaacactgaaggcgcagatcgaaggcttgctggctcaggctgatgtctgggcgctgggcgaacggctggataagaaatcctcttcgccgttagctatcgtggatgcagcctgcggttacgttatcgagaacagtttctctaaactgaaattgctgcgcctgagtactggggacgtgaaccgtgaaactcacgctctattgacggtagaaaatgatactcagctcgacctcggggaaatggaagagtccaacccagaggcgatgcgtgaagtggataactggatcagtatgagtattgagactcataagccagtttatttgcgagacatccttaccacttttggtcgccgcccatttggctggccggaagatgaagtcaaattgctggtggctcgcctggcacgcagcggtaaatacagcttcactttgcaaggcagtgaaatcgcactgaagcaggcgtgggatgcgtttaataattcacgtcgttacagcgatttgcgtctgcataaagttcgtcgccatgacgaagcacagttgactaaagccgcgcagctgatggctgatattgccggagagccgtttaacgagcgagaagaacagtcgttggtctctcatatacgcgaactctttggccgctggaagagcgaactgaccgtttttaaaactcgtgcagagagtggacaaaaccctggccgtaaagagatagaagaaggcctggtattgctgaacgggatcctcaacgagaaagaagaatacgcagtgattgaaaaaatcactgcagcggctgacgacctcgacgatttctcggaagtctgggacgatttggtcagtttctacaaaaaccaatacgccacctggcagcgcttgagtatggcgttgcatggcagtttcaaagctaaccgtaacgcactggataaagacgaaacggcccaaaaggctttgcaggagttggaagctatctacagcaaggcacgaccttacggagaactgcatcgaattatcccactgattgaaaccgttgaaaccatcaaccagcgtctggtggaagaataccgaagccatgcgctgctgcagatcgatgtccatatcaatgaactgaagcaaagcatgctagagatgctcgtccctgctgacttgcagcactcggttttacacccgatgcaacaatcgcgtaagaaagtggagcagaacggtctgatcccgcaaatcatggaagaacaggcagaggttcgggcactacaatttaaagcaaacgaacgactgaacggttgggttgaagaacagcgtaagaaagtgcctgaaccaaaacccgtccctcaaccagggattatcgacccagcagttaagcctgaacccaagctgaaaaagaccatctacgtgaacacacgtaaaacgatggaacgagctgcgggtgtgacaacgctggataacgccgaacaggtagacaaagcgctggaacaactccgtagaacgctaatggatgccattaacgcaggtgaacgcgtacagcttcagtaa

SEQ ID NO: 431184 - DNA, 3612 bp, Serratia marcescens
atgaatacgtcaaacatcaaaaaatacgccccggtggcacgtaaacagttccgtgatgcagttatgcaaaaactgaccacgctgggcattgaggccgataaaaaaggcaacctgcaaattgcgcaagcaaccgagcttggcgaccaggtgcgttatggtcagttctcgctggacaaagcactggcgtcacgccgtgagcgtctggtcaagcgtgcagaaaagcagggctacgacgtgctggtggaacacattgcttacacctggtttaaccgcttctgcgctattcgctatatggagctgcatggctatcttgatcacggtttccgtatgctgtctcacccgacgctggaaggtggttttgaggttctggatcatgtgccggaagtggctgatgctctggggctggacaaagcgcacctggtggagatgaagctggcgggcgatcgtgacgaagaattgtaccgtgaactgttgcttgcgcagtgtcatgcgctgcacggtgcaatgcctttcctgttcgaagcagttaatgatgaaattgagctagtgctgccggataatctgacccgcaccgactccattctgcgcgggctggtggacattattcctgaagaagactgggaacaggtcgaagtgatcggctggctgtatcagttttatatctccgagaaaaaagacgatgtgatcggcaaggtggtaaagagcgaagatattcccgccgccactcagctgtttaccccgaactggattgtgcagtacctggtgcagaactcggtgggccgccagtggctgcaaacctacccggactctagcctaaaaggcaaaatgccgtactacgttgagccagcggagcaaacgccggaagtacgggcacagctggcagctatcaccccatccagcattgagcctgaaagcattaaggtgctggatccggcctgcggctccgggcatatcctgactgaagcctatagcgtgcttaaggccatttacgaagagcgtggctaccgtacccgtgacattccgcagctgattctggaaaacaatctctttgggctggacattgatgaccgtgcagcgcagctgtctggttttgcgatgctgatgctggcccgccaggacgatcgccgcattttgagtccaggccgtggcgttcgcttgaatattgtttccctgcaggaaagtaagctggatatcgctgagctgtggaccagactgaactaccaccagcaggtgcagcgcggcagcatgggagatatgtttgcagaagggacggcactgaccaataccgacagcgcggaatataagctgctgatgcgtacgctagcgttgttcaccagcgcaaaaacgctgggttcgttaattcaggtaccacagaaagatgaagcggcattaaaagcgtttatggatggactgtatcgcctggcgggtgaaggtgatattcagcagagagaggcagcagcagagctgatcccgttgatccagcaggcgtggattttggcgcagcgctatgatgcggtggtagcgaacccgccgtatatgggtgggaaaggaatgaatggcgagctgaaagagtttgctaaaaaacaattcccggacagcaagtcggatctgtttgcgatattcatgcagcatgcattttctttactcaaagagaatggtttcaatgcgcaagtgaatatgcagtcatggatgttcctgtcgagctatgaagcgcttcgcggttggctgctggataataaaacttttatcactatggcacatttaggggcgcgggcgtttgggcaaatttctggagaagtggtccagactactgcatgggtgatgagtaataaccattttgaacgctaccagccggtatttttccgtttgattgaaggaaatgaggaactgaagaagacggttttgctcgagcgggaaaatcgatttgataatactctacaagaagactttaaaaaaataccaagcgcacctgttgcgtattggctaacaccatcaataataggtgttttttttagaggggaagctttgaggaatatatcgattcctcggcagggaaatacaacaacaaacaatgaaaaatttgttcgctcttggtttgaagttgattttgataaaattgggcttggatactcatcagcaaaagatttttcagaacataagaagaaatggtgtccatacaataaaggtggtggttcgttaaaatggtatgggttgaatgaaagcattgttaactgggaaaacggtggtgagcaaataaaagccataccacactcagtggtagcaaacgaaagtaactatttcaagcctggaataacattttctacggtctcaagttctggttatggatttcgtctatttgataatgggtttatttttgataacaaaggagcttcaattttcatcgatggagaaaagcgactttacctattagctatacttaattcgaaaatatttgaattaaccgttcattctattaccccaacaatttcactgcagccgggcgacgttgctaagttacctgtaattgagggtgatagcactcaaatggaaaaagttatatctctcagtaaagaagccgttatgaaatccaaacagagctgggatgataaagaattatcttgggattttaaaagaccaaatttcatatctaatgctgtattggatgaagtgctatctaactctataaataaacatattatctcatgtcaaaatcatgcggattgtatttccgatattgagaatgaaataaacattgagttaattaatatttatgacattaaagagggtgttatatctaatgttgttagtggttctgattatgttaatttaaccgcaatgactggggagctgatttcttacatcatcggctgccaaatgggccgctactctctcgatcgcgaaggcttggtctacgcccacgaaggcaacaaaggctttgccgagttagttgccgaaggtgcttaccaaaccttccctgccgacgaagacggcatcctgccattaatggattccgattggttcgacgacgacgttaccgctcgtgtgaaagaattcgttcgcacggtttggggcgaagagcatctgcaggaaaacctcgactttatcgccgaaagtctctgtttgtacgctatcaagccgaaaaaagccgaatcttcgctggatactattcgtcgctatctttccacacagttctggaaagatcatataaaaatgtacaagaaacgcccaatttactggctgttcagctccggtaaagagaaagcgtttgagtgcctggtgtatctgcatcgttataatgaaggcacgctgtcgcgtatgcgtaccgaatatgtggttccgctgctggcacgctaccagggcaatatcgacttggttaacgatcagcttaagagtgctgaatcgggggccgccactacgcgcctgaaaaaagaacttgatggactgactaaaaaattcaatgagctgcgtagcttcgatgatcgcttgcgtcactatgctgatagacgtatcactattgatctggatgacggcgttaaggttaactacggcaaatttggcgatctgctggcagatgtgaaggcaatcaccggcagtgctccacaggaggcataa

SEQ ID NO: 431185 - DNA, 1122 bp, Serratia marcescens
atggatcaacatcccctgattattaaaggctacaagagcatcgcggggctttcccttgtggaaagcccaccgttcattacttttgccggggccaacggcgcgggaaaaagtaacattactgatgctctggctttttttggtgccgtggtcaaaaccggcgcgactcaggctattcgcgattttggtggtttccagcagatccattgctacaagctgcgtagtgaaaaccggacgacggcgtcactgcatcttgatattgagctggcaggaaaacagtttacctatgatctgacgatcaaaagtatgaataagaaacccgtcattactgagaggttggcgatcaatggggagatctatattgatcgcagacaaccagatgccctcaccatccgtttaagtgacgatcccgaaatcccccctgcgcattttcctaactattcgtcagatatgacggcgctcatgctgctgggtaaaagcgagctgtatgcatttttaaccaatattgtcgtgttccgcattgatccactccgggcgaaagaaccagacagcgccaaaacggacgcaacgtttctggatccccatggtaaaaatattgcctctgtgcttgctgagctggagtccaacagcgacttcaaacagcaaatactagactggatggaactgattgttccgggtatggaaaatgtgtccacagaaaagcaaaaactggatggctcgacggtgttaacgttcaaggagcagggaacccgtgctcgctttcctgcccacctgatctctgacggcaccatctataccctgtgtattatgaccgccattctgagtcgggctcagcagaccggtatcaccataatcgaagagccagagcggggcattcatccaaaagctatcggcgagctggtgcagttgatgcgcgagaatgcaacattgaatcatcccattatgatcacgacccacagtgaatccgttatcagaaacctggaaccagaagagctgtggtttgtaagtaaacaagaagggaaaactcagctgaaacacgcttcggatgcgggagtcgataaaaaaaccattcccttagacaccgcctggttaacgaatttatttgatggtggcctgccatggtaa

SEQ ID NO: 431186 - DNA, 570 bp, Serratia marcescens
atggtaaaaattggatttatcgtcgagggcagtactgagtccatcatcgtcaattcgcctgcgtttatcgctttcttgcaaaataatggcttcgaactcgtgacgccggtcgtcgatgccaaaggtgggggaaatctcttacccaaatatgttgaaaactttgttggaacattaaggcaggccggagctgaaaagatctgtatcctgaccgatttggaagatgaagcatcaacggatgtggtgagagcgcgcatcgcccatgaggatgtggatatctcctttattgcgattaaagcgattgaagcctggttcctcgcagatagtgaggcgatgaaagcctggcttaacgaggctgcattccatgaagagcatcctgagatgaccatttcgaaaccctgggaaagacttagggaaattgcgcaacagctcaacaaacctggaaccggtcagagtaaaacgatttttgccaataagatggtttcgcgttttggatttgatgtgagcaaagcagctgcccaccctaactgcgcaagcgctcgtgaactggtcgactggtttgagaatcaataa

SEQ ID NO: 431187 - DNA, 2598 bp, Serratia marcescens
atgcaatttaaagaactggaatctgggcttcgtcagaagtttaccgacaatcgtattgtcttctggcacgacccggaacaacgcttcatcgattcacttgatgagctggatctcgacaacgtctcgctgctggatatgcgcggcgtttctgtgctcgcaacaaaaaaacgacttgaaatcgacgagcctgagcagaaatttttactctatttcaccagtgaggttcccgctcgcgaacaggactggctgctagacatccgcctttatagcaccgaattccacgctgattatgcggcgatcactctgaattcgctgggtatcccgcagcttggtttacgtgagcatgtccagcttcgcaaagccttctttaccgtcaaacgcactcagattctaaaagggtgggtcaccgaacgggaaacagaaagttcacttgataagaaaatgctggcggtggtggtcggggccagtacctttgaaaccaaagaaattttgtttgctctgattcagcagtttgtcgcggcacggcagcaggatgatagcgcgcttgagaacaccttcgccgtactgaagaaacttggcctggatgaagtactctgggagattcttcgtgttgagctagggtaccagtttgaatcaccttccctagataacctgcttctgaaactgttctgtaccgatctctgggcgcaaggtgatgaagcgcatcgtgactggttgagcaaaaatgtactggttaccgctgctggccgagcatcttcactggcctttatgggggcgtggcgtaacgatcgtcgctataaagcagaatacgattattgtgcagaggatttgcagcagacactgcagccaaaagagcactacaactacagctcaccgtacgtcctggcaaaatgtgaaaccttcgaggccattgaacaacttattatccgtggtctggtgacccagttgcaggaagagagcactactctggacagagattcgtttaaagcactggtttctgagcgtagagcgaaatactggagccagactcgtccggaatatctttctatctggaatgctatccgtcaggcagagcgcttgctgaatttgcgtaaccgctacaccgatgggtttaatttccccgatactggtgcgttctggaaggcttactgcggcgaaatttatcgcttcgatcagacctatcgtttgttcaatgaatatgccgcaccggtgcacagcaaaggggcgatgatcctgcatgaactggataaattcatcgaagagttgtacagcaactggtatctggccgagctgagtcgtggctggaacaaactgctggaagcggaaaaacgtatgcaggcatggcaatttagtggcataccgctgcagcgcaatttctataaagataatgttaaacgtcaatttgacacctcgcaggtcaaacgcgtttttgtcgtgatctcggatgcattgcgctacgaagtggcggaagagctgggcaggcatatcaatcatgagaagcacttcagtgcagagctgcgctcccagaccggagtgctcccaagctatacccaactgggcatggccgcactgttgcctcatgagtcgttgagctaccttcctgataattctggcgtagtttacgccgatgggatgtccacttccgggtttgaaaaacgagccgctattctggcgaaggtgaatggtgtagcgctgaaagcaaaggacttgcagaacgccaataaccaggaagtgaacgagcaaatccgcaacgcttccgtagtttatatctggcacgacactatagatgccatgggtgataaggctgcaacggaagataaaacattcgaggcctgccgaagtgcaatcactgagctaaaagatctggtttcacgcctgcgtagccgatttaatgccagccgaatttttgttaccgccgatcatgggttcttgttccaacaacaagcgctggtggagcaggataaaacgaaactggaaagtaaagccaaagacactattgaagcgaataagcgctttattgtgggtcatcagctgcctgaaagtgaattttgctggcacggtaaactggcagatactgctggctcaagcgatgagagtgaattcctgttacccaaagggatacagcgtttccacttcgtagggggagctcgtttcgttcatggcggagccatgctgcaggaggtgtgtgttcctgtgttgaagattcgcgcgcttgaaaagaaagcggctgagaagcaactccagcgacagcccgtgtccgttgttgcgcgagatcaggtgatcaagctggttaacagcattgataaagtcggttttattcagacttcggcagtgaatgagctaaatgagccgcgcacgctgaatatctttatcgtggatgaaaacaaccaggttgtctccggcactgaaacggtttgctttgacagtgatagtgacgatatgggtaaacgcacccgcgatgtaaccatgaaactcatggggacggcattcaaccgtaaaaacaaatatgttctgatcctggagaatgcggacagcgcaacagagtatggtcgctacccgataacgatcgacttggcattccaggatgacttcttttaa

SEQ ID NO: 431188 - DNA, 2076 bp, Serratia marcescens
atgcaacagcaggataactcagccagtaacatggaagcagcctttgcgttggctcaggacctggattcattgctgaatcagcactttcgcggtcgcgtggtgcgtaaggacttgacgaagcaacttaaagaaggggcgaatgttccggtttacgtactggaatatcttctcgggatgtactgtgcctccgatgacgatgaggttgtcgagcaggggctacagtcggttaagcgtatcctttctgataactacgtccgcccggatgaagctgaaaaagtgaaatcactaattcgcgagcgtggttcttacaagattatcgataaggtcacggtaaagctaaatcagaagaaagacgtttacgaagcccagctctctaacctcggcattaaagatgccctggtgccgtctcagatggtgaaagacaacgagaagctgttgacgggtggcatctggtgcatgattaccgtgaactacttttatgaagaagggcaaaaaacgtctcctttctcgctgttcacactgaagccgatccagatgccaaatatggatatggacgaggtatttgaggcccgcaagcagtttgatcgtgaccagtggattgacgtgctgttacgttctgtcgggatggagcctgcgaatattgaacagcgtaccaagtggcatctgattactcgcatgattccctttgtggaaaacaactataacgtctgtgagcttggaccacgtggtaccggtaagagccatgtttataaagaatgctctcctaactccctgctggtatctggcgggcaaaccacggtagcgaacttgttttacaacatggccagccggcagattggtctggtgggaatgtgggatgttgtcgcgttcgacgaagtggcagggatcactttcaaagacaaagatggcgtgcagatcatgaaggactacatggcgtcaggttcgttctctcgtggtcgtgactccatcgaaggtaaagcctccatggtgtttgtcggcaacattaaccagagtgtggacacgctggtcaaaaccagtcatctgcttgcaccgtttccagatgcgatgattgatacagccttttttgaccgtttccatgcctacattcctggttgggaaattccaaagatgcgtccggagtttttcaccaatcgctatggtttgattacggattacctcgctgaatacatgcgagaaatgcgtaaacgtagcttctccgatgcaattgataaattcttcaagctgggaaataacctcaatcagcgtgacgtgattgccgtacgccgcacggtatccggcttgttgaagctaatgcacccagacggcgcttacgacaaagaagatgtacgggtttgcctgatctatgcactggaggtccgccgtcgcgttaaagagcagcttaagaaactcggtggcctggagttctttgatgtgaacttcagttatatcgataacgagagcctggaagagttcttcgtgagcgtaccggagcagggcggcagtgaattgattcccgtcggtatgccgaaacctggcgtagtgcatctggtcacgcaggctgattcaggcatgacgggcctctatcgtttcgaaacgcagatgactgcgggcaacggcaaacatgcggtgtcaggtttgggatcaaacacagcagcgaaagaagcgatccgcgtggggtttgactatttcaaaggtaacctgagccgtatcagtgctgcggctaaattctctgaacatgaataccatcttcatgtggtggagctgcacagcacgggcccgagtacgaccaccagcctggccgcgttaatcgcgttctgttcggtattgctggcaaaaccggttcaggaacaaatggtcgtattgggtggtatgacgttgggaggcgtgacaaatcccgttcaggatttagctgcatgcctgcaagtagcattcgatagcggtgctaaaaaggtattgctccctatggcctctgctatggatattccgaccgtaccgactgagttgttcaccaagtttcaggttagcttttattccgatccggtagatgctgtatataaggcattgggtgtcaactaa

SEQ ID NO: 431189 - DNA, 696 bp, Serratia marcescens
atgaaactaattgcaaatggattgaacaaacagttttttagttcttttttacctcctccggattgcgaaattgacggtgtcgttgcagccatagcctatggtgatgataaaactgctctacttgaccattgtctaaaaaatcatcatcgccttgatatctggatgcgatatgatcacaccgtccctgtatccccctcactcatggcgaaatttcttgctaatacaaaaaataatatcttctgcaaacttgttccggatcgtcttcacagtaaagtcatctggtggaagggttatggcgcatatattggatcggctaacttaaccgatcgtgcatggcatacaaacatagaagcaggtatcttcttcactgagagtgatttatatagttctaatctaattgagcagcttgaggaattcttcgatagcttagcgtctcttgactgttgtgttgatcttagtgacgatatcattaatgaacaaagactattgttaaaatcaaaactcgagttagagaaaaaagagcaagagcttatcaaaaagagaaaatttcctgaatggggcggcgtaaactttattgataacaaaaaaaacaaagataaaagaaaagagaattttcataaagaatgggaaagcacactttcaatcattcataatatctcaagccagataaatgattacaggcctatatgggtataa

SEQ ID NO: 431190 - DNA, 642 bp, Serratia marcescens
atgttctggcaaaccgatcagtttttacatgcttattattataagcaagttcatcagcaagataatacttatccttttgaggattttaatcgtactagcagtaaaaacccacaagcagcattgatgagtatgctctcctggtggaaaagcctatcagttccgccgtctaatgaggatattcatcttgggatttacgctccctatattcgcgaaaacttgtcaaaaaataatattggctcattgactgaggataagctccatcaaatattctcttatacacatgcaacaatggaccatgtgataaaaatgagtgctgaaacatttggccaacctgccacaaagtccttaaacaaggaagaacgtgccgttttatttacaaaatggatcatgggccaaacaaatcaaaaaggcataactattgctgaattactcaattatgtgctctacggtggaacgccttcttttatgtgggaaaggatctatcaggcagggaaagatgagcaatataaattccagcattacggtattaactccattgctgaagttgttggctgggccagacctgatgatacgcctcccagaaatggcagaacaaataaagcattgtgggcattgggttatccggtcctagttaacatttaa

SEQ ID NO: 431191 - DNA, 2271 bp, Serratia marcescens
atggataacaatattctatttattacatcgattgaaaaatttaatgacttcgaagaagtagttagacgtttcttacaacggatttttaatgcggatgcttatataacaaatggcccctatgatggaggtaaagatgttgtttactccataagggggcgtgaaaaaaaagaagttatacaagtatccattactaaaaaaaacttagaggctaaactagaagaggatttgagtaaaactgatagattaattcaagagcataattatcctccagtattgcattttttctggagtcaaacaatttccgaaagcaaacttgatactttaaaaagcaatgcaaggatgaattatggtattacacttgagttttatgatgcaaataggatttcccaaaaaattaccaatgattacccggagatattgacattccttcttgaggatatacataaatatcgttcttcaaaaaaggatgatttagatataaaagaaatggcattttatgaatatttattattgagtaaggatgctgccaacttaaaaaatgtcattattgattcatatatagtttcattgcttacagttcaaggtaaatctgagtctgatttacgaaatgaaacacaagttcttgggttgcatcatgaaactctaaaaaacagactgtatatcttaaaacgtgaaaatcgcattgttattgagaatgatatatacatactctcagacgtggaaagtaatagaattaaaaatcttgagttaaaagagatagccaaaagaaatgaggttttaacaattattggcaatgcaacttcagaatatttcagtgaggatatttcttcagaggtactggttctgatcaaagaagcatatgcagagtcagtaaacctacaactcaatgaattaaattttgaatctccgaagaataaaatcgtaaaagaaataataaaaaagcttgaaagactgataattgaaaaagggaaaataacaagttcactttcttcaaaattagctaacgaacttgtcgagctatctggacagaatgaatatctttctgattattgttcatctcgactatgcataactcttctaaatcagaaaaaattagagagatatatagataataaaacattttatatatatcttgatgcaccagtgttgattccttatctaatagcattaaggtacgagaatttttctgatggagaaaaatctataaatatcgtaaaaacattaaagaaaataatatttaacataaggaatagatatttaagggtaactcaggagcatcttgaagaaacagcaagacatttagagaatgcaatgaaaatcagttcatttgctaatgatgagttagttagtaaaatagggaactctaaaaatgtattttttaatacatatttgaagttaaaaaaaaaccagccgaaaaattacagttttgaaaaattcttagatgactttattggttacgaggattcatctggccccatacatatgaagttctataagctgagtcggtcagtttctcaatatctgaacctgaatagaattgatgttatttccactacggcctaccaagatgataaaataattgatgacgttgctaggaaattttctcgacaactttctggtgctaaaaaaagaagccagagaacaattaataatgatatctatgcagcattaaccttatcagatgatagtatacattgtgatgataaaggagttgggcaaacgcctatgctaataacatgggatgcaacgcaacacacgctaagaaatattgttaggcaaaaagacaattacaaggaatggcttgtttacacccctcaaagagcaatcgaaaggctttcaatgttagaaatgaaaattgaaagctctgcaattaaagatggtgttctagctataatagatgaggattacttcttcaaggataatgactccaatctcatagatactcttgcattattagtgaaggatgatgaaccagatgctggcgcattaacaacgttgataaacaaactgtcgcaaagagtaacagaggagtcgttagattcgcatgacattgaaaaggaaacattcaacactctaaatgaggttctgacttttacgtactcagaatttaaagataaccttggtcaaataaaaactgtttttagcgatgttaagtataccgattctatatttgaaatattaacatcaacgctaaaaggacctttcgatgagtcctctagaaccgagtataaagctaaaattgataaaataattatagctcactttggataa

SEQ ID NO: 431192 - DNA, 2793 bp, Serratia marcescens; identical to SEQ ID NO: 425272

SEQ ID NO: 431193 - DNA, 129 bp, Serratia marcescens
atgcagcgcctcgaccaggtgttgcgtgagctgcaaccggtgttgcgcaccctgaatgagaagagcaacgcgctggtgtttgaagccgccggcagcaatgaccctcagccgaagaaggccacgaaatga

SEQ ID NO: 431194 - DNA, 192 bp, Serratia marcescens
atggctacgaccctcaccccgactcaccctacattctgctttttgtttgcggccgtacgccgttctgcgctgaccgcttcaccgcgtatcgtgcgcaccgtggcggattctgagcacaacgctcgccgcctgctggcccgtgattacgtgttgtcctttgccggtcgtctgccggttaaggtggtggcatga

SEQ ID NO: 431195 - DNA, 633 bp, Serratia marcescens
atgttaattcctagcgaattggacgaagatgtttttccagaatgcagctggacttacatcggatataaagaccatttaaaaccaaataaatacttgcaagatgccattgatgatttaaatgcaggtaaagagagaagaaatctaaataatgcgattagaaatgcaaaggccgctttacatatgagggtcgacatcctttgtatatcatttagcgggaatgtttattttaaaaaattaaagacatttccaagaaaaatggactttttggaaagcattgggattgtcagaccacgaataatagataaaattaacaaactaagaaatgaattagagcacgaatatagagacgcaactctcgaagaggctgaagattttatagatatagtattactattcattgaagcaactaaataccttaacacacgattccctagtgatagtaacttttatggcgtagtatcctcaaatggagattatttaagagggatcgtatgcaaatgggatattggagagctgatattatatttttcaaaagatgattttggacatgattatagcaacaaacacacattaaaggtaggtgatgaacaatactcacaatgggtgaaatatttaattgaaaactgtgactaa

SEQ ID NO: 431196 - DNA, 1026 bp, Serratia marcescens
gtgaagataatatctttgttcaaccataaaggtggcgttagtaagacgacaactacttttaatatggggtggatgctagctcaactagggcataaggttttaatcgttgatgcagatccacaatgtaatttaacggctttgactttaggttattcgaccacagatgactttgatgtaatatataaagacaatccaaattgtgatatttacacttgtattaagccagttgttgatggttctttgggtaaggttattcccgctgatccaatcgttacagagaattcgaatctaagcttgttatgtggtagtatttctttatcagaaatagaaactcagattggtgtggctctgacaactagtgcagccattccagccattaggaatattcctggaagtataggtgctttcctgcgtgaaacaggagggaaacacgactttgattatattcttattgatatgagtcccagcgttggtgcattgaatgaatgtctgttgatgtgtagtgactattttatagttccgacttcaccagattttttctgtgctcaggctattaaatctttggcgaaaattctccctaggtggaatggggaaataaatagttttagagatactggtatcttgtatcctttccctgctgaaccaccaaaattcattggatttatttctcaaaaatatcgaccaagaaacaatcagccggtaaagtcttttcagcgatggatcgatgttattaaagatgaggttacaaacacattaataccatctttgactcctgttaatatgtctataactgcggcggattttctcaatggaagttcgtcaaaagagccttttaatttggcaaatatttctgatttcaactcacttatcgctcaatcacagaagcatagcacacctgtttttgctttatcagatgggcaaatagaacaaaatggagtgattcttgaaacaatgaaagaaaataggaaagagtttatgaataacttcatggcattagcaaattctgttgtcagcctggcgaagtag

SEQ ID NO: 431197 - DNA, 948 bp, Serratia marcescens
atgcccgcgctgcaaaaccacgctcacgacccgctgggacgagccgcgcaagcggccgatcggttacgcgctcagcgccttgttcatgctggtgctggccaacattttcccgtttatcaacatgcgcgttgccggcctcggcaacgaaatccggatgatccaaatcccggaagtcatggtggcggaagactacgccagcatggccacgctgtttatggtgttcgtgcagctgatcccggcgttctgcatggtggcgatcgttctgctgtgcgccaaagtgcgcttgccgctggggctcaaagcgtggatggcccgggtgctattccagttcaagacctggtgcatggtggagattttcctcgccggtgtgctggtcagcttcgtcaagctgatggcctacggcgacatcggcatcggcagcagcttcgtgccctattgcctgttctgcctgctgcaggtgcgcgctttccagtgcgtggacaggcgttggctgtggcaggacatcgaaccggcgccgcgcctcgaccgcccgctgacggcggggcgtaccggcatgcgccagggcgtgcgctcttgcgcgtgctgcacggcgatcctgccggccaaccaggtgcgctgcccacgttgccacacccccggctatgtgcgccgccgccacagcctgcagtggacgctggcgctgctggtgacctctgtcatgctgtatataccggccaacttaatgccgatcatggtgaccgaggcgctgggcaacaagatgaactccaccatcatggcgggggtgatcctgctgtggggaagtggctcttacccggtggcgatggtgattttcatcgccagcatcatggtgccgtcgctgaaaatgctggcgatcggttggctgtgctgggacgccaacggcaggaagaaaccgcgtgccgacagcgagcgcatgcatctgatttatga

SEQ ID NO: 431198 - DNA, 903 bp, Serratia marcescens; identical to SEQ ID NO: 425884

SEQ ID NO: 431199 - DNA, 510 bp, Serratia marcescens
gtgaatcagggttacaaccatgttcacgttgtcgcctggcattaccatctctacgccttctggcagttcgatggtaccggtcacgtcagtggtacggaagtagaactgtggacggtagcctttgaagaatggagtgtgacgaccaccttcatctttgctcaggatgtacacttcagattcgaactgggtgtgtggcttgatagagcctggcttcgccagtacctgaccacgttcgatttcttcacgtttgataccacgcagcagaacacctacgttctcaccagcacggccttcgtccagcagtttgcggaacatttcaacgccagtacaggtagacttaacggtgtctttgataccaacgatttcaacttcttcgccaactttgatgataccgcgctcaacacgaccggtaacaacggtaccacgaccggagatggagaatacgtcttcgattggcagcaggaacggcttgtcgatagcacgctctggctctgggatgtagctgtctag

SEQ ID NO: 431200 - DNA, 123 bp, Serratia marcescens
atgctgcggttcagctccagcagggttttctgcatgtcctgcggcagcgcctgcatctctttgctggcgatgatgtcgttcagcgacttcatggtctgctgcgtcgatttcatggttttctga

SEQ ID NO: 431201 - DNA, 255 bp, Serratia marcescens
gtgtacgacctggcggataacctgctgggcgagcgcagcccgcagagcgacatcgacgcgcacctgccgctggcgccgatcgccgacaaccggctgacgcactggcaaaaactgttttaccgttacgacgcctggggcaacctgatcagccggcgcaacggcctgtacgaacagcactaccgctacgacgccgacaatcggctggtgcgggcgacagccgctcggcggatatctactggtatcacaccgatctga

SEQ ID NO: 431202 - DNA, 228 bp, Serratia marcescens
atgaatgagatgagagtgctgtttttaaatggattgaattgtcttcttgatggtaattatagctcagctaaagtggcggactacgcctatagattttatctggactatgacattcctgacgaagaactttcatatgtagtagattatttaaaaggaattgatgctggcccagaatttgaaatgagcaaagatgaagtaatatctttcatcaagctaaatctgaaatga

SEQ ID NO: 431203 - DNA, 300 bp, Serratia marcescens
atgaatctcgtaaaggttgattggattcctgagcatatgggcgggagaaaagcggtccctccagcaggaaagtattatgcagtatctcgatttcctgaggacaaggagtggcaaaataatgcctggagcgttgtttttgagctagaggaatccaagtctgaaaatggcaagacgttttcgttgggaactgtagattttcttatggaatcagcacctaaagaacacatggttcagcatgttaaattcgaaatttacgaagggcctaagaaagtagcggatgtgtttcttattaatacctga

SEQ ID NO: 431204 - DNA, 381 bp, Serratia marcescens
atgcagagccagacggtggccggtgcggaaaaaaggcaggggctactgtatcagcagcccctgcgctataccgggcaatatcaggacgataacgcagaacctgagatgggacgttttaccacgcaggatccgatagggctgcgcggtggactgaacctttatcaatatgcgtcgaacccgctgatgtgggtggatccgttgaggttgagtgcgtgtggctctgaaaaaaataaaaaaaccacatatattggcatcagtagaagagatgcctttagacaagctaagcgtgatgcaaaaatcggtaataaccaacatccaaaaatagatcgagttgacttattggatgttaaatgtaataagatacttgatgctaatggctaa

SEQ ID NO: 431205 - DNA, 129 bp, Serratia marcescens
atgaatgcggatatgtttatttttcggctgaacaaggacttggaaggaattgtaaaaatagataaatacggttttttggcggttatttacggccatcccatgcggaatgaccgttattctaacgcttaa

SEQ ID NO: 431206 - DNA, 183 bp, Serratia marcescens
atggttctgtttgctggtacgccgctgcggcgttcggtcggttggtcacgctggcatctgtatctgctgcggcacagaacgagaaaggagctgttactgttgaacgacaggcagctggcggacatcggcctgacgcaggtggaagcccggcgtgaaggctataaaccgttctggaaagaataa

SEQ ID NO: 431207 - DNA, 822 bp, Serratia marcescens
atgagcgatacaataatcttaaattgtcgcgttatttataataaaaacacagccacattgatggatgtagaacaaaagaaagacgtgataaccttaaccacaccggcgaataactgtttacagattttgttagataacggaatggagatcaccacccagaaagagctgtttgaagaggtgtgggagaaacacggtattccgatcaataccaacaccctttatcaaaatatcgcaatgatccgcaaggccttccgccagctgggcgtggaggaagaaatcatcgtgacgatcccccggcgtggcatggtgatcgccgacggcgtgcagatcgccgactttattgccgacccggcatcgccagaggaagatgcgggcgaagccgaagtgccggataatgcgattcatacagcgcaacgacaggcggaagcagaagaaacgagcgctgtaaccccgggtaagataaaaagaagagcgatgcttaccctgttatatgttgtcgtaatgacgctgacgggcttcgccgcttcgtttgcttatcacgtctatcagaatacgcaaagccgcttttacagctaccgccatctgggggatgctcagcaatgccagatctataccgacagccggggcgagaatcagtctttgccggcggtggcggaacggctcgccaaatcgggtttacgctgtgacaacagggaacgggtctatgtttcgtcctttagcgggacgccgcgtgagtcctttattctttgcgatggtgatattttggttgccacgtcccagtgccgttcgcaatatcgatctttctcggagggaatgcgatga

SEQ ID NO: 431208 - DNA, 489 bp, Serratia marcescens
atgaaggtaaaggtagtgtttgcggtgtcgatggcgctaacggcgctggcggctgttttttacacggcgtattcacgggaaaacgatctgagcaaaggcgtaaactgttttacgcaggtgcaatatgattatgaatttgacgacggcaaagcaatgatgaacactggcattcttttcgcattatcgaacggtcacggtgtggtctcttacggcggcaggttttatcatcagggcaatacctatactgtgaagcgctatgccgaagtaaattacaccgtaagaaatgagcatgcatttttattgaaaacgcaatcgttgaagattgcaccagtcgataatttgccagagtccctggcgaagaagtatttatacggttatctgcgggatgataacggctgggtcaacctgggtatacaggccaatgcggataacggttatattatttccaccactcctgttcctcagctgttgtgcaaacaggttagataa

SEQ ID NO: 431209 - DNA, 534 bp, Serratia marcescens
atgaaaatgaataaaattttattggcgatggtaatggcctccggtatttcagcatttgcagcgaatgcggccgacacggatcagggcagcggtagtgtgaccttcgttggttctattatcgatgcaccatgctctattgcgccggaaagctccaaccagacggttaacctgggccaggtatcgaacgtgttgctggctaatgccggatcttccacaccgcgcaacttcaccatcgatctggagaagtgcgataccgcaaccaaaaagaacgtcagcatcaccttcggcggttctaaagacgccgtgaacgataagctgctggggatcaccggtacggccaaaggcgccggtgtggttctgaccgacggcagtggctctcggttggaactgggtactccttccgcatcgcgcggcctgctgtctggcgagaacaaactggtcttctccgcctatctgcagggcaactcggcgaccggcgatgttaccccaggcgaattcaccagcgtagccaactttactctggcttacgaataa

SEQ ID NO: 431210 - DNA, 477 bp, Serratia marcescens
atgataaccgtgttttactttaattctttggcatgggcggcgggcacggtaagtatcaggggcgcggtactggaatcggcctgtgcgatcgcgcccgataacgttttccaaacggtggatttgggtacggtgccgttaaaaaatattgaacgcaacggcgccagcaaaccgcatccgtttgaattgcgcctgattaattgtgtgctgacggacagcaagggaaaagaatacaaatccatggaggtcacctttaccggttttggtcaagagggtgatgagatggatagaaatggtattcgcttaatggtgctggatgaatatggccaggtgattacacccggtgtgccactatcggaactcccgattcacgcggggaatatgatattacgctacagcgttttttttgccggcaatggcaagcgagtgcgagcagggaactatcaggcaacgatgaatatattattccaatacctctga

SEQ ID NO: 431211 - DNA, 2481 bp, Serratia marcescens
atgaatggaatcaataagattactttggcggtatttattgcgctatgggcatattgtaaaccgacgctggcgattgaattcaacctggatgttttagacgccgaagatcgcagcaacgtcgacctgtcgcgcttttcgcacgccggctatgtgatgccgggcaactacatcatggcggtctacctcaacgagcaaaatattgccgatcgcgaacagacgatcccattttatagcgacgaaaacagcacccaagccagcaaaatttgttttcccgccaacctggtcgacaggctgggattgacggaagaggcgctcggtaaaatcgcttattggcacggcgggcagtgcgccgatttttctgcgctcaaaggcatgacgctaaaaggggatatcggcaacggcactttgcacattaacgcaccgcaggcatttctcgaatacagcgatccgaactggttgccgccatcacgttgggataatggtatcgcaggcttgctgctcgactacaacctgaatgccgatatcagcaaaccttatcagggagagacaacaaagaacgccagcctgagcggcaccacgggagtgaatatgggagcctggcgtttacgcggcgactatcagggcagctatgcgtttgcctcggcggcgcgcagtgcacagcgcaccttcgactggagccgctggtatgcctatcgcgcgatcccgcgtctgggcgcctcgctgatgctgggggaaaactatctttactctgacttgttcgattcattccgttttactggcatgagcctggcgagcgatgaacgaatgttaccccccaagctacgtggttatgccccggaagtccgcgggattgccaaaaccaacgccacggtgacggtttcgcagcagggacgggtgatttacgagaccaccgtggcatccgggccgttccgcatccgcgatttgaacagcgcggttagcggcaggctggaagtgcgggtgaaagaacaggatggcagcgagcagactttcactgtcgataccgccaacgtgccttatctgacgcgccccggcacgctgcgctataaaaccgccatcggccgcccgtctacctaccgccaccggttggaagggccgctgttcggtaccggcgaattctcctgggggattgccaacagctggtcgctgtacggcggcagcgtggcggcggatgactatcaggctttctccgtggggctcgggcgcgatctgttcatgtttggcgcgctgtcggccgacgtgacgcagtcgctcgctcaggtacctagcgaaggcaagaaacgagggaaatcctatcgtctcagctattcgaaacgcttcgacgagattgacagcgaggtgacctttgccgggtatcgcttctcggaacgagactatatgtcgatggggcagtatctggatgcgcgctacggcaccgggacgctggggcggaataaggcgatgtacaccattacggcaaacaagagcttcagcgccgcgcaattgagcgcttatgtgacctatacccaccaaagctattgggatcgccaggcggaagagggctatagcctgtcgctcagccggtactttgattttatgcagcaaaaaaacctgtcgctcaacctgtccgccagccgtagccggtatcgccaacgccagaacgacgcgttttacctcagcctgacggtgccgctgggcaacggcaagagcctgggctacagcgggcaaagatcgaacgaccgttttaaccaggcgttgagttacaccgacaacgtcgatgtcaacaacaactaccggatcgccgccggtgccagcagccaacgcggacacaacgcacaggcgcagttcaacgggtattacacccaccggggtgaggcggcggagatgagcatgaacgcggcctatgcccagaacagctatacctcggcgggattgtcgctgcagggcggcgtcacggcaacggcaaaaggggcggcgctgcacccggcatcgattaacggcggcactcgcctgatgctgagtaccgagggcattgccggtgtgccaatcgatggcggcattgcgcgcagcaaccgtttcggtatcgcggtcttgagcaatgtcaacagctattaccgcaccgataccagcgtggacatcaatcagctggccgatgacgtagaggtgagccaaggggtggttgagtcgacgttgacggaaggggcgatcggttttcggcgattttctctgttgcagggggagaaggcgctggcggtgatcgcgttacccaacggcaagcatccgccgttcggcgccagcgtgatgaaccctgacgggcgagaactggcgatcgtcagcgacgggggcctggcctatctggcgggcgtcaccgctggggaggcgttaagcgtgagctggaatggcgccaagcagtgtcggatgacgctgccggaaaaaatagaaacggtggggaatcttttgctgccttgccaatggatcaagtaa

SEQ ID NO: 431212 - DNA, 717 bp, Serratia marcescens
atgaataaattgaatttaatgatgctgatgacgttgagcatcaccgcgttcgacagcgcttatgcggccatcgccctggatcgcacccgggtgatttatgaaggcgggaacaaggcgattagcgtcaatatcagtaatgagaacaaacagctgccttatctggcgcaggcgtggattgaggacagtgatcagcgcaaggtgaccgggccgttgatcgttacaccgccggtgcagcgtgtggagccgggcgctaaaagcatggtgaggatctccgccatgccggcagccagcgcattgccggaggatcgcgagacgctgttttattttaacctgcgcgagatcccgccgcgcagcgataaaccgaacgtgatgcagattgcattgcagaccaaagtgaagctgttttaccgcccggcggcgatcgtggttaagcccggcaccgtctggcaggaccaactggtgttgcacaaaatcgccggcggttatcgggttgaaaacccgacgccttactacattaccgtggtcggcatcgccgcacaggccaaagggaatgaaaacaaagattttaaaccgctgctgttggcgccgaagagcagcagcacggtgacggtgccggtcacggacgcgccgcaggtcacctacatcaacgactatggcggccggccgacgctgaagttcagctgtgtgcagcagcgctgcagcgctgcgcaagggtaa

SEQ ID NO: 431213 - DNA, 591 bp, Serratia marcescens
atgcagcgcttgcatactgggttgatcggcgggctgttaatcgccggcctgcaaaacgggtatgccaccagggtggcggatcccgcccaggtcgaaggtatgcatgccaccgtaacggtgcgcggtgcgttggtcgaatcggcctgtacgctggagatggcctcgcaagatcaaaccctccgtctgggggatatcgcccggcgtgacgttgcccgttttggcgcgcaggcgaagccgattgcgttccatctgcagctgcgtgactgcggccattgggacggtgcgccgcgtgatgcgcaacacggcgacaacctcagttggatgccgggtcagcaaagtgtctggatcaccttcagcagcgagcagcagcgcggcggactggtgcgcctcaaaggggaagcgaaagggatcgccctgcggctcgaagatggtcgccgccgccggttgccgctgggagagaaaagccatgctcaggtgctgacgccaggcgacaaccgtttaacgttttatgttgtgccgcagcgtacggcggaaccgctcatccctggggcgttttacgccgtggtgaactttcgcttgagttacgactga

SEQ ID NO: 431214 - DNA, 483 bp, Serratia marcescens
atgttgagcaaaatcgtgttgaccaccgcattgacgctggttgcgttgccaaaatgtgccggaatgggcacggagatgaatttcaaaggctttctgttcgagccggcctgcgaatttaacggcggtaaaaccatcgacattgatttcggtaaggtggggatctttaaggtcgatggcgtcaaatatgcccgcaccaccacggtgggcctcaactgtcgccccagcgaagggaagaaactgatgttgcaaattcagggcgacgtcgtgaacgggacgaacaatgtgctggccaccaatgcgccgaacctgggcatcgcctttcgcgatagccagggcgcgccgctggcgttcaaccgtttttttgatgcgcacagcgacacaacgttcagctttatcagcgtgccggtaaaaaaggatgcggggcagccgctggataccggcgaattcagcgcggtggcgacgctggtatcgagttacttttaa

SEQ ID NO: 431215 - DNA, 519 bp, Serratia marcescens
atgttgtatcgaataacggcggcctgcatggcgttggcgctgagccagagtgcgcaggcgctggatgaaaatatctacctgcacggcacgctggtggaagaaccctgttcgctcagcatggcgtcgtccaggcagacggtaaaactgggcaacgtgatcaagaataccctgtatttgcaccagcgcacacacagctacccgtttgccatcgtgctggaggagtgtgatatcagcctgggcgcaatcgttgagatcggcttcaacggcgaggccgatgaacaacagccggatttgctggcggtgagtggcacggccaagggcatcgccatcgggttggaaaccgctgagggcaagccgttggcgctgaataaaaccatcgagcgctatagcctgaatgacgggcagcgtgtgttggcattcgccgcctacgtcagcgcgcccacctcggtgattgaacagcaggggatcgtggaaggagatttcagcgctagtgcgacgtttaccctcaattacccgtga

SEQ ID NO: 431216 - DNA, 369 bp, Serratia marcescens
atggcgattgaggtggattttggtgatatcgataataccaagattagccgtgacggcagccgctatataaggaccgtgccgctgcggtacagttgcaataccccgatcacgcaaaatatcaatattaacctggtggctgcgccagcttcgttttcatccgacgttatcgcctccagcttgccggacgatatcggcgtgatggtgaaatataatggtgaattggtcaagcctaacgataaatttgacaccacactggtgaacggcatggggcaggatcaactgcaggtagcgccggtcattaacgacccgaccaaatcggtgaccggcggtttcaccgcctcggcgacgttgattatgaccgtgcagtga

SEQ ID NO: 431217 - DNA, 600 bp, Serratia marcescens
atgctgaatatcattatcagagacagcgatgcggcctttggcttcggattacgatcctatctggagcaagaactctcgttgtattattccaaacagcgttttattaacgcttacggcacgttacgtcaggcagatattcttttccaggcggtagtggagggggcggattgcctgctggcgctgcccggaattggcggtaaatttagcggtatcatttttcttattatggagccttccactaagccgccggcgagtgcctgtttaaggcaccttccagttatttaccggcatgactcactcagtgtcgtgtgggacaaagtcttgaggcagctgaaactctggcagcgggtggggggggagggcgtattgtccaatgtctgcgcggcgtgcgggcgatctaaattaaccgagaatgagatcaaggtgctcagcctgctggccaaagagttttcgctgacggaggccgcctgggttctgggtaaaaatataaaaaccgtcttcacgcaaaagaagtcggcgatgaataagctgaatttgaccagcggccgggaattgagttcttttatcatcaagcaccgccgggcacttgaaatactctga

SEQ ID NO: 431218 - DNA, 1023 bp, Serratia marcescens
atgattaaaaaacacacttacttattgcttgttatctccataaatagttatgcgggtgatgtcgtaaatagctgttgggatgaaggtgcaaacaacaacttcaatgtatttcttgacggtgggagttttagcagcaatcaacccgaagcgcaaacccgtttttctctggctggcatgccgagcagctataaagtgagatgttggcttggcccaagagctgatgcatcggcggcagcccggctttacagttacttagcaaaaacagatttaacgacgtcagaaaactcaaatgcttgggggacttatttaaaattaacaaatgacgttgatgtccgtattgacattgataaagttggtaccgtgccagtaaccaacgcctcaggcaccgtatggtttatccccgatagcacaaaacctgacactatcttctacgatagcttaactgccggcttaaaggtcaaggtgtcgatgaaattgcgccgtaaacaaataggaggcgttgttcatattccgggtggtatacagctctttcgtctttacaactcaataaactattacaggcccacaaatgagattagaaacgtgccaataatgaccatctccaccagcgaacaatacattccactacctgtagcatgcaaaattaacaacaatgcgataatcaatattgactttggcgacattgataacaaacgcatcagccgggacggtagtaactatattaaaaccgtaccattaaaatacagctgcaacactgctattaatcaaaacattgcgatacatgtcgtggcatcgccggcaccattttcatcagattttatcacgacctctcttccagactctataggtgtcatgattaaatacaaaggtaatgtcgtgaaacccaacgatcagttcaataccgttctgattaatggtatggggcaagatgaattgcaagtcgcaccggtaattaatgacccgaataagtcagtgacgggagagtttagcgcttcggcaacgttggtcatgaccgttatctaa

SEQ ID NO: 431219 - DNA, 657 bp, Serratia marcescens
atggattggtattccctgacctttttcggcgacagcatgttactgctgccttccggaatcattgtttttgctgtcctgatgtttgtctgtcgggattggaagcagacggcccaatgggcgctgctgttcggtggcgtaggtgccatcgtgtgcgcctccaaattggcctttatgggctggggaatcggtattcgtgaactggatttcaccggttttagcgggcactccgcactttccgccagcatttggccagtaatgatgtggctactgaccggtcgcttctccactgccgttcgcaaaacggccgtgctgagcggttatgcgctggcgttgttgataggctactctcgcctggccatccacgtacactccatttcggaggtcatcagcggcctcgcattgggggttgccgccagcagcgcatttttatggctgcagcgcaatatttcaccgccagccctgtcataccggaaaatcgctgccgcgctactacttcctctgttgttgatcaacaacggcacgatagcaccgacccagggactgttggaatttatcgccgtcagcatcgcgccgatagataaacctttcacacgtgaagatatgcacgccaacgtacccgttgcttataacaccctcaactcacgctccgcccaataa

SEQ ID NO: 431220 - DNA, 894 bp, Serratia marcescens
atgactaagttaaaggctgtcattcctgttgccggtttgggtatgcatatgctgccggcgacgaaggcgattcccaaagagatgttgccgattgtagataagccgctgattcaatatatcgttaatgaatgcgtatccgctgggataaaagacattattttggttacgcattcctccaagaatgcgatagaaaatcactttgacacgtcgttcgaactggaagctatgttagaggcgcgtgtaaagcgccaattactggatgaagtcaaatccataatcccaaaaggggtgaccctgatgcacatccgtcaagggcaacctaaagggttagggcatgcggtgttgtgtgctaagccattgattggtgaagagccttttgtggttgtattgcccgatattctgttggacgaaggcaaagctgcaccccagaaagataatttagcgcatatgattgcgcgttttgagcagaatggttcgagccaggtgctggttcagacggccgatgaaaatgttctctatgactattctgtcgttgagtgtgaggtggatactttgcatccaggcgaaagcgctagaatgacatcaatcgtcgagaaacctagccgtgaacttcagttaaactccaattattctgctgtcggacgttatgtcctttccgccgaaatttggcccattttggaaagaaccgaacctggcgcttggggtcgaattcagctgactgacgccatcgccgagctgttgcaacacaaaactgtggaagcgatggagctggtgggagattcattcaattgcggcgagaaaatgggctaccttcgtgcctttgtggcctatggtttgcgacatccaagccaaggcgaagcctttagggcgtgggctaagcaactgtcgctgtaa

SEQ ID NO: 431221 - DNA, 2163 bp, Serratia marcescens
atgtctgaaaaaaaacacgtaactgaaccgtgcgatagtggccaaattaacagcaatttgcatcatttagttggtgtgctgcttgaacatcataagtttattatcggactggtattcttatttgcgggtatgagtattggttacacatggctagcaacgcccatgtaccgtgcggatgtgttaatacaggttgaaaaaaacgccgctgacagtttagtatcgaacgtttctgaagctttcgcgcaagatcaggaagtaaaggatgctgctgaaatggctttgctattttctcgacgtgtcattggtgaggctgtatcgacgctaaaacttgatattgatgctaaagaaaaggttttacctgtaattggcacactgatctcgaaagttaccggggacaagaaatatattattgtagacgttttggacgttccggagaaccttcaggataaaactcttcgattagacgttatctctcaaaaaaaatataaaattacgactgagcagggtggtgtcataacaggagagtttaataatcctattttggaaggtggtgtttctgtgttaataaataaaggaaactctaccgtcggagacacttttgagttagtaaaaaaatctaaaataacagcaattaactctgttatagctaacctcagtttcgtgagtaataatcgggatagtggtatttttagagtgttctatcaaggaacagatcctgaaaaagtagtatcaacgctgaatgaaattgcgaaaaactatcttaatcaaaatataaaggataaatcagcgcaagctgagaaagggcttgattttttatctatgcagttgcctattaaaaaaaatgatctagtccttgctgaggatgcactaaataaacatagaagaaatagtaactctcttgatatgactttagaggcccaacaattattaaagcgaggagttgcgttagacactcagctaaatgcgcttacgatacaagaggttgatgtatcgcaagcttacacgaaggaatatccatcatacaaagctcttctcgataagaaaaaagctatagaagaagagcgttcaaaaattaactacagtattgccaacttaccagagaaccaacagcaactaattcgactgagtcgcgacgttctggtagggcaggctgtctacgtgttgcttttgcaaaaagaacaagagttacgagttactaaggcgagtattatcggtgatgtaagaatcattgactacgcagagttgaggaatggagttgcaagtctgaatagcaaggtgattatttttgtctctatttatcttggtttcatatttgcgtttatattggtattgttgaaaacaatcttttataaaagagttgaaaaaatcgaagaattggggcagctgggagtgagtgtgctagctacgataccgttttcctcgatacaaggtgaaatcatcaagaaagagagaaaaggcgataataaaatatttctcaaacacactatactggctgactttgaccctagcgatttagcaatcgaagcacttcgtggattacgcacttcactacattttacaatgatagagtctaataataacgtgctaatgatctctggtgtaagtccagggtgtggtaaaacatttattagcgccaatttatcaagtttaatcacgaagtctgggaaacgagtgcttttgcttgatgctgatttgagaaagggttatgttcatgagctattttctttgaaaaacgagttgggattatcctccttccttacgtcatctaaggtagatgttagtaaatacatccagcatgacgagcgcacaggattggatataattcctagaggtaagatagctccaaacccttccgagttgttgatgactgctcgcttcgagcttttagtttcaacattaagcaatatgtatgattttgttattattgacacacctcctattatggccgttaccgatccttctattattgggcggcacgctggaacgacaatgttggtagttggattcgcgaaaaacactgtgaaagaagttgaaatgtcaatatctcgttttgaaaaatcgggagttagtatcagcgggttaattgtgaatgggtatgttaaaaaagcaacagagagctattctgaaggctcatattacaattacggatataaataccgataa

SEQ ID NO: 431222 - DNA, 1224 bp, Serratia marcescens
atggtgaacaaaaggaatatggtcctttgcttattggtgctggttgctatgagcagtttctttgtcgccccctacctcactatggttggcttttgcgggataatggctttttatatcattgctagtgatagagaaaaagactatttggcatacttttttttctttattgcaatgacattgataacttgcattgttatatccacaaagacacttgatgcaattatgaatgacaaggtcaattaccgtgtatctatgctagaaggtaatgggctaaatattgttcagtgggttgccagtttcagggactcggatttcatttcttatttgttcatgtacatttccgcatacttattcggagtgaacaacgaggcatttgccttcttttatttcgtcagttttacgttacttgttgtggggctctatagaattaccggaaacagcttcgcgattattttgtttatgttctgttgtcagtatactttccaagggttgtacgggaatattcttagacagtctttagccttatcctttttaatttgtgcgctctcttgtaaaactatacgaaacggtatggcattaataattttggcagcactgagccacttctcgtttataatgtatgccccttatatctttttaagacgtttcttccacaaaatatcaacacctctagcactcattgcatttggggccacttatattgttgggaaatactttttttcagtattggtggcttttttcccaacagggagtctgttatcagaaaaagcggcggtatatgataatgatgcaacgtttgaaggtagtgattttggccgaaaattgggagcgatagttttcttcatcatgattatagagggggggaatattttccaaaaatattttctagagttagacgagtctagaaagagaacattagaagatatacgcggcttctttatttatggcgcattgatattttttctatgcacgtcgttcgaagagatttcgacacgatatgcatttaatttaatgatctttgcatttgcttatgccattttattagtaggcggaataaaagattacacgctaaaatgcatgatttatctttccttggtggctctgttattattaatgtatgtatacatcaatgtcgttagtaatcagtttttctactatggagatcttgtctctattcttagtgatgatttgccaactattataaataaaatcggcatattttaa

SEQ ID NO: 431223 - DNA, 1008 bp, Serratia marcescens
atggggtctatactttttagcataattatacctgcatataatgtttctgagtacttatcaaactgtcttgcctctatagtcaaacaacagggctgtgtgtcattcgaatgcattatcattaatgacggttcgacagataataccggagatattgcagagtcgtttataatcaatgagaaggtaaataacttccattattatgagaagaagaatggtggtgtgtcagagactaggaatttcggcttgcaaaaggcctctggggaatacattattttcatagatgcagatgatatcatatcgccaaatttactatgtttcttgaataaagctatcgaagagcataatgcggatttagtatactataacttcgaagtattacgtggagagtcaacagaagaaagcaacgttttaagaaatgatttgaaattcatatgtagtgaaatgtctaagcaagagctagcatctaagcccaattacccctgggctagagccgcgaagagaaacctctatgaaaacgttgtttatccacttgggcttatctatgaagatattgttagtacaactattctgaatgcactgtgtcaaaaaccttatcacatagagaactcgctctatggctatagaaaacgaccaaattctttgatgtcagagtcggcacttaagcaactggtaatgtttgaaacaataaagtatctgaagattgaatgcaaaaaaaacaatatagcagaaatttattataattctgctgttgtcaacctttcacgttctgcatttatgagcgtttatcgtatcaaagatagagataaatttattgaaggaagggaaatgatgtggaaaagctatcatgaacttcctttgattgagggcttgcgcagctatgctactcgtttagaaaaactgatctttattattataaaggcaaaaaagttagcaataccattgtcatgggggctcggtaagctagttaatagaatagatgctaaacgcaactctcgttttagtgattaa

SEQ ID NO: 431224 - DNA, 750 bp, Serratia marcescens
atggtcatatatatagtcacccataaggattatcagttcccggcagacaatgtttacaagccgattaaagttggttctggaaatgtaaattctgatatattaacggatgcgaacggggaaaacatcagctctttgaatccctatttctgcgaacttacagccctttattggatatggaaaaatgcgagagaggatattgttggcttggtccactaccgtagatatttttcatctgggagcagttctgttcaaataaatggtcgcggaatattaagccgcgaagagatcgactccgaactaagtggattcgatctgattgtatcaaagccaagaaactattacattgttaaaataaaggatcactatattaaagctcatggggaaaatgattttgaactattaagatctgagattgaaaataatgagcctgcgtatattgagagttttgatgcggtaatgaatagtaaaaaaataagcctttacaatatgttcattgcaaggaaagaagttatcgatgaatactgcgaatggttattcgggattctattctccttaaaagataagattccgtacgaaacttatgatgcctaccaaagacgtgtttttggtttcatgtcagagaggctctttaatgtttggatcagagcaaatgctcacaaattaaaagtaaaagaaatggccgttgccaatattgaaggtgagaacgtcttaaaaaaaggctttgggcttattaagagacaatatctatga

SEQ ID NO: 431225 - DNA, 1116 bp, Serratia marcescens
atggatacgtcaaggggctcgaagataatggaaaagaaaatattaatattgacttcattcgtttcaggtatggggggaatggaaaaggtcattgaacgcactaatacgattttatctaaaaataaaaaatacacaacacgtattatttctctcagtggcggtcagagtaatttaataaatgggaaaacaaaatttttctatacggggaaagaatcatggattaataatataaacggttctcgcttcccttttcggagtggaataaagcacctcgactttattcttcacgccatgtatgtatttttggttctcattcgatatagaccccattatgttgtttgcactggatttggtcagcttgtctatgcgaataagattcgtaatctctttggtcttaaatataaattgctttcctggcctcatttctccatagcatcaggattcgggaatataaaatattcaacacaagccgattactgtttaggaataagtaaagagataaatgatgaatttataaaagcctgcgttgagcctgagaaggttatttatttcccgaatccattctctcgcatggatataataaaaagaaaaaatgacattacaacctttgtcttcattggcagattactaattgatggtcagaagaggattagagatataatcgatgcagcgggaaaaataaatggagattttcgcgtaaaatttattggtgatggcgaagatgctgatctaatcgagaagtatataaagaacagcccagctaataaaaaattagagctgttacgtggatgggttaatgatccttggagactggctggtaatccgaatgccttgttattagcatctgctttcgaaggattgcccacagtaattggtgaggcgatgtctagaggcattgtctgcatcagctctgattgtaaaacaggcccgagagattttataaaggatggaaggaacggctatctgttccctgtaggtgatgtagatagtttggcaaatcttatgcagcgtgttgttgatggcgatataaatccatcaccggaaataatcgcggagagcatcgatttcttctatgaggatagatatgaagagcgtttgctcaaggtgttcaattaa

SEQ ID NO: 431226 - DNA, 1137 bp, Serratia marcescens
atgaagaaaattgcatatataacattattggacacgagtgccaagagcaatggtgtaaacaaaaaaatttttgcgcaatgtaaagcatttattcacttagggtacgatgtggatattttctccatgactagttatggactgatgaaaaccaacctcatcacaggtgagtttcatgaggaaaagttgagcaagcgaaggaatgtttttttttacaacgaggttattcactatctaagtgggcgtgacgatgattaccatatggtatatcttcgacagccatttcctacaataagaagtattggttttagtaatttcataaaaaaaataaagctaaaggctaaaaaaattgtcttagaaatgccgacgtacccatttcttaacgaatcaaaaaacctcaaagaaaaattgtataactttttatttagatggcaattctccacttcgaaaaaaaacattgatttaattgtgtatatgggcgcttttactaaagaaatctggggtgtaaaggctttgaggattttcaattcagtggatatctctcaaaatccgatgatcaaaaattgtttttccaagacggttaatgatgaacctatcagacttattggtgttgcgcagttggccttttggcatggttatgatcgaataattacagggttggcggaatattacaaaaatagctccaatagcaaggctgtatactttgatattgttgggaattccgacttcgggggggcagaatcagaactcaaagctttggttgataaacttaatttaagaaagtatgttatttttcatgggccacaacatggtgatgcattaactaaaattttcgaatcctcaaacatcgccgttgactcattaggtcgtcatcgtagtaataatgaatataattgctctttgaagtcaaaagaatactgtgcgcgaggcctgccgtttgttaaaagtcataaagatgacgcctttgaaggaaccaactatttttaccaggttccaccggatgaatcagctatcgatatcagcgaattattaaattggtataaacgagtggattttgaccccaatgaaatgcgttgttttgtcgagaatgagctagtctgggaagtacaaatggaaaaggttatatcagcgctatcgtaa

SEQ ID NO: 431227 - DNA, 1149 bp, Serratia marcescens
atgacagtgaaaaatgtgctacttgttggtgctggcctatccggtgtggttattgggcgccaattggctgagaagggattaagagtcactattatagatcagcgccctcatatcggggggaactgttttgacgatcgagatgccgaaacagaggtaatggtacacacctatggcccccatatattccataccgataatgaaaccgtatggaattatgtcactaaatacgcagtaatgatgccatatgtcaatagggtaaagtcaacggttaatgggcaggttttttcactcccgataaacttacatacaataaatcagttcttcaataaaacgtgctctccctcagaagcaaaggagcttattcagagtaaaggtgacagttcaattgttgaaccgaaaacttttgaagaacaagcgttgcgctttgtggggcaagaattatatgaagcctttttcaaaggttatacgataaagcagtgggggatgtctccatccgagttgccagcctcgatactgaaacgcttgccgattcgtttcaattacgatgacaattattttaatcacaagtatcaaggtatgccaaaagatggctatacggcgatgataaaaaaaattgcggagcacgacaatattactgttaaattgggtactccttttgataaagcctgcatcggagattatgaccatatattttatagtggcccgctcgatgccttttatgagtacagccttggcagattggggtatagaacgctagactttgacaagtttaaattcgatggagattatcaaggctgcgccgtaatgaattatggtagcgtagatgtaccatatacccgtattactgaacataaacatttctccccatgggaatcacatcaaggctcggtctgttacaaggaatatagtcgatactgtactgaggatgatattccttattatccgattaggcaggttggagagatgcagatgttggaaggatacatttctttggctcagaaagaaaagaacattacttttgttggtcgtttgggaacatatcgctacttagacatggatgttactattcatgaagcacttcttactgcagatatttatttaaatagtatcgctactggttcggatatgcctgtatttaccgtgaaatga

SEQ ID NO: 431228 - DNA, 2172 bp, Serratia marcescens
atgacagatataaccacaaagaaaagcgctaccaacacgaaaggcaatgattttaacattgcccaagtgcttggggcattgctcgatcatagatggcttatcattggtgttgttacattatttgcagttttcggcatcatttattcgttattcacaacacccgtttaccaggctgattctctcgtacaagttgagaaaaaacctggtgggtctttgctggataatctttcacaaatgattccaaactctcaggccgaatcaacaacagaaattgagttaattaagtctcggatgatcataggcaaagctgttgatgatctggggctcgacgtttccgttgaaagaaaattctttcctgtttttggaaaaggttgggcgcgcttaacgggcagtaagccgcaagaaattgaagtgccacgactgttggtacctgagatattgtttggtgaagaactaacacttactgtcttagatgatcaatcattctctcttagcgatgatgatggtgaaatattaaaaggaaagttcggtgatctggcatttggtcaaggtgtaacggtcgttgttaataatatctcggcaaaagcaggagctacttactatatcactaaaaaaacgcgtttagctgcgataaatagtgttttaaagtcgctagtggtcactgatcgaggtaagaaaactggtgttttggagctgactctaaccggggaaagcaaggcgttggtacaaaaaacactgaacagcattgatgaaaactacgttctgcagaacgtagctcgtaaatctgaagaagcagaaaaaagtctggagtttcttaaagaacagttgccagccgtaagatcatcactagatgatgccgaagataagcttaacagttatcggaagaagaacgattctgttgatttatcattggaagcaaaatcggtgctggatagtattgttgccgtagaatcgcaacttaacgagctgacatttaaagaggctgagatttcgaaactgtttacgaaagaacatcctgcatatcgtgctttgatggagaagaggtctaccttagagaaagaacgggcgaagttaaacaagcgtgtcgctacaatgccacagacgcaacaagagattttgcgattaacgcgcgatgttgatgcgggtaaggtcatctatatgcagttgcttaataagcaacaagaattgagtattactaaagccagtacggtcggtaatgttcgcatagttgatgatgcagttgcgcagccgcgacctgttaaaccaagaaagacattaatcgttttaatagcaattttcctcggtggtttgctgtccgtcgctttcgttgttataaaaatgcgtatgcatagaggtattgaatcacccgatcagctagaacaggaaggatttaatgtctatgccagtattcctctctctgaatggcaacaaaagaaagacctccagattcgattggcctcaaggcgcaaagttaatgctgattcggatagtttactggctaatggcaacccggccgatttagctatcgaagctattcgtagtttacgcactagcctccactttgccatgatggaggcgaagaataacgtactgatgatctccggggcaagcccgaatatcggtaagacattcgtgagcatcaacttggcagcagttattgcacaatcagggcaaaaagtactggtgatagatgcggatatgcgtaaggggtatcttcactcgttgcttggtattgatggcggcaatggtttatctgatgtcttagcgcagcaagtttcaattgaaaatgcaatcaagaaaaccaacgttgagggtatggacattattgttcgtggtcaagttccgcctaacccttccgaactattgatgacgcgtggtcttggtgaattgattgattgggctagccaaaactatgatatggtattggttgatacacctccaattttggctgttactgatgctgctattattggccaccatgcaggtactgcgttgatgatcgcgcgttttggtgttaatacagtgaaagaagttgaagtcagtattcgtcgctttgagcagaatggtaccaatatcaaaggcgttattcttaacgctgttgaaaagaaagcgagtagttattatggtggttatggttactaccattatgaatacgagtcaacgaagaagtaa

SEQ ID NO: 431229 - DNA, 1161 bp, Serratia marcescens
gtgaaaattatgatggttagctcgttatacgcaccatatcagatgggcggtgccgagatatctcttcaattgctaagtgaggaactagttagaagaggtcatcaagttagggtaattacgctatgtgataaaccgttaaggtcgttctctataatcaatggcgtcgaggtcgtatacataccacttagaaatatatattggcctttcagtggcagaaggcggaatgttttactacgctttttatggcatgttattgataattataacctgttaatgaaaactccgtttaggaaggaagtggccgattttcaaccggatatagtaaacacaaataatttatctggcttttcggttgcagtttggggcgttgttaacgctatggggattacattagtccatacttcacgtgattactatctaatgcacccaaacacgacgatgtattacaaaggaaaaaatactgaaccgcgtgcgctctcagtttttctttggtcctttttgaagagaatttatagtaaaaaagtcaatttttatattggcattagtttttttatcatggattttcatataaagaataaattcttcaagaatgcattaaaggattatacttataatccagtatcagtttattccggatgttcgccctctgcagatgtgattcgtatcgggtttatcggacggttaacaaaagaaaaggggtttgacgtatattgtcgcttgattgttaaattgcgtaacgccggatataatatacaagctttcgctgcaggtgattgttttgatgacaatgatgagtttcgagttatgttgcattcagctgatattattcagatgggacgcgttaatatcgagcatttcttaaataacgtagatattgtcattttcccttttcaatggcgtgagccatttggtcgagtcgttgttgaaagtgcattagccaaaaagcgtgtgttaattaacccagttggcggggcaggagaattactagagttaatcccatctgtcaaagagataacggaaaataatcttgagtgggcattgaactctactacagaaattactattgagcccgatactataaagctttttgatattgacaacataacagatgagtatatatcgaattatgatcgagccagagaaactacccattatcactga

SEQ ID NO: 431230 - DNA, 1080 bp, Serratia marcescens
atggcacaagtaatcaacactaacagcctgtcgctgatggcgcagaacaacctgaacaaatctcagtcttctttgggtactgcgattgagcgtctgtcttccggtctgcgtatcaacagcgcgaaagacgacgctgcgggtcaggcgatctccaaccgtttcaccgcgaacatcaaaggcctgactcaggcttctcgcaacgccaacgacggtatctccctggcgcagaccactgaaggcgcactgaacgaagttaacgacaacctgcagaacatccgtcgtctgaccgtacaggcgcagaacggttccaactcttccagcgacctgaaatccatccaggacgaaatcactcagcgtctgtctgaaatcaaccgtatctccgagcagaccgatttcaacggcgtgaaagtgctgagcagcgatcagaaactgaccatccaggttggcgctaacgacggtgaaaccatcgatatcgacctgaaaaaaatcgatgctaaagaactgggcctggataagttcgatatcacaactaaaggtactaaagttggcggcgcagtaaccgacgggtcaactattaaatataaagatggtaccgatactgttgatgcaaaagtaaaagttgataccacgtccatcaaagatggcgataaattggtcagcggtaccgacaaagatggcgcgactgtgtatatggttgaatcaactgctaaagatggcactaaatcttacgttgaagcaaaagcagcatatgacaagacaagtggcaccgtgactttcaccaaagacactaaaacagttgatgacgtgcaaaatccactggctaccctggacaaagcgctggcacaggttgacggcctgcgttcttctctgggtgcggtacagaaccgtttcgattctgttatcaacaacctgaacagcaccgttaacaacctgtcggcttctcagtcccgtatccaggatgctgactacgcgaccgaagtgtccaacatgagccgtgccaacatcctgcaacaggctggcacctctgttctggcacaggctaaccagtctactcagaacgtgctgtccctgctgcgttaa

SEQ ID NO: 431231 - DNA, 2160 bp, Serratia marcescens
atggatcgcagaagcgtagtcaaaggtctggtctccttttttttcggtggcgcgatcacctcgccggcttgggcaaaagacaacgggcctctctggcctaacacagcttcactcagtgctatccctcctcggttgctcacgctcgtaagctcattcaaaggcagtgcgaacggccaaatgtatataggcagggctgataccaaccctcttgtgtcggcaaaccagattcctgtgtatctggaacgggcagatggctcccgtatgcttgtttcacagcctatattactcgatgaaagtagtgctcctcgtatcaacagtgaagcggggaggcttgtcacgcaagaaagttatgctttggctgtgcatgatcgtgagggggggcagcagttttatattcccgatgtccgtcaatatgagccttatattactaacttatatattgatgagaaattgtcagagctgtctgactccactggagccgatcttattgggtataaaaatgccaccgtaggtgaagagttggggtcattagaatttataaaaagcactgctgatatttactacgctacattttttgagacaaacacgaatgcggttaatttagttacgtctcacgatggtcttaactggagtgaccccactcaattgagtgatggtaaaaaatcaattgcagggcgcgacccatcgatttgttttttcaaaaataattggtttgtagctataacgggaaattcagttgaaaattatgacatgctcgtatataccagtaaagacttaataaattggaagcgtgttaatgtcaaacttaatggaaatgaagctatttgtagccgaaaaaaaatatgggataaaggaacgagaggtgcagataaattatgggctccagaactcattgttgagaatgatgagctttatgttattattagtatttacttaggctatgatcaatcgtcttcaccaacggctaagtcgaattactttggcacatatattgccaaatgcatagatatcaatgagatgcggttttctgaaccgtcacgcatcgattatcatgaatctgatggaagccttaataaatatagccgtatcgatgccgatattgtcaaggataccgaaaacaataaatatttacttgcggcaaaaagagaaaactatggtgtgattgatgtttttcacagtacatcatttttagggccatatgaatatgtcagtacagtaagtatgtcaaccggtggtgcggatattgactatcttatgcgctcaggcatagaggctccttgtttgtttcagctaaaaacaggtgagtgggcaatgatatttgatccgaatgatacttttgatgggataacttatataacgtcgaaggatggtttcttttcctacagtaagccgcaaaaaatgcgtttgtcaaaatttagacatggcactataaagtcaggaaagtatgagggcttgacggcgaaaggcgttcaggacctttatagatgcaaaatggcaacttcagcagtaataagctctcaaattactccgaacaatttcattcgaattaaagaaaactgctctattatccctcagtcagatactgtctactgggctaatgcatcatacaaggtgacgttgattgccccaaatcgtggtgattgcccacgtagcttttacttttgtgtgcgcagttcggaccgttctgtggtgctaagcctcaacggcgctatcgttggtggctcgtatgatctcggttgggggatctcaaatgagcgcattattgagtttttttatgacggtctagataataagtaccgctgcgagatgctcgaggtaaaatcttataatgggagccatttatctgcgtctgcaggagggaatgctattaacgcgcagagtgccagttggattcctcaacatggaatgacttacactatttctacgtctgacggaacatgcgttatacattcgttgccaaatatgccggtaggaacatattttaatgttgtgattcaaagtgcagaagatgcatttataggtttggttatcaaggcggggaatggaaaaaacaatctgggtttaacagccgatttcgcttatcgtggtggggttgagcaatacgatggtagaatcattcgtatagaaaaaggctctgacctttggtttgttacaaagtaa

SEQ ID NO: 431232 - DNA, 654 bp, Serratia marcescens
atgaaaggtaaaatgctgctgcttatcggcctgctgtgcagtctgaacgcgcgcgccgacgatctggcgacgcaaatcgaaagcttcatccaaggcaaattcagcggtgaaccggtgcaggtgaaagtacgggtgcgcacgccgccgaatcaatggcccgcctgtgaactgccgcagctgtcgctgccgcccagcgcgcggatcggcggcaatgtcagcatttcggcgcgctgtggccaggagcggcgttttatccagactcaggtgcaggtgttcggccgctatctggtttcggcgcgcggcatcagcgccggcagccgcctgaccgcggcggatctgacgttgaaagagggccggctagataccttgccgccgcggacgttgaccgaagcgggcaaagcgttaggcgcagtcagcctgcgcaatatcagccccggccaaccgctgaccctggccatgctgcgtcgcgcctggttgatcaaagccggacaaccggtgcaggtcaccgcgcaaggtgaaggattcaacatcagcggtgcgggcaaggcgatgaataacgctgccgccgaagacagcgtgcgcgtacgcatggcgtccgggcagatagtcagcggcgtagtcggggacgacggcgcgattcgcattacgttataa

SEQ ID NO: 431233 - DNA, 753 bp, Serratia marcescens
atgttcaaaaagatcttattacctgcattatttactgcttctttactctgttccattgaatccacagcagcgataaacctgttgcaatataataaaattagcacagtaagcgggcttgttaacgataaagcagtcactgacagtctcaaaagcacactgggtcaggactatgagaaatacatcagcaattttgatgttttcggtgaacctcattcagtccctggcggggggttatttgctgaaggctggctgaaggatctttacctggaaagtgcctctgctttggtcatcaatcccgatgggaaaatttatgctgcctgggttgtacctgactctgatgtcataaattacaaatcttctgataaagatgcccccatgaataaggagattcagcattgggctgaacgcttcaaaaacatgcaattcgccacaatcaacgaaagaaaaaagatgagggcgacaaaagaatattttgatacgcagtcattctctatcaaactcacgaccatttgctccagtaaaggcgattgtaatgatgcaacttactatgggaaacgtaaaaaagatggtgccgctttaactttacagggcaaagcgacacaagctgattgcaatacagccccatgcccaatcattggttatgaatttaaaaacgcatcaacaacttatatgctcagtaaaattgataacaccctgacagtcataaaggatggtaaaatattaatgaatcagaaaggggagtgggtgaaatag

SEQ ID NO: 431234 - DNA, 960 bp, Serratia marcescens
atgaaaacgcaacccgtcattgggatcagcggctgtttaacgggggctgccgtccgctttgatggcgggcataagcggacggagttcgtcatggatagactggctcagtgggtgacgtttcggcccgtctgcccggagatggcgattggcctgtcggtgccccgaccggcgctgcgtctggtgcaaaccgccgccggggagattcgcatgcgccttagccatacgcctcacgaagacgtgaccggtaaaatggccgatttttgcgaggggtatctgaccgggttaggtgaactgtctggttttattgtctgcgcgaaatcacccagctgtggcatggagcgcgtgcgcctctatgacgagaaagggaatcgtgggcgcaaggagggggtgggactgtttaccgccgcgctgatggagaaatatccgtggctgccggtggaggaggatggccggttgcacgatccgattctgcgcgaaaactttgtcgaacgggtttttgcgttgcatgcgcttaataccttgcgcaaaacgggcctgacgcggcgggcgatactggattttcacagtcgctataaactgcagctgttggcgcaccatcaggcagggtatcgtgaaattggtccgtttgttgcgacgctgcatgagtgggaggatttggatgccttctttgcggtctaccgcgataaattaatgacgatcctgaagaaacccgcctcgcgtaaaaaccacactaacgtgctgatgcacatccaggggtacttccgtaaccagctaacgatgcgccagcgcggagagctgcgagaggtaatcctcaattatcgtgcagggttgttgcccatattggccccgatgacgcttctgaaacattatctggcggaatatcaggatgcctatttgctgacgcagaattactttgatccttacccgcaagctttagcgttacggctgacaattcagtga

SEQ ID NO: 431235 - DNA, 531 bp, Serratia marcescens
atgaaacgtttattgatcctaatcctgcccttactgatgcagctcgccggctgtagcgctgagattgcggactatcgccggcagcagccgacgctggatatctttcagtattttcagggggacacgcaggcgtgggggatggtccaggaccgcaacggcacacagcttcgtcgcttccatgtcgatataaacggtgatgtcgtggggaacacgctgaccctcaacgagcgatttgtgtatgacgatggcgagaaacagcagagggtgtggcgtatccgaaaagtcagcgccgatcgttacgagggcacagccggcgacattcaaggcgtcgcgaaggggcaggcggcgggcaacgcgttcaactggcattacagcatgaatgtgacatccaacggtagaacctggctgctcaattttgatgactggatgtatctgcaggacggtcatcatctgttcaataaaaccgagatgaagaaatatggcttctccgttggcacggtgacgctcttcttctcccgtaaagcgcactag

SEQ ID NO: 431236 - DNA, 528 bp, Serratia marcescens
atgaaacctgtcttactgatgctgctgggattcatggcgattgcgccgtttgcggacgcggcagactggttaagttggcggaaagtcggcgatgcgacgctcacctgggggccgtttacgatctatacctcgcaactgctcacgccggaggggcgatatcgtggtttgggggaagatcaggcgctgattatctcctatcagcgcactattgatcgtcaggaactggtggatgctacgcgcgaacagtggcgggcgcagggcattctggcgcgggaagcacagagcgagtcatggctgcgtacgttgggaaacatatggccagacgtcgtgccggggatgcagttggcgtttgtgcaaaaagcaaggcaggggcagttctggtatcgcatgtctgcgacacaaaggcattttatcccgctcggctcaccgcagtcggcggcgttcagtgaaaactttctcgcgatctggctgggcccccgcacccaatatcccgagttgcggcagcagctcactggaggtgacgaatga

SEQ ID NO: 431237 - DNA, 486 bp, Serratia marcescens
atgaatcgccatctgaaggtctttaccctcgccgtcggcttcgacctttactggctcctggtggtgctatttcgcgagcgcggcgtggtgttgtggcttgcgctggcgattctagcctgtagcttgctcccgccaacgcagcgtgtgcatgcgttgttgctggcggcggcgggcagtgggcttgatgcgctgtgggcgctggcggggctggttgattttaacggcgaggcgctgctgccgctatggatggttgcgctttggctgatgttcgccgccctgtggacgcacctggtctgctcgaccgccttgccgggttggctgccggcgctgatggctactggcggagggccggtggcctacctgttgggggaacgtctgggcgcgattgcctttctgaaaccgaccgctatcgtcgtcggtttgttggcggcgggctggctggcgctgatgctgtttttccatattctcgtgaggccacgacaatga

SEQ ID NO: 431238 - DNA, 495 bp, Serratia marcescens
gtgctgctgtgcgactaccgcgatctgactggggaattcgacaaactggtgtcggttgaaatggtcgaggcggtcgggcagcgctttctgcctacgtttttccgtacctgtcaggcgcgcctgcgcccgggcggcaaaatggcgattcaggccattaccattcaggatcagcgctatctcgattactgcaaaaacgtcgattttattcagcgctatatctttccgggaggttttttacccagtatcaccgcgatgagcggtctgatgacgaagcataccgactttgtggttcgcaatctgttcgatatggggcccgactacgcccggacgctggcccactggcggcaacgatttgttcacgcctggcaggagattgaaaaactgggttttgatgagcattttcgccgtatgtggctgtactacttcggctactgcgaagccggttttaacgcccgcaccatcagcgtggtgcagctgacggcagagcgagtatga

SEQ ID NO: 431239 - DNA, 786 bp, Serratia marcescens
atgatcgaacccgcctttgcgcttgaacctgatattccgcgcaatctgcgctttgcgcgttggctcctttttcgtgtgctgagcggccttcgcaaaggttcactcacggtgcgggaaggggcgcagacctttcattttggcgatgcctcggcagaattgcgcgccgatctgcagattctatcgcccgcggtgtattggcgggtgttgacaggcggaagtcttgcggcggcagaagcctggatggacggtgaatgggaaacacagcagctaacgccgttactccagatattcgcactcaacagcgccttgctggggcggctggaaagcggttttcgtgtgctgggcaggcccgtagagcgcttgcgtcactggacgcgtcgtaaccatcggcaacaagcgaggaaaaacatcgccgcgcattacgatctcggcaatacgttttacgcgcactttcttgatgaggatttactctattcctgcgcattgttcacctgcccggaacagtcgttagcgcaggctcaacaggccaagatggcccgattgtgcgaacagctggcgctgactgaggatgatcatctgctggagataggcactggttggggggcgatggcggaatatgccgcgcgtcattacggatgccgcgtgaccaccacgacactgtctcaggaacagtttgcctgggcgaccgcgcgcaattacccgcgcaggtttacaagagagagtcaaagtgctgctgtgcgactaccgcgatctgactggggaattcgacaaactggtgtcggttga

SEQ ID NO: 431240 - DNA, 723 bp, Serratia marcescens
atgaacagttgcttgtaccacggcgtattgcggcaccagcgcctccagccgacaacgcaccggtttagctatcgggtgtttatggcgtggatcgatcttgatgagctggcgcaactgccgagcgtgggcgtgcggcgtaatcgcttcgccgcagcggcttttcatgatgcggattacccactcggaaccccgttaaaagacaacgcgctgaatcagcttgccgccctgacgggcgagtgtcccgaggggcgcgtgatgcttctgacgcagctgcgttatttcggttttcattttaacccggtcaatttttactactgttatgaccgcgcgaacctcctgcgctgggtgctggcggaggttcgcaatacgccctggaatgagcgccattactacgccgtagacgcgcagaaaaagtgcccgttggcaaaagcctttcacgtatcgccgtttaacccgatggagatggtctatcactggcgatttaatccgccgggcaaaacgctgcatatgcatatcgagaaccatcaggcctcgaagatttttgatgccaccctgatgcttaaacgcgagccgttgacgcaggcgagtctgcgttcactgttgttgcgcctgccgttcatgacgctgaaaacggtgtttgcaatttactggcaggcgttgcggctgtggctcaagcgagtccctctttacaaccaccctgcaagcaggagtgagcgatcatga

SEQ ID NO: 431241 - DNA, 1257 bp, Serratia marcescens
atgaaaattgctatcattggcagcggcattgccggattaacctgcgcgtggcgtcttgcggggcaccaccaggtgacgctttttgaagcggcgccgacccctggcggccacaccgccacggtggatgtggctaccccgcaggggtgttttgcgattgatagcgggtttattgtctataacgaccgaacctatccgcgttttatgggcttgctgagcgaactgggcatccagggacaaaaaacgcagatgagcttttcggtgcataatccgcaaagcggcctggagtacagcggccatacgctagcttcccttttcgcccagcgtgaaaacctggtcaatccttcatttttgaccatgttgaaggagattgtccgttttaatcgtctggcgaagcaggcattaaatgaggttgatgcgaacgcgaccctacagacattcctcgaccggcatcacttcagcgcgttttttgcccgccattacattctgcccatgggcgcggccatctggtcatcttcgcttcaggagatgcgccgctttccactgccgctgttcttacgcttctttgagcatcatggccttctggatatccggcatcgcccgcagtggtacgtggtgccgggaggctcgcgggagtacgttcgcgtgatgctgacgcagctgagcgaacgtctgacgctgtgtctcaatgcgcctgtgcaacaggtgattcgttccgacagcgaaatcagaatccagctggtggcctctacccataccttcgatcaggtgatctttgcctgtcattcttcgcaggcgttgcgcctgcttaaggatgcgagccccgcagagcacgatgtgctgggtggcattggctggcagcgtaacgaggtggtgctgcacggcgatcggcgctggttgccggtacgcgagcgcgcgtgggcaagctggaattatcgcctgagtgggaaggaacaagcgagcgcttgcgttacctataacatgaatattctccagggattacctgaaggaagcccactgttctgtgtgacccttaatccggacagctcgattgaagagcgactcgtctggcgacgtttcgtctatgagcatccgctgtttaatccccaaagctggcgggcgcaggctcgtcgggcagagattaacggccagcgtcgaagctggttctgcggggcttactggtacaacggctttcacgaggatggcgtgcgcagcgcgctggatgtggtgcacggtattgctgcaggagcggggggctaa

SEQ ID NO: 431242 - DNA, 720 bp, Serratia marcescens
atgatgactgttctcattaccggcgcaagctccgggatcggcgccgggctcgcaaagtcatgggctgatgacggttgccacgtgattgcctgcggtcgcgatcctatacggctggaacagctgcgccaatctcatcccaacctcacaatacgtctgttcgatatgacagacagagaggcctgttgcctggcgttggcggactgcacgcccgatcttgtcattctctgcgccggtacctgtgaatatctcgaccacggctgggtagacgcagagcgggtcgaacgcgtcatgtcaacaaattacctgggccccatcaattgcctggccgcgcttcaatcacggttaacctccggtaatcgcgtggtattggtcagttcgatggcgcactggctgccgttcccccgggctgaagcctacggcgcttctaaagccgcgttaacctggtttgctgacagtctgcgtctggagtgggagccgaaaggcattgccgtgaccgtcgtatcgccggggtttgtcgataccccgcttacccgtaaaaacgattttcctatgccgtttaaggtcagcgtggagtatgcggtgaaagcgattcgccgtggcctggcgaaaggaaaaaacaatattgtttttcctgccggctttggcctgctgctgcgtctgctggccgggctgcctgaggggctccagcgcgctctgctgcgcaggatggtgcgttcatga

SEQ ID NO: 431243 - DNA, 462 bp, Serratia marcescens
atggggttcaccctcaaggcagaatttatgcgcgcgcagccgttcgtcatcgacaggtttgttgattattacgccggtttggatcgccagaccgtcatggcgcttgctgggttgtacgacgtgcacgccgtcctggtcgatcccttcggggaacacaatgggctgttggccatcaagcgctatttcacgcatctgctggcgaatgtgaacacctgccgattcgccattgatcctcctctgcgtggagccgggcaatttgccgtgacgtggaacatgcattggtcgcatccgcgtatcgccggcggtgaaatgcgttcattgccgggatgctcgatggtggagttccagggggagaagattattcgccagcgcgattactacgacgcgggcgagatgctttatgagcatctgccgcttttgggttgggtcgttcgcggagtgaaacggagggtgtgcgcatga

SEQ ID NO: 431244 - DNA, 729 bp, Serratia marcescens
atgtcttactccattggcgaatttgcgcggctttgtggaataaccgcgacgacattgcgcgcctggcagcgtcgttatgggcttctcaagccgcagcgtacggatggcgggcaccggctgtataacgatgacgatatccaacaggcgcttaaaattctcgactgggtcaaaaaaggcgtcccggttagccaggtaaaaccgttgctggcccgtcctggcgcacggcgaacgaataactggttcaccctgcaagagaacatgttgcagcgcctgaaagaaggaaaaattgaatccctgcgccagctggtatacgacgcggggcgcgagtatccccgtcccgagttggttagtgaagtattgcgtccattgcgcagtaaagtctcggccaacgtgccggctatgatgacgctgcgtgaaatcctcgacggtattatcatctcctacacctcgttctgtctggaaggggataagcgtgcgccgggcgataattacctgattaccggctggcatctcacggatccttgcgagatttggcttgaagcgctttgtcgcactggtcaggggcatcgtattgatgtgcttcccttaccgcccgcaaccctggcccccaacatctttcccgatcgtaaatggctgttggtcacttccggcaagctcaccgtggcccgcaaaaaacagatagagctctggctgcagcaggtcagctccctcgatgtgatctcactttaa

SEQ ID NO: 431245 - DNA, 3087 bp, Serratia marcescens
atgagcggcgggcgctttaatctctcggcgctcgccgttcgtgagcgatccattactttattcctgatcgtcctgattacggtcgccgggatcctttcgttcttcgaactggggcgtgcggaagatccgccgttcacggtcaagcaaatgacgatcgtttccgcctggccgggggccaccgcgaaggaaatgcaggagcagatcgccgaaccgcttgaaaagcggttgcaggagctcaagtggtatgaccgcagtgagacttacacgcgtccaggcctggcttttaccctgctgtcattgcaggacagcacgccacccgcacaggtgcaggacgaattctatcaggcgcgcaagaagctgggcgatgaggcgaaaaacctgccggcaggcgtgatcgggccgatggtgaatgacgaattctccgacgtgaccttcgcgctttttgcgctgaaggcgaaaggggagccgcagcggttactggttcgcgatgcggaatcgttacgccagcgtctgctgcacgtgcctggggtcaagaaggtcaatattatcggcgagcaggcggagcgcatctttgtttcgttctcgcatgacaggctggcgacgctgggcgtttctcctcaggaaattttctccgctctcaacgaccagaacgttttgacgccggccggttcgatagatgcccagggagcgcaggtctttattcgcctggatggcgcctttgacaagctggagaagatccgcgcaacgcctatcgtcgtccagggccggacgctgcagctctcagacgtggcgacggtagaacgcggctacgaagatccggcgactttcctggtgcgcaatcagggagagccggcgctgctgctgggcatcgtcatgcgcgaggggtggaacggtctggatttgggcaagacgctggatgcggaaacggtgaagatcaatcagggcatgccgctgggcatgacattgacgaaggtcaccgatcaggcggttaacattagctccgccgttgacgaattcatgatcaaattctttgtcgcgctgctcgtggtcatgggggtttgcttcgtcagcatgggatggcgtgtgggggtggtggtcgcggcggcggtgccgttgacgctggctatcgtttttgtggtgatggcggcgtccggcaaaaacttcgaccgcattacgttgggctccttaatcctggcgctggggttgctggtggatgatgccatcatcgccatcgaaatgatggtggtgaaaatggaggagggatatgatcgcatcaaagcctccgcctatgcctggagccacaccgccgcgccgatgctggccggtacgctggtcacggcggtcggttttatgccgaacggatttgcacagtccaccgccggcgaatacaccagcaacatgttttggatcgtgggtatcgcgctgatggcctcctgggtggtggcggtggtgtttacgccttatctgggcgtgaaaatgctgccgaacatcaaaacggtgcagggcgggcacgcggctatttacgacacccggcactacaaccgttttcgccggctgctggccagcgtcatcgcgggcaaatggcgagtcgcgggcgccgttgttgccgtctttatcgtggcgattctcggcatggggctggtaaaaaaacaatttttccctacatccgatcgcccggaggtgttggtagaagttcagatgccttatggcacctctattgagcagaccggcgtcaccacggcgaaaatcgaagcctggttgaataagcaggaagccgcgaaaatcgtcacgtcttatatcggacagggcgcgccgcgtttttatctggctatggcccctgagcttcccgatccctcgtttgcgaaaattgtcgtgctgacggacagccaggccgcgcgtgagacgctcaagttgcgcctgcgtgaagcggtggcgggcgggctggcgccggaggcgcgtatccgcgtgactcaactggtgtttgggccgtattcaccttatccggtggcattccgcgtcatggggccggatcccgccaaactgcgcgagattgctgagggcgtggaaagggtgatgcgggccagtccgatgatgaggaccatcaacaccgactggggcccgcgcgtgccgacgttgcatttcgcgctcaatcaagatcgcttgcaggcggtgggattgacctcgaatgcggtggcccaacagcttcagtttttgctctccggtattcctgtcacctccgtacgtgaagacatccgctcggtgcaggtcatggcgcgcgcagcgggcgatattcggctcgatccggcgaaaatagcgggttttaccctcgtcggatcttccgggcagcgcattccgctgtctcagatcgggacggttgacgtgcgaatggaagatcccgtcctgcgtcgccgcgatcgcacgccgaccatgaccgtgcggggggacattgccgaaaacctgcagccgccggatgtctccacggcaatcatgaaagcgctgcaacccaccattgacgcgcttccggccggatatcgcattgagcaggccggatccattgaggagtcggcaaaggcgaccaaagcgatggcgcccttgttcccaatcatgattgccgtgacgctgttgatcatcattctgcaggtgcgttcgatgtcggcaatggtcatggtgtttctcaccgcgccgctggggctgattggtgtggtgccaacgttactgctctttaaccagccctttggcatcaatgcgcttgtggggttaatcgcgctgtcgggcattctgatgcgcaacaccttgatcctgattggccagatccatcacaacgagctgcaagggttggcgcctttccacgcggtcgtggaggcgacggtacagcgagcccggccggtgttgctgacggcgatggccgccatattggcatttatcccgctgactcactcggtgttttggggaacgctcgcttataccctgattggcgggacgtttggcggcaccgttatcacgctggtgtttctgccggcaatgtatgccatttggttcaagatacgcccagacgatcggcagcagaaggaaaaggctgcgtcttag

SEQ ID NO: 431246 - DNA, 1110 bp, Serratia marcescens
atgctccggcttaaccccgccaccttcgctatttgcctgttgccgtttgccctagcggcctgcaacgacgcttccggtattgacgatccgcgaacgcaaccgcctttggtgagggcggcgaccgtagtcaatgccgtcgatacggctcgcgcattcagtggcgtggtcgtcgcacgcattcaaagcgacctcggttttagagtgcaaggcaaaatccttgaacgcctggtggatgccggccagagcgttaagcgcggccagccgttaatgcgtcttgatcctgttgatctgcacctgcaggcgcaggctcagcaacaggccgtcgccgctgcgcgggcccgtgcccggcagaccgccaatgatgaagctcgctatcgcggtctggttaccgccggcgccgtctcggcatcggcttacgatcagatcaaggccaccgcagagacggccaaagcggaactcagtgccgcccaggctcaggctaacgtggcgcaaaacgcgacgggctacgcggtgctgctggccgatgccgacggcgtggtcatggatacgttggctgaacccggtcaggttgtcagcgcgggtcagcccgtcgtccggctggccagggcggggcaacgcgaggccttggtgcagttgcccgagacgctgcgcccggcgatcggaagcgaagcccaggctgcgctgtacgggaacgataaacagtcagtgcctgcgaaactgcgcctgctctccgatgcggctgacccagtgacgcgaaccttcgaggcgagatatgtgcttgagggcgcgctggcgagcgcaccgctcggctccaccgtcacgctccacattaccgaagataaaataacccgtcaggtagtgcaggtgcctttggcggccatctatgatgcgggcaacgggccgggcgtctgggggattgtcggcaagccggccaaagtgtcatggcgatccgtccaggtgctgagcctccgggacgatgcggcaaacgtcacgggcgcactgcaagccggtgaacaggtggtcgcgctcggggcgcatttactgcatgacggcgaatctgtacgcacggcgcaacaagacgctggcgctgtcgcggggagccggccatga

SEQ ID NO: 431247 - DNA, 615 bp, Serratia marcescens
atgactgaatacacaaatgcgaatccctctcggggcccctctgaccatagtgtccgcgatcagatcgtggacgccgccacggagcatttcgggcactttggctatgaaaaaaccacggtatccgatctggctaaatcaataggcttctctaaagcctatatctataaattctttgactccaagcaggcgataggcgaggtgatctgcgccaaccggctggcgacagtcatggagattgtcaatgcagcgatcgcagaggcgcctacggccgccgaaaaaatgaggcgcttattgagggcgctcactgaggccggcagcgatctgttctttcacgatcgcaagctgtatgacattgcggcggtggctgcgcgcgataagtggccttccgccgtgcggcatgaagagcgcctgcggcaacttgttgagcacattatccttgaaggacggcagacgggggaatttgaacgaaaaacgccgctggatgagaccgcggatgcaatatatctggtcatgcggccttacatcagcccgatacagctgcaatgcaatctggagacggcatcctcagctgccgcgctcctgtcatcgctgatactgagaagcctgtcgccttga

SEQ ID NO: 431248 - DNA, 759 bp, Serratia marcescens
atgagcaagttgataatggctatggcgttactgtttactgttctcatgatgcaaggatgcaaaaaaaacatggaatatgaaccacaggatttttttgaaggccgtcaactggaagtcgcgcagctgatttatgatggcgacgaagtgaaactgaatgagaagcttccttcaataagcaaggaagaactgaatcgaccggtgaaagcagacatgaccctgctgttttggtcggtgttgaactcaatctatgataaaaacacgccggaaaggctgaaaataataaccgacctggttaaagctggcgcagacccgttgcagcccagaccggaagggggaagcagccctgcggaatttgtcatgaaagccgacaaggggatttgggccaaagccatgctcaacggtggtttaccgccaaacgcaaaagataaggtattcaatgaacccattgtattccaaacaatcaaagccaaaaacactgaaacgttaaaggtgatgctggattatggcgcggatataaatatcagagactccttgcaacaaaccttattaatggatgctttttttagctcagcctttgagcatatgaccttactgctcaatcggggtgcggatcctaacccggtaaatataaacaatctttcgctgttaacagcagtgaatcggcaaataaaagacagccaagatggctcagaatacaatgaacagtgtaagaaaatactcgagctcatgcttttgaaaggagcaaaggaagcacagtaa

SEQ ID NO: 431249 - DNA, 2445 bp, Serratia marcescens
atgttaaaggggtttgatataactaaagcaaagacacaagaagtagatacagaactgcttaagcgcagaatctccacaggaaaagccatcgcatttacgggtgctggtttctcatttggaactgaaaatgtgctgggttctgttccaccaatggctggagaacttgcaaaaaaactcagcctattatcaaatttagaagaatctgaagatttaatgttcgcagctgacgttgcagttgagtacgcagatcgcatttcagtattagatttacttaaagataattacactcttaaatttgtttcaaacagccatgagaacatatgtaagctcccgtggagaaagttttttacaactaactatgacaactctatagaactcgcatgcttgaacgtaggtaaacgtatagaatccgttgacttatcttacaagccgacaacttatcttaaaaaaaataatgtttgtcttcatattaacggtaaaatagaaggtgccgaacctgaagatttagtctctaaaataaaattatctgattcctcatacctctctccagattctttcgtaaattcggattggtactatcactttaagaaagaccttgaaaccgcaagtgctatcgtattcatgggatactctatgtatgacatggatgtgaaaaaatttctatttgaaaatccagtattgcaagaaaagacttacttcgttgtaagaaatggtgctgattttaaagaaatattcactctcaggaagtatggacatgttttatccataggaattgatggcttttcggaactggtgaaggatgttcaaaagcaatcagatgaagatggggttattttcactgagtccttagtaaagcatgaagtttttgacacacaacctgagtttcgagacattgatagtgaacgactttttctttatggtgactacgagatagaaaaacttcatgattctattagaagaattaaatccatcccttattttatcaagcgtgatatagtttccatttgccttcaaaatataaatagcaataataacgttattattaccggggacttagggaatggaaagtctataattttggagatgttagcttacgagttgactataaatggatatcacacatatattttacgtaacagtgatggtgattatgtttctgatcttgatcaaatctctaggcatgaggatacagctgtagttattgttgataattgctctaattaccctgatttgattagacacatctttgaaattaaagctgataatttaacttacgttattgcagatagaaattcaaataacattaaagcaaatgtatctctcgattttatagagcacaatatagatttactatctagcaatgagattgaaagtgcagtaaaaattatagataacttagctacatggcaatacttttcttcattatcccctgaaaggaaaaataaattagtatctgaaaaatacgcttctcaattatctcttttgcttttaggacttatgaatagtccaaatataaaaacaaaaataaagcaacaaactgatttgatatattccaattcagaccacaaaaaaactgtcttttgtatttgcatttgtgaaatagctaatgttgaaccaacatcgagtttagtatctgaaatttcaggaaccaatgccatttataatacttcactccgaaactccccaccatttaatcaactttttaaagtcaatggcacaacaatcaaatcaaagtcgagtattatgtcattgtctttactaaataatacatttggcgatatttatgtaagggatgttctactggagattgttgagagaactgacacattaaaagatcaagacattgaaataaaaaaaatatttaaatctctattaagatttcatgtggttgaaagagtattaccacaaaatcaatctgctttagatagatattacgagcaattgaaatttagatgtacatggttaatagatagtcctcactattgggtacaatatgcaatgtgtaggttatctttttcagactataaaagagcacaaaactatctaaccaatgcttatgaaagagctgaaacaaaaaatggaacttatcatactgataatattgatactcagcaggctcgtttatatctcaatcagtgtttagataataacaatgcttcagagtcttataaattctttgataaggcccatgctcttcttgaaaagttacctaatgaagggcgaaaattcagacaagtattgttatataaaaaagtttttgattcaaaataccaaatatttagcaggaaaaacaaagtagattttgaacagtcatgtaagaaagtattggagcaaacgaaatctaataatgattaccctctgaatactagtatggcgcgatttattacttcagcagaggaagtgttaactgatataatcaatgttattatgcgcgaaagaaactaa

SEQ ID NO: 431250 - DNA, 981 bp, Serratia marcescens
gtggtttcaattcaacttttgcgagcgatagccgcgttggcagtggtgctgtaccatgttggcagaaagtctgactttctcgctataacaaatgggaattattttgaagttggaaaatatggcgtagacttgttcttcattatttccggtttcattatggcctatatcactcatgggaaatcagttaattttatttcctttatgaaaaaaaggtttgttcggattatcccaatatactgggttctaacttcagtagcacttgccgtttttattataagcccatcatctgtaaatagcactatggctcctcccggggtcataaactcatatctgttgtttcctgttgaaggaaaatcaatgctgctcgaagtggcttggacattgcgatatgagttcattttctatatcattttttcgctatctcttttgacgccaaatagatatgtgactgtttcagtattacttggagttgtttgggcttgttctaaattttcttatgaaaattactatattggatttttcttcacccattacatgggagagtttttgctcggggtattatcattccttttctacacgaaaggaaaatcgttaacactggttgtcttgtcatcgattgccgcgttggtcggttatttttatggcactcatgatggtgtcctcacttatggtttgtattctaccgtattgttcaatgtcttcgttatgcttgaagataaaataaaaagtaatgaaagtatggttaggccgctctcttatttgggggatgcgtcttactctatttatttggctcatctttttattattgccgccgcaggaatactctataagcataccgagtttatgaacgaccctatcttgtttaacgtcagcacgttggttgcgagtgtgtttttctcagtactgttctacgagtttgtcgagaggataatcacgcgtaaattaaccgccattaaacatgccgctccttcggtaggttaa

SEQ ID NO: 431251 - DNA, 540 bp, Serratia marcescens
atgacacaaagcggcaagcattattctaatgatttcctggtgtttgccacagactacgtgcactggccgaaacgcatcgaagggtcggtgctggcgagcgatcagttctatcagtatcaggccgccaggcggttggcgcataaactggcgaccatagaaaaaggacgcatctttatcaccgtttccttccctgaaacgcctaatgcaccccaccagtgcggcatcgcgccgattgaaaccacattaatactggacgattacctgcggcagcgcggtgcgcaacaccgatctgggcgatattcaaaacggcgaggggtgactaccggccgatcgccaaacactgcaggtttacggccagcagggtatatatgcgatcggcgacaccgtggatctgcagggggatatagggtgggcgttggcacaataaaaaacccgccgcggcgggttttagcagaagcgagcgttacatctgttgtgtcgctgcggttaccggcgaaccgccacctttcttgcgtacccacagccagtaggccacggtga

SEQ ID NO: 431252 - DNA, 465 bp, Serratia marcescens
gtggcggcttacccgcagaaatactatggcaatgagaaagacgggatctacgtcgacgcaccgatgcacacggtgccaacgcatgatcggttcggactcaccgaggtgcaatgtgagccgacactgctcactgacgaccaacgtgcctggtgctgcatgtgtttgatggacgaatacagcgacgaaccggacgacagccacctgttcccggcgccgcgcccgcagtttatccaggtcggcgagtacatggtggtcgacatatgcatgcggatattggagccgcgcgaactgtataacgccaatggtttcccgcaaagctacatcatcgttcaggacattgactgcacgcgctggccgaaatcggagcaggtggcacgttgtgggaactcagtgccaccaccgtttgcggaggcgcttgtcagagcgaatatgccacaatattgtgcatggcctatggttgcataa

SEQ ID NO: 431253 - DNA, 1011 bp, Serratia marcescens
atgtctgaagaaaattcaaaatcgaatggtggcaaggcaagagctaaggctctttcggcagaacaacgaaaagagattgcaaaaaaagcggcagaagccaggtgggacgagtcgattccccgggcaagtcatgagggtgacttcaatatcggtggtgcattgatatcagcggcagttttgcctgacggaggtcgtttactgacgcagagtactttcttgaaggcaataggtcgctctcgttcgccgaagggcggtactggcgttttgagtacggtcgacggattaccattcttcttgcaagctgatgtgctaaaaccctttgtagataaagaattgattgagtcgaccactccaaaattttttaggcataaaaacgggaaaaaatcggttggatacgatgcttcactcctacctaaagtcgcagaagtttatttgaaaatgagggaccaattcctacgtgaggggaaaagagttccgaaacaatatgaacacctcgtcgcagcttgtgacgctgtaatgcgtggccttgctttagttggtattgtggcactcgttgacgaggctacaggttatcaggaaataagagatagacacgctttacaagcaattctagataaatatcttactgcagagaaagctaagtgggccaagactttccctgatgacttttacaaaaaaatatttaaattacgaggctggaaatatgatccgggttcagtaaaacgacctggtgttattggtaaatatacgaatgatattgtttatgaccgcttggctgttggggtgcttaagaaattaaatgaagtaaaccctaagacagacaaaggttacagaaaagctaaacatttccaacacttcaccgatgactatggtatgcctgaactgaaaaaacatattgagaacgttatgttcttgatggatgccgctggggacgactgggatctcttcaaatcactgcttagccgtgctgcacccaagcagggagacactatccctatgaatctagaataa

SEQ ID NO: 431254 - DNA, 222 bp, Serratia marcescens
atggataaatacagctcccagatttcgtactgggtcgcttcgctgctggccaccgctggcgccatgacattgcaagattgggccggattagtggggatcctcgttgccgtttttaccgctggagtgaactggtactacaaacgcaaattggtcaataagctcactgccgtcggttatgacaaagggcgcacgaaagcagcctataaagcgatgagcgagtga

SEQ ID NO: 431255 - DNA, 222 bp, Serratia marcescens
atgtctcattcatcagcgaggaaaaaagtgttgaatacagcaatgccgttggcacacagagcgtctcacgcgcgcagttgtgctaaccatgtggcaaaccggttgggaatgactcgcagtgagcttctgataaaagttgagaaagagtcaggctcaaatctggaatcaccgctaactgaagaagagctgatgaacgcattcaactatatggaaagcctttag

SEQ ID NO: 431256 - DNA, 531 bp, Serratia marcescens
atgcctctgcctgagcgaatgagacccacaaaagtcagtagtaaaaagatcaatgaactggcaaacaaagctaagcagatactttcaagaattgacgaaggttttgacgaacaagattccgttttagaagcaatgataggcgaatggaacagccaggttgcatgcccctatgcgctttcagatttcagagatttctcctcctggaccagtgccagggagttcacccgcatggctttcaatctggaaaaattctatgcggattttacctgggatgaattggttcaaacacttcgctgtgtgtctgatgccaaaagtaaggaatccgaacaaaatttcgctcttgcactgcttgagaaaaattttgatggcaatccgtcagacctcattttttggccggatgaatggttccaggatcctgatatgttccatgttgaactgacaactgaagagattgccggctatttaatggcccgttctggcaggcatttagctgatgcacctgaaatagagttaaagtatccgatcccatga

SEQ ID NO: 431257 - DNA, 1179 bp, Serratia marcescens
atgcgcatcggaattgcgagcaatggataccctgaaaagcggtgcattactgaaaacaaaagtaatgacttcatcaactttgataaaagcaatatttttaaatatattaattttctgagcagcaaactactaaagaaagcaccatcatttatttttagaccgctcatagttaaaccctcagataatattgatgtattccatttcttcaatcacaccgggttaataaaaaataaatggatttcaacctttgaaactattatcccgagagtgcctgaaataatggatgttcacaggaatccggatggaaaaaataattatgaaaagaatgaaaaaattggcaccttgctgtcagctatcgccgaaagcaattgcctcagtgttttagcgttatcgcaatccgcttatgatattcaggtggctatgcttgatgaatacccaacttttgccgcttcaatcaaaagtaagatgcgtatcgttcatccgcctcagcaactgttagtggctgcagtaacagacaaaccggtcgattcagacagggtaaagctcatctttgtcggccgggacttttaccgtaaaggcggtgcagaaatcgtccttgccattagcgagctggttgagagcgggactatttcagcagacgacattgatgtcaccttgatcggcgatctgagcaaaagagataattatgttcatggagaattcaaagatgatatgcagttttatgaacgtattgaattccttgtaaaggatctatcctgcatttcccattttgcatcgcttcctaacgagcaagtaatgaaaaaattcattagcagccatattggtttgttgccgacatggggtgacacttatggttattccgtattagaaatgcaagcttgcggatgtccagtgataacaaccagcgttcgcgctctgacagaaataaacccctccgaatcaggttggatgatcgacgttccatgtaataaattcaaagaaattgtcatcagtaattatgatgacaaagaagaaattcgcaatatcattataactggcataaagaaaaatataaccaatgccgttgctgacaaaaaagcaatcagtgataaagcacaagcatccatcgaaagaataaaaaacgcgcatgcccccgatgcctatttcaaactaattaatactatttacgaaagtaaatag

SEQ ID NO: 431258 - DNA, 321 bp, Serratia marcescens
atgggcaaaccgtttggcggccgcgccataccccagaaaggggccattataggggccggggcggggtgggtaaaggcggttatcccagcggcaaatcagcgggttaaccgagcctggccgatcaaaacggccgcagtcatatcactgcggcgaatgaaagaggcgggcgctgcagcgcccggcgggaagggttactcggccttgggcgagcgatcgcgcatcacccactggctggcgatcaccagcaccagcgacagcagcagcaaaatggtggccagcgcgttaacctccggcgagacgccgactttcaccatcgaatag

SEQ ID NO: 431259 - DNA, 984 bp, Serratia marcescens
atgaccaaaaagccggaattctttgctgaaacgccgccgtataaagaggatgaggcagaacccttctccttcaagcgcgacgccttctccgaagtgctggagctgattcgcgtgcgcggcaatacggtgttcacctgcgcggcatcggcgccgttcggctggcgtttccccgccggcaagcaccggctgcacatcatcagaagcggcaacgtggtcattgaagcggagggcgatgcgcgggtataccacgcctcgcagggcgatttggtgatgctgattcacggccacgcccacacgattgccgaccaaccgggccgcccgacgcacagtctgacggcactggcgcacagccactatcaccgggagagcctgacgctcggccacggcgaaaccacctggctgtgtggtgatttcggctttgacggcatgctgtcgcagcgcctgctgtcggtgctcccaccggtcttgatcctgaaaggcctgcgcgaacggccgttcgagtggctggagctgagctgccgtttcatactcgacgaggcgctcacgccacgtgcgggcgccgccgccatgatctcgcgcctgctcgacgtgatcttcgtgcagctgctgcgcacctgggcgacggaaggcgaagccgggcacggctggctttccggtgcgatagactcgcgcatcagccccgccatgagcgctattcacgccgagcccggtcgcgcctggaacgtgccggaacttgccgcgctggccaatctgtcgcgttcggcctttgccgaacgtttccagcgcattgtcgggcaggcgccgctcagctatctcaccagttggcggctggatcgcgccgcagagctgctgcgttacagccgcgcttcggtagcgcaaatcgccaaccgggtcggctatacctccgaagcggcgttcagtcgcgcgtttcgcggccgttaccagctctcaccgatgcagtggcgcaagctggcggctatttag

SEQ ID NO: 431260 - DNA, 780 bp, Serratia marcescens
atgacgccgctgtcgtgggagcattggatcactcgctacgagcagcggggcatgagggtgatcgcgcccggctatccgggcattgaacccggcgttgccggcgttgaggcgctgcgccgcgatccctcgccgctggcaaatctgggtgtgcgtgaggtttacgaacacctggcggcgattatcggcgcactcgacggaaaaccgatcatcatggggcactcgttcggcggcgcgtttgtgcagctgctgctggatgccggcttcggctctgcgggcatctctatcgacggtgcggcagtgaaaggagtgaaggcgctgccgttcagcgaaattaaagccaccttcccggtgctgcgcaacccggctaacctgcatcgcgctgtgccgattagcgagaaggaatttcactacgcttttaccaacaacctgagcctggaagcgtctaaagcggtgtacgatcgctactcagtgccggtatcggggcgcatgctgttccaggggggattggccaactttacgccggacgcggcgaccacctacaactttgccaacggcgatcgcgcaccgctgctgtttatcgccggcggcaacgatcatattttgccgccggcggtgcagcgtgagaactatgagaaaaatgccaagggctcgcaggccatcagcgcttacaagctgttccctggccgcagccactatacctgtggcgaacagggttgggagacggtggccgatttcgcgctcgattgggcgcaggcgccggtggcgggtagcctggactga

SEQ ID NO: 431261 - DNA, 1230 bp, Serratia marcescens
atgagcgacaaactgctggatcccccctgtgcggtgctggggcgcctgccggcctccttggtgctactgttagccgccgccagcgccttcagcgtggccaacgtttattatgcgcagccgctgctggacgctatcgcccatgatttttccatcagcctggcggcggtcggcatggtgatcagcgtgactcagttgggctgcgcgctggcgctgctgttggtggtgccgttgggggatcggctgaatcggcatcggttgctggcggggcaacagctagggctgatcggcgcgctgctattggtgagctgggcgcacagcgcgccctggctgctggtagggatgttgctggtaggcttattgggcaccgccatgacgcaggggctgatcgcttacaccgcagccctggcggcgccgcaggagcgcgggcgggtggttggtgcggcgcagggcggagtggtgctgggattgctgctggcgcgcaccctgtccggcgcgctggcggacatcgggggctggcgcacggtgtatttcttctctgccggagtgacgctggtattgctgccgatcctgtcgcgcctgctacctgcgccgcgcaccgctcccagtatgctgagctatcccgcgctgctgcgttcgatgttgagcctgttgctgcatgaccgcacgctgcaaattcgcggcatgttggcgctgctgatgttcggcgctttcagcctcttttggagttcgctggtgttgccgctgagccaggcgccgttcaacttcacccatgctgcagtgggggcgttcggcctggtcggcgcggtgggcgcgctggcggcggtgcgcgccgggcatctggcggatcgcgggctggggcaggtggccagcggcgtgtgtctgctgctgttgacgctggcctggctgccgctcggtttgatcggcagcggcctggtttggctggtggcgggcatcgtgctgctggatctggcgggtcaggcgatccacgtgctgaaccagagcatgatcttcagcgcgcacccgcagtcgcacagccggctggtaggctgctacatgctgttttacgccgtcggcagcgggctgggcgcctgggcgggcacccatatgtacgcctgggcaggctggagcggcgtctgctggctaggggcaggcgtcagcctgagcgcgctgctgttttggcggctgacgctgcgcgggatgccgccctcagcgacggcggtggagcagtga

SEQ ID NO: 431262 - DNA, 1317 bp, Serratia marcescens
atgcaactaaccgaaacggatcaggcataccttgccggcgcggccgggcctggcgtgcaaaagtgcatgcaggtgctcgtcaacttttcgaaagcctttggcgcgccgaagctggttaatatcgccagcgcgcacgttattcccaatattcccttggggctgctggaaacgctgacggagggggtagaaaccctgcctgtcatgaccaccctgcatccccacatgtccgcgctttgccccagcgcctggccgtcgatgggcatcgacacgcagtatgcgcaggcgaaacttcccgatgtgaaacgccgcgcggcactgtttgcggagaaaggatttaatcaaacctatacctgctacccggcgatggtgggcagcctgccgaaaaaaggcgactacgtctcctggatcggttccggagggcaggtgctggtgaattcgatcatcggcgcgcgctgtaatcgcgacggggcgttactcacgctggcggcggccattacaggccgttcgccttattacggactatttctggatagcaatcgcctggcggaggtgcaggtcacgtttgacgggctcgatgcgaatcggctctcaaaaacggagcttagcgcgataggttattacctgggggcgcaggccaaatcgcataatatcgtgatcgagggcatcgaccgtgaactcggcatggaccatcttaagcagatcatgatcccactgacggtcactggctcggtgggggtttgtcatgttctcggggtgacgccggaagccgacacgctgaaagaagcgcttggcgggcgccgcccggtgaaaaagatttcggtcggccgcgagatattgcgtcagtcgctggcgcagtatgcgccgaagaacggatcgggctttcctctgttgccgccgcaggccggcgtgacgccgaagcgggacatggcgccgaccgatatggtggtgttggggtgcccgcacctgaccatccaggagatccggttactcgccggtttgctggcggggcggcatattccgcgccataaacatttgtggatcgggttggcgcatcagcaataccagctcgccagggaaatgggctatgcggcgaccattgaacgcgcgggcggcgtcatggtcagcgcctgcatgtccaccattcctgattcccccattccggcgcacgtcaattccgtactgacgtcttcgatgaaagcggctcattacatcacgcagttgaatcagaaacgcctctgcgtaggcgttgcggacatcgaatgttgtattcagtcattgctcgattcaaccgccctcacaccgaaggtaaccgcatga

SEQ ID NO: 431263 - DNA, 399 bp, Serratia marcescens
atgaaattacaagccagatcgctgaatcccggctgcgtgatcgccgaggcgtttctcgtcgaacaggcattttcgttcatcggcgacttcgatcctcagaccggggcgctgctgatcccgcatcatccgcgctatggggagtcgttggcgggaaaggtgctggtgtgcccgggcggcaaagggggaaccatggcgccatttttgatttacgaggcgcttcaactgggtaacgcgccggtggcgattatttgcaatcgtgcggacccgattctttttgagtcggcgatggcgatagacatccccatttttgacagcttcgacggggacgttttggcgctgttcaggcatggccagcaggtggtcattaacggcgaagatattgccattgcggcgtgttag

SEQ ID NO: 431264 - DNA, 327 bp, Serratia marcescens
atgcatcaactctacagctacctttgcgctatccatgcgctgccgtcaccggtaaaaacggtcaataagacggagaccctcgagcgcttccaggaaggggaaaacatgatcgaagaacgtgaaatactttacgcgttcaataatggcgttcaggttttatataaaagggaatcggatacgttccaatcggatgatgtttgccgtgagtgctgggtaagttatgaagtggtgcatgacggcggatatgccatttcaccgcagaaaaagcagttttataatcgctgccaggaagaattctggctaaaaatgcagtctgaatacgcttga

SEQ ID NO: 431265 - DNA, 1704 bp, Serratia marcescens
atgataatgatgaacgatgagttggccgatgctatttttgatccgcgtggagagaaccaattttacgaattaaagttggcgccgcgccccagcctgcaggcattaagggacggcaaagtcctgttttttgacaataccaagttggatttctgtcattaccgtgaaatattcacccgtctcgaggcggtgttgaatgaaaacggtattcaccatatcgaacatgttcgtcagtcggtgcgcggcaccatgacggaacagattcgcgcgctggcggacaatttggcgcaaaggcaggttcaggccgccgtggtggcgttagccgacatgggaacgtcggtgatgaccaccatcctcgccattgaactggagaaaagagggatcgccacgctcttgatcgcctcgccccccggagacaatctggccgaacacgtggcgcattaccgggcggggcagctgtgcatttgccgtctcgatatctatcaggcaagcaccgtcagcgatatccgccgtcaggttgacgcccagcgcgcctgcgtgttggcggcgcttacttgtgccggcaatacgcaggccgccgctgcacttcatccgaagatggaccgcgatcggcacgtgtccggggcggaaatgatgcgctacagcggcctggacgcgctgatggcggagtatgaaagcctgtctatcggcgatggtttgccggtgatcccgccgacgccggcgcgttttgccgccatgctggaatactgcgccgagccgctggataccgtgctgatccctgaggcggggccttcaggcaaaaatatccgcgtgcgggatgtcgtcgtcaacagcattctggccggctgcaaacccgcatacttgcccattgtgacggcgacgctccgcgccatggccgatccggcgttcaacttccagcaatccatcaccacctcgtataacggcggcaacctggtgctggtcagcggcccgattgccggcgaactggggatcagttctggccagggctgcatgggaccaggatttcgtgccaacgccaccattggccgggccgttaacctgacgatcctcaatgtgtgccgcgcctacccgggcaaagcggatctgggctgcctcggctcgccggttgaattcacttactgttttgccgaaagcctgagccacagcccgtggccgacgttgaatgaagagcggttcgggcctgaggcgaccagcgtgtatctgatgaaggcggaaccgccgaccgacgtggtcgattttctgagccaaacggcggacagcctgctcgaggtgattgtcgacagcgccacccatctggggcgcatgaacgcgtatatcccggggagaatcttgattgtcctgacgcccgatcacgcccaaatgctgcagaacgcgggctggagcaagggcgcgctgcgggaatatctgcatgcacatatccataacccgcttggcgccgtgcagggcaaaggcctggtgcccgtgaggccggcgcagtttgccggccgagatcccatgccggcgacgcgcagcgcccaggatgtcgatctggtcgttgcagggggacggggcgggcattccgccattttggccagttgggggctctattgtgatgcggtgctcacgccgttgacgctgcccggcgggcaacttgcgcgcacgatcgaggattttcattcccccctgtcagctcaggagagccgttaa

SEQ ID NO: 431266 - DNA, 1254 bp, Serratia marcescens
atgccaaccattatagatatatgcgcacgtgaagtgtttgactcccgcgcggacattacgcttgaggtcgaagtcgtgttggacagcggtcaacgcggccgcagcatcatcccgacgggctgttccaaaggcaagcacgaggcgatagaggtgcgcgacaacgatccgctgcgcttcggcggccagggcgtcttgcgggcgatagacatcgtgcacaccgtgattaaaccgcagctgtgcggcctgtctccttttgcgcaagaagagatcgaccgcatgttgatcgcgctggacggcaccgtgaataagagccggctgggggccaatgcgattttgggcgtgtcgttggcggtggcgaatgcagcggcggtgcaaagcaatcagtcgctgtgcgattacgtcagccgcggccgggaaaagtccatgccgcagcccattttctccatgttatccggcggcatgcatggcgatggcaactgcgattttcaggattatcaggtgattgcgctaaaagcgccgcatcttgaagcggcgttgcaagtcggcaagaacgtgcatatggcgctgaaatccctgctgatggcgcgtgggatcagcactggcgtttccggcaccggcggcttcctgccgccgctaagctccaatgaacaggggctggcgctgctgctggaagccattgaaaaagcgggctatgagccgggtgtggaggtcgggttgagcatggatatcgcggccgaaatgttctttaaagacggccggtatcacctggcggctgaagggcgaacgctcacgaccgcggcctttattgattacctggcgtcgctctgcgggcgctatccgatcatgctgatggaagatccgctgggagaggacgacttcgacgggtgggtcgcgctgacgcgccggctgggcggcgaaatagagctggtgggcgacgatctgttcaccaccaatctggcgcgctttgagcagggcgtcgccatgcggatggccaactcgattttagtcaaaccgaatcaggtcggcacgctgagtgaaaccatgaacctggtggcgtcagccaaagcggccggatacggcatcgtgttctcacggcgctccggtgaaaccgaggacaccagcatcgccgatttagcggtggcgctgaacggcaccaaggtgaagtttggctccctggcgcgtaccgaggcgatggccaaatacaatcagctgctgcgattacaggacgcgatcgccagtgcgcagagagtctga

SEQ ID NO: 431267 - DNA, 711 bp, Serratia marcescens
atgaagccgatgtctttctttgttcagggcaataaagacgccatgcccctgttgctgggcctgttgcccttcgccgtgctgaccggcgtcagcgccattcaggcgggaatgacgccctgggttgcccagctgtcgtctttgctgctgatgtctggcgcctcacaaattgccgctgccacgctgatgacagccggcgcggcgccgttcgtcgtgatcgtcacgcacattgcgatcaattttcgctatgccatctacagcgccgggctgtctcaactgaagcttcatttcactccgctgagcaagctcgcggcggcgcaggtgctgatcgatcagacttacgcgctgacgtttttgcgttgtcaggcccagccgccgagcgcaaaagataaaacgctgtattactttggcacggcgctgccgatgtggctggtgtggcaagcgggaacggcggtagggatcctcgccggcccgcttattcccggcggctggcatctggagttcgccatcaccctgtgctttatctccctgttggtgccgatgttgaaaaacgcccccatcgtggtggcagctacctgcgccgggctgatttccgcctttaccagcgggtggccctataatctgggattcttgttttccatggccgcgggcgtattggccggcggtctttatcacaagacccgatggtctcaacgcagtggggaagcgtcatga

SEQ ID NO: 431268 - DNA, 321 bp, Serratia marcescens
atgagcgagacgacgattttatgggtgctggtcatcagcagcctgggtacgtttctgctgcgctactcctttctgtggctcaatgaccgcctgccgtttcccgaacgggtgggcgagtggctgaaactgatcccggctacggccatcgtgtctctgatcgtgcctgccttgatcgcgtctccctcggcgttgacggttgaaggggcgccaaaactgtgtgcggcgctggtggcgacgctggtgatgtggaaaacgcgcaatgccaccttgatgctgctgctcggcatggcgacgttttggctgagcggcgggcttggctga

SEQ ID NO: 431269 - DNA, 840 bp, Serratia marcescens
atgccagaaatcactgaatccattttcgtcaattcagatctgcttaatgaacattttgaccccgacgccattgatacgcccatcgtgtcgatctacgcctctttctcccatgagaaagaacactcgttgcgttcgagaatgcactcgcataccaaaggccagttggtctatgtcaaatcgggcgccgctatcgtcatgttggaaacgcggatttgctctgtgctgccgcaccagctgctctggatcccgggcggcgtttcccacaatgtgatcctccgcgacaatgtcgattttcgcgccgtttacctcgaccaaaaacgcttcgcgtcgctgtcgaaaagcgtcgaaatatttaccgtcacgccactgctggaagaggttatcgaggccatgtgccgctcccctttccacaccgactggatggcgggaaccgagttccatctgcaatccctgctcatcgataaaatccgggtcgccgcccattcccccacctggccggctttacctaacgattcccggatacgcaattacctgcagtgttaccacctgaaaggcgaaatggtgccccgattgaatgagctggcgtcccactgcggcgcatccgagcgcaccatccatcggctgttcgtccagggaaccggcatgtgttatcagcagtggcgccagcaggtgcgtttgcagttggcgctggagttgctcaccaccaataaaccgatcaccgagatcgcccactatctcgagttctccaccaccagcgcctttatctcctttttcaaacactaccgggacatcacgccgaaaaaataccgcgaccaattgcccaggcccaacgcacgttga

SEQ ID NO: 431270 - DNA, 390 bp, Serratia marcescens
atggacgacgaacgtatgacgtacagtgaaataagaggaatgacactggagtgtttctatgattgttgtaggcatatactctctactaaaaaaaaattaggggccagctcttttaaaccatcttatgatggttatgaaataggttatgcatcctatcaatttgaaaatactcctttttcgccgatagaaaagctgatgttcgaggtgttttcactcattcttatagccggcagagggccaaaagatgttgagaataattaccgaaactcaatttcttccattttggaaaaaacaaaccttgaatctctaattcaaggtattggcgaagatgaaaaaagcgatttgctttatgatatggagttgcttggattgcttgataagcccgagtaa

SEQ ID NO: 431271 - DNA, 1371 bp, Serratia marcescens
atgaccgttcatatccccgcccagccaacgcagcactcgccaccggcatcgcaaaatcgggatgccgagcgagctcgccacgaacaggcggtaatccaaaaattattccgcaggttgatgctgtttctgttcgttctgttcgttttctcttttctggatcgtattaacatcggcttcgccgggctgacgatgagccaggatctcggtctgaccagcacaatgttcggcatggcgaccacattgttctatgcgatgtacgttattttcggcattcccagtaacattatgctgggtattatcggcgcacgacgctggattgccatcatcatggtgatttggggcatcgcttcaaccgccacgatgttcgccaccggccccaacagcctgtatgcgctgcgcatgctggtggggatcgccgaagcgggctttctgcctggcttgctgctttatctgacctactggtttcctgcccattatcgtgcgcgcgccaacgcactattcatgatcgccatgccggtgacgatggctctcggttcgttggtttccggctatatcctcagcatggatggcttgatggcgctgaagggctggcaatggctattcctgctggaaggcttgccgtcagtgctgctcggcgtgatcgtgtggttctatctcgacgacagtccggcaaaagccaagtggctgaccgaagaggataagacctgcctgagcaccatgatggaaaaagaccgcctcaaccgcgagcaacccgagcgtcagcatgccgaaagcggtctctggcgcgacgttcttacgccaaccgtcatgctgtatacggttgcgtatttttgtctgtgcaacacgctgagcgcgctcagcgtctggacacccttgatccttaagagtttcaatcaagacagcagcaacatcgccatcgggctcctcagcgcagtgccgcatatatgcaccatcgccgccatgatctggtggagcaaacgttcggatcgtctgcaagagcgtaaacgccacacgctgctgccctacctcttcgcggccgcgggctggatactggccgcacacggcgccaccggcgcgatgcaattgctgggggtcatcatggcctctgccggcgcattttcggcgatggcgatattctggacgaccccggatcgctccattagcctgcgcgcccgcgcccttggcatcgccgtaatcaacgccacggggaatctggggtctgccgccagcccgctgctgatcggctggctgaaagatatgacgggaagcttcaatcccggtttttatctggtggccgggttgctgatactaggagcgtggatcgtggcgaagatacccatgagcgtcagcccaccgagagagaagacctag

SEQ ID NO: 431272 - DNA, 873 bp, Serratia marcescens
atgaattgggacgacgcgcgcttctttttggccgttgcgcgctgcggcacgctgcgcaaagccgccagccagctgcatgtcgatcaggcgaccgtcggtcgacggctgtccgctttcgaagatgcgctcggctccaagctgtttatccgcacgccgaagtccttcgccctcagcccgctgggggaggaaatgctggcggacgtgatgaagatggaaaatgcggtgcaggcgatcaaccgcaaagccgccagcggtgacgaaagcctgaacggcaacgtgtgcatcgccaccaccgataccctggccgaagccttcgtgatgccggcgctgcaagatctgcgggaacgctaccccgccatcaccgtcacgctgttaacggcgctgaacatcgccgatatctcttaccacggcgcagatctggcgatccgcggcgcccgccccgatgacgatgagctgatcatcaagcgcttagccaccatcgaaatgggtctgtacgcctctcagcactacctggcgcggcgcggcatgccggtcaggggcgagcagctacgcggccacgatctgctgatgttcccgcgcgagctggtgccgcgccactggaacaatttctgcggcgaggctctgcacgagcccaacgtcgtgctgcaatgcaattcgcagctgctgctgcgctccgccacccgcagcgggctgggcatcggcctgctctccgcgtttttggcggacaaagacccggagctggtgcgcctgttcccggagaacaaagactgggtggatatctggctggtgctgcatcccgatttgcaacgcgccgcccgcgtgcgcgcggtggtgcaggcgctggaaacgtcgtttagcgcccattacggctga

SEQ ID NO: 431273 - DNA, 738 bp, Serratia marcescens
atgaaaaaaaataaaaccccgccggagcgaggtttatctatcgtgcgacggcgccggcaacaattcagttttatcagattaccggcttatttgcgtacgcgtgagtcttttatgataaaaaataaaaccccgccggagcgaggtttatctatcgtgcggcggcgccggcaacgactcagttttatcatattaccggcttatttgcgtacgcgtgagtcttttatgaaaaaaaataaaaccccgccggagcgaggtttatctatcgtgcgacggcgccggcaacaattcagttttatcagattaccggcttatttgcgtacgcgtgagtcttttatgataaaaaataaaaccccgccggagcgaggtttatctatcgtgcggcggcgccggcaacgactcagttttatcatattaccggcttatttgcgtacgcgtgagtcttttatgaaaaaaaataaaaccccgccggagcgaggtttatctatcgtgcgacggcgccggcaacaattcagttttatcagattaccggcttatttgcgtacgcgtgagtcttttatgataaaaaataaaaccccgccggagcgaggtttatctatcgtgcggcgacgccggcaacgactcagttttatcatattaccggcttatttgcgtacgcgtgagctttttttaattatggcgacgcgcaagatattttactcgaccttattattccttatatcattaggaggcgaaaaataa

SEQ ID NO: 431274 - DNA, 279 bp, Serratia marcescens
gtgaatatcttccgtccctttggtgagctccagctcatcctgcccgacattgcgtttaccaacgaaaatagaaaatgtcaggccgcgtttgtgcgcttcaagcatgtagcgttcaaagcctggaagcagatttttcatcgcatcgatcgcttttggcaccgttggcgcccgatatttaaattcacggccgaaaaccttaatcatgggaccatgaaaacgaatggttctgagaggaatatcaataaaatccatacaacctccaataaaaagccccactag

SEQ ID NO: 431275 - DNA, 1278 bp, Serratia marcescens
atggaccatggcgtattgggtgttgatttgctaaagatagaaaggttatcagttccaaacatcctgcattttgtatggatcggtgacttaaatgaagtaaatacgcattatatcgacatatggaaaaaaacgaataaagataagcagatattcttttggtatgacaaagactcttcactgtgtcatttactaaacaatgccatacaagattttgtcaacgccaaaaaaatcaagaataaagtaggtgctgagttaaaaataaaaaactcagcttttaattatatatatccaaaaataaaggagggcttttcttttgatgagctagttattgattttttgataaaaaatgagatcccttatcaaagacagtcaatggctatagaagatgcatggtttgattgcagaggttttataaaaaagagtataacggaacttttttgcaacggttctgaagacttcattaagtattattattatgagattatattaaggtgtaatattgccagtgcaagcgacatcatcaggcttttaattatctaccaatatggtggaacttatgtcgatgttgatacgctcccatacactgataacatatatcatgggttaaataagcatatagaagaggagggcattatcgagagtgactcgcttctcttatttaagaccatctgttttttaaaaaagataaattcagaagagccacggtctgaagcagtgattggctgtgatgagaatgagctaggagtagatgctgttgggtttgaaaaaataaaacggcttatcgaacaggatctctctgatttttctatggatatgatattgccattgggggaaacatacgtttataaaaatttgttggcgctaggatcgctcagaagatttaaaggtgtttattttaataattttatatcttctcatcaaaaatcaaaagcgataaggatcatccttagaaccataaagaaaaggtatcgctttttggaaaaaaataattgcatatttgattgttacgttgatgataataccacgtgttacctgaccagacttttaacatggcggaccgagttaataacaaggcactattgtgtgactccggtcttaaccggtccgggattaattgtcgaggttttattggggttggcttataaagtattcaatattgaatattcagttgagccacatattatagcagagcacatgcaaaattctgattttggcattgcactattccaacacaacatagatacacctgatggcgcctattccacatggcgaaaataa

SEQ ID NO: 431276 - DNA, 267 bp, Serratia marcescens
atgaaaaatacccgttataccgaagaacagattgcgtttgcgctgaaacaggccgaaaccggcacccgcgtcggggaagtctgcagaaagatggggatttctgaggccactttttataactggaagaagaaatttgccggtctgggtgtgacggaactgcgacggctgcggcaactggaggatgaaaatcaacggctgaagaaactggtggccgacctgagtcttgacaaggaaatgcttcaggaggtgctaaaacaaaagttctga

SEQ ID NO: 431277 - DNA, 753 bp, Serratia marcescens
atgcagagcagaacggtttaccactggcagagccggcgtgatgatcgggcgataaccctgcgtatccgggaaatcgcggaaacccggatacggtatggttgcccgcgtattcatattcagttgcggcgggaaggctggcttgttaaccacaagaaaacccaccggatttattgcctggaaggtctgaacctgcgcagaaagcgtccccgcagacatgtcagtgcagcacgccgtcagcagcgcccgattctgacgcatgtcgatcagtgctggagtatggattttgtgtcggataatctgtttaacgggcagcgttttcgggcactgactgtagtggataattttagtcgggaatgtctggcgatccatgccggaaaatcgctgaaaggcgaagatgtggtcagagtaatggaagcacttcgggtgctggataggcgtttaccggtacgtattcagacggataacggcagtgagtttatttcgaaaagtctggataaatgggcgtatgagcacggtgttacgatggacttctcacgcccgggaaaaccaacagataacccgtttattgagtcatttaacggcagtctgcgggacgaatgcctgaacattcactggttcctgtcactggaagatgctcagaacaaactcgatagctggcgcagggaatacaatcacgaaaggacgcattcatcattaaatgacatgactccggctgaattcatccgaagtctccggaaagacgaagatctctga

SEQ ID NO: 431278 - DNA, 3138 bp, Serratia marcescens
atgaaacttaataagaaattgaagttagcgtattgcgtttttctggggtgttatggcttatccatacattcttctcttgccgcttatcaggatcccggtcggttgggcgcgcctgacagttggaaaaccgctgagtttaaccgccaatgggggcttggggctatttccgccgagtttgcctatgccagagggtatactggaaaaggcgtcaccatcggcattatcgacaacgccattctttcccattccgaattcgccggcaaactgacgcgattggacaacggcagttataatttctcgtacgataaacaagacaatatgtctttcggcgatcacggcacccatgtagccggtattgccgcagcgaaaagagacggcggcggcatgcacggcgtggctttcgacgcggatattatcggcaccaaattgaatgactacggtaatcgcaacggccgtgaggagttgattcagagcgcggctcgcgtcatcaacaacagctgggggattgcaccggacattcgccgtgacgccaaaggcgatatcatctggttgccgaacggcaggccggactacgtggcattcgtaaaaagcgacgtgatcggcgagatgatgcgcaacaaggccagtgtggaatggggcagcgaacagccggtgcctaccggcgcgcacagcgcgatgccaacgctgctgcgggcggcccggcacggtaagctgatcgtcttctcggcaggcaattacaacaactacaatattcccgaagcgcaaaaatcactgccttacgccttcccggacgtcttgaacaattacctgatcgtgaccaacctgagcgacgaaaacacgttaagcgtctcttcgaccagctgcgggcaaacggccagttattgcgtttccgcaccgggctccgatatttacagcaccgtcggccggctggagtccaataccggcggtgccgttaatcgcgaagcttataataagggcgagctttcgcttaatcccggctacggcaataaatctggcacctcaatggctgcgccgcacgttaccggcgttgccgccgtattgatgcagcgcttcccttatatgagcgccgatcaaatatccgcggtaattaaaaccaccgccaccgatttgggtgtcgccggtattgataatctgttcggctggggacgtgtcaatttgcgcgatgcgatcaacggcccgaaaatgtttattaccaaagaggatattccgcaggaatattatgtgccgggctcctacagtgaaaaacagttcgtggtgaatatccccgggctggggaatatcgtcgaagcgggcaccccggttgagcggcgttgcacgtcgagcgaatgcgacttcgatgcgtggagtaacgacatcagcgggcacggcggattgaccaaaacgggcgccggcacactggcactgttgggcaacaatacctacggcggcgatacctgggtgaaacagggcacgctgtcgatcaatgggtctgtggcgtccaacgtctatatcgaaaatagcggcacgttggccggtgacggcaccgtgagcgctttccgggccgttcggggcggcagcgttgcgccgggcaacggcatcggcacgctgcacgtgttgcacgacgccatttttgatcgcggttcgcagtataacgtggaagtggcggacaatggccgcagcgacaagatcgacgcacgacgcgcgtttctcaacggcggtagcgtgaacgtcagcctggagcacagcaaaaacctgctgtcgcagaatgaggcgcaaagtttgttgggcaacaaatacaccatcctgacgacgacggacggcgtcaacggccggttcgaaaacgccaacccagcgtatccgtttgttaatgtgacgctggattatcagggaaatgacgtcggccttggcatcacccgcaccgccgcccgttttgacagcctggccagcactgagaacgagaaagcggtggcccgcgcggtggaaacgctcaacgcgacggaaccggtcacggaaacggccaaacgcagcgtggcggcgcctagcgctgaggcgctgagcgcactgcaaggtgatgaaggcaaagcgcaagccgtgaccgaagaggcgggcggcgtcaccggccatccggtgtatgaaagcttcctcggcttcacgtcggccagagagctgcaacaggcgacccgccaactgtccggccaggtccatgcggatatggcttccgcccagattaacgaaagccgttacctacgcgatgccgccaccgagcgcttgcgccaggcggaaggccgccgtatcgcttccgatatcaaagcggatgataatggggcctgggcgaaactgctgggcaactgggggcatgcttctggcaacgataatgccaccggttaccaaacgtccacctacggcgtgctgttgggtctggatggcgagctgtttgacgacggccggctggggatgatgaccgggtatacccgcacctcgctggacggcggttatcagtcagatgctcacagcgacaactaccatctggggctgtacggcaacaaacgtttcggtgcgttggcgctgcgggcggggggcacatatacctggcatcgtatcgacacttcgcgctcggtgaactacggcgcacagtcggatcgcgagaaggccagctataacgcgcgcaccggccagctgtttatcgaaagcggttacgactggacgaacgacacggtcaatcttgagccattcgccaacctggcttatacccactatcgtaacgaggggatcaatgagcacggcggggcggcggcgctgcgcggcgacaagcaaagtcaatcagctaccgcttcgacgctggggctgcgcgcagatacgcagtggcaggccgatagcgtggcgatcgcgctgcgcggagaattgggctggcagcaccagtacggcaagctggagcgcaaaacgcagctgatgttcaaacgtaccgatgcggcgttcgacgtgaacagcgtgccggtttcccgcgatggcgcggtgctgaaggcgggcgtcgatgttgcggtcaacaaaaacgccgtcttgtctctcggttacggcgggcagctgtcgtccaaccatcaggacaacagcgtcaacgccggcctgacctggcgcttctga

SEQ ID NO: 431279 - DNA, 1221 bp, Serratia marcescens
atgtttaccccactgacgctgcccaacggcagccgcctgaccaaccgtctggccaaggcggcgatggaagaaaatctggccgccccgggccaactgcccggcccggcgctgtggcgcctataccgctattgggccgaaggtggcgccgggttgatcatcaccggcaacgtgatgatcgacggccgcgccatgaccggccccggcggcgtggtgctggaacaagacacgccgctcgccccgttcgaaacctgggccaaggccgcgcgccagggcggcgcacaggtgtggatgcagcttaaccacccgggccggcaggtgatggcgaacatgggcggcaacgcatgggcgccctccgccatcccgctggcgatgggcaagcacagcaagctgttcgcccagccgcaggcgatggatgaagcgcagatcgccgaggttatcgcgcgcttcgccgccagcgcgtacgctgccgaacaggccggttttaccggcgtggagatccacgcggcgcacggctacctaatttcccagtttctctcgccgctgaccaaccaacgcaacgatcgctggggcggcgagttggcgaaccgcgcccgcctgctgctggaggtggtgcgtgcggtgcgtgagcgcgtctcgccgggcttttgtgtagcggtcaaactcaactccgccgattttcagcgcggtggtttttcatcggacgacgcccgccaggtggtgctgatgttgaacgatctggcggtcgatctgatcgaactgtcgggcggcagctacgaaagcccggcgatgcaaggcgaaacggcagacggccgcaccctggcgcgagaagcctattttctgtccttcgcccgcgatcttgccgcagtggcccggatgccggtgatgaccaccggcggcatcgcccgtccttcggtggcgcagcgagtgctggacagcggtgtcgcggtcgccggcatcgccaccgccatggcggaagtgcccgatctgccgcggcgctggcaaaccggcgccgccccccatgcgctgcctgccccggtcacctggcgcagcaaagcgatggcgtcgctcgcccgcatggcattggtcaagcgccggatgcgcgcactgagtgacgatcggccgcgcagcgtgcgctactctccgctgtttacgctgctcgtcgatcagtggcgtactcgccgcatcctgcagcgttaccacgcctggttacaacaacgttaa

SEQ ID NO: 431280 - DNA, 2442 bp, Serratia marcescens
atgacatcagaacagcctgtagctactgcgccgagcgttagcgagctgagtgcgcagattgaaaataatcttaaatatcaactctgtgtaaccttgtcggcggcaactgaaagcgacattttcaatgcagtggcgctgactgttcgtcattatcaatacgatgactttctgattacgcagcaaagacaacgcgcggaaaaaaagaaacgtctttattatttgtcgatggaattcttattaggtcagtcactgcgcaataacctgatcaatatcggcttgctgacgaatatgcagcgcgcggttaccgaattgggattcgatttcgagcgcattattgatgaagaacccgatgcagctctaggcaacggcgggttggggcgcttggccgcctgtttcattgactcgatggccacattggacatcgccgcctccgggcacggcatcaaatacgagtatgggctcttcaaacaggcgatccacgacggcaggcaaatcgaacagccggatgactggcactccactcgctcgccgtggctggttgagcaccacgcccaacagatgctgatcccgatcggcggccgcgttgagcacggtgaagacgccgagggaaactataacccgatgtggatggattggcggattctcgtcgggatcccgcacgactatctcgtttccggttatcaggggtctgcgaccaataagttgaggctttacagcgcactggcttcagattccttcgatattcatatcttcaaccggggtgactatatcaaggcggtgagcgagaaaatcgcctccgagaatatctcaaagattctttacccggcggatgaggctttgaccggcaaggagcttcgcctcacgcaggaatatttcctggtcgcctgtacgctgcgagacgtgctggccgattatgcaagagaagggacgccgatcgccgcgttgccggagcgggtggcgatccagctcaacgacacccatcccgcgctggcggtggcagaactgatgcgcctgttggtcgatgagcaccagctgccgtgggagcaggcctgggacatcacgcagcgaacctgcgccttcaccaatcacacgctgatgcccgaagcgctggaaacctggtcggtgagcctgtttgaaaagttgctgccgcgtcatttgcagatcgtttatgagattaaccggcgttttctggcggaagtggccgcacgctggcccgagcaaccgcagctgttgtcgtcgctgtccctgttcacgggcgaaaacgacaaaaagatgcggatggctaacctggcgatcgtcggcagccatcgggttaacggtgtggcaaagctacattcggaattgatcaagaaaaacctggtgccggatttttattttatctcgccggaaaaattcattaaccagaccaacggcgtcacgccgcgccgctgggtgcagcaagctaacccaccgctggcagcgtttctgcatcaacatttgggcgatcggtggccgacggatctgcaacagttggccggcctggagaaattggccgatgacgtcggtgcgatcgatgaaatacgcacgataaaacgcgccaataagggcaccttgtgtcggttgattgcggagcgatacggtatccatgtcgatccgatggcgatgttcgactgccaggtgaagcggatccacgaatataaacggcaattgctgaacatcctccacgtgatagacctttatctggagatcaaggaaggcggtaaaaccatcgcgccgaaagtgcatctgttcgccggtaaggccgcgccgagttatgcggtggccaagttgatcattcaactgatcggttgcgtggcgcagcgcattaatcaggacgctcgcgtcggcggccagctgaaagtggtgttcctcgaggactataaggtctcgctggccgaacgcattatccccgcgaccgatctgtccgagcaaatctcgaccgccggtaccgaagcctcgggcaccagcaatatgaaattcgccctcaatggcgcattgaccatcggcacgctggatggggcaaacatcgaaatccgcgatgcggttggggcggacaatttttacctgttcggcgccaccgcagaggaaatcgacgccatcaggcgcagcgattaccacggtggcgatcattatcgcaacaacccgcgcatcgcacggatggtggactcgctgacttcaggcctgttcgcagccgataccgaactgtttgcgcctttacgcaacatgttgatcgcgggcgactatttttgccatctgcaagattttgagagttaccggctggcccaactgcgtgcggcggccgatttcgacgagccggaacagtggcatcgtcgcgcgctgttgaccattgcacgtatgggcggcttctccagcgatcgcaccattcgcggctatgccaaggagatttgggggatgaaatactga

SEQ ID NO: 431281 - DNA, 888 bp, Serratia marcescens
atggccacccgatttttgcgacgtttttccccgctggccggctgtctgttcagcgtttgtggctgggcggcggacaccgtgcccaaccagccggcggtacgcgtgttcaccagcccctgggcgcgtctgttctccggcagcgaggcgtctttttccacggcgctgacctataactcaaacctggcgcgtcagccggtctatgtccctacggggcccaacacgtccgagatccgtgataagtacaaccagcgcatgttgctgagcatgcagtattcgccgatgagctatttcttcgccaacatgacggtgcgggtgccgctgcaggacaccaataagtacagcaccgatttcgtgtacagctttggctacgatgactggcaccccggcacctttagcctggtctacggcaactataacgataataaccacttttatccggccagcggcgacagacatacctattttgaacaaggcgcctggacgtttgcgtataaattcagtttgccggacagcgtcgaaaaacacctgctgatcaacaaggaagacgcgttgatctgccaggtgggttacagctatgtgccgcgatattattcgctggccgacagcggcatcaaacgtaacaaaagctcgctgttggccagctgcggttacacgctgctgcagcactatttcctgcgcgtgtcgtcgttctattatcccgaccaccagcaacagcagccctgggattacgactacacctacagcatcggctatgtctccagctatttgccgggcgcggtatccgtgcattacgacaactataccggcacgcgctacccgtggcgccgcgatgccaatgccaattttcgtagcgggacgatcaacctgagctggacgctcccgttttaa

SEQ ID NO: 431282 - DNA, 1236 bp, Serratia marcescens
gtgaaaccaacggagaaagacagcgcatcctctttgaccatcctgatcgtcgatgattccaggagctaccgtcatttgctgggcagcatgctgagcaaatggggctaccgggtgctggaggcgcaggacggcgtacacgcgctggcgatgttggagacgcaaaccatcaacgccgtcatcagcgattgggaaatgccgcaaatggacggcgtggcgctctgccaccaaattcgacagcgtgatttcggtcattacatctatgccattctggtgacggcgcgccagtcgatcgacgatctggtgcaggggctggaatctggtgccgacgatttcctctccaaaccggtcaatcagagtcagctgcgcgcccggcttcatgccgccgaacgcatcctgacgttagaaagcacgctggcgattcgcaaccagcggttgagcagcgcctaccggcaaatcgagcaggatctgcaggctgccgcacgattgcagcgcagcgtgttgccggcggcagcgttgacgttcagcggctatcaggcggactggatgtttttgccttccgcgtacgtttccggcgacctgctgaactattttgcgctcgacgcccgtcatttggcgttttactgcattgatgtcgccggtcatggggtgagcgccgcgatgctctctctggcggtcgccagagagtttcttaccggacgggccgatgggcgactgctgatcgacgagggaggcgtcattgcgcctcatcaggtggtcgcggcgctcaaccggcgtttttgcctcgacaacgaagaagtcaccagctatttcacgctcatctacggttttatcgacactcaaaccgggcggggggcgctctgtcaggccgggcatccgacgcctttcattatctgccgggacggtgaactgcgtaccgtcggcctcggtggtgtccccgttgggctttttccccagtcggcgtatcagagcagcgaattttgcctggcacccggcgaacggctctatctctacagcgacggcatcagcgaatgtgagaactgcgcgggagagctctatggggaaacgcggctgcagcaactgctgaaagcgcatcgcgggctggcaaggccggcgatttttcaacgcgttgaacgcgagttggtgagttggagccgaccggagtccgatgagttagcggagtacggccgtttctttaatgacgatatttcgctggtgactattgagcgcaccgcataa

SEQ ID NO: 431283 - DNA, 342 bp, Serratia marcescens
atgaattttgaaatgtataccgaaaatgacatcgagatcgtggtgccgctggtgcgccgcctcgacgcttccgtcgcgctggcgttcaagcagcaggtgctggaagtgatcgaacgtaagggcaatcacgtgctgctcgacttcaatcgggtcgattttatcgacagcagctgtttgggcgccctggtgtcgatactcaaaacgttgaacggaaaaggggagctggtgctgtgttcgctgaacggcaatattcagcacctgttcaaactgacccgaatggacaggatctttaccatcggggccacgcggcaggatgcgttggacattcttgcccgcgactag

SEQ ID NO: 431284 - DNA, 453 bp, Serratia marcescens
atgaagactgtcaccacctcgctgcgcctgggggcgacgcttgaaaacctggatgcgctgagcagcgcctttcaacagttcgtcgcgccgttcgcacttgatccggcggcgatataccagatggatttggcggccagcgaggcattcagcaacatcgtccggcacggtgtcaatcacgatagtcagcaaaaagtagatgtgacattgtcacactctgcgggtatattgacccttggatttatcgaccagggtcacccgattcctgaaggcattttgcagtcgctggcgcaaaagcaacggctcttccctgagtcgggggcgctggcggattggccggaaaatggcattgggttgagactaatttattccatgatggacgaagttcgttaccgttccaccgacggacgcaacgagctgactctgattaaaaatgcaacggttgcctccgcctga

SEQ ID NO: 431285 - DNA, 1881 bp, Serratia marcescens
atgttcgagccatgttttcccgaaaatgaagccgaacgcctgtcggtattgaattcgctgaacgtgctggattcgacctcggtagaaaagctggatcgtatcacgcggctggcggcgaaatatttcggcgtgaccatcgcgctggtttcattgatcgaccgtgatagacaatggttcttatcgcgctacggcctcgatgcccgcgaaacacctcgcaatatctcgttttgcggccatgcgattttacagcatgacgccctggtcgtgccggatacggccaaagatccacgtttttttgacaatccgctggtcattggtggaccgaagatcggtttctacgcagggcagcagttgctgtcgctcgatggtttgccactcggcaccttgtgcattatcgatagcaaaccgcagccgtttccgcaggaaaagttggccgatctgcacgattttgccgccgtagttgaagaatacctgcaaaacatcgaacgcaacgtctataccgaaaatctaaagtcagacctgcagcgcacggaatccttgttcgagcaaaccttctctcaggcggcggtgggcatggcgctggtctctctgcaagggtactggctgcgggtcaatccgcgtctttgtgaaatgctgcattactcggagcgcgagctgctcgagcgcacctttcaggacattactcaccccagcgatttgagcagcgatctggaatatttggaacagttgctgaggggggaaatcaacacctattcgatggagaaacgctattttcgcgccgacggttcgatcgtctgggggcaactgacggtggcactcaatcggctgccgaacggcaagccggatcatttcatctcggttgtcgtcgatatcagcgagcgcaaggcggcggaggccgatctgttcgtgttgcagcatgagcttgaggagcgggtggagattcgcacacgagagctcaacgtggtggtcgaaaagctcaacgaagagatagaaacccgggtgctcgccgaatctcagctcagcgcggagaaagaacgtctgcgcgccattaccgacaacatgccggcgttgatcagccagatcgacgccaatgaacgctacctgttcgccaacagcgcttataagatctggtttggcctggaagaggccagcctgcagggtatgacggtacgtgagttcatgggcgaaggcgtgtatcagatagccgaaccgatgattgaacgcgcattggccggcgaggtggtaagctttgagaatgaattgcagacggcgcagggggtgaaaatgatccataccacgctggtaccctgcgaagcgcaaggcctctacatgctcgccatggatatcactgagctgaaacgtctgcagcatcggttggagtacgacgttacgcacgacatgctgaccgggctgaccaaccggcgtgcatttttgcgccgattgtctgccacattgcccacctgcagtcaccagcgccagatggcattgttgttcatcgatctcgatgggttcaaggcgattaacgatagctatggccatgatttcggcgatctgattttgaaaaccttcgccaaattgctcagcgcctgcgccggtcaacagcacagcgtatcgcgcctggccggcgacgaattcacggtgatcctgtggccgctgaccgaaccgcggcgggaagtcagcgaattttgcgagaaggtgctgacgcagttggccggtatttcgcagatcggccagcaaaaagtgagtctgtccgccagcattggcgcggccattgcgtcgaccagcgaagtcacggcggaaaaactgttggccagcgccgacggggcaatgtacaaagcgaaatctgccggaaagggcacttacgccatctgtgagcggtga

SEQ ID NO: 431286 - DNA, 1761 bp, Serratia marcescens
atgctacgacacctgagtaaaaacgaagaagagcgcctggcgtccatcgatgcactggagggactgggcgcgagccatgacgacgccattgaccaggtgttgagcattactcgcaaactgttgcaagcgtcgggttgccttatctgtctgtatggatcgcgcaagatctggatccgtgcgcagatcgatatcgggtttgatgcaattgatttcgctagcccactgttcaactttgtgcgtcgctacggtgaggcgctgttttgcgctgatacgttgactgatgaacgttttgccacggatccgatggtgtccggggcggcggcgatccgccactgtgccgccatcccgctgcgtactcgcgaaggttacacgatcggtgcattttgtctcgtcgggccagagccaaaaccgttcactcgccatcaggccgaactgttgaacagcatgaccaccatcgtcagcgaactgattgaagcgcagagcgaaatcggcctggtagacgctatcactcggctgcctaatcggcagcgactgatgggcgatctctgcaatctgccggcggcgggaaaatatgcgctgctgctgatcgacaccatcgatatcaaatacgcctatgaaatggcgcgctccttcggcctctccacggtagagctgttgttaggggatatcgggcattttctcaaggaagcttttctcagcgaccgcatgttgtacagcatcgcgcccggacgttttgcggttatcattgaagcgcaaaacttgccgcaggccaaacgcgatctgctgcgctgcgccgatcgtttgcaccgcgaggtgcgcggtgccgtgccgctgcgtctggaactgtatgccggctatgcggtgttctccgcaccgcacgccagcccgcaggaggtgttgcggcaggcaaccagcgcactgcatgactctatcgacgaagggcgaacgctctctgtttacagtgagccaaaggacgcagtccgcaagcataaattcaatttgttcaatgagctggcgcagtgcctgaaacaaaacagcgggctgtttctggaataccaacctcaggtcgacttgaccaccgggcgcatcgttggcgcggaggcgttgctgcgctggcagcatgaagtgctgggcgccatcccgacggcggagttcattccgctggtggaaaacacctcgctgataaaaccgctgaccgagttcgtcatcacgcaggcgattactcaactgctgatgctgcgtgaggcggggatcaagttcccgatttcgatcaacgtcacggccagcaatctggccgaacggcactttgccgaacgcttgaatgacgctatcgttagacgcgggctgcggccgggtgatatcgagctcgagtgcctggagtcgcaacgtattcaggaaagcagcgccgcgctggcgtgcctgcacgcgctcaaggctaacggacaccgcatcgcgctggatgatttcggcgccggctacagcaacctcaactacttgcgccatattcccgccgatgtggtcaagttggatggttctctgatcagacaattaaaaaccgatgcggaaagtcgcattatcgtcgagaacatcatcaatatgctgcataaactcgattatgaagtgctggcggaaggcgtcgaagatcaagagtcgctcaattttcttacgcagtatcgatgcgatgtcgcgcaaggcttttacttttcacctgcagtgtcgccggaaaaactgtgtgaactggttgctgctcacggacaatag

SEQ ID NO: 431287 - DNA, 2184 bp, Serratia marcescens
atgaagacaaaattctggctctcactggggctgctggtctgcgcgtcatccccccttgcccaaacgccgcgcagcgtttctctcgatggcgtttggcaataccaggacgccaacccgccccatgacgatcggcagcgcctgacgccgaattggcggcctctgcgggtaccggcgaactggtacagcgccggcgtcgatcaccagggggctctgtggtaccgcacgacattcactctgccgcgcctcgcccccgatcggctggccacgctcactttcgacggcgtcgattatcgtgcagacgtctggctcaaccaacgctttgtcggtcggcatgagggctattttcagcgtttcgagtttgatgtcacccaggcggcacggcgtgagaaccacctgctggtgagggtggacagcccgtttgaaccccccggcagcgtctggccgctgcacaaacgcgcgattaaaggcatcttgtcacagcacgatacccgccccggcggcgcctggtcgccgcagggccaggacgccaactcgggcggtatttggcaaccggtcacgctgcgcctcagccgcggcgcggcgatcgataacctcacggcgttgcccgactggcgtcagggactggaacggccgacgctggacatccgtctcgattaccgggtgaatcggccgagaaaagcgcgcctgaccctgcgtctgacgccgctgaacttcaccggcaagagctatcgcctttcccgccaagtggcgttgaccggcgacgcaccgctcgccgtttcgctgccgatgccaggcgccgcgctttggtggccgtacggccatggggcgcaacatctttatcgcctcgaggcaacgttgtccgacgctgaaggattgctggatagacacacgtcgcaaaccggtttgagagaagtccgtgaactggcatcgggccatggctggacgatcaatggccggcgcctgtttattcgcggcaccaactatatcggctcgccgtggctcggcagcatgaccgccccgctttatcgccgggatctgctgctgatgcgcgcggcaaacatcaacgcggtgcgggtacatgggcacgttgccggccaggcgctgtatcgcgaggccgatgaactgggcatgttgctatggcaagatatgccattgcaatgggggtatgacgacagcgaagccttcgccgccgaagcggcgcgccaggccggggatctgctgcgacaacggggcaaccacccttcggtgatcgtgtgggccgggcaaaatgagccgcctttcgactccccgtggatgaaacagcggtttaccgattggacccccacgctcaaccgccggctggcgcaacgcgtggcggacgcgttgagtgaagatcgcacccgcatcgttcaccgctggtcgacggtcgccgagcattactggcagggatggtatttcggcactgtcggtgatttcctcaagccggcgactacggcgatcatcagcgagtttggcgcgcaggcgctgcctcgtctcgccacgttgcgcaccatcattccggcggcgaacctgtggcccgccagcacgtcacccgacgatccgggctggaaggtgtggcaatatcacaacttccagcccgagcaggcttttggcttggccaaattgtcgcgtggcgcaacgatagagagctttatcgccaacacccagggttatcaggcggaaggcatccaactggcggcggagagctatcgacgccaacgctatcaaccggtcgccgccctgttccagtttatgttcagcgaaacctggccttcaataaactggggggtggtcgactaccgtcggcagcctaaatcgggttactacgcgttacgtaaagcctatcaacccatactgccatccatcgaaccgatcacgccagaatggcgacaggggcgcagcggcaggattgggctttgggcgatcaacgatcgctggcacagctatcacgacgccaggctaagctggcgtctggtgcagggagaacaggtattggcgcacggtagcatgaagctggatctcccggcggacagcggccgcaagctgagagagctgacggtaacgccgcgctcaacattgccgctgcacctggtaaccgaattggcggacagcgacgggaatcaactgggagaaaacagccggcattttcaggtaagtgagccctga

SEQ ID NO: 431288 - DNA, 2682 bp, Serratia marcescens
atgaacaagctgccgctgctttccgcgctcaacgccccgcctatcgcgctggccatctatgacgccgaagaacggctgagctattggaaccggcgcgtgatcgagtattaccccggccttgaaccctggttacgcgtcgggcttacgctcgccgacgtcttgcgcatgatgatcgacatcagctatccggcgttgcatgacgaagccaaaaaacgcatggtgaccaccttgctggccaactaccgccggccagatcattacgaagttcgacggatcaccgatcgcaccctgtatatccagcaccaccggacgccggagggcggcgtgatcagcacccataccgatatcagccactatgccgacgtcattaaagccgagcaacggctgcacagcgactttattctggcggccgaaacctcgcgcatcggcatctgggaatgggatttggcaacagacgagctgcaggtcaatgacgcattgctgctgttgctggatattccgcgcaccaatccggtgctttccggcagcttgtggacgcaggcctttcccgccgactgtctggcgcatttcacgcagagtatccaccaggcgagccgggctattctgccgattttcgcctgcgaagcaaaagtgcaacgcacggatgagcgttacggttgggtgtcgctgcagggccagatcgtgcagcaaggcatgcacggcgaagtgcagcgggtcatcggcacgctgcaggatattacggaacacaaagaggcggaggcctcatccctccggtcggttgagatagccaaagcggccagccaggcgaaaagcgagtttctcgccaatatgagccacgaaatacgcacgccgatgaacggcattctcggcatgacccaactctgccttgagaccgagttgaatcaggaacaacgcgactacatcacgatggcgtacagttccgcgcgcgcgttgttgaaaattatcgatgacattttggacttctccaaaatcgaagcgggcaagatcagcctggatccggaagatttcgccctgcggccgttgattcaggaaatcacccgcccgctgacgcccaagttctccgagaaaaacgtcgagctgctggtggatatccaccctgacgtcgccgacgagatctatggcgacccgttgcggctacgccaaatactgaccaacctgatcggcaacgcgctcaaatttacgcccgctggcgaagtggtactgcgtatcgagccggtggccaacgatccgcgtcgtttgctgttcagcatccgcgacagcggtatcggcatcgccaaagacaagcagaaagtcatcttcgaatcgttcagccaggcagataactcgacgaccagaaaatacggcggcaccggtctcgggttgacgatctccgcccggctggtggcgatgatgggcggcgagttgcaggtcgacagcgacgccggacgcggcagctgcttctatttttcactgccggtattatcagacgcgcgcagggaaagcgtcggctggccacaaacgctggcaggcctcgaggtgctggtggtggacgacaatgccaccaacctgcgtctgctggccgacctgctgcgcaatatgggtttgaaaccgacccttgccggttcaggcaaggaggcgctggcgctgatgaacggccgcgcgcctttcccgctggtgctgttggacgcgcaaatgccggaaatggacggcatggcactggcgctggagatcatgtctaccccctcgttgcggcattgcacgctgattatgctgagttcgacgggcagccgtatcgataaggcggtgctgaaaaaagtcggggtctcctttttcctgacgaagcccatcgatgccggggaactgtttgccgccatggaacaggcgctggtcccgatgctgccgagcgcgtccgcggccgtaccgcccgcccacgaaccaccggtgagcgcggcggccccccgctatcatttgctgatcgccgaagacaatccgatcaaccaaaagctggcgctcagctttatcggcaaactggggcacagcgccgatctggccggcaatggcgccgaagcgctgaaccggctgcaaaccgcgcgctacgacgtcattctaatggatttgcagatgccggaaatggacggcgtcgaagcggtacaagcgattcgtcaggcagagcggcggcaaccggcgggcgaaccgacgcagcggattatcgccatgaccgcacacgccatgaaaggcgacagagaaaaatgcctgcagctcggctttgacggctacattgccaaacccatcctgctggagaaactggcggaagagattgcgcaggtcgttgcagccccggtgctcgccttcgattatccgcttgcgctcgcacagttggacaacgatccggcgctgttcaacgagttggcggcgatgttcatcgacgaattgcccgggctgttaaacgccttgcaagcggcgatcgccgctcaggcattcgacgagatcaaacgctgcgcgcatcgtctcaaaggcgaaacgctgcactttgccggctcgccgctggaaccctgtttgcaagccattgagcaggctgctggcgcccgcgatctcgcggcgttcccctctctgcagtcgcagttggcgccgctgagccggcagctacgcgacgcgctgatcgccatcgtggaggcaacatga

SEQ ID NO: 431289 - DNA, 453 bp, Serratia marcescens
atgggcatcaattatgaagagctgttcaataacagctacagccgcatcactcagggagataaaggcgaccgtttcttcacccatttttacgcgttgtttatcggtagcaccgaggacctcagttcgccgggcggcatcgcccaacggttggaaaagcagaaaattatctataaaacctttttctatatgctctcggtcgccaatacccatatcgtggcggattacctggtgcaggtgacgcaggaaggcagcccgcaaagcctcaacctgccgccgtcaatttatgcgctgtggcgcaaggccgtgctgcaaaccgtgcgggatctcgatcccgaatgcgatgaagagatcctgaccgcctgggccatcgtgctggctccggggctggaattcatgcggcggcaggccgaactgcatcacaatcccagcgcacaatcggggctgccgggatga

SEQ ID NO: 431290 - DNA, 1383 bp, Serratia marcescens
atgcttaaaaccctgacgctgatcgtttccgtcgtcatcgcactcgggctggtcgtgttgctgggcgtcatggcgcgccccgacggcgccgggtccgtgtgggagcgctggcagcagcagcctcgccgtggtgcgttaaccgaggagcagcggcaatgggccgacgttgcctggcgctatgtgcagaacaacacgcagcccggctccggtttggtgaacggcaaagatcgttacccggtcgtttcgctatggaacatcggcgacaacctgattgccttgaccgccgcacggcgtttggatctgatcccgcagcaagagttcgatgcccgtttgtcggcgctgctgacgacgctcgatcgtttaccggtgacccgcattggcgcgcccggtgcgttgtacgacgccgtcagcggcgctttcagtcaaaacggcggcaccgccggcgaagcgcaagggatggctcgcctgctggtcggcatgcgtttcacggcgcaaagcttccccgaataccgtaccttcctcgaacgaatcgcactgcgctggaacttctgcaacctgctgacccaagacggtcagccgctcgacgggcgggagcaaaacggcgcttggcgcagtgccgcagccagcgacatcggctatgccgactacaacggcgcggctttcggcctgtggggatttcagcgtgcatcaacgcgaacggcaccgttcaaaaccgcggtcgtctacggtgagcccctcgccgttacggcacgcgatccccggctcaccggcacgcccgccggcatcgaaagcaccccctatctgctgaccggcctcgagatgggatggccggcaccccatcccggcgaggcggctgacgtcagcatggcgcaacgggcccagcgcctttaccaggcgcaagaaacgcgctggcgccgggagaacatcctcaccgcccgggcgcaatattcgcgcagcacggcgccgtgggaggtatatgacagcctgtttgccaacggctatgcctggaataccctggcagacgatggccgctatgcgccggagttggcgctgctctcgacccgcgccattttcggcctgtgggccttgtgggatacccgttacaccgacgcgctgatgcagctgggccggctgcatcaggatgagaaacgcggctggtttgaaggccgttacgaagccaacggcggctacaacgccaccttcaccctcaccaccaacaccgtggtgttggaggcattgctgttcaaacaaaaccgcggcccgctgctgcgcgcagcgctaaacgacggctatctcgacgcgcgcatgaaagacatcttcaactggcctggccactgtctgccgcaggagcgtctaccgctctccagcgcgaaaggaggatga

SEQ ID NO: 431291 - DNA, 1569 bp, Serratia marcescens
atgtttcatcattatttcgtcaggccgtttgtcacgctgtgtcggcacgcgctgtgcggctgtttgctcttgttgctgacggtgcctgcggccataggcgatacccaactgcccgccgccgcctatccgcagcgccacggcgacctgacgccgcgcgaacaggcgatggcggtcaaagcctggcaatacttcgtcaccaactaccaaccggcgaccgggctggtcaacgccgtcaacaactacccttcaaccaccatgtgggacagcgcctcctacctggccgcgctgacggccgcccgcgagctcggcatcatcgacaaggaacagttcgatcagcggttgatcaagtttctcgctacgctcaacaccgtgccgctgttccaaaaccagatgccgaacaaggcctacaacaccatcaccgcgcaaaaggtcgactatctcaacaagcccggcgagatcggcttttcatccatcgacatcggcagaatgctgctgtggttgaaaatcatcaaagagcgctatcccgaatttgccaacgacgtcgataacgtcgtgctgcgttgggatttcagtcatatcatcgacgactgcggcacgctgtatggcgccaatctggatgccaacaagcagccggtttacgtccaggaaggccggctgggttatgaagagtacgccgccagcggttttcagctgtgggggttctccacctgccaggcctcccgcgcggagccttaccagttggcggacatttattgtgttctggtgccgtatgattcacgcgatccgcgcaccaccagtcagcataactatgtggccaccgaaccctatgtgctgcacgggctggagatgggttgggacaccagcgacgatcgcagtgacgatctcgctaaacacagccatccctggatgcaagactttgctaaccgcgtctatcaggtgcaggagaatcgctaccagattaccggccgtctgacggcgcgttccgaacatcagctcgatcgcgcgccgtatttcgtgtacgacaccgtctactccgacggcttcgactggaacaccatcacggacaagggagaatacgtgcccgataccgccgccatctcgctcaaagcggcgctcggcatgtggagtctttggcaatccccgtataccgatcggctgctcgacgtgattgagaacgccagtgaaaaagacaaaggtttctacgaaggcctgtatgaaaacggcgccggcccgatccgtgagttcaccgccaacaacaacggcatcatgctcgaagccctgctgttcaaaaagcaggggcgactgctgaaattcaatacccctgacccaagcagcgccaagtatgcgccggccctgtgggataaaacgctggtgaacgtgtttgacgacaaaaacacgccgtttaaccggcctttcatcacgccggacgctaacctgaagacctggtgccaacaaacgggggtcgcgctgcgcaatgcgccttcctgcaaagcctgtaaatgcccgcagtgtcagaatgacgcgcccatgaaactgcctccggtagcgacatcatgcttaaaaccctga

SEQ ID NO: 431292 - DNA, 1365 bp, Serratia marcescens
atggcgtggaaacactcattgttgcaagcacggagctatattgcggtcatcatcggtttcctgctggcattcggcgtcgtggtttatgttgagacgcatatgccccccgccccggcagaaagcgccgagctgacgctgagcgccgatttccccacgctgcccgcgccgcgtgcgctcactttcgacgaagccgtttgggcgcgcattgcctggcaatacttcgtcaacaacacgcagtccaacggactggcgaatgccatcgacaaccagccctacaccaccatgtgggataccggcagttatctgatggcagccatcagcgcgcaacggctcgggatcattacgcgcgacgagctcaatgcgcgcgtgaatgccgttctgaccacgctgtcgtcgttacccctggccgacggccagttgccgtcgctgtattaccatacccagcgttcgatccggctgaacagcctcagccaaaacgaaaaccaacccgattggtcggccgtcgacatcagccgtctgttgatggcattggacatcgtcgcctggctgtacccggaacagaccgcggcgatcgtgcgcttaaccgccccctggcggttcgacgccctgtttatgcagcaggagccgcaacagccgctaaatttccgcgcggcgaagaaatggcagctcgtcacccaaagcaaccgcgacagctacggttatcagctttacgccgtcaacgggctgcgtcgcgtcagccccctggccggcatcgttctcggttcgcaacagccctcgccgcgcaccatcagtattgacggcttgcgtattccctacgacagcctggtcaaaatcggcaagctcgatcacccggtcgttaccaccatgccctatctgctgaccggcctggaggcggggttcgacatccattcggcggaaatcagctggcgggtgatgaaagtacaggaaagccgctaccgcagccacggcgattacgcctacgtgaacgccgacaatgaagaacagttgccgcgttttatcgacgatgccgtcatcagccgcttcccggcactgatcgacaaatcgcgggcggaaatcaaagaggcggcactgcagctgtcgaccaaatcggtgttcgggtggtacgcgctgtttcgcacgccgtggagtgacgagatgcgccggcgcgccggcgtgttgttcgaaccggggcgcggctggtacgaaggcatcatcgccgccaatgggcaacagagccgggtgatcggtgccaataccaatgccctgatattggaaagcctggtctatatcgcgcaagggccgctgttttgccaaaactgcgctcccgcgccccctgcgaatcctgccgacggtcaacggccgtaa

SEQ ID NO: 431293 - DNA, 1833 bp, Serratia marcescens
atggcgcatttttatttttcatcttttgaaaaaaggagcccccctgcaccgctaaaaacctcgcgggcaattgtgttcctttggcaaatactcgccgttgccgctctggtggtcggcgccaactacattcgctggcgttggatggcgtcgctcaattatgacgccttatggtatgccgttcccttggtgatagcggagactctggcctattgcggcacgatcctgtttaccctcaatctgtggcaggtacgcgacgtcaaacgccggccgccgccgcgcgatatacgtcaatgcctcgatcctgacgacacgacggcaccgcgcccggtcaaagtcgatctgtttatcgccacctattccgaagataccgaactggtcaggctgtcgattcaggatgccaaacgagtcacttaccccttccccctggattatcgcattcacgttctggatgacggcaagcgcgccgagatgcgccgcgtcgccgaacaggaaggcgtgaattatctgtcgcgcgagaacaacatcggttttaaggccggcaatctacgtaacgggttggaacacacggacggggacttcatcgtcatttgcgatgccgatacccgtgtcttcccgtccatcttgaccgacacgctgggctattttcgcgatcctttggtcgcctgggtgcaaacgccacaatggttttacgatctgcccgcaggaaagcgcctgccgcactggttgaagggcaagctcgggcagcccggctatgttgccgggcgcgcgctggaaaaggtgatgggccccctcaccgtcggccacgatcccttcttcaacgatcccaagatgttttacgacgtgatcttgcgccgccgcaactgggccaatgccgccttctgttgcggcgcggcgtcgcttcatcggcgcgaggctattatgcagagcgcattgcgtagctatgcacgcgccgtagaaacggaaatcgaacgctatacccgcgacgtaacggatgccgggctgcgcgacgagctggggcgggcgatgaaaccccaggtggcgttagataccgagttgaccccctataaattccacgtgtcggaagacatttatacctcgatcgtgctgcacggcgatcccgagcggcgctggcgttccgtcatgcatcccgaggtggaatcgaaaatgctgtcgccgcaggacttgctgacctggatgattcagcgtttcaaatatgcggcgggctcgctggatattgcgctgcatgatgcggtcttcagcgcgaaaaatttcaggctgagcctggcgcagaagctgatgtacggtaccaccttctggtcatatctggcgtgcttgtggaatacggtgttcctgatctcaccgctaatctatctgtttaccggcattccgccggtttccgcttactcgctacccttttacctgcacttcttaccgtttttcctgctgtcggagctggctttcatgttcggcacctgggggatctctgcctgggacggaaaagcctcttacctttcgctgtattccatgaacctgcgtgcgctggatacggtgttgcgcggtgaaaagatcaaattccacgtcacgcccaaagagcgccagcaaggcaacttcctgacgctggtcaaacctcagctggccatcattgccttgacgctgctggggctattatggggcggcattcagctgtatctcggcaaagtggacgatccggccggctacgtgatcaatattttctggggcggcgtaaacattatcgccatgttgccgatggtgctcgctgcgctgtggcgtcctgagtcagaaactccttccgagcagcaggaggccgggtaa

SEQ ID NO: 431294 - DNA, 1203 bp, Serratia marcescens
atgaatttacagcaagttgatgagtgtccggcgacggcgcttcactatgttgccatcgggaagcgtgatttacgcatcgatatgctgcgcggcatagccctggtgatgatggtggtggcgcacgtagagattatgtctgttttgaatattttcacctgggagcgattcggtttgacgaccggggcggaaggttttgttattttgtcaggctttattctcggtaatatgaaacggcgacagttacaaactgatcctatgttgacggtggcctattctctgttgcggcgtgcggtgaagctttatttcgttaacatcgttattattataagtattttgctgctgcaaatgctggactttatcgatacctttgaagtgacgcattttgtcgatcgtttttcaggggccgtgtactcgatgtatccggtgaatgaacaagtcaaagaggcctggtttaacgagattatttttttacagatcgggccgcatcaaacgcaaattctggggctctatttctatctgctgttgttcagcccgttgttcctctggctattgaatacgggcaggggggccggcctgctggcgctgtcgcttatcgtttatggctactaccagctcagcggcatgccgatgacgtcggcggagttcgagttcgctttccctttcctggcctggcagttgatctacgtattgggcctgtgctgcgggtggtataaagaagagatcgcgtcgctggcccgtacccaggccggcaagatggcgcgttatctcatggcggcggtggccttggccatgctgttcgtcgcgcagaaccataccaatccctttatgccgccggcattgatgatgcatgtgatcccggcggcggaattcaattggttttatcagcaccttgccgccaagaatgcgctggggcccgtacgcatcctgaatgatttttgcctgatcgccagcgtctattggctgctgaccgtctgctggcagccgatcaacaaggccataggatggttcctgatcgtgctggggcaaaactcgctgtataccttcattattcacgtctatctggtgttgttcatcagccagttcgtgaccttcgatctctggacgcaacattggctcttcaatacggcggtgcatgtcgccggtctgatggcgctttgggtgatggcgcgttacggcctgttgaaaaagattgttcccaactaa

SEQ ID NO: 431295 - DNA, 870 bp, Serratia marcescens
atgaaaaaaattcactccctgccgcacctgtccgctttcgaagccgccgcccgccttggcagcttcagcgccgctgcggatgagctgtttctcaccaccggcgcagtcagccgccatattcgcagcctggaagaacagctggggatcaaattgttttatcgcggacacaagtccgtgcggctgacgcaggccggtgagaacttttcccgtaccgcgtctcgagtgataagcgaattgtttgcggcggaaagcgcgctgaaagagagcgcaggccggcagcggctggtagtgcacagcctgccgacgtttaccatgcactggctgatgccaaagctggcggcattcaatgagattcatccggaggtcgcgattgatatcaccaccagcaccggcgccgtcgatcgcaatacgccgtttgatctggcgatccggcgcgatcctgctcatttctccgggctgaaagcgatccctttcctgcaggaggacagcctgctggtctgcagccagagctatttgcgcacgatgccggtcagtgcgccgagccggctggccggacataccgccatccgcatccgcgctcgagaggatttatggcacagctggctgaatacctacccgacggcgctggacgccgcgccggcgccgctcacgctcgaccatacctttgccgccattcaggcggccgaggacggcctggggttggccgtcgtgccttacctgttctgcgccaagcatctgtcgtccggccgactggtgtcgcctttcccggcgttgactatccgaaccggcgtttattccctgctgctgcgcgatcgggacgatgaggtcgtgagaaaattcgccgcctggctgcaggcgtttcaggtctag

SEQ ID NO: 431296 - DNA, 2067 bp, Serratia marcescens
atgtttaaaccgacttataaaaagaacgccgttacccgtgccatcaccaccgccatgccgctgttcctgctggccggccacgcggcgcaggcgcatcagcaccctaccgacgcacaggttaatgatggcgacgtgattaccgtcaccgcgccgctctactccccgctcaccatcgtcacctcgccgaaaaccccgcgccagccggtgccggccagcgacggttcggactacctgaaaaccatccccggcttttcgcagatccgcaacggcggcaccaacggcgatccggtgttccgcggcatgttcggttcgcggttgaagatcctcaccgacggttcggaaatgctgggcgcctgcccagcgcggatggatgcgccgacctcttacatctcgccggaaagcttcgatctgttgaccattaccaaggggccgcagacggtgctgtgggggccgggatcgtcggcgggcacggtgcgtttcgagcgtgaacgcccgcgctttgacaaaccgggcatcaagggcaacgccagcgtgctgaccggctccaacggccgctgggacgagaatatcgacgccagcctcggcgccgaacaaggctacctgcgggtgatggccaacaaatcccgctccaacgactatcaggatggaaccaatacgcgcgtgccgtcacgctgggacaagtggaacggcgatctggcgctcggctggacgccggacaacgacacactgctggaagtgaccatgggccgcggcaacggcgaagcgcgctatgccggccgcagcatggacggttcgcagttcaagcgcgaaagcctgggcatgcgggtggaaaaatccaacatcggcgaggtgctggataagctggaagcgcaggtctactacaactacgccaaccacgtgatggacaacgtcaccctgcgctcgccgggcagcggcggcatgggggggcacgggggccatggcggtatgagtatgggcggccacggcgggcacatgatgtcctccggcatgacgatgcagctcgatcgccgcaccgtcggcggccgcgtgatgggcacctggcagtggcaggacgtaaagcttgaaagcggcctggacacccaaaccaacacccaccgcagcatgagccgcggcagctgggaaaaagacgcccagttcaacagctacggcgccttcagtgaactgacctggtccaccagcgaacaggataaactgatcggcggcgcgcgtcttgaccgcactctggtggagaatttccgcagcggcagcgatggagagcgttcggacaccctgccgagcgggtttatgcgtcttgagcatacgctggccgagctgccgctgatgctgtatgccggcgtcggttataccgagcgcttcccggattattgggagctgttctcgccgaagctcggcccgaacggcagcaaggatccgttctccagcgtcaagagcgaaaaaaccacgcagctcgacatcggcgcgcagtacaacggcaaacgcttcaacggctgggtctccgcttacgtgggccgcgtcgatgatttcatcctgttcaaatacgatccgcacaatgcgcgtctcagccaggccgataacgtcaacgccaacatcatgggcggcgaaatgggcatgggttaccagctgagcgagcactggaaaaccgacgccagcctggcctactcctggggcaaaaacaccagcgacggccggccgctgccgcagatcccgccgctggaggcgcgtctggggctcacctatgagtacggcgactggagcggcaccggcctgtggcgtttggtcagcagccaacaccgcgtggcgatcaacgaaggcaacgtggtaggcaaagactttgccgaaagcgccggcttcggcgtgctttccgccaacgccgcctacaaggtgaataaaaacgtcaagctgagcgccggtctggataacatcctgaacaagacctacagcgaacacctcaacctggcgggcaacagcgccttcgggtattcggccaacagcgcagtgaatgaaccgggccgcaccctgtgggccaaggttaacgtcaccttctaa

SEQ ID NO: 431297 - DNA, 162 bp, Serratia marcescens
atgcaaaagctcactcgttttctggccctgctcggcgagctgatgattgaaaaagccgaagacgccgcgccgcaggcagctcagcctgacgatcgcgacgacgcgttgccgcctcgcctcgaacgtggggttccgctggccgaccgcttcctgttcatgtaa

SEQ ID NO: 431298 - DNA, 885 bp, Serratia marcescens
atggcgaaacgggaaaactataacgatttgtacctgttcatgcaggtggtacgggaagggagctttacagccgcagcacatcgccttggcctggcacaatcaggaataagccgttcagtacgggaacttgaagaacgactgggcgttcagctcctggtgcgcaccacgcgcagattatcgctcacccatgccggtgaaaagctctaccggaccattgaagcaggattcgacgctttagatatggggctggacacgctggctcattatcgccagtccccatcggggacggtacgcatcaatgccagtcagcatgctattgataaattgcttctgccgaagcttgcggtgtttaagaagagctacccggatatccgactggaactcattagcgaaagccgatttgtcgatattattgccgagaggtttgatgcgggtgttcgcctggggcctgaagtagggagtggcatggttgctgtgcgtatttcccctgacatggagatggctgttgtcggcacgcctgaccattttcgtcgctatggctttccgcaagcccccgtagatttagcggttcatccctgcatcgcttatcagtttggcgacgggaaactgtactcatgggaacttcaccataacggtaaaaaaatcacccatcggccgcaggggcagtgggttttcgctgacagctatatggaggccaaagcggccaggctgggcctgggactggcttatgttccggaagagttggtatctgatgatttagaacagggttcgctcatcagagttttacaacgttacagccaacgcctggaaggctcatttctatattatccgcaccgcaatgtgtcgcctgctctacgagcggttatcgatacattgagaatttag

SEQ ID NO: 431299 - DNA, 1194 bp, Serratia marcescens
atgcccacagtaagtcttaaaagatcacctaagaaaacagatgcgcactggggtggcgtgtttgccatgacgctctgcgtttttgtactaatcgcttccgaatttatgccggtcagcctactgacgcctattgctcgcgagctgcacatcacggaaggcctggcaggtcagggaattgcaatatctggcgcgctggcggtactgaccagcctgactatctcccatatcgccggagatctgaatcgtagatatcttctgctggggctaaccgtcctgatggccatatctggattggttatcgccatggcgcccagctatccggtttatatgctggggagggccctgattggcgtcgtcatcggtggattctggtcactctcagctgcaaccgccattcggctcgtaccgcagcatcaggttccccgtgcgctggcgatttttaatggagggaacgcgctggctaccgttgtggctgcgccacttggtagctatctgggggcaactgtcggctggcgtggggcttttttatgcatcgtccccctggcgatagccgcgttcatctggcaatgggtcagcctgcccactatggaaagcgataaaaaacaaaagccacagggaactctgcttcgtctgttcagagacgtcattatactaacagggctgctggcttgcgggcttttctttattgggcagtttgccttatttacctatgtgcgcccctttcttgagaccgtgaccaacgtaggtcctgctgggctctctctgattttgctcgcaataggcgcagcaggttttgtcggcacattagtcgtatcgacattcctgaatgccaggttgtatcaaatcttaatcatgatccccctgcttatggcaacggtagccggtacattattgctgttcggacacagcatctgggcggttaccgttttgctaagcctgtgggggttactggccacgtctgcgccaacaggatggtggacatggattgcacgggcgctgcccgaagatgcagaggcgggtggcggtctcatggttgcggtgatccagctttcgattgcgcttggttcaacggcaggaggagtggtattcgacagtctgggatggcaaagtgctttcggcttgagtgggttattactgctgggggcggcagcgatgacttacgtcacatctattcaaaacagtaaagcgcactag

SEQ ID NO: 431300 - DNA, 993 bp, Serratia marcescens
atggctaaatcaacgattaaaaccgcttcggtgttggcatttgaacgcaaattggcaaactcggacgccatcatgttggcgggggagtggggcaccgagagttggcaacctatcgtcattaaagaaaaggcggtgcgtgggactatctctaaccgcctgaaaaacgcgattaccagcgatcccgccaagcttgatgcggagattcagaagccaaacctgcaaacggttgatgttgcggcactgccgcaaaatgccgataccctaaaagtggcgttcacgctgcgtgtgttgggcaatctggcggtgccgtcggtctgtaacgatcaggactatcaaaatgcgctgcaggcggtgatcgagggctatatcgccgagcatggttttggtgctttagccgcgcgttatgccgagaacctggcgaatgggcgcttcttgtggcgtaaccgcgtgggggctgaaaaaatcgccgtgcgagtgaccggcagtaaaacctgggaattcaacgcgcatgagtacaacctgcgcgcatttagtcaaccgaaaggggcgctaagcgagctggcggcggaaattgaacgtggcctggtgggagaaagttttgccttattcaatgtcgaggcgtttgtacgcctggggaatgggcaggaaattttcccttctcaggagctggtattagacagtaacagtaagaaaagtaagttgctgtaccaggtagagggcgttgccgcgatgcactcgcagaaagtcggtaatgctttgcgtactattgatacctggcattctcaggccgattctcttggtgcgatcgccgtagaaccttatgggtcggtgaccagccgtggcatcgcctgccgtcagccaaaggaaaaaatggatttttatacgctactcgatcgctgggtaattaaagaagagaaaccgtcggttgaacagcagcattacgtgatggcggtgttgatccgcggcggcgtatttggcgaaaaaggcgaataa

SEQ ID NO: 431301 - DNA, 1179 bp, Serratia marcescens
atgatgaaagactgctcgccgctgctgctggagctgaacgaaaacgatcccggcatcatcgtcacccagtcggtgcacaaacaacaggccggcttctcgcaaacctcgcagatccacaaaaaagataagcacatcaagggccagagccgctactgcaaccacaagcgcttcaacaacgcctttatgctgcacgcctccaccagcccgttctatccgctgttcgccgcgctggacgtcaatgccaagatgcacgagggcaaaagcggccagcgcctgtggcaggagtgtgtgcgcgtggggatcgaagcgcgcaaaatgctgctggacacctgcacgatgatcaaaccgttcgtgccggatcagatcgacggcaaaccgtggcaggcctatgacaccgcggcaatggccaacgatctgcgctttttcaacttcgtgcccggcgaaaaatggcacgcctttgagggctatgccgaatcacagtacttcgtcgatccgtgcaaactgctgctcaccacgccgggcatcgataccgcgaccggcagctacagcgagttcggcatcccggcgaccattctggccaactacctgcgcgaaaacggcatcgtgccggaaaaatgcgatctcaactcgatcctgttcctgctgacgccggcggaagacatcgccaagatgcagcatctggtggccctgatcgcccgcttcgagaagcacatcgagcagaactccctgctcagcgaggtgctgcctgcggtctataaaaaccaccagcagcgctacaaaaactacaccatccgccagctgtgccaggaaatgcacgacctttacgtcagctatgacgttaaagaactgcaaaaagagatgttccgcaaaagctatttcccacgcgtggtaatgaatccgcaggacgccaataccgagttcgtgcgtggcaatgtggaattggtctcgctagccaaggccgagggccgcatcgccgccgaaggcgccctgccttacccgccgggcgtgctgtgcgtggtgcccggtgaaatttggggcggcgccgcacagcgttatttcctggcattggaagaaggcatcaacttattgccgggattcgcgccggaattgcagggcgtttatatccaacaggatgaggacggctggaaccgcgcttacggctacgtcatgaaaaattaa

SEQ ID NO: 431302 - DNA, 783 bp, Serratia marcescens
atgcaactgacctttctcggcaccggcggcgcgcagcaggtgccggtgttcggctgcgactgcctgatctgccaacgggcgcggcgcgagccggcatttcggcggcgagcgtgcagcgccatgctcaactatcagggggaaacgaccttattggatgcgggattgccggctttggagcggcgattttcggcggggcaaattcaacgttttttactgacacattaccacatggatcacgttcaggggttatttcctttgcgttgggggtgcggaaattctattccggtgtatggcccgccggatgaacagggctgcgacgacctgttcaaacaccccggcattctggcgtttcagccgccgctggcgcccttcgccaccgtcgagctgggcggcatgcgcatcaccccgctgccgctgcaacactccaaactgacccacggctatctgatccaggcggcgggcgcttcactggcctacctgaccgacaccgtcggcctgccgccggccaccgccgactatctgcaaaacgtggcgctggatctgctggtactcgattgcagcctgccgccacagccgcaggcgccgcgcaaccacaacgatctgacccgcgcgcaggagacgcagcggttgctgcagcccaaacgcacgctgctgacgcacatcagccatcatctcgatctgtggctgctggacaacgaactgcccgccgggctggagctggcgttcgatcacctcagcgtcagcctcggtagcagtgcagccgatccgactccagcaccctga

SEQ ID NO: 431303 - DNA, 579 bp, Serratia marcescens
atgccagcacttctgcctgtcgcgctgtctcccggagcaagctttactctcgttatgagtagtgctctggcaggcggccataaagggctcttcagaacccttgcaggcacagccctaggcatatatacccatgcggttctcatcggccttggtataaccgctgtgatcatctcgtctccagaaatttttacagtgttaaaaatttctggtactgcctatctgctctggttaggagtgatacttatcctcagcgggataaaggcaaggcatagagcgttcactgaaacaaggagttcggtgactttaagagaggcctgggtagctaatgttttgaatcctaaagccatcatcttctatctgactgtcgtttcacagttcgcagggaaacagggaggcgtcagtaactatctggcattggcatcagttcatgtaatagttatgagtgtctggcttttggcagtcagccgaacactgatcttttcagtaaaaaaaaccaacccgttattgcttaaaaagtacgtcaatattgggggaggcgtactgctgattgttttttctttgcatagcctgatccagtag

SEQ ID NO: 431304 - DNA, 840 bp, Serratia marcescens
atgattttatctcaaataatttaccgacattttttaaaatttgtagagctagaatccaaaaaattttcacttcaatcacacaatacttttttgaaatgcaataataataccgacttttattacctcgaatattactctgtaaaagaacctaccccgccttataatgatgaaacctgtaaatcttgtaagaatcactttttagcaaaaaggccaaacattgttcatgaagaagacattgttcgtggaataggtattgaattttctttcatgaattatttgaattatatttttaaaatcagaaaaatacaacttgaatgtaaaaaagccgatgtggaaaataaaaacatgcctgatttgaaaatagagaacagttataatggagaaattttatgttatattgaaatgaagtcaatatttaaaccatttataatgataaataatcttgtaggtagtgattattattgtaatagtcattctcttactttagatagtgatgaaaaacttaaaaagcaatttaaacaaattgagttaaataaaatccaagacaaaactatctatgtttattggtacgatattccatgcttaaagggtatattctggtctacttatgaatatgtattaaattgcaaaaatagtcagagcgaatatgtaagacaaactgtcaaaggcgattacagagatggcagacaatcagggcacatacagaaaatatacttaaacattaaagatatgaatgatttcgaaactttaatgacttatatttcaggtcaaagaatcgtccctaagttaaaaatagatgattactctgacattgagagatacccgataatcactaattag

SEQ ID NO: 431305 - DNA, 933 bp, Serratia marcescens
atgaatccaaaagttagcgttgttatcgcaagttataatacggaaaagtatattgtcgagtgcgttaactctgtttttaatcaagactacccgaatgtcgagctcgtcgttgtcaacgatggttcgacagatgctacaggggcgttgttagcggaagttgtccgtaaccactccaatgtaaaagttgttaaccaagagaatcaaggtcagtctgtcgccagaaataatggcgtgagtgtggccaccggtgagtttatcgtctttctcgatagtgatgatatttttgacgtctctttgatttctaaatgcgtaatggcgctgatgtcaacgcacagcgatattgttttctttgatgcggaaaaattttatgatgatgaatgcgccgtcgaattctcgtccacttacgttcgcgacaacagcctgtatggtaagactatggatagcaagacatttttcaaagaatcatggcgattgaatagttatatcgtttcgccttgcatgtatatgtcgagaacacagttagtgcgcgataatccgttttatcccggaattattcacgaggataatttatttaccaccagcattttattggcacagaagtccacgatcgtttgcctgaaagagtcgttgtataagcggcgtcttcgtcgtgactcggtaatgacctccaagaaaaaccatcgccatgtcatcggttatttaaccgtcgccagaaagctgccggttttgcgttcgagaaccgatagagagctgaacaactacttaaatagttttatttctcgctgcgtcagtttttccattaacgatgccaagtcttgttatggacgagtgcctaaagcgctgagaaaagagtacctttccgcattcaaagagataggaataatgaacattaagaagaaagttctagtcaaatatttcttagctcagctgtaa

SEQ ID NO: 431306 - DNA, 1440 bp, Serratia marcescens
atgagcgcattaagtaatgcaaagtggatcactttgtcgcagatggggaaagtatttactcagttaatgagtatgttcgttttggcgaggctgttgccccccagcgaattcggcttgatggcaatggccttggtcgtgattaacttctctcttttgattagagatttgggcacatccgccgcgattattcaacataacgaattgaaagacagtaccaccaacgctatttttggccttaatatcaccatgggtacagtcattgccatcgtgattgctttattttcgccattaatcgccacggcgtttaaagagccgcgcctaacggatatattattattgctttccatctctttcccgatcgccagcagcggatccacgcacttggcattgttggaaagaaattcaaagttcatgattgtttcactgattgaactttcagccggcattctggcgcttatcgccgccatcatcctggcttatatgggcgccggcgtttacagtctggtgttttcaaacctgctgacggcgatcatctcaaccagcctgctctggatgaaaagcgggtggcgtcctaaaataacgcaaattttcaacaaaaaagagctgaaaacaatcttttcctttagcagtaatctgacgctctttaactttgtaaactacttttctcgcaatgcggatagcatgttcatcggccgatttatgagcgccaatattcttggcgcctactctctagcctatagaataatgttgtttccgttacagaatctgacgtatatcgcatcgcgctccttgttccccatcatgagtcgtcagcaagataatgtgctggaagtgaaaaagttatttctcaagtcggtagatgtcatttcgtttatcgtattccctttgatggtcgggttagctacgctacgcgagccttttttcaatatcgcctttggccccgaatgggcattaagcgcaacgattatgttatggctggcgccgaccgggattgctcaatccttgaccagctcaaccggtgcagttttgatgtccaaagggcgttcgggaatgttgttgatgctgggcatcctcggcatgctgctaatgattagcgcatttattattggcgtacagtttgatatcactacgctgactatgctgtactttttcgccaacgtcgttaactttattcctgcgatgactatcaccatgcgcttgttggaggggagtctctttgaggtgctcgcccggcttatcggccccgcattttgttcaggaatcatgtgcgcggcactgtattggctgcaacacacttcaccgctgggtttcgccatcaataatatcttctcgttaatcggcgcttcactgtttggtggcgcggtatatttgatgtcttcattggttttcctgcgcgatcgagtagggtattttaagaaagtcatactgaagaaagcgtaa

SEQ ID NO: 431307 - DNA, 828 bp, Serratia marcescens
gtggagaataacttcctgagtacgacctcttcaacgaaacgggatgagttggcagagaaagtactgcaaggtgataaaacactgcaaaccgcgaaagagtttttgcagttggaaaatgcggataaacgtagtgatgcgctggtcgccaagttcaataaagatccggttgggatgacatcgggagaacgcgcggaactgaccggttatctgatggtttatgctgccgaaatgcaagcccagtacggtgaggcagtcactaaagaactgattactggaatgctgacaggacaggcttatctgaaatcagccccgcagactgaagctcagcaaaaagcgcaaaccattatgaatacctggggctaccataaatccaatgcgagtattggtgaccctgtggttctgtatggtctggggccgctggggaactcaatcaaggctgggatgctaggcaatgcggcgataggcgttggtgttaatgcagccgttcaacttggtggtaaagatccatttaactacgttgatgcgatacttgccggtgttactgccgcagctactacagggaaaggcataggtgtatctgctggaatcaatatgggcggagcagctttgggttgtgcgctaaaaggggaggatccaactggagccgtaattggggcaggagctggctcattgctgggaggtaaagctggacaggttacttctggtgcaatcggccaggtagttgataaaactacttctgatataggaggtgctgtagtgggttctgtcatatctgaggctgttggtggtgctgtaaaagaagaaatagataaggcaggtaagaaatga

SEQ ID NO: 431308 - DNA, 267 bp, Serratia marcescens
atgaatattcagaccgttgggatcaagctattagtttatctggtctttttctgctttctattgtttgtggggatggccttaggcacaaggttagtaattgctttaattttttactatcaacacgatacttttatttttggctgggaaaacgatgttgtttactcagttaaagcaggtcttgctgcaggcattcctgcaggcgtcggagtttggctcatgtcgtggatgaaagcccgcaaagagaagcatcccctaccgaaagagtaa

SEQ ID NO: 431309 - DNA, 993 bp, Serratia marcescens
atgatgattcggatttgggtctacgatggcgtgctggcctccggcgtcgccggggcgatagacgtttttcacgcggccaatagcgtcaagctcgaaggcagcgacggcccaaagctacattggcgcgtggagtccctcgacggccaaccggtgcgcgccgcatccggccaaacgatcgcggtggacggcaaaatcgccgctcgtgggcacggtgacatcattctgttaaccgcgccctttgtcggcgatatggaagcgtttatcgcccagcgcgaacggattctggcgatctcccgcgccttgcaaagccgacacgccgatggcgcgctgttggctgcctattgcaccggcagctacctgctcgccgaagccggcttactcgacgggcggatcgccacgacccattggaacaaagcagcggatttcgcccgccgttatccccgggtagaactgcgggccaatgaagtgttaacggagcaagacggcattctgtgcggcggtgcggtgacgtcgtgcctgacgctcgccgtgcggctggtcgaacattgcttaggtacggcgcgtgcggtgaaaaccgccaggctgcttctgatcgatacccagcgtatcgcccagagcgcctatgctacgctggtagcagaaaacgaacacgccgatcgtctggtggcgcgggcgcaacagcgcatgcagaacacgttgccacaacgctttagcttgccggacctcgccgcccatctcgccgtcagcgaaagaacgttaaaccggcatttcaagcaggcgaccggtttgtctccccttggttatctgcagacgctgcgcgtggaagtcgccaaacgcctgctggaatcgggccacctttcgctcgccgctatcgggcagcgcatcggttaccatgatctcagcaccttcagacaacttttcaaacgtaaaaccggattatcaccgcgcgcctatcagcagcgttttgccctttcgccaccggcatctcgctaa

SEQ ID NO: 431310 - DNA, 531 bp, Serratia marcescens
atgccgatgatagatgcctatattccggaaggcgcgttgcaaccggaggcggaagcgatgttgtgcaaatcgctgacggatattctgttacgagcggaaggtttcgacccctccaacccgatcgcccagagcgtttccgtgatttttctccatcgcccggcggcgattttcgtcggaggcgtccgctctagcgtgccttactaccgaatcgttccttcggtgccggaaggacaatacgataatctttcaagacagacgctggtgaaagctgtgaccgcggcagttgctcaggccgaaggtagcgtcttcgaggaggtagcggcgcgtgtttgggtgttcccgacggaagtcacggacggcgagtggggtagccgcggcgtgatccgccacctgcccgatattcaggcgtttatcgccggtgaacaccagcggcaggtgggtaacgaccggctcgccaaacggcgtcgcgacaaggccttgctgatgttagcagcgatgctggacgctacagggtgcactcgcgggtcatga

SEQ ID NO: 431311 - DNA, 1740 bp, Serratia marcescens
atgaacgtccggctcaacacccatgtttccgcccggcgcctgctgcccaatggctgggacgtcatcgcctttccgctgatcatcggcctgatcgccatgatggccatcggcctgcatcaaaccctgcagccgctcgcgacgctgaaaacgcaggcggtatcgctcgatcctgccaacctgccggaatacgccctgcgtactacgctgcgcatgctggtggcgatggtggccgcgctggcgttttcgttggtctatggcaccctggccgccaagagccggcgcgccgagaaagtgctggtgccgatcctcgatattctgcagtcggtgccggtactcggctacatctctttcaccgtcacctttttcatcgccctgtttcccggccgggtgctgggggtcgagctggcggcgatgttcgccatcttcaccagccaggcgtggaatatgaccttcagcttctatcagtcgctgcgcaccgtgccgcgcgacctggaagaggtggcacgcggcttccatctgagtccgtggcaacgtttctggaagctggacgcgccattcgccatgccggggttgatctggaacatgatgatgtcgatgtccggcggctggttctttatcgtggcgtcggaagcgatcaccgtcggtaacaacacctttacgctgccgggcatcggcgcgtatctcgcgcaggcgatcctcagcaaggatctgcaggcgatcggctgggtgctgatcaccatgacggtggtgatcctggcctacgaccagctgctgttccggccattggtggcatgggcggacaaattccgcatggaaaccacccgctcggcgagcgcccccacttcctggctgttgaacctgatgcgccgcacgcgcctgatccacctgctgctgacgccgctgggcgcgctgctggccaaaaccgcgcgcctgaaactgaacctgcccgcccggccgttacgccgcggcaatagcgcccaacggcagcggcgttcgcgcataatcgatcggtgttggagcgccatcgtcatcctgctgacgctggcgatcgcctggcgcgtcattctctatgtacagaccggcgtgacgctcaatgacgtgggccatgtgatggtgctggggctgatcacgctgctgcgcgtggcggtgctgatcgccctgtcgtcgctgatctgggtgccgctcggcgtgctgatcggcctgcgcccgacgctggccgggaagatccagccgatcgcccagtttctggccgcgtttccggccaacctgctgttcccggtgttcgtcatcaccatcgtccacttccggctgaaccccgatatctggctgtcgccgctgatcgtgttgggcacccagtggtacattctgttcaacgtggtggccggcgccaccgcgttgcccaacgactatcgcgaggccgccgccaattttcacattcgcggttggcaatggtggcgccaggtgatgctgccgggcatcttcccctattacatcaccggcgccatcaccgcgtcgggcggcgcctggaacgccagcatcgtggcggagttcgtgcaatggggaagcacccaggtgaaggcgcatgggctgggtgcctacatcgccgaaaccaccgccgccggcgatttccccaagatcattttaggcatcgccgtgatgtcgctgttcgtcacgctgttcaaccgtctgctgtggcgcccgctttacgcctacgccgaatcccgcttccgcatcgattaa

SEQ ID NO: 431312 - DNA, 249 bp, Serratia marcescens
atgacctcagtttattcagcagaatatcaattggttataaaaataattcgagacgctcgtatagaaaaaggcatcactcaggtcaagttggccgaagcacttggccgcccacaatcctttatcgccaaggttgaaaatggcgaaagaaaattggatgtcgtggaatttgcattgatcgcgcggttactggatgtaaataccgggccaattatggaacgcattgggtgtaacgctagaaagctgagatga

SEQ ID NO: 431313 - DNA, 468 bp, Serratia marcescens
gtgcgcgtcgaccaggctaatcagctacgcgctaacccaaagtcacgtcaggtcatcaaacgtagccgctggctgctgctgcgcaacccggaaaatctacccgaagggcatgaggtaaaactcacggagttgctggaagcgaatcagccgttgaatgtggtatggctgatgaaaacagcgctgaaagagctgtggtatgccccgagtgaacaagaggcgcagagacgctgggtaagctggtacaggcagtctcaggaaagcggaataaaggcgttgcaacactttgccgagaaactgaaagggtatgccgggggtatcatcgcgagtgccagacacaggttgaataccagtgtactggaagggatgaacaataagataaaagtgatgaagcggatggcctatggataccgggataacgcttacttcttcctgaaaatcaaagcagcgttccccggtaaagcgcgatga

SEQ ID NO: 431314 - DNA, 1110 bp, Serratia marcescens
atgcgtagccgattaaaagtttttctcgtattaatgttagccgcgctattgtctttttctgtagcggcgtctcagatcacgcttcctcaaggtgtaatgacaaaaattgcgccgtggaaagctcataacaatcgagaaaaaccgctcattgccgttgtcggcgaaaataccttcacggaactgactgactttgtcattccttacgcactgcttaaagaagcaaacgtagcagatgttttcactgtcgccattcggccagggccaatacagctgtttcctgcatttaaaattgaggctgatatgacggccaataattttgatcgtctttatccgcttggcgcagattacatccttgttcctgccgtgcacgaaacggacaatcctgagttgttaagatggatacaagaacagcaagccaagggaagcacgattgttgggatttgcgatggcgtgtgggtcctgggccacgccgggcttcttgatggacattatgctacggggcattggtattcacgagaagatctggaagaacagtacccgaaagctacctgggtacaggatcgccgctatgttgctgatggaaagatcgtcaccacgacaggagtaaccgcctcagtgcctgtgacactggctttgatagaggcgattgcgggcgaaaaaacggcagccaagttagctgctcaggtgggggcctcggattggtctgtcaaacatgacagccgcgcctttgcgctgaaagtatccaatgtggttacggtggcattaaattatgtttccttttggcagcatgatatttatggcataaatgtttctgcgggagacgatgacattaagttggcatttagtgcagatgcattttcaagaacctatcagactcaggtgttctcttatgcgaaggacatgagccctgtgaagctgaaaagcggattaactctcttgccggatagaatagaagggcgtaatgataacgtagatcgttggatttcactcatggagagtgaaacagccatggaaacgttaaatcgcactctgagggatatcggagacacttacggttttcgcacggcggtattggtggcgttacagcttgaatataaattcgataattag

SEQ ID NO: 431315 - DNA, 234 bp, Serratia marcescens
atgcagactgaaggtttcccgaatgcgggcgtctcgcggcggctgatgtattcaggcgtggcgatgctgctcgttctgttaatgctgtcttttcgcggcgatgcgcagagctatcgccacagcggccatcatgcttccgctgtgccgcgggttcatcaggtgacgccgccggacgcctacggctgcgtcaaagcgcgcattaaaaagcagctgcgccgcctggctcagctttga

SEQ ID NO: 431316 - DNA, 1338 bp, Serratia marcescens
atgcgcttgatttccgccttcaccagcgacaccgataaagccttgtggcgcctggctctgccgatgattttctccaatatcaccgtgccgctgctcgggctggtggacaccgcggtgatcggccacctcgacagcccgatctacctggggggcgtcgcgatcggcgcggtggcgaccagcttcctgttcatgctgctgctgttcctgcgcatgagcaccaccggcctcgcggcgcaggcgctgggagcgaagaacccgcaggcgctggcgcgcgcctttatgcaaccgctgctgctggcgttgttggccgggggggcgatcgtcctgttgcgctacccgcttattgaactggcgctgcggatcgtcggcggcgatggcgcggtgctggagcaggcgcggcgttttcttgagatccgctggttgagcgcgccggcggcgctggccaacctggtgctgctgggctggctgctcggcgtgcagtacgtgcgtgcgccggtgatcctgctgatcgtcggcaacctgctgaacatcgtgctagatatttggctggtgatgggcctgggctggaacgtgcgaggggcggcggcggcaaccgccatcgctgaatacgccacgctgctgctcggcctgtggctggcgtggcgggtgatgcgcctgcgcggtattaccctgtcgatgctacgccaggcctggcgtggcgatctgcgccggctgctggcgcttaaccgcgacatcatgttgcgttcattgctgctgcagctgtgctttgcatcgctgaccatcttcggcgctcgcctggggagcgaggtggtggcggtcaacgcggtattgatgaacctgctgacgttcaccgcctatgcgctcgacggcttcgcttatgcggtggaggcccattcgggccacgcctacggtgcccgggacgacagccagctgcgcaaggtgtggcacgcggcctgcaggcaggcaggactggtcgcgctggccttcggcctggcgtatgccgttaccggccagcagatcgtggcggcgttgacctccctaccggagctgcgcgcgttggccgcccactatttaccgtggcaggtcattttgccgctggtcggggtgtggtgctatttgctggatggcatgtttatcggcgccacgcgcggcgctgagatgcgtaacagcatggcggtggccgcggcagggtacggtctgacgctgttcagtgtgtcgttgcttggcaaccacgggctctggctggcgctggcggtgtttctgacgttgcgtggcgtggcattgggctggatttggcaccgccaccaggtgcgcggcagctggtttactgcacattaa

SEQ ID NO: 431317 - DNA, 915 bp, Serratia marcescens
ttgacgattttcaatgaaaaactacccacaattaagcagttgcagtgttttctcgccgtcgcgcacgagctgaattttcgccgggcagccgagagaatgcggatgacgcaaccgccgttgacccggcagatccagtgcctggaagaggtgatcggctgcccgctgtttacccgtgatacccatcaggtgcatttaactgaatcagggatcaagctggaagaacaagctaagcaactcattaaccagctttctcatttggttcaacaactcaatgtcgagagcgacacggtgaaaatcggcgttacgcgtacgctggacttcagtctgattcccaccatcaatgcccgtttggaaaagctcatcgatgccgatgagatctccgctcaccaactgacgtcaaaacagttgttgcagatcttggctcgggggaatctggatatcgcgctcgtcggcgagaaagcgcctagcggcgaagaagcctttgaatttcgctggttgtatcgagaaccgcttatgttggcattgcctacgtctcatcccgccagcattcaagatagcgtatcgctgcacgacgttgtcgacctgccgctctactggttctcccgcagtgcaaacccgggtttttatgacaagtgcgaaaatgtccttcaatcactgccttttgtactgaagcgcaaagcggagcccgacgattcgctgatcatgctggccagcatcgctcggggaaaaggtatggcgctgatgccgcagtcgatgtgcgtatccacccgggcaggcttgtgctatcgccatctggatgcacaaatgaatgaaagattgaatatcgacgtctatctggtgatgcaaaaaaacgaaaagcgggtcaacgtattgaacgcagcccgacaattgttggcctcatcgccagaactctga

SEQ ID NO: 431318 - DNA, 1215 bp, Serratia marcescens
atgaaaaaattatcaaacgatagccagccattgagcattaaaacctggctggcattggtgatattggccctgtccacgttcactatcgttaccaccgaattagcgccgattggcctgctgacgccaatggctgaaggcttgcaccagtcagaatcgatgatcggtctgacggtcactttgtatgcgtgggttggcgcgatcagcgcgctgttatcttcgctgtttctgggcaattggccaaagaggccgctgttgctgacgttgacgctgatcatcctggtgtccaacagcctgtgcgccacggccgaaaattaccactggctgctggcagcccgtgtgattggcgctctggcgcacggtgcattttgggcgatgatcggcgctacggcggtatcgctggtgccggcaaggtttatcgggttggccacctccatcgtgtttggcggcgtctctgcggccagcgtgttcggcgtgccgttgtcgaactatatcgggttgaatgtcggctggcggcccgccttttggctgatgtctttgctgagcgcgatcgcgctggcgggaattgcgttggcggtgccgaaggtgaaagccaacagcgccctgggctgcgaggcattggcgcgcgtactgcgttcgggcgcgctgtggcgcatctacggtgcgacgttgctggctatcacggcgcatttcgccgcattcacctttattgagccctggttacacagcgttggggtggtcacctccggcatgatcccggtgatgctattcgtctttggcatcgccggtctggcgggcaactttgttaccggcatgttcatcgacagatggatgaagccgatggtggtgttgtctgttgtaccgatcgccgcaacgctacttacccttggccagatgggggacaacctgacaggtgctgaaatcctgacgttggtgatcgtctggggcctggcggtttccggtatcttcgtcggcttccaaacttgggtactgcgcctggcgggcgacaatgcgttccccgcttcggcgatttatgtctctttctttaatggcgccatcggctgcggcgcattggcgggggcatggctggtatcggcatacagcattccggcgttgttgatgttcgccggtatcgccattgcgctctcgctgctgctgattgcgatgattccggttaacgctgaacaggcggaggggctggcgggagatgcgtcatga

SEQ ID NO: 431319 - DNA, 1149 bp, Serratia marcescens
atgtcacgcatcaatataaagaaaggttgctttggattcgtagccgctttgttgcttgcttttgacgtgggagcggccctccccgccttcagccccggcaccttgattaccgtcgaaaaagaggcaaaacccacactgtctgcagccggtcatgagtatcggatgacttatatttccaccgcgttcaatggccaaaacacggtggtcaccggcctggcagcattccccacctccgcttcaggcgccggggggtaccccatcatcagttggggtaacggcaccacaggcttcgctccgcaatgcgctccctcgctggatgaaaatctcagcagggacgcctatctcaatgaatggcgaaagcggggttatgccgtgcttcgcaccgactacggcggctggggcgcgcaagggccgcggccccttctggatgggaaaagtaatgccaacagcatcgctgatatcgtgatcgccgcccatgcgttaccggaaaatctcagcgcggactggttggctgttggccatagcgaaggtggcggcgccgtgatttggaacgccgcagctacggagagaacggccaagcgatatccattgaaaggcgccatcgccatcgcacctgtcggtccgggcatcagtcagtttatggaggccgcgctacggggcggcgccgtacgtcaaaaggctcaaccctttatttccgttaccgtactcggcgccgcggccgtcgatccttccgtcaacttacagcacgttctgacctccccgatacttaaacaggcgaatgaggcgcgtcggcaatgtctctccacgctgatggcggaaacacctcagcttaaaccaggggaatatctcaaggccggcgcagactatgagaaaattcaacgctatctgcatgaacggcaagatccctccggcctgatattaaaggcaccgctgctggtattacagggagagcaagatgaaacaaccgttacccctgacaccacccaacaaatggtacgtgcgctttgcacgcatggcggaaaggccatgtatcgtcaatatgctggggaaacgcaccgttccgtgatcgccgcttcgcaaaacgatgcgttcggctttgctgaaaaagcgctggcaggccatggcgtgcaatgtgataacggccaataa

SEQ ID NO: 431320 - DNA, 240 bp, Serratia marcescens
atgatttttgttctgatcttcgccttcttgccaaacatcattctatctcggctgctgcttacaccgaatatggcgttgaaaatgattcacaagtctaatgaatcggggttcggcgatccgaaggtgcgctcgacagcctacctgctgatgctttatgccgcagcagcggtaatcgcttggcgatgtctgcgttttattccaaaaaaaatcggcctagcccgtcacactgctgaacgttaa

SEQ ID NO: 431321 - DNA, 1950 bp, Serratia marcescens
atggcatccccctcttctaaaaccagagatgacatcacggtgctcagagcattcgccgtcatttccgttttaggcttccattttgccatgcccggcttttccgccggatttatcggtgtcgatgtcttctttgtcatcagcggctatctgatcagcggcctattaattcgcgacattgaacagggccggatgaacttcgcgcaatttttgctcaaaaggggattcaggttgctcccagcgctgatcgcgacagtcgccataaccttcatcgccacctgttttattctgcagcccatagaatttgcaaataacgccaaagcatccctatccgcactgttttttatctctaacttttatttttatgcgataggcgggtatttcgatgcggctcccatcaccaaaccgttgctgcacacgtggtcgctgtcgatagaaagccagttttatcttctgtggcccgtgatgctatgggcgacaatgcgcaaacgcattcccgccaggctgacgatttccgtctttaccgctcttctcttcttttcttctctgtatgcgctgcacagaaacggctccgccgcatatttattaacgccgttccggctgtgggagctagcccttggcggaatgttctataccttcaacgcttccgccatcgcgcgcagtaaaacgatcgccaacgccgtttacgccgccagtctgatcggcattgccgcttttgtttacttcctggatgaaaacattcccttcccgggaacctatgtgttaataccgacgctctgcaccgggcttatgctggttttcggccaagaagcccccctcgcacgctggttcgagcgcaaacccgtgattcacatcggcgagataagctattcgctttatcttgtccattggccgaccatggtcatggtcacatatctcctcggagacaaaaccctcgccggcggcttgatctcattacccctcagctacgccctcgcctggctgatgcaccgctatgtagagcagcgctatcgcgccgcctggcggcaccggaataaaaacgcgctcatcgcaggctacctcgccgtcttcgccgcgctgtccgcgctggccgcctccgcggccctcaacggctggatctggcggctgcccacagatttgcaagcaacgaactcggccttcaacaaacaggcggaagatcgttatgtctgggtgaacagcaatgcgtttaaacaaaacgacatcgcgaaatcggggaaagtaagactggtcatcatcggcgactcccaggctgcggatttaatcaacgcaatcatggagtcacgctatcgggataatttcgacatcttgtccatacaaagtgacgttaggtgcgggacgccttacgtcagcccgcccgacgcagaacgttatcttgcagagatcaacctcaacaccgcctcttccagcggattaaggggattctgcgggcggaaattcaccggcctcttcagcgagtccaatgtgcgggaaatgaagagcgccgatttcatcttgatcgccatgaattggaaaccctacagcgccaaatatctcggacaaacgatcggtcggattgagtcgaatggcgttcatgcgaaaatcgtcgtggtgggtaaaaaaagcctcaaggcgaacgggattttcatactcaacaaaaaccagtcgctgcagcaggccaatctcttcgcggccaggtacatcagccaggccacaacggaaatcaaccgcggcattgcatcatcattgccagatggcgtgtcatttttccaaccattgagcatcgtctgccctgaaaaccggcaatgcctcatcgtagatgagcataatagcatcacctacagtgacgaagcgcatttcacgagaaaaggcgcccagttgttctcgaacgaaatcgtgtctcaactcggcttgctgggcaccgtcccgtccgctgcgggcaacaagggcaattaa

SEQ ID NO: 431322 - DNA, 912 bp, Serratia marcescens
atgtacttccctttactcagaggtaagcagttcgagtttacagcgctaagagaactatcgggcattgtacctaatagtctttttaaaccagttattgagcccgtgcgagaaaacacaaagcagctcgagacaacaattaactcattgaacaaaaacaatattacaccacttattattgtcaattctgagataggagaactcaaaggaaagacagatcaattcattaatgaactatataaaatcaaaggtatatcattcataccgtgtattaaatatatagataatattcaagagtttgatcgattaaatagtcttataaaaggagaaaaagcatcatatgtggagagtggtgttacccgagatttagtttctcgtttaaaactatttgcaattaatattattccagaaggttctcctaacattgtactacagcaattatcaaatattgtcttaatggatgacccctttaaaaagaaaaaaaggaacgctgattacccatcaaattcatatttttcagatctgcacgtccgttataaaggtgtccacaattcagtaattggttttggtgatttcaatattgcaggttcagattatgcagagtctggaggccctgcgtatgtggtgactattcatgctagctatttggatagtgatgaatttgatgcaatgtcagttaagcatttttcatcaatagatgatggtaccccctcgaatccatcaggaaaattccagcaagctttagaaaagcttgtcttgcatgatcaaacttatcccggtttctttgataacacattaggcctacgtgagtttaaagcacttcatgcacgtagacattaccctgggcttggccaggtcaagcagttttcgatgcaacaccatattgaaacaatctgcaacttcatcgcaatctag

SEQ ID NO: 431323 - DNA, 897 bp, Serratia marcescens
atgattaatcacaagaatgttggacaactattcactagccaaactataaatgcggttgcggatggtgatttttccttgcttcatcagttagcggcagcatctttgtctcctaaattatttcctatgaaaatatcagatttttttgatattgctttcaaaaaactttcaaatgaatataaatctgaatattttttcaaaaacattatagctaacgaaatgtttttgaaaaaacataaaataaacaaagcagtgatgctttctgagtttcgtgttggagcaaataaagctgactgcgttatattgaatgggctgtccacctgttatgaaataaaaacagagcttgataacttaaaaagattacctgaacaacttgaggcatatattggtttgtttgataaagtttatgttgtctcagcaaagtctcatgttgagaaaataaaggccattattcctgaggtggttggtgtaatggaacttacgcaaaagaataaattagaagaagtaaagccagcactggttattgaatctgaaattaatccaaagctaatgattagctcgatgagagttgctgagtataaacatatggccgaaaaaatatctgggatgagaatagatctcccaaacatggatgtatattctttttgcctagaagtattcgagaacacagactctcaaacgctaagaaagcacttccgtgactctctcaagatacatagaacaaacgacattagttttattaatacgttacctagatcactaaaatcgtcagcaattagttttagtatcaatcagtctcgtcagagatcgctgaccaaaatactatcaagctacattgaaaaggacgatatatgtacttccctttactcagaggtaagcagttcgagtttacagcgctaa

SEQ ID NO: 431324 - DNA, 1905 bp, Serratia marcescens
atgacaattacaaaaaatacgctgctggcggtggtctcctccgtcacggctttttctggatgggcgcaagacaacacgacagccacgaatggcgataacctggtggtgaccgccaaccgcttcccgcagccggtttcttccgtgctggcttctacgtcgatcgtgactaaagatgatattgatcgttggcagtccaaaaatcttttagaggtgatgcggcgactgcccggcgttgatattgctcaaacgggggggttgggacaaagcgcctctttgtatgtcagaggttcagaggcgcgccatactttagtgctcatagatggtgtcccaatcgcgaaacctggtattacaggcgtggcggattttaaccaaatacctatctcgttagtgcaacgtattgaatttatccgtggacctcgctccgcagtatatggtgccgatgctattgggggggtcattaacatcattacacagacggatgcagatagagcaaatctgacggctggattgggttccaaccgttatcaggaattcagtggtagtttccaacgcaaggtgaacgacaatactcgtgtcacggtagcaggagcctttcaggacagcaaaggctacaacatccaacctaactcgacatatagcgtagatagcgatcgtgacggttggggtaacaaatcgttctgggctgggattgagcataagtttagtgaacaggtgtctggttttgtccgtggttatggctatggagcaagcagtgactatgatgcggggtctgcaggaagccctgatgaacagcagatctataatcatacctatgacggtggactccgctatcagcaagacagttttgcctcccagatcgtcgccagctaccagaaatataagacacttaattatctcagtacggaaggccgctatgccgatagtaattccctggatgacatggagcagcgtaatgtgcaatggggtaatacgttagcactgggacatgggatggtgagtgcaggccttgactggaagcaacaaaaactggtttcaacgggtcttggttatgactctgtaacttatttgccttatcgagcgggtgataattacaaacaggataatactggggcatatgttactgcccagcagcagttcgataccatcactgtagaaggtgcgcttcgtggcgatgataacgaggattttggtacgcatggcacatggcaaacggctattgcttgggagttcatccctgaatatcgtctaggtatctcttatgggacggctttccaggcgcctacgttaggtcagctatatggccagaggcgttttggtatcgcctcaaatgaacatttgaagcctgaagagtcgaaacagtgggaagccagtttggaagctacctctgggccattgcactggcggttggctgcttaccacaataaaactagcaacctgattgactattactataacactttgacgtcatcgggcgcctactacaacattaaggccgccactatgaaaggtcttgaatggagtggggactttgataccgggattttcaatcatcagattacgctcggttatcttgatgctcgccgggatgaagataatgaagtgctggctcgtcgtgccaaacaacaggctaaatatcaattgagctgggtaatgtatgactttgattttgatgttagctatcagtatttcggtaagcgcttcgataacaacaccagtatctataatacggaacagcgtcgtttaccgagttatagcactgttgatctcgcagtttcgtatccggtcacatctcatctgacagttcgtggtagaattgccaacctgtttgataaagattatgagacggcctatggctacgctactccaggaagagaatactacctcactggaagctataccttctaa

SEQ ID NO: 431325 - DNA, 918 bp, Serratia marcescens
atgaatattcgtgatttagagtatctggtcgccttggccgagcaccggcacttccgccgtgcggccgattcatgccatgtgagccagcccacgctgagcgggcagatccgcaagttggaagacgagttgggcgtcatgctgctcgagcgcaccagccgcaaggtgctgttcacccaggcgggtctgttgctggtggagcaggcgcgtaccgtgctgcgcgaagtgaaagtattgaaggagatggccagccagcagggcgaagccatgtccgggccgctgcacatcggcctgatcccgaccgtggggccttatctgctgccacagatcatcccgacgttgcacaaaactttcccgaaactggaaatgtacctgcacgaagcgcaaacccagcaactgctggcgcaactcgacagcggcaaattggactgcgccattctggcattggtgaaggaaaccgaggcgtttatcgaagtgcctctgttcgatgaaccgatgaagctggcggtgtattccgatcacccgtgggcgcagcgcgagcgcgtggcgatgccggatttggcgggagagaagctgctgatgctggaagatggccactgcctgcgcgatcaggcgatgggcttctgcttccaggcgggcgcggacgaggatacccacttccgcgccaccagtctggaaacgctgcgcaatatggtcgcggccggcagcggcattaccctgctgccgtcactggcggtgccgccgcagcgcgaacgcgacggcgtctgctatctggattgcttcaagccggaaccgaagcgcaccatcgcgttggtgtatcgccccggttccccattgcgcagccgttatgaacagttggccgaagcgatccgcgagcacatgcagggctatatcgacaacgcgttaaaacaggcggtttaa

SEQ ID NO: 431326 - DNA, 765 bp, Serratia marcescens
atggaaaaagaaccagtgaagatttcaaaactcaaaacgctagcaattatcgcttccgcaatggtttgtgcgcaaagtgctcaggcgggaacctggtcactcggcgctgccgcgctggttagcccggacgcgtatcgcggttatcaggaccgcgtttatccggtgcccgtcatcaactatgaaggtgacgacttctacttccgtactctgaccgcgggctactacctgtggaaagatcaagaaaatcagctgagcatcatgggttactacacgccatggggctaccgtcctggcgacagcgacgacgatcgcatgaagcgtctcgacaaacgccgcggcacgctgatggccggcctggcctattcgcacaacgcagagtggggcaccctgcgcaccaccttcaccggcgacacgctgaacaacagcaatggtctggtgggcgatgtggcttacctgtacaagtttgatctggacgcactgacgctggtcccaggcgtgggcgtgatgtggaacagcaaaaaccagaacaaatattactatggcgtcagcgccaatgaatctcgccgcagcggcctagacagctacaccccaggcgatagctgggcgccgtatctcgaactgagcgccaattaccagatcaacaaaagctggaacgccttcttcgtcggccgctatgtgaagttgtctgatgaagtgaaagatagcccgatggtggataaatcctacaccggtttgttgatgacgggtgtgagctacaccttctaa

SEQ ID NO: 431327 - DNA, 651 bp, Serratia marcescens
atgaacagacgtgaaagtgatgaaatgctggctgcagagtatgctcttggcacgctcagagggaatgctcggctgcattttgagcgccgtctgaaaacggatagcgttttagcttcccaggttggaaaatggcaaagtatctggtcagggctggatatcggtatcacgcctgtccctccgcccgaaagcgtttggaaaagaattgaattaaatctgcctcgatactcttcgtccagacggcatatccgaaactatattgcatggggggttgcggcgggaatcggcgtattgagcctgagttcgtggtttcattggcgtacgccagagctgaaaccgctagttgtgctgaacggaacgaatcaagtgtcgtgggttgtgagttccgataggcaaagaaaaattgttcgaataacaccattaggcctggccgctatccccgtcggaaaaagccttgaattatggcttatccccgttgggcataagcccgttgcaattggccttgtaaacgagaaaggcatgagtcagttttatttggcggatgctgatttagttaaaggaacaacgattgccatcagcctggagccgttaggcggctcgccgaaccaacagccgaccggccctgtgctgtattccggcgaattggttctatga

SEQ ID NO: 431328 - DNA, 549 bp, Serratia marcescens
atggatcactcgttgaaagaaaaccagataatgtgcttaaaggcgatcgctaatggcgatcgccgagcatttgaacgcctgtacagttcgacatccgcatgtttattcgccattgcgctacgcatgctgcgtaatcgtcagtgggcagaagaggttctgatcgacggttttcttaccgtatggcaacgtgccggggattatgatccgaccatgagttcgccaatgacatggttgactcatattataaggaatcgatgtattgatggattgcgtagccggcacggacgccatgtcgaactggaagaagaatatagtgaccaaatccttcagtcggaaaatgaacgtttggatgacgatggggagcaggctaaaaagctaaacgattgtttgaagcatctgacttctgaacaacggcaaagtattgttttggcatattatcaagggatgtcgcacgcggatatcgctgattggttgcagcaaccgctgggtacggttaaaagctgggtccgtcgtgcgctttcgcatctgaaggattgcctaggcctatga

SEQ ID NO: 431329 - DNA, 564 bp, Serratia marcescens
atgaaaacgcttatctccactctcttcaccggttcattactgttcagcgccgcaaccctggcagttgccgctgattcggcatccgtgatggttgggggggctgcgatgtacccctcaaaaaacattgtgcaaaatgcgctgaattcaaaagatcatacaacgctggtcgcggcggttaaagccgccggcttggtcgacaccttgcaaggcaaaggaccttatacggtctttgcgccaacgaatgccgcattcgccaaattgccggccggtacggtggataatctactaaaacctgagaacaaaactctgttgaccagcgtgttgacctatcacgtcgtggcggggaactatgacatgaaagcgctggagagaaaaattgagcaaggcggaggacgggcggaacttaaaaccgttaatggccagtcgctatggtttatgaataacggcccgcataatattcagatcaaagatgccaaaggcgacgtcgccaacatcagcacctatgatgtgcgacagcaaaatggtgtaatcgaggttattgataccgtgctaatgcccaagtaa

SEQ ID NO: 431330 - DNA, 810 bp, Serratia marcescens
atggaaaaggataaggacatggaagaaaaaacagaaggcgtcagcagtgaaatgcgcgtcaaaataaaaaaggtgttgcgtgaaatagaagcgcgatatgacgtaagggtgttatatgcctgcgagtccggcagccgtggatggggatttgcttcgccggacagtgattacgacgtgcgtttcttgtatgtgcatcggcctgaatggtatttgcgcgttgagacgcagcgtgacgtgatcgaactgccgatagatgatgagctcgacgtctgtgggtgggaatggcgcaagtcgctcggcctgttaaagcgagctaacccgacgttgatcgaatggctggattcaccggtggtttatcggcaggatgctgaaagtgtagaggcgctgaaaggcgtcgtacctgagtggttttccgcaacgcgagcacgctggcattatctttccatggcgcgtaaaaatttccgcggctacttacaaggcgaggaagtgcgcctaaaaaaatatttctacgttctgcggccactgctggccgtcctttggatagaagcgggcaaaggggtgccgccaatgcgtttcgatcacctgctggctggaacggtgagcgatccattgttgttagcggaaattcatgccttgttggcggtcaaaaaaagagccggagaagcagaatacggtccccgtagggagctgatacacgcgtttattctgcaagcgcttaaggctcatgaacaaccggctgaattacctgatagctgcgcgcgcagtgatttctcgctcgacgaattgctttataaaaccgtcatggcgtaa

SEQ ID NO: 431331 - DNA, 597 bp, Serratia marcescens
atggcacgtaaagcgcgcgcagaaatgattgaagaaacccgacaaaaattggtggcggctgcccgtcagcagtttggcagcgtggggtatgctgagacggtgatggatgaactcaccgcgcaagccggtatgacgcgcggtgcgctctatcaccactttggcgacaagaaaggtttgtttttggccgtcgtgcaagaaatcgacgccgagatggatgcgcgtctggcggcaatttccgccaacgcgcccgacgagtggagcgcttttgccgggcgctgtcgcgcctatctggcgatgacgattgaaccgcaagtgcagcgcattttattgcgtgactcaccttctgtattgggggcggaacatcttcaggccagccggttgcaatgtatcgcctccatgacgaatatgctgcaaaagctgatggaacagcggacgatcgcgacgaccgcacctgaggtattggcgcatttaatcaatggcggcctgatggatgccgcgctttggatcgcgaatcagcaggatgagaagattgctttggagcaggcgttggccggtttgacgctgttgctgaacggcttgcggccaacggccgcttaa

SEQ ID NO: 431332 - DNA, 468 bp, Serratia marcescens; identical to SEQ ID NO: 431313

SEQ ID NO: 431333 - DNA, 1809 bp, Serratia marcescens
atgttgcttaaaaagggaaactctctacgacgtttggcgctgagtggcgctatcgcctgtagtcttgtgtcgtcgttttccgcatcggctaccgtcacggcgttgccggtggcatcagcaggcatgtccgttgcgcagagccgttctgagctgctggccgcgttgccgcgcggcatggatttgcactacctttccacgctggcgccgctgtatgcggcgaatcacatgcagccgatgtggcaggatcgcgaggccgttcagcagtttcagcagcagctggccgagctggcgatgtccggcgtgcagccgcagtttacccaatgggtgaaaatgttgaccgatccggcgctcagtgaagcgggccgcgatgcggtgctgtccgatgcgatgctgggctatctgcagttcgtctccgccatcggtgccaacggcaacaactggctgtacagcaatattccctacaagcttggcttgccgcccaccgcggtgatcaaccaatggcagctggcggtgcgccaggcgcgtaccctgagctatgtgaattcgctcgcgccgcagcatccgcaatacgccaagatgcatcaggcgctgcgcgacatgctggcggacaatcgtccgtggccgcaggtgggcagcggcccgagcctgcgcccaggccaaatgagcaacgatattccggcgctgcgtgagatcctgacgcgcaccggcatgctggcagcctcggcgccggaagcggagccggaaccggcggtggtctcggcgaagagcaatgagcccgacgacggcgggctgacggtagacgaagagaaaagccgcgtgacggtcagcccatcggcggcgccggtgacggagttgactgcggaacagacgccgccgcaggttggcagcgtggtgagcgacaatctctataccaatgagctggtggagggcgttaagcgcttccagaaatggcaggggttgacggcggacggcgtgatcggcgtgcgcacccgtgagtggctcaacgtatcaccgaaaacccgcgccgcgctgctggcgttgaatatccaacgcctgcgaattttaccggggcatgtcggcaccggcattatggtgaacattcccaactactcgctgacctactaccagaacggcaacgaagtgctgtcttcccgcgttatcgtcgggcggccgagccgtaagacgccgctgatgagcagcgcgttgaacaacgtggtggtcaacccgccgtggaacgtgccgaccacgctggtgcgcgaggacattgtgccgaaggcgatgcgcgacggtaactacttccagaaacacggctatacggtgctgtcgggttggagcaacgatgcggaagtgatcaacccggcgatgatcgactggagcatggtttctgcgcgcaacttcccgtatcgcgtccgccaggcgccgggtgccaccaactcgctggggcgcttcaagttcaatatgccgagctcggacgccatctacctgcacgacaccccgaaccacagcctgttccagaaagatatccgcgcgctcagctccggctgcgtgcgggtgaataaggcttccgatttggcgaatatgctgctgcaggacgccggctggaacaacagccgcgtgtcttccacgctgaaagaggggaataccacttatgtgaatattcgccagcgtattcccgtaaaactgtattatctgaccgcttgggtttcggatgacggccaaccgcaattccgcacagatatttacaattatgataatacggtgcgatcgggcgcacaaattttggctcaggccaaaaaattaatgcagtaa

SEQ ID NO: 431334 - DNA, 504 bp, Serratia marcescens
gtggtggcaaagtatggccgggaggttatcgaccgggtccgcgtcgaccaggccaatcaactccgtgataacccaaaatcgcgtcaggtcatcaaacgcagccgctggctgctgctgcgcaacccagaaaacctgcccgaagggcatgaggtaaagctcacggagttgctggaggcgaatcagccactgaatgtggtctggctgatgaaaacagcgctgaaagaactgtggtacgccccgagtgaacaagaggcgcagagacgctggataagctggtacaggcagtctcaggaaagcggaatcaaggcgttgcaacacttcgccgagaaactgaaagggtatgccggtggcatcatcgcgagtgccagacacaggttgaataccagcgtgctggaagggatgaacaataagataaaagtgatgaagcggatggcctatggataccgggataacgcttacttcttcctgaaaatcaaagcagcgttccccggtaaagcgcgatga

SEQ ID NO: 431335 - DNA, 540 bp, Serratia marcescens
gtgattaacggaacgctgcgcaccctgctgttgacggcgctgatcggcaccccggcggcgcatgccgataccgtcagccagggcttcacggtcaacgcttcgatcatcaaaggctgcgtgctcggcagcggcatcaccaacgtcacctcgttcggcaccttgagtttcggccaggtgtcgtcgctgagcagcaatatcaatatcgtctccagcgccggcgctggttctatcctgatacgttgcaacccggggatcagcgtctcactggcgttgaacgtcggcaacaatgtcaccggctccatcgccggcggccgcaagttgctgaactcagccacctcggaaacgctgctttaccagctctatcaggacgccaactactcgattctgtggggcgacggcggcaacggcggttcagtgcaaaccgtctcctccaccggcagtacgcaagaaataaaaatctacgccagtttaatggcgagcagcaccttgcccaccagcggcacctacaacgatacggtcttagtgacggtgaattattga

SEQ ID NO: 431336 - DNA, 537 bp, Serratia marcescens
atgaaaaagactctggcggcattaacctcaacaacgctcttgctgtgctcctttggtacgcaggcagtgaacggcaccattcagggcacgctgggcgtgacgctgaccatcggcgccggctgcgtggtcaccggcggcaacagctccggcaccaccaacagcttcggctccatcagcttcggcacctactcctcactggctaacgttatcaccgccagcgccaccggcagcggcggtaccggcacgctggggctgaactgcaccaccggcaccaactacaccgtggcgctggacaacggcctcaatgcctccggcagccagcggcgcatggccagcagcgtaccggcctatatcagctataacctgtatcaggacagcgcccactcgctgccctggaacaataccaccggtaccctcaccggcaccggcaccggatcggcggtgccgctggtcgtctacggcctggtgcccgctgcgggcaccaccccggcggccggcgtctacagcgataccgtcaccatgaccgtcacctggtaa

SEQ ID NO: 431337 - DNA, 1137 bp, Serratia marcescens
atgacgctgacgatgccttctaccctctcttcccgcgccgaggcgcgggataacagccaagacatcgccgggccgtcgggtattcagctcgaccgcgtcagcgtgtcgtatcgcggcaccgaggtgctgaaacccctgacgctgactatcgcccccggcgaagtgctggcgctgattggcccctccggttcgggtaaaaccaccgtgctgcgagcgatcgccggattcgtgcagccctccgccggtcgcattaccatcggtgacgtcgatgtcaccgacgtgccgccctatgagcgtggtctgggcatggtggtacagaactacgcgctgtttccgcatatgcgcgtcgaggacaatgtggcgttcggcctgcgcgcccagggcaagccgcgcggcctgaccgccgagcgcgtcgaagaggcgttggccatcgtcggcatgtccgcctacgccaagcgctatcccagccagctctccggcggccaacagcagcgggtggcgatcgcccgcgccatcgcggtgcgccccaaagtactgctgttggatgagccgctgtcggcgctggacgcgcaaattcgccacagcatggtggaagagatcgcccgcctgcaccgtgaactgcctgacttgaccatcctgtacgtcacccacgatcagggcgaagcgctgacgctggcggacaagatcggcatcatgcgcgacggccacttgatcgcccacggcgagactcgcgcgctgtaccatcatccaacgagccgcttcgccgccgagttcctcggccgcgccaacctcctgccggccaccgcgctggagacgaccaccgggcaaggcatgaccaccgtcagctgcgccggcaaagtgatcggctgcttcacctacggcgcacaacgcggcttcgataaattgctgtgcattcggccacagcatattgcactcgatgccgatgctcaacgcagcaactgcatcatcggtacgctgcgcgacattcactggcagggggagttgacgcacctgcagttcgacgcggaaggccatccgctgcgcgtggtcaccacccatcgcagccagatgccgcagctcggcgagcgcgtgccgctctatttcgcccccgacgacgcggtactgatcgaggactga

SEQ ID NO: 431338 - DNA, 1332 bp, Serratia marcescens
atggaaacggcttcaaataatagcgtgctattggatgatatatcgcctgctttgcgggcgaagatgacggaaagtgaatggcgcgaggcaattaaattcgacagcactgataccggctgggtcattatgagtattggcatggccattggcgcaggcattgtgtttttaccggttcaggtcggattgatggggctatgggtatttttgctctcctcaattatcggttatccggcaatgtatttattccagcgtttatttatcaatacccttgcggagtcgccggagtgtaaagattatcccagcgtgattagcggctatctggggaaaaactggggcatcctgctcggtgcgctctattttgtcatgctggtgatctggatgtttgtttattccaccgccatcaccaacgacagcgcttcttatttgcacacctttggcgtgacggaagggctgttgtccgacaatcccttttacggcctggcgctgatctgcattttagtggcgatttcatctcgcggcgaacagctgttgtttaagctttcaagcctgatggtgttgaccaagctgctggttgtggcggcgctcggcgtgtcgatgattggcctgtggcacgtgcatcatatcggcgcgctgccgccggcggcgctgctgattaaaaacgccatcattacgctgccgtttactctgacctcgattctgtttattcagacgctcagcccaatggtcatttcttatcgctcgcgcgaaaaatccattgaggttgcccggcataaagcgttgcgcgccatgaatatcgccttcggtatcctgtttaccactgtctttttctatgccgtctctttcactctggcgatgggtcatgacgaggccgttaaggcctatgagcagaatatttccgcgctggcgattgccgctcaattcataagcggcgatggtgccgcttgggtaaaaatcgtcagcgtgatactgaatattttcgccgtgatgaccgcatttttcggcgtttacttggggtttcgcgaagcgacgcagggtatcgtgatgaacctgctgcgccgtaagctgccgctggaaagcatcaatgaaaaatatgtgcagcgcggcattatggtgttcgccattctgctggcctggagcgccattgtgttgaatgccccggtgctgagcttcacgtctatttgcagccccatctttggcctggtcggctgtcttattccggcgtggctggttcataaagtgcccgcgctgcataaatataaaggcgcatcgctggtgcttatcatcgtgaccggtctattgctgtgcgtctccccgttcctggcattctcctga

SEQ ID NO: 431339 - DNA, 1311 bp, Serratia marcescens
atgttgaaccctgaaagtctttcattatggaaaaaatacattcgcgcagtgcaggaggaggtaaagcctgcgctggggtgtaccgaaccggtttctctggcgctggccagcgccacggcggcggcccatttaccgggggcggtcgatcgcattgaagcctgggtttcgccgaatttgatgaaaaacggcatgggcgtgacggtgcctggcaccggcatggcgggattgccgatcgccgccgcgttgggggccgtaggcggcgatgctaacggcggtttgcaagtgctcgagaaggcctcggcaagagccgtcacccaggcgaagtggctgttggaacagggggcggtgcgcgtcatgttgcaggcgccttgcgacgatatcctctatgcccgggcgaaggtgtacgccggtgagcgttgggccagcgccaccatcgtcggcggacatacccgcattgtgagcatcgagcagcagggggccacgctgtttacgttgacggagctggcgcagggcgaagcacctgtgtgcccgctgcaggtgctggcgcagacttcgctgcgtgagatagtggattttattgagcgggtaccgttcgacgatatccgctttattctcgatgccgcgcaccttaacgaggcgctgtcgcgtgaagggctgcgtggccagtggggattgcacgtgggcgctacgttgcaaaaacagcgcgcgcgcggattgatggcgagcgatctggccagcgacatcgtgatccgcaccagcgcggcgtccgatgcgcgcatggggggcgcgacgctgcccgcgatgagcaactccggttccggcaatcagggcattgccgccaccatgccagtgatggtggtggcggagcacttcgcggccggtgaagaaaagctggcgcgagcgctgatgttgtcccacctgagcgcgatttatattcactatcgtctgccgcgcctctctgcgttgtgcgccgccaccaccgcttcgatgggggccgccgccggtatggcatggttggcggatggccggtacgacaccctcgccaaggccatcggcagcatgattggcgatgtgagcgggatgatttgcgatggcgcctccaacagttgcgcgatgaaggtttccaccagcgcttcttcggcgtggaaagcggtgctgatggcactggacgacacggcggtcaccggcaatgaggggatcgtggcgaacgatgtcgagcagtcgatcgctaacctttgcgcgctggccagccgatcgatgcagcacaccgacagacagatcatcgaaattatggcgcaaaaggcttcctga

SEQ ID NO: 431340 - DNA, 252 bp, Serratia marcescens
atggcattaacagaaaacagttggaataatagaaacgccaaggaattcctcttcatttcaggcatcgttttactttatgtactgaaagggagctataaattgcgggttttaggcaacctcattatccctacattggtcattatcattggtgtctcgctgacggacaaacttatctatagccgatttgattactcttatggcgtatatgtttatgcgctcccagtgcagcaaatcgtgatcaaccatacatag

SEQ ID NO: 431341 - DNA, 3585 bp, Serratia marcescens
atgatcagcgttttcttaccggcttacccctttagaggcgttaaagcaccctatttgtggtttttctatcgcgtcctaagctcgatgaaagagcccgtttatttcatgatgggcaacgattaccagtcttctcttgagcaatgggaaagtgagaagcgttgggagctagaggaggattcgcaaaagcgtctgggcttccaattgcctgacctgaacctgctgggcgatacacataaagtcagtgtgattgatgagtcttttttcagtcactacatggcaaaatgttttaacaatcccgatgcgctctttaagaagttcatcactgaagtgattcctgagcttgaggcggctttgtttgctgcgctaagccaggaaaaccacatcgagtgcgtattgacatggtgtaattgcccttccttaaatgcggcagcgaaaagaagaaatattaaagtcgtcaaccttgagttggggccattgcgttcgccggagtatttgtcgaccgcttattttgactttagcggggtaaacggcaatacggaggcggaaagacgctacttgagtagcgattaccgtttcaatatgaacgctcaagtggagcaactccgcgagttctttgcgggccagcctccggtgatgccaaacgcgcctcaagatgctgaagaccgagcggaagacaagtttgatgtcggtattgcgctgcaggttgaaaatgattccaatatcatcgcgttcagcaactctttcaataaccagtcgttgctggactatgccgagttcactttccctgggagacggctggttcgcagccatccaggcagccgcttcaccttgcaggcggggcacgatgtcatcgaccattcggcaaacagcatcgactttatccatcgttgcaaacatattctgacgattaactccagtgtgggtctggaggcgatgttgttggacgtccccgtgaccgtgctgggtgactgttcatacgcgttctgtaatgtcgccaatcagacagagagagtaaagcgccttgccttctacctgttctcctatttggtgccttttgagttattgtttgatatcaactatattcgtttccggctttcctctccggatgaagcggaaataataacgaaacacgtcaattattatattacccgtggtgatggcatgcgtgatgcggaaatggaaaaaaaggcctcttccattatcgaagatggaagtgttgaaaggactgtttgtaccttaatgaatacaattgaagatttgaactcggcattggcagccaaacaggcggagatcggtgctctggaagaaaaagtcggcgcgttggaagcgacggtcagtgagcaatctgaagagatcatcgttgacgtcgtagtccctgtctacggtggattggaagagactcaggaatgcattgagtccgctctggcgactttgccgcactgggcccaactggtggttatcaacgatgcttccccggagcctgagctgactcagtggctacgggagcgggccgaaacggcgcgtttcaaactgcttgaaaacgaacaaaacctgggttttgttgcaacggtgaaccgtggcatgaagctcaatccaaagcgggatgtcttgttgctcaatagcgatgttgaggtcgctaatgattggctggagcgtattcgcgaagcggcttattcacgtagccgagtcggcagcattacaccattctcaaacaatgcgaccatttgcagcttccctaatttctgtgaagacaatgaactctttatgggaatgaacgtacagcagctggacgatcagttctcgacttacggcagagaaaacaacctggtggaagtgccgaccggtgtcggtttctgcatgtatatccgtcgggattgtttgaatgaagtggggtatttcgacgtcgaaacctttggccgcggttatggcgaggaaaacgactggtgccagcgtgcggcaaaagccggatggcctaacttccaccagctcaacgtctttgtctaccacaaaggcggcgtgagcttcgccggcgaacagaacccgcgcaaaacgcgagcgctagagctgttgaacgaactccatcctaactacactaaagatgtgatggatttcattgcacacgatccggccaaaaaagcgcgccaacagatgctgctgcgcattttggctaagaaagacgtcagcaaagtcttgctggtctctcataagatgggtgggggtgttacccaacatttgcatgagttggtcaagttttataaagataaggcgcatttcctgctgttaacaccggaagaggaagggcgcagcgttgcgttgtcgttaaatacgaacgaggcagtgtaccgcgagaagttcattattgatgtcgctcatggttatgacacgctggtcaacctgttgcgctttattggcgttgggcacattcatttccatcatatgattggcgttgccgataaaattggcgagctgaaaaatagcttgtcatgcacctatgacattacgattcacgattactatttcgtgaacgcgaatccgacgttgaccgataaaaacggcatctttgccggtgatgttatcgctatccgtgataaactttgcagtgaacactatccgattccgggtgggatgtcggcagagcaatggcgcgctaaactgctgccatggatcgaaaacgccgagcgggttattttcccttctgccgatacgcaagtccgctttatgcgcgattttccgagttgcgcacaaaagagtgtcattgcctggcacccggattacgaagttgccgctccttatcctgaagtcaagtccacctatcaggcgggacagcagctgaaggtgcttgtgttgggtgcgatcagccgtgaaaaaggcgcattgatgctggatgaggtcgccaatgacttgaaacacgaagatatcgagtttcatctgttaggctacgctttccgccccctgtgcgattccgtcaaaggtcatggcgcctattcaagccgcgacctgcagcagaaactggatgaaatcaagccggacgtcatttggtacccggctcaatggcctgaaacttatagctatacgctcagcatcgcgctcgaatacggtatccccgttgttgttcctaacattggcgccttcggcgagcgtgttatcggccgtcgtgatagccgggtgatagcatgggatacttccgccaagaaaatgtgcgagctctggcgttctctgcgtaccgatccgcaagctttctttgcagctgctaatgcgccggcagtgctggatctttctcaggcagaacgcgtagaggacttctatcgggacggttatttgcaggctgattggctgcgggaaagcgaattggggcgtatcgattataaagccctgctggcatcggtttacgcctctgcttatgtagaagttgttgccgtaacgccagccgcaccgcaaggccgtaaagagaaattactggccattctgtggcggctaagcaagcatccggcgttggcttggggcgtaaaattagtgccttaccgtttgcagcgttatgtgaagcgaattctgtcgcgcagagcgatccatgagatcgtcggctaa

SEQ ID NO: 431342 - DNA, 1326 bp, Serratia marcescens
atgtcctctaacgatgttgcgattcaggttagcaatttaagcaagtgctaccaaatctactctcgtccgcgcgaccgtctgaagcagttctttgcccctaaactgcagcgcgtggcaaggaaagaaagccgtacgtatttccgcgagttttgggcactcagggatgtgtccttcacgataaaccgcggtgagaccgtcggcattatcggcagaaatggggcgggcaagtccacgctgcttcagatgatttgcggtacgctgacaccgacgacaggtgacatcagcgtcaatggccgaatcgccgccttgctggagctgggcgcggggtttaatcctgaatttactggccgagataatgtctaccttaacggcagcgtactggggttaagcaaggctgagatcgatcgcaagtttcaaagtattctcgatttcgcagatattggcgcgtttatcgaccagccggtaaagacctattccagcgggatgtatgtgcgcctggcttttgcggtgcaagcctgtattgaccccgagattttaatcgtcgatgaagcgctggcggtaggggatatcggattccagtataaatgctttaaaaggatggaagcgctgaagaagcaagggacaaccatcattatggtgacccattcaaccggcagcattctggaatacgccgatcgctgtctggtcatgagcgacggccaattgatcggtgatacgacggatgtgctggctgcggtattagcctatgaaaaggggatgttgctttctgaaaagaaacaggaaccgatggtatcttcctccgtcgattcttccgccaggtatgggattgaggagctccgagccctgcaacaggcgtcgatcaatgcggaagtggatgagaaacgttttggtagtgcgcgggcgattatcgagtcgttctctgtcatcaaaagtgacggcacccccctggctgacaagccgttagtcaaatcgggtgaagagctgtactttaactttaccctggcggcctcagagacgatcagcgacgttgttttggggatctcgatttctcgcgctcaggggggcgatatttggggggataacaacatcggcgctgggcatcctctgacgctgcagccgggtttgcaaacgttgaaatacaaagtcaagttgccgattaacgccggcgattatctgatccactgcggtctggcgtgctttaataatggcgagcgagaagagctcgatcagcgcaggcctattggaaaaattaagtactggtcctcgcgagagctcggtggcgtgatccatgctccaatccaaatcgttgccgatggagtgtcataa

SEQ ID NO: 431343 - DNA, 849 bp, Serratia marcescens
atggctgtagaccaagaaaaatctcaatttcagatcgttgcatctatcgttttatacaaccacagctatgagcaggtggcgggcaccttgacgtctctcttggccgagcgctgcgttgaaaagattgttttggtcaataatggcggtgcggattgggctgatgctttggaaaatgatcgtatcagctacatctctgccgagggaaatggcgggtttggccacggacataacctggcaatgagccgctatctggactcctgcgagtattttttgatctgtaacccggatatcagttttgagatgggggcattggcgagtttgtatcagttcgccagcgaagggaaacatcagtttgtctctccacggattcattatagcgatggccgttttcaatacagttgccgattgctgccgacaccggcgaatttgctgttgcgccgctttattccccgtttaggcgccaagatggatgccgcttatgagctgcaggttgctgattatgattcaacctttgccgtgccgaccgtgtcggggtgctttatgctgattgcgtccccgttgttgaaaaagctggaagggtttgacgaacgctttttcatgtacatggaagatgtcgatctctgtcgcagggctttaccgcacagcgatatcatctacttttcgggggcgctgatcacgcatgtcttcggcaaagggtcctataaaaatctggtgttgctaggtcatcatgtgcgctctgctgttgcctacttttgcaaatggggatggttttttgatcgtcagcgccgccagtataaccagcaatgcttaaagagcattcctatgaaagaaaacggtcgcaagcggtag

SEQ ID NO: 431344 - DNA, 534 bp, Serratia marcescens
atgaaagtgatagagacgcaggttgaaggtgtaaagctgatcgaacccaaagtgtttggcgaccaacgtggttttttcttggaaacgttccaaaaaagccgataccaggagctgctcggcattgatgcggagttcgtacaagataaccactcccgttctgcgcgtggtgtcttgcggggattgcattttcaaacggcaaaaccgcaaggtaagttggtgagggtggtacgcggcgaggtctacgatgtggtcgtcgatattcgtcctgagtcgccgacgttcaaaaagtgggttggcgtctacttgtctgaagagaacaagaaccagctttgggtgccgcctggtctcgctcatggttttgtcgtagtttcggactcggctgattttgaatataaatgcactgattactatgatccaagtaatgaaggttgcctgctgtggaacgatccggaagtaggtgtcgaatggccaatcagcgatccgctgctgtcgccaaaggatctgcagggaaaactgtttagagagcttttttaa

SEQ ID NO: 431345 - DNA, 1332 bp, Serratia marcescens
atgtctacgcatattggcgagccgaatgactcgtactcagaacagatcccgctggatgagcgccgttatacccgcctcgggtggttggcgctgggtgtaggtgtgttcggtttcttggcctgggcggcgtttgcgcctctggacaaaggggtagcgtcgccgggatcggtaaccgtttccggcaaccgtaaaacggtgcaggcgccggccagcggcatcatcaaaaatatcgtggtgaaagacggcgacaaggtgaaagccggcgaagtcctggtgcagctgagccaggtgcaggcacaggcacaggtcgattcgctgcgcgatcagtattacaccacgctggcgaccgaagggcgcttgctggctgaacgggatggtctgagcaaggtcactttttcccctgttttcgcgcaggttaaggatcagcctcgtgtcgcggagatcattgcgctgcagacgcagctgttcgcctcccgccgccaagggctgcagagtgaaattgacggttataagcagtcgatggacgggatccgtttccagttgaaaggcctgcaggactcacgcgccaacaaacagatccaactctccagcctgcgtgagcagatgaacagcatgaaacagctggcggcggacggttacctgccgcgcaaccgctacctggaaatacagcgccagttcgccgaggtgaacagcagcatcgatgagaccgtcgggcggattggccaactgcaaaagcagctgcaggaatctcagcaacgtatcgatcagcgcttcgccgactatcagcgcgaagtcagaacgcaactggcgcaaacccaaatggacgccagcgagttccgcaatagactgcaaatggccgatttcgatctgggcaacaccgccatcacttcaccggtggacggtaccgtggtcggattgaatatcttcactcaggggggcgtcgtgggagcgggtgaccacctgatggacgtggtacccagccaggcgacattggtggtggattctcgcctcaaagttgacctgatcgataaggtgtacaacgggttgccggtggatctgatgtttaccgccttcaaccaaaacaaaaccccgaaaattccgggaacggtcacgctggtttccgccgaccgtctggtcgacaaaaccaatggcgaaccttactaccagatgcaggtcacggtctcgccagagggcatgaaaatgctcagcggtgaggacatcaagccggggatgccggtggaggtgttcgtgaaaacggggtcgcgctcgctgctgagctatctgtttaaacctattttggatcgcgctcatacttcattaaccgaggaataa

SEQ ID NO: 431346 - DNA, 231 bp, Serratia marcescens
atggcggcgatggccggtgcttccatggccctcggtggcattctccaaatgctctccccgcaaatgggcgggctgcgcatgcggcaaggcccggaaaataaaccgagctatgcctttggcgggccggtcaataccacggcgcagggcaaccccgtcggcgtgctgtacggcacgcgtgaaattggcggggcgattatctccgcgggcatttataccgaagaccagcaataa

SEQ ID NO: 431347 - DNA, 207 bp, Serratia marcescens
atgcccttcgggcaggttttctgggttgcgcagcagcagccagcggctgcgtttgatgacctgacgcgattttgggttatcacggagttgattggcctggtcgacgcggacccggtcgataacctcccggccatactttgccaccacatggaacaagtcatagaccacttccgcctgcgggcagtgatgcctgacctccaggtctaa

SEQ ID NO: 431348 - DNA, 513 bp, Serratia marcescens
atgggggcaacacaggcgccggacggggacgttgagccagacgacccaatcgagcagctggcgttcacgcactcggcggaaggaaacatcatgcacaacaggcacccgccgctcacaacgacgacaacagggcatgacggcagcgtcaggctggagctggataagcagggagttggcagaaggatgcgagaaggaattgacgacaaagccttcccagaacagggagcaaaggttagcattcatagtgacggcagttttgaaagtttagggtgtgttttggcgaatacaaacctaaacgttctgactgccgttttctattggttcacgctaaagcgcgatgaacctttttttatgacctgcgtcgatgcttttagagcacggcgacgatggcttcacacagcggcgccatgttgtccggcgtcatgccggccacgttcacccggcctgagttcacggcgtagacgccgaactcttcgcgcagacgcaacacctgttctttggtcaggccgctga

SEQ ID NO: 431349 - DNA, 1143 bp, Serratia marcescens
atgatgaagcgcaacattcttgcagtggttatcccggctctgttggctgctggtgcagcaaacgcagctgaaatctacaacaaagacggcaacaagctggatctgtacggcaaagttgacggtctgcactacttctccaaagacaaaggtaatgacggcgatcagacctatgttcgttttggcttcaaaggtgaaacccagattactgaccaactgaccggttacggccagtgggaatacaacgttcagtccaaccactctgagtctcagggcaccgaaggcaccaaaacccgtctgggcttcgccggtctgaaattcgctgactacggctccttcgactacggccgtaactacggcgtactgtacgacgtggaaggctggaccgatatgctgccagagttcggtggcgatacctacaccaactccgacaacttcatgaccggccgtaccaacggcgttgcgacctatcgtaacaacaacttcttcggtctggttgacggcctgaacttcgctctgcaataccagggcaagaaccagaacgacggtcgcgacatcaagaaacaaaacggcgacggctggggcatctcctctacttatgacatcggcgaaggcgtaagcttcggcgctgcatacgcttcttctaaccgtaccgatgcccagaaaaacaaatctaacgagcgtggcgacaaggctgatgcatggaccgtgggcgcgaaatacgacgccaacaacgtttacctggcggccatgtacgcagaaacccgcaacatgactccttacggcggcaacaactcgctgaaagatggcaccacctcttgtgctgacactcagaacaacagctgcggcggcttcgccagcaaaactcagaacttcgaagtgaccgctcagtaccagttcgacttcggtctgcgcccagaagtgtcttacctgcagtctaaaggtaagaacatgaacgtcccaggcgcgggttctgaccaagatctggttaaatatgtttctgttggtaccacttactacttcaacaaaaacatgtccacctacgttgattacaaaatcaacctgctggatgacaacgcgttcaccaaagcagccggcatcgctactgacgatatcgtagccgttggtctggtataccagttctaa

SEQ ID NO: 431350 - DNA, 1191 bp, Serratia marcescens
atgacaagcaatacctcgcagccgctggggctgcaccggcttaaattccatgggaaaggtggtgagtacttcgcgatttggttggtcaacgcattattgaccatcgtgaccctgggtatctattccgcctgggcgacggtacgtcgtcgtcgctatttttacggcaacacggaattggacggcgatcgtttcgattaccatgcgcaaccgctgcaaattctgaaagggcggctgttggtgatcggcggcatcatcgtgttttatatcctgttagcggtaacgccactgctggggctgctggctttactggtactgctggccctgctgccgtggatcgttattcgcagctggcgctataatgcgattatgtcgagctatcgcggcgtgcgttttaattatgtctgccgcaccggacgcgcttattgggcgctactgttctgcccgttattactgattattgggctttatgtcgccttaatcattttgctcagcattggcagcggctttggcagcatcaacgccatcagcctgatggtggtgttaacgctgatgttggccgtgccggcatttgccgccgtcaacggtattattagcgcgctgcagcacgatctgtacgtcaataatctgttcttcggccgcacgccgtttattgccgagctgaaaaagtcggccttcatcaaatttgccttgatcggcctgctcattttcctgccgttcatgttggctgcgctggtgtgtatggggtcgtttatcctgtcactgtaccaaatggtattaatgggtatgttgacggatgaaaccgccgatttgctggtgctggagaatattggcagtttgctgctgatgatggtgatattgctgattggcgccttgatttccggcagctatcagatcgtcgcacaacgcaactatctgtttaaccaggcgacgctgaacggcagcatcaaactgcgctcttccatgcaaacgctgccgtatatgggactgctgatcaccaataccctgatcacgctgttctcgttcggtttcgccgtaccggtggcggaagtgcgtcacgcccgttatctggcggagtgtacgtcggtcgaaggcgatctggcgttgctggatatcgcggcgcatcaggaaaccgccaacagcgcggtggccgaagaagcggtgcaggcgttggatctgggcggcagtttctga

SEQ ID NO: 431351 - DNA, 903 bp, Serratia marcescens
atgaatgctaacctttgctccctgttctgggaaggctttgttgtcaattccttctcgcatccttctgccaacaccctgcttatccagctccagcctgacgctgccgttatgccctgttgtcgtcgttgtgagcggcgggtgcctgttgtgcatgatgtctccttccgtcgggtgcgtgaacgccagctactcgactggatggtctggctcagcgtccacgtccggcgtctgtgttgccctcattgtggggtcaccaccgaaaaaatcagctggttgcctgaacgccagagatataccacgacgctatcagtatgggttgagtcattgacctgtttactgccgattaaacatgttgcacaactcaccggactgcactggcatacggtcaagaatatcgactaccggcgtctgctacgggaacgaacagagccgcagcgccataccctccgccgtctggtgatggatgagtttgctctgttcaaaggacatcgctatgccaccgtggtgatggatgcagatacgcagcaggtgttgtgggtgggagaagggcgtagcagggcggccttccgccccttcttcacctggctggggccggaaggttgtgccgctatccagtctgtcgccatggatatgaatacggcgttagacctggaagtcaggcatcactgcccgcaggcggaagtggtctatgacttgttccatgtggtggcaaagtatggccgggaggttatcgaccgggtgcgcgttgaccaggctaatcagctacgcgctaacccaaagtcacgtcaggtcatcaaacgtagccgttggctgctgctgcgcaacccggaaaatctacccgaagggcatgacgtaaaactcacggaattgctggaagcgaatcagccgttgaatgtggtatag

SEQ ID NO: 431352 - DNA, 300 bp, Serratia marcescens
atgaaaacggcgctgaaggagctgtggtatgccccgagtgaacaagaggcgcagagacgctgggtaagctggtacaggcagtctcaggaaagcggaataaaggcgttgcaacactttgccgagaaactgaaagggtatgccggtggcatcatcgcgagtgccagacacaggttgaataccagcgtgctggaagggatgaacaataagataaaagtgatgaagcggatggcctatggataccgggataacgcttacttcttcctgaaaatcaaagcagcgttccccggtaaagcgcgatga

SEQ ID NO: 431353 - DNA, 1053 bp, Serratia marcescens
atgacggcatttaaccctatcgaccatccacaccgccgctacaacccgctgagcggccagtgggtgctggtctcaccgcaccgcgccaagcgcccctggcagggccaacaagaggccgtccccacggaaacgctgccggcgcacgatcccgactgttttctgtgcccgggcaacgcgcgcgtcaccggcgatcgcaatccggattatcgcggcacctacgtcttcaccaacgatttcgccgcgctgatgagcgatacgccgccggcgcccgacagccaggatcctttgatgcgcagccagagcgcgcgcggcgtcagccgggtgatctgcttctctcccgatcacagcaaaaccctgcccgaattgacgctgccggcgctggagcaggtggtcgccacctggcaggcgcaaaccgatgagctgggcaggcagtacccctgggtgcagctgttcgaaaacaaaggggcggcgatgggctgctccaacccgcacccgcatgggcaggtctgggccaacagtttcctgccgaacgaggccgagcgcgaagatcgcctgcaacatgcgtattttcgggaacacgcctccccgctgctgctggactatgcgcagcgcgagctggccgctggcgaacgcatcgtggtgaacaccgaacactggctggcggtggtgccctactgggccgcctggccgtttgaaacgctgctgctgccgaaagcggcggtgcagcgcattaccgatctcagcgcggcacaaagccaagatctggcgctggcgctgaagaagctgaccagccgctacgacaacctgttccagtgctccttcccctattcaatgggatggcacggtgcgccgttcaacggtgccgacaaccgacactggcagctgcacgcccatttctacccaccgctgctgcgttcagccagcgtgcgcaaatttatggtcggttacgagatgctggcggaaacccagcgcgacctgaccgccgaacaggccgcagagcgtctgcgcgccgtcagcgatattcattaccgtgaagccggagcccaagcatga

SEQ ID NO: 431354 - DNA, 174 bp, Serratia marcescens
atgatgcccaatacttcctgctgtatctttaccgaaggcagtgcggtcctacaggaaggttacctcgaccgctccgtcaaagagcttctggccggtgatgaacgttttccctcgatcaatgtttctcgcgacgcgctgctgttgcaggtgctgagcagctaccgggcggcctaa

SEQ ID NO: 431355 - DNA, 801 bp, Serratia marcescens
atgtttaccgacacgatcaataaatgcgccgccaacgcggcgcgcatcgtccgcctggcgaaggagagcccgctcggcttctggatcagctcggcgatggccggcgcctacgtcggcctcggcatcatcctgatcttcaccctcggcaacctggtcgaccccagcgtgcggccgctggtgatgggcgccaccttcggcatcgcgctgacgctggtgatcatcgccggttccgagctgttcaccggccatacgatgttcctgacgctcggcgtcaaggccggcaccatccgccagagccagatgtgggcggtgctgccgcaaacctggctcggcaacctgctcggctcggtgctggtggcgctgatgtattactacgggggcggcagcctgctgccggtggataccagcctggtgcacagcgccgcgctggcgaaaaccaccgcgccagccgaagtgctgttcttcaaaggggtgctgtgcaactggctggtttgcctggcgatttggatggcgatccgcgttgaaggcgccgccaagttcatcgccatttggtggtgcctgctggcctttatcgcctcgggttacgaacactccgtcgccaacatgacgctgttcgccctctcctggttcggcaaccacagcgaggcctacaccctcgccggcatcggccacaacctgctgtgggtgacgctgggcaatatcctgtccggctcggtgctgatggggctgggttattggtacgctacgccgcgcgccgaacgcccgcaggcggcgaaagccgccgcacgtcagaccgcctga

SEQ ID NO: 431356 - DNA, 1404 bp, Serratia marcescens
atggactacctgccgattttctgccaactgcaacataaagcctgcctgctggtcggcggcggcgagatcgccgaacgcaaggcgcgcctgctgctggacgccggcgcagcgctgaccgtcaacgccgtggacttcaccccgcagttccgcctgtgggcggaagaaggccggttgacgctggccgaaggcgaattcagcccggccctgctggcggaaaaatggctggtgatcgccgccaccgaccggctggaggtcaacgcgctggtatatcagtgcgccaaccagcagcgggtgttctgcaacgtggtggacgatccgaaacgcgccagctttatcatgccgtctatcatcgatcgttcgccgatcatggtggcggtatcctccggcggcaaagcgccggtgctggcgcggctgctgcgcgaaaagctggaggcgatgctgccgcagcacctcggcaagctggcgcagctgggcggctcgctgcggcagcgggtaaaacaacgcttcagcagcctcggcgcgcgccgtcgcttctgggaacggttattcgcccacgatcggctggcgcagtcgctggccaatgacgatgccgcactggccgaacgccagctcgagcagctgttcagcgaacagccggaagatcgcggtgaagtggtgctggtgggggccgggccgggcgatgccggcttgctgacgctgaaagggctgcaacagatccagcaggccgacgtggtggtttacgaccgcctagtctccgaagagatcatgacgctggtgcgtcgcgacgccgaacgcatcttcgtcggcaaacgcgccggccaccactgcgtgccgcaagagcaaatcaaccaaatcctgctgctgcaggcgcagcaaggcaaacgcgtggtgcgcctgaaggggggcgatccctttatcttcggccgcggcggcgaagagctggagacgctggcggacgccaacgtgccgttctcggtggtgccgggcatcaccgccgcctccggctgttccgcctacagcggtatcccgctcacccaccgcgaccatgcgcagagcgtgcgcctggtgaccggccacgccaaggccgactgcggattggactgggcgacgctggccgccgggcaacagacgctggtgttctatatggggttgtcgcaggcgacggagatccagcgccagctgatcgcgaatggattgccggccaccacgccggtggcgctggtagaaaacggcacttcctgccgccaacgggtgatcgaaggcgagctcggccaactgggtgccctgtcactgcaggccgccagccccagcctgatcatcgtcggcagcgtggtcagcctgcgcagcaaactcaactggttcgccagcgaggcatcccccgtcggcctggcgcaaatggcgtga

SEQ ID NO: 431357 - DNA, 285 bp, Serratia marcescens
gtggctataggcaaatggctgcgcggcgacgccgaggtgctgatcttcgatgaaccgaccaagggcgtggacatcaaagccaagcaagagctgtttggcctgatcgacggcctggcccgcgccggcaaaggcgtgatttacgcctccggcgagttcgccgagctggttggcctgtgcgatcgcatctgcgtgctgtgggacggccgcatcgtggcggagttgaacgccgccgacatcgacgaagaaaccttattgctctattccaccggaggaacccctgcgtga

SEQ ID NO: 431358 - DNA, 1212 bp, Serratia marcescens
atgtttcatcttgatacttatggcacgttagtcgcggcgacgctggttttgctcctcgggggcaagtgcgtcagaaccattcctctgctgcgaaaatataccattcccgctcccgtcgccggcggtttgctggtggcccttctgctgttagccctgaaaaagctcgtcaactgggaaatcagttttgacatgtcgctgaaggacccgctgatgctggccttcttcgccaccataggcctgaacgccaacctggcgcgtttgcgcgccggcggcaaagtgctggtggtgttcctgttcgtggtgctggggttgcttatcgtgcagaacgccatcggcatcgggatggcgaaaatgctgggattggatccgctgatgggcctgatcgccgggtcgatcaccctgtcgggcgggcatggtaccggggcggcctggagcaagctgttcatcgagcgctacggttttgaaaacgcgacggaagtcgccatggcctgcgccaccttcggcctggtgctgggcggcctgatcggcggcccggtggcgcgctatctggtcaagcactcctccacgccggaaggcaccccggaagacagcgtgcagccgagcggcttcgagaagccggaaagcggccgcctgatcacctcgctggtgatgatcgaaaccatcgccatgatcgctatctgtctaagcctggggcagctgattgccggcctgctgaacggcacggtgtttgaactgccgaactttgtttgcgtgctgttcgtcggggtgatcctcagcaacacgctggccttcaccggcttctataccgtgttcgagcgggcggtatcggtgctgggcaacgtcagcctgtcgttgttcctggcgatggcactgatgagcctgcgcctgtgggagctggcctcgctggcgctgccgatgctggcgatcctggcggtgcagacgctggtcatggcgctgtacgcgatcttcgtgacctaccgggtgatgggtaaaaactacgacgcggcggtgctggccgccggccactgcggcttcggtatgggcgccacgccgacggcgatcgccaatatgcaggcgatcaccgatcgtttcggcccctcgcacgtggcgtttttggtggtgccgatggtgggggcgttctttatcgatatcgccaatgccatcgtcatcaagctgtatctgctgctgccggtgttcccggcggtggggtga

SEQ ID NO: 431359 - DNA, 720 bp, Serratia marcescens
atgatttttgctttattcttttccagattgccgcaaagatttacaatctgtttggcaacaatcgttattggtgcagtgatgtattttaatatgtacaagtttttattcgccttcgcttttctctttatattgtatgatatcatcattaacattcttaataagaaactaccaaagttaaaaataacgataacttttctcatctgcatcatagcgctgcctgctatgatgaatttgtactccagtaaatcgatgaatactcgctcaagtcaaatgacagattattggaaatatacggggcagtatttccccgcaagtctgataggcattggctatggaggtctatattattcaccttccggcattggtgataaaggagagacaaaaaaaattgaccttatggagttagatgcacattataaaagaagcatacagacgccgtttttgacgcagttaaaaaatagcggattgcttggtattatttttatgctgactgtcgcaatcattgtcgctgtgagaatgataaaagttaatttaaaattggctgaacacatcttcagtaatgcgatttgttttaatatcatttggttggtcggaagtaccagtattttattacaaccatatccgatgccttcgcttgcttttgtgaaactactattgcttctttttttgatgttaagtgcaaacaagttgcgaatggggttgcatagaaatgctaactga

SEQ ID NO: 431360 - DNA, 909 bp, Serratia marcescens
atgctaactgaatggataagaaaatggagggggaaggggcgtgtatatatcaaattattttctaagttcttaccctggtcccttcaggataggttcgtttttttattgaagttgggctatttccctaatttgaaaaatgcaagaaccttcaacgaaaagatattgtttagaaagcaaaataaaatgagcggtgacaattttgtttttctatcagacaaatatttagtgcgtgattatgtgcgtgaaaaaatcggagaccaatacttcgtcccattaatgttttgtaccgactctccagagcagttatttgattatgttccctactgtgacgtaattttgaaacctaaccatggggcagggatgtacagaattgtaaaaacttcaaattataattctgaaatagaggatatagttaaactatgtaacgaatggatgagaatagacttttcacatattcaaagagaaattcagtacagaaatattcctaagaagatattgatggaaaagttgttaggcgatggtgttattgctccaactgattataaattccatatattccgtggtttggcaggtaaggttaattatgttcttcaagtcataaatgaaagatttactggcaacttgtcgcgtattttttatgtaaatggatttgataagccatttgaaactggaataaacagtaaaggaaatggtgaagaggagtctttatacgttattgacaaaaagttggcatcagaggcattgagattgagttgtttgctggccgctgatttcgattatgtacgtgttgactggtatattcatgatggctgcatttattttagtgagcttacgtttacgcctgctgcaggatttggcattggatatggccctcacctagatagattgatgggggagttttgggtatag

SEQ ID NO: 431361 - DNA, 1050 bp, Serratia marcescens
atgatatacatcaacgcccggtttttaactcaagatatgacgggagttcagcgtttcgcagcggagctttgtctacaactggcggggctaagagatgatgttatattcttatcgccacgagatattaaacaagtggatatcgcatcgcgtctaaatgttaaagtagtaggtagtcgttcggggcacctctgggaacagtgggatcttcctttttttttgcgaaaaaatggatgcccattgcttgttaatttaggaaacaccgctccattactatatctgaacaaagtaatcacattacatgatatatcttatctgcgatatcctaaaacatactcatggggtttccggtactgctataagttttttataccacttctattgaaaacatgtaagaagttattaactgttagtggtttctcgagagatgaaatatgttcacagtatggattttctagagagaagatacatattattcataatgctgtaagtgaaaagttcactggagctcataagactgggcttaggagggggtattttcttgccgtatcctcgcatcattaccacaaaaattttcatgggttactcgctgcattcaataaattacctgaaaagtatgaaatgcatatgattgttgctgggagcacgcatcctaactatcagcccctagaatttgacaaaaacctcggtaataaagtcagttttgtcgggcgagtttctgacgaggagcttgtggatctgtatcgcaatgcattctgctttcttttcccatccttatatgaaggctttggtttgccaccgctagaagctcaagcctgtggttgtcccgtgattgcatctaatgccactgcgatgcctgaagttcttggcgaaagtgcaattcttgtcgatccattaaacgatgatgcattaactgaagctatggagcagctggttcttgatccaaaactcagagagtctcttatcgcagcaggcactgaaaatattgaacgattttcttggctactctctgcaagacaactaagctgtgttatcgacagcgtatcagtttga

SEQ ID NO: 431362 - DNA, 1158 bp, Serratia marcescens
atgttgggtagtgattttagtgttggaatagttgccgattggcttgttacatcagccggctctgagagcgtcgtcaaagaattgatcaatatatacccatcttccgagttgttttcgttgatagattttatctctgaggaggaacgtaatgactattctggaaagaaggctaaaacgacatttatccaaaagctcccttttgttaagaaaaactatcaaatttttctgcctttgatgccttttgctgttgagcaaattgacgttagctttcataatgtgattatctctagtagtcacgccgtttctaaaggtgttcttactggacccgatcaattacatataagttatgtgcattcccctatgcgttatgcgtgggatcttcaacatcaatatctaaaagaaactggtctcagcaaaggtttgaaaggactgattgtaaaatggcttttgcataaaatacgcatttgggactaccgaactgcccatggtgtagaccacatggtggcgaattcccagttcattgcacgtcggataaagaaggtctatggtcgcgatgctgacgttatttaccctccggtgcatgtcgaacgctttgctttgaatacccataaggaagatttctacattacggcatctagattagttccttataagagggttgacctcattgttgaagcttttagaagaatgccggataaaaagcttattgttattggtgacggtcctgagatgaagaaagttattcgccacgcatcagaaaatataagtgtacttggatatcaacccgatgatgtattgcaagacttgatgggaagagctaaggcatttgtttttgccgctgaagaagactttgggatcgtggttgtggaggcgcaggcttgcggtactcctatcattgcctatggacgtggtggtgcgttagaaacagtaagaccttatggttcgcagaatgcaacgggcgttttttttcatgaacaaacgcctgaacatattatgtctgctgttgaaaaatttgagtctattcaagatgatttgttacctgaaaactgtcgcagtaatgcattgcatttttctgctcatcggttccgtgaagaatttagcgcttacttaaaagataaatggataaattttcaagagttaaagaagatcacatactga

SEQ ID NO: 431363 - DNA, 1038 bp, Serratia marcescens
atgagtctgccccacacgctgcatatcggccgcccggacggcgtcatcaactggcgtatgccgctgcgcctgctgctggtcaatctttcgctgctggcgttgtgcctgacgatggcggttgccgcgctgtgctacggcacgctgcagctttcgctggaacaggtctttgccgcgctcagcggcgaggcgccgaaaaatctggtcaccgtggtcacccaatggcgcttgccgcgtatcgccatggcgctgttgttaggcgccgcgctcggcatgagcggcgccatcttccagtcaattatccgcaacccgctcggcagcccggacgtgattggctttaacatgggggcttacaccggcgcgctgatcgccatcaccctgttcaacggcggctattactacatcgccggcggtgcgctggccggcggcattctcgccgcgctggccatctatctgctggcctggcgccaaggcatcgccggcttccggctgatcatcgtcggcatcgccatcagcgcggtgctggtctccaccaatacctggctgatcatcaccgcctcgctggagcgcgccatggacgccgccatgtggcaggccggttcgctcaacggcatgacctggcagaaagcccagcccgccacggcgttcatcgtgctggcggccgcggccgcgctgctgatgggcaaacggctgcagctgctggaaatgggcgacgacacggcgcgcgcgctgggcgtgaacgccgaaggcagccggctgtggctgatgctgttcggcgtcaccctcaccgccgccgtcaccgccaccgccgggccgatttcctttatcgcgctggcggcgccgcagatcgcccgccgcctggccggacaatcctcggtcaccctgacgtcctcggcgctgatgggcgcgacgctgctgctcggcgccgacgtggtgtcccaacatctttttgcgccgatccaactgccggtcggggtcgtgaccgtctgcatcggcggcctgtacctgatttggctgctcatccgtgaggcccgcagataa

SEQ ID NO: 431364 - DNA, 468 bp, Serratia marcescens; identical to SEQ ID NO: 431313

SEQ ID NO: 431365 - DNA, 1338 bp, Serratia marcescens
atgccacttcttaatgacctgctggatttcaacgaccatccactgataccgccgccctccgctcagctttttaccgaacatctgcccgttgagtggttgcagcattgcctttctctttccacccatgccaccgtcagacgccgtcgtttgccgggggatatggtcgtttggatggtggtctgcatggcgtttttccgcaatgaacccattaccgagattgttcgccgccttaatctgagcgctgacggtgaagcaggaacgcagttgcttgcccgaagtgccatcactcaggccaggcaacgcgtcggggctgcccccgtggagtggctgtttcgccagacggctcatgtctggggggctgagcgctatcccaaagatgactggaaaggtctgcagctcttcgcagttgatggcgcacagctgcgcacgccggatgaacctgaactgcgtgaacacttcggctccagcaacacatccacggaacggcagagccctttcccggtgatgcgtctggtggccctgatgaacctgaacagccatgtcttactggatgccgtcaccggcccttatcgcagcagtgagacccggctggcacacaccctgattaaggcgttgccggataactccatcacgttgttcgacaaactctttcatagcgcagacctgttgctgacactgagtcgcagtggtgaaaaccgccactggctgttgccggcacgcaaagatatcgcctcagaggttcaggaaagttacggggcgggagaccgactgctgaaaatgagagtctccccacaggcccggaaacaaaatccttcgttaccggagtattggtatgcacgggcggtcagctatgagctgaatggggtggaaaaaacggtgttgacctcgttacccgcagaccgttacccggcaaaggccgtggcagaactttatcattgtcggtgggaaatcgaggtggggttcaggaacatcaaaagcagcctgcagaataatgcgttggtgctgagaagccgaaaagtcgagctgttacaccaggaagtctggggactactgctggcttacaaccttattcgtcgagaggcggcgctggcagccagacaacataaaagggcaccgtcggaaatcagcttcaagttcgcttttgatgtgatatcggccgagttgttctggctggggaacacgatatcgccgggaacaatccccaaacggcttatgcatctgagaggcagtgttgaagcgatgtttataacaaaacgcccccgaccatcaaggccgaggacggttaagctatcaaaaacacgctacccggtgaaccgcaatgccgctccgcttaagtga

SEQ ID NO: 431366 - DNA, 876 bp, Serratia marcescens
atgaacgagaaaattttcaccctgcccgtttccgaacagatttcgccttacatcagccagcgtcaactcgatgagctgggcgtggttgtggtctcgcaccctaaagtgcgtgcggccgtcgcgctgcaaggcgcccatttgctggcctggcagcccagcggtgagcagccggtgatttggctcagcaataacaccccattcgccaaaggcaaggccatccgcggcggcgtgccgatctgctggccgtggttcggcccggtagcgcaaccttctcacggttttgcccgcaaccagccctggagcctaacggcacacgatgaagatgacaacggcgtcatcctgaccttcacgctgaaagacaatgagcagacccgcaaactgtggccacacgccttcacattgattgcccgtttcaagctgggtgaagagtgcgagatcgaactggaatcgcacggtgactatcaggccacggcggcgctgcacagctacttccaggtaggcgacatcgaccgggttagcgtggcgggcctgggtgagccttatatggacaaggtagcgggtggcgcagaggcgcgccagacaggcgaagtgacctttgtcggccaaaccgatcgcgtctacacccgccccgaggccttcagcctgatccgcgatccggcgctcacgcgcaccatcgaggttcaccaccatcatatgagtgacgttatcgcctggaacccgggcgtagaactctcatgcagcatgggggatatgccgaacgacggctacaaaaccatggtctgcgttgagactgggcgcgtcagcaaaccgctggtcgccgccggcgaacaacctgctcgtttaggtgttaccttccgcagccgtaagcaggcttga

SEQ ID NO: 431367 - DNA, 153 bp, Serratia marcescens
atgtcctttgaacagggcgaactcatccatcaccagacggcggagggtatggcgctgcggctctgtccgttcccgcagcagacgccggtagtcgatattcttgaccgtatgccagtgcaggccggtgagttgtgcaacatgtttgacaggtaa

SEQ ID NO: 431368 - DNA, 447 bp, Serratia marcescens
atgagcagatatgaatccgcttcccacgtattctatcgctgtcagtatcatctcgtatggacaccgaagtacagatacaaaatcctcaaaggtaatctcggtaaagagctttaccgcagcatttacatctactgcagtatgaaaaaatgcagagtagttgaactaaatgttcagatagaccatatacatctggtagtgagaaccccaccgagtttaagtgtttccgagctaatgggatttgtgaaagggcggacagccatcagattgttcgctaagtttccttatctaagaaagcacaagctttggggtaatcacttttggcaaagagggtactttgtggactcggtaggagcaaacgaagagataattagacggtatgttcggtaccaggacaaggtggcgaaagaggaagaagaaaggcaaatgcagctagggctagaaaagtag

SEQ ID NO: 431369 - DNA, 531 bp, Serratia marcescens
atgaacttctatactttcagtagctttacatttggcgataacttgatttgttttcccgatccgaaatcaagattgtccagcttttttatttggaatgaaggtgatggtaatttcctatcctactcactgccaaaagggaaaatgccaagcgttttgagtagtgacacttttaatttgcatgactattttcctgtcagtctcggaattcaaattttttcaaaaagagctaaggctgcatttgaacgtaaagtttcttctgaaatgtcattctatgagtgcgcggtagaaaacgtaactgaaacgatgtttctgtgtaaagtgaataattatttttcaattattgatgaggaagcctcgacgttcagagaacttgaggatggaagcaagctcattgatgtgcctgcttacaagtgtgacagggagttctttattgctagggatagcatctattgtgaaagaataattgtctctcagcagtttgttgacctatgtaatgaagaacagctaaacataggctttgagcgttgctaa

SEQ ID NO: 431370 - DNA, 465 bp, Serratia marcescens
atgtcatcgaaagaaaaatccctctatgccctcaccaacgccctgcaaccggttcgccgggtgtggaaacaggctgcgacgctggcgatcgccaaatccggcatctccatgtcgttggccaccgtcgtggttctggtgcatcgcaacccccagggcatcaatcagcgcgatctggcggaagaagtcggcgtcaatcccggcgcgctggtgcgtctgttggatcaagccgccgcgttaggcttcctcgagcggcaggagtcggccggcgatcgtcggtttaaaaccctgcgtattctgcccgccggcgccgagctggcccaaaaggtcgaaaccgcggccgataagctgcgagtcgagctgatgcacgacgtgccgttggaagatattgaaaccgccacgcgcattctgcgcctgtttgaagagcgcgcaggccactatctgcaacaggccggcaatgagccatga

SEQ ID NO: 431371 - DNA, 222 bp, Serratia marcescens
atgaaagactataaaaacacttcgggcactaagattctgctgctgttcagccttgcgttttactctttgcacttcaacccgtttttggccgaccggggcatacccggttatcaaactttcttctacttgctgatgctctggttggggatgaatattttgctgtggctgctggtgtgggggacggggcgattgtatcggtgctggcgagcgccgcgcggctga

SEQ ID NO: 431372 - DNA, 753 bp, Serratia marcescens
atgagtgccattgaagttaagcaattgaccaagcagttcaagggtcagacggtgctgcatgggatcgatctggcggtggacgccggcgaagtggtggcgatcatcgggccgagcggctcggggaaaaccaccttattgcgctgcatcaacctgctggaggagccggattccgggaccattcgcgtcggtgatatcctgatcgacggcagcaagccactgagcaagcagaaaaatcaggttcgagcgctgcgccagcaggtcggtttcgtgttccagaacttcaacctgttcccgcaccgttcggtgttggaaaacatcatcgaagggccggttatcgtcaagggcgaggcgaaagccagcgcggaacagcgcgctcgcgcgttgctggccaaggtggggttgagcggcaaggagcaggcgtatccgcggcggctgtccggcggccaacagcagcgagtggctattgcgcgcgcgctggcgatgcagccggaggtgatcttgttcgatgagccgacgtcggcgctcgatcccgagctggtgggggaagtgctcaataccatgcgttcactggcggaagagaaacgcaccatggtgatcgtcacccatgagatgagctttgcccgcgacgtggcggaccgggttatctttatggaccacggccgcatcgttgaacagggcccggctaaagccctgttcgccaacccgcagcaccagcgcacccagcaattcctcgacaaattcctgaatcaataa

SEQ ID NO: 431373 - DNA, 723 bp, Serratia marcescens
gtgagcgatctgtataccgccgaaggcgtgatggacaaaaattctctctggctgcgctacgtcccgttagtgcgccacgaggcgttgcgcctgcaggtcaggctgcccgccagcgtggagctcgacgacctgctgcaggccgggggaatcgggctattgaacgccgttgagcgttatgacgccctacagggaaccgcctttaccacctatgcggtgcaacgcattcgcggcgcgatgctcgacgagttgcgcagccgcgactgggtgccgcgcagcgtgcggcgccatgcgcgcgaggtcgcgcaggtgatgcggcaactggaacagcgttacggccgcccggcgagcgagacggaagtggcgcaggcgctagacatctcgctggatgagtaccgtcaaattctgttggacaccaataacagccagcttttctcctacgacgaatggcgcgaggagcatggcgagaacgcggaaccgatgctggaagggcatgaagaggccaatccgctgcatcacctgttggaaggcagcctgcgccagcgggtgatcgacgccatcgaggcgttgccggagcgcgaaaaaatggtgctgacgctgtattaccaggaagagttgaatctcaaagagatcggcgccgtgctggacgtcggggaatcccgcgtcagccaactgcacagtcaggcgatcaaacggctgcgcgcgcggctggcgaacgatacctga

SEQ ID NO: 431374 - DNA, 1008 bp, Serratia marcescens
atgaccgttaagctgctcgaaggtggacgctataaagtggatattcgaccgcgcggagcggcaggacgccgaatccagcggatttttgataagaaggctgatgctgttgcttttgaaaaatatgttctcagcaacatgcataacaaagagtggctggacaagccagcagatcaccggcgcctgacagaattacttgccaggtggtgggcccttgaaggccgcagccataaatacggcgaaaagcggcagcgagagctggagaagctgatcagtgatatgggtaacccacgtgcttcacaactggtgaaggggtttattactgaataccgctctcaacgtttattcgaagggatcaaggcgtcaacaatcaatagggagctgacgacacttagaagcatgttccgagtgttgatagaagcggaagactatcaccacgaaaacccgctgaagggcattccggtactgaaagaagaaaagccggaaatgtcatatttaacggagagggaaatagctctattgctgtcagcattgaccggggatgccagaagactcgccgtgctatgcctaagcactggcggacgatggggggaatcgcacaatatgctggctcaaaatgtaatccatggaaaggttacgttcaccaagaccaaaaacggccgggctcgaaccgttccgatctctgaagaggtcatgagctacgtcaagacggtcaaaacaggccgcttgtttaacgtgagctatcgcgaatttcgcgaaactctgaaggcgttaaagcctgatcttccgaaagggcaggcaacccacgttctgcggcatacgtttgcggctcacttcatgattaacggaggtaatattcttacgttaaacaagatattagggcacgccacgctagaacaaacgatggcatatgcgcatttttcgcctgatcatttaaacgatgcattggcgcttaatccgttgcggtctggcatccagatctcatccatcgatatggcgtctgctggttaa

SEQ ID NO: 431375 - DNA, 303 bp, Serratia marcescens
atgagtatgagtgtggcggataagttaaaggttatgcgcgagagcgaacgacttacgagcttgcctgatgcggcaaagatgctgggattgaatcgtgatgctttatggcgttatgagtctggaaaaacaacacctaacactgaggtgatcatgagtattttgaaccatccgaggtttgagaaatacgccctatggtttatcaccggaaaaatcgcccctgaatccggtcaaattgcgccggctctcgcacactttgggcaagaagaaacaacctcgccacactcagaccaaaagactggctaa

SEQ ID NO: 431376 - DNA, 333 bp, Serratia marcescens
atgaaagatgcagttttgagcgcgttgtttaagattcccgaccccatcaccgccgacgaattttcccgacgcactggcaagactacgtcagcggttcgtcatatggttgatcgtcgccagctgccgctggtcacagagcgtgaagttattggcgaagagggcagcgcccgccgcctcctgattctatggaatgagtggctagagatggtttacgaagccacgggcaaactgccgccagagcgccaggactggcgcaacagttggattaagaaggcgactaagctggctaacgatatgggggtaaacatgttcagcagcgagtctgcaacatga

SEQ ID NO: 431377 - DNA, 135 bp, Serratia marcescens
atggggctctttgaatcgattagccgctatatatgcccagcctttgtttttgggtgggggttgaaacttgggtttgattttaacgaactgcttacgaacatctctaagcttttatggatggtactggccgggtag

SEQ ID NO: 431378 - DNA, 309 bp, Serratia marcescens
atgagcatgacagttgagcaaataaaatccgttgagtgtttcgtcaataatgcaaagtcattactggcgcgcgctaaaaacaaaaatcacactgcctgtttttataacaagctgatggcgagtgaaaaaaaagccatttgcacattaggtaatattgatagccgcataaagttaactgctcaacacatcgaaatgaaattcgaggaaatgagttacgcagaaaggcgagccgttttccgaggaataaaacttctacaaaggttaaatcgcgatatcccgtcattaataaatattactgactgcgattaa

SEQ ID NO: 431379 - DNA, 876 bp, Serratia marcescens
atgaacaaacccgcccttaaatggctgggcagcaaagcccgtattatcgacactctgcgccagcacctgcctgaaggtaagcgcctggttgagccgttcgtcggctccggcgctgttttcctcaataccgactatgacagctatctgctgtgcgatatcaacagcgatctgatcaacttccacaacgtcgccaaaaaccatcccgaggtgctgatccgcgaagcgcgccatctgttcaacgcacacccggatcaggagggctattacggcgtgcgcgctgacttcaatctgcgctgtgacagcaatttcatctaccgtgcggcgcagttcctttacctgaaccgccacggcttcaatggtgtttgccgctacaacctgcgcggcgagtttaatgtgccgtttggtcatcgaaaggcgccctacttcccagaagacgagatcagagccttcgcgaaaaaggcgcaggccaagaaagccattttcctgtgctgcagcttccccgaggcgatcaggatggcccaagccggcgacgtgatttattgcgatccgccgtacatcccagccagtgaatcagccaactttaccagctatcacactgacggctttaccagcgagcagcagagcaagctggcacgcatgctccgtatcgccgccaagctgggccgccacgtcgtggcatcgaacagcgagacggacgcagccaaagcgctgtacgccgatttcactatcacctcgatcaccgcccgccgctctgtcagcgccaaagctgccagccgcgcagacgttggcgagatcatcgcaacaatgaatgcatccaccatgcaagccatccagcgaaatgaagatgttaacgctggttggctgcaaaagttatga

SEQ ID NO: 431380 - DNA, 270 bp, Serratia marcescens
atgaaaaagcatgagctaaaaatcttgccggtgcatttcgcggcagtggcccgcggagagaagaaggcagagtttcgcataaacgatcgggactacgccgtcggcgatttgcttcgcctgcggctgtccggcgaatgcccggaattcatgcaccccgcggcatttgctaacgcccatacctgggtgcgtatcacccacatcaccgacctggccgaatgggcgccgggttacgtgatgctgagtatcgagcgggggccgttcaaatgctga

SEQ ID NO: 431381 - DNA, 1005 bp, Serratia marcescens
ttgatcgatgatcgtgtcttcgctaccgatgccatcaacgtgatcagtatttccggcggcaaagacagcctggcgcagtggctgcttgctcttgctgccggcgtcgagattgttccggcctttgctgacacaggccatgaacacccgttaacaatggaatacctggattatctggaatccaagttagggccgattcgccgtgttaaagccgactttaccgcgcgcatcgagggtaagcgccggtttattgctgagtactggcccatatcacttgttactgagtgtgggctgactgagcaggaggcaaaaaagaccgttgccctggcacttgaaacccttcacccaaccggcgtgccattccttgacctctgtatgtggaagggccgctttccgtcaacaatggcccgcttctgcacattcgagttaaagcacatcccgatccgcgatcagctggttgcgcctttgctggacgagtacgacgaggtgatcagttggcaaggggttcgggcggaggaatcgccgcaacgcgcgggattgcccgcgtgggaaagcgatgccgataaaacgccaggcctaaatatttatcggccaattctcgattggaaacatgccgacgtcttcgcgattgccaaacattacggcatcaagccgaatccgctgtataaacaaggctgtagccgcgtcggctgcatgccatgcattcacgcacgcaaatccgagctggccgagatttttacccgctggccggaggagatagcccgcgttgctcgatgggaaaagctggtagccgcttgctctcgccgccagaacagcgccttctttcccgctactcaagatccgaaaaaggcggaaagccgaatcgagtgcatcacggttgaatcacatggcatcgaaacctatcgcgattgggccctaaccaccaggggtgggcagcagttcgatttgatcgccgccatgaacgatcacaccgcttgcagtagcgtttacgccggcgtttgcgaatga

SEQ ID NO: 431382 - DNA, 702 bp, Serratia marcescens
atgggatatttggggagcaaggcggcaagcggcgcttatcaagcgatcatcagccaaatgccgccgcatgatacttacatcgaaacgcacctcggcggtggcaccatcatgttacgtaaaccgccggcggcccgcacgatcgggtgggatatcgatccggagaccgttgaagcattttgccagggaaacccggactatctggatgaacaggccgatcgccttatgattgagatcggcgacgcggttaagctgctgcgcgccgttccttttgaaaaatacggccgcacgctgatatacgtcgacccgccctatcttccagaaacccgcaccagccgcgcgcggtaccgtcacgagtataccgtcgacgatcaccgccgcctgatcgacgtgctgcgcaccgtgcccgccaacgtcatgatctccggctatccatccgcactctatgacgagttgctcggcgactggcgcaacatccagtttcaggtaatgacccgcggcgggccccgaaccgaacaactttggatgaactttgccgagggtaacgcctacagccatgcatttgccggcgccaactacattgaccgtcagcgcatcaaacgaaaggcggaacgctgggcaaggaactacagcgcgttacctgcatcagagcaaacggccattctggccgccatgcttgaagtgcatcagcacaagggtaaataa

SEQ ID NO: 431383 - DNA, 594 bp, Serratia marcescens
atgaataagcgaaaaagtaaaatttctgcgatggctgctgcaatggcgatatccattgctcctgtattggcggatagcatcgcacatcatgatgttagtatcgatcgtcatagtgcgatgtctatttcgttgcaggacgtcagccaatctgttgtttatcttcctatcgaagaagcaaccccctaccttcagaatcttgctgagcgtatgcgcttgcaccgtaaaaatttagagttggaatgggaagaaaaacaagtacctattgagctgaaaaaacagaagaagagcacgcgtgacaactttggcagccttaaagcgcacatcgatatttgcagtaacttcgttgaggcggccagattggctctgagtaatgttcccgcgtcggagagtaaactcagagcggaaatcgttgcttttgcccgtgcatcggcggcattgcgctatagcattgaatctattttagatttcatgaaaagtacgcatgcgccagcaagatcgattgatgcagagctgaccgttacgacggaacaggttcaggctttgatcagaggtgagcataagaatttagggcttgatgaaccaaaatttcactaa

SEQ ID NO: 431384 - DNA, 603 bp, Serratia marcescens
atgaataacaccctgctccccccgtccgccggcgcctggatgcgccacaccgaaacggtcactgcgcgactgtcggcgatcactgtcgcgctgcgcacgctgtggacgccgaccgcctgcccggttgagttgctgccgtatctcgcctgggcgttgtcggttgaccgctgggataagaactggccggcagagaaaaagatagcggcgatccagcaatcctactggcagcaccgccgcaagggcacccgcgccgcggtgcggcgggtgattgagagcatggggttttcggccacctttgccgaatggttcgacaccggcgatcggccgggcacctttcggcttgaggtcgacgtcaacgaagtcggactaactgaaaaaacgctggccgaattaaatcgcctggtggcggatgccaagccggtcagccgacaccttgcgcaaatgaatatcgtgacaaaggttagcggttttatctaccccgccgttgtgatgcacgacggcgatatcgtcactgtttacccggccgactacgagccggacgacagcatcaaatataacggcgttgcaagttttagcggcgattaccattattccggggagtaa

SEQ ID NO: 431385 - DNA, 2964 bp, Serratia marcescens
atgtcaaatattactgaaggcaaagagtgggttgataatatttaccagatacagagaaatgatgccgtaaccggcgggttatctggtgtggccaacattcaggcaaaacaattggccgcgcgtactcaatacctaaaggaatccgtcgaagggttgcgcctcggtgaaaatccgtacccatcaattgagcaggcgcaagccgccgctgatgcaggagcaataccggaaggtgcattgattacagtcagaactggcaatacagattattggtttatcgagtgcgttaataatggcgggattatccagactacggggaaaacgctattatccggcgagttagtttcacgcgttattaacgaaatgagaaatacatttcaagactcgcctgattcgctctttgatatcgtttcatcgaacggcgtccggccgtttcgcatccgtgataatgacggcgctatcgaatttgagatggttgccaaactggtcaccggcaatgcagggttaaattttgccggcagttcggtggattattttgcgccgccgggttggctgtttgtgatttattccgcaaatggcctggtgattgccggtgtcaaagacgacggtacgaaagtcggctggggtgatggttccggcggtggcggccagtccggtgagattattcccggtgataccgcagccagctatgacgccatccggcagtatgacggcgaggcgacggtcaaggacgttatcggcaaccgcatcgccggacgttttgttgtcgatgccggggatacgacttcccccgatgatgatggcggttgcctggtcgatacgctgggtcggcgctggaagcgtgcggcggattatgtctcgttcgacatgttcggcgcaccgcgcatccccgaatcggtctatcagcagtttgccagcctggccgcgcagggcgaccacgccggggcggcggcggtcatggctgaccaacttcccgccgatactgctattcgggcgtgcttcgcctttgctaatgcgctcaatatccccgtgcgtcaggacgctggccggttcctgtggaaaaacacggaaatcgaggtcaaggtcagcgccttcctgtcgggcgctaccatcgtgacgaccgacatttccggcgtgaatcaagaccggtggggccctatccctggcgtcgacgacaatgcgcctgagccggtgcgcatgttcactatccgtggccgtaagccggtgattgagctgacgcccgctcagattaacctgctcaacaccacctactcgggctacctgcgcgcgggcagctgtcagttgcccatgcctgagctgtaccgctatcgcggcgggcagttgttcatgcgttccagcgcagtcgagtattaccgcagcggcagtacaaccaacgcccgcgcccaggtgctgtatcgtgactttgcccgccttggcaagaacggggcgctgaccgatatgctggtaaaggatatcccggcaggcacagtgacctacgccaaaatcgtgcagaaagaagattcatacctgacgttcgaaccgccgttcttccacgaatccggcaacagccgccgttttgtcaatatcgaggtgtaccggccgcagactatcatcggcaagatggtgctgcgcaccgacgcctacggcgaggcggcggcctgggtgaaaatctccgcgcatgaaacgttcgacgtggaattccagggcggacagtgcgaggcgtcgttcggctactctggggcgtatgtggtctcataccgtgactgcatcaatatgtacatgcacgatttcaccggcatgtacggctggggcgtgaacggccaccacggcaccaagaagatgcactttgaacgctgcgtgttcaaccgcatcgactggcacacctttggctatgatatcagcggccgcgacctggaatttaaagggctgggtatcaatatgcagggcggcggcacctgggatttccgtaatgtctcggtgattgtgccggttggtgataccgctggccgtggtgagccgatgcaaaactggttcgtcgagctgcgcggtgattatgccagcgactgttacggttcgctgtctatcgacgggctgaccatcaagttcgacgtgaccaacccgaacaacctcggtgcgtctgttcgctcctatgaagtggtgcgcctggtcggcgtggatggcaccaacgcccgccacgatacccgcacaccgaaccgcatcgacctgcgcaacgtgacggtagacctgcaaggctcgacagcgttcgccgctgaccccaaccggtttgtctttgccgccgtgcgtaccgtgcgcagcgaaaagaccgaccacacggtgaccggctataaaacgctgctgcctgagtttattcgggtggagggcatgaccgccatcaacgtgccggccgataaaaatgcctggatgtgcgggctgatgaccagtaacgacatgcacaaaaacactctgggttcgcgagtgaagaagcgcgctgacggcaccaacgccgatgtggtgctgcgtgatattcgcagcgtggtcaacaacacggtcagcgacagcagcagtaacaacacggtggcgatggcggggacggcatcctggtggacagcggaatacctgaactcggactattcgtggataccgcgcatcatcatggataactgcgcccccgccatgattgatattaccggcagcctggccgtggtggatattcgcggcggttgtgtggcgcgcctgcaaaacggtaacacgcaaagccgggtgcgcatcaacggtgccgatattcagcttatccccgacgccagcggcaacacggtctttgacagcgcgaacagcgtcgccatcggcagcacctggctgaaccccgccggtgcggcggtctattccggtaccctgcgcggggccgcaaacgaaaaccggggcgatgccagcaacgccccgaacattccttcatctgtattcatctga

SEQ ID NO: 431386 - DNA, 717 bp, Serratia marcescens
atgagcggcgtgcgcattttttgtaactcctacatcccggttgagaattgggatcatgaatttgtggtggtcaactcccgcctggtcagcgaaaacccgctgccggcgttggtgtcttttgacctgctgaacccactggacaacagcggcaacggccacaaggtcaccaaagcgggcggcatcatcaagccctatgggctggacttcaaccgtgctaacggcggctcaaccaccgactttattgccaacaaagacagcatttcagtgttgtgcgcggtgaaggtgaacggtaccgatgcctataataccttcctcgactcgcgcaccatcaacagcagcacatcgagcgggtttgcggttgacttctcaagcgccacgcaaaagctgcgtctgaacctgacctacccgtcaggggctaacgaagtggtgcagttcccgacgttcgtcgccggtgagtggaatattctgtgcttcacgctgtcgccgacggtcattcgtggcgagaaccacctgggcgaaatcatcaccaaagacttttccagccctatcaacgtcggacaatgggcccgcccgctgctgctgggcaagtcagtgaccaacggcacatgcgatggttcggtggggtttgtggcggtttatgacggctactggacgccggagcagcgcaaggccgtgattaaaactggcattgacgtaatggcatcacgagagggctga

SEQ ID NO: 431387 - DNA, 1083 bp, Serratia marcescens
atggccaacaatgcgttttatgtcatcacgacaagcaagggcaatgagaaaatagcgcaggccgcagtaacgggtaagcctgtcgcaatttctcagatggccgtcggggatggcgatggccacgtgccaaagccaacaccggggtgggatgggttaattcacgaggtctaccgcggaaagctgaacaagctggtcattgccgacaataatgccagtgtcatcgaagctgaattgataatgccgccgcagatcggcggcttctggctgcgtgagctggcgctttacgccgatgatggcgaatgcatcgccgtcggcaacatgccggaaacctacaagccattgctggcagaaggttcggggcgtttccagataatcaggatgcagctgaaagtcagcagcacggccgacgtggagctgattgccgatccgtcggtgattttggcaaccgccgaggacgtcaagggcgcggaagatgcggccaaggactacacggacgaagcgatcggcgagctgggcgaaagcgtaaacaaggcgatcgccgccgcagtaaaagctgcaatccgtgacgcctgggagcaggacaatcccctgggaacttcgcgcttgttcaaccagaatgtagaccccaacgagctatggccgtggtcaacatgggagtatgccggcgaacacctgacaataagaacggcgaaggaggacggttcagacgtcggcacccttggcggtagcgatgaggttaatatcacgcgcgccaacctgccgcagtctgtactgaatgtgtcgggaagcacaggcgagcaaggggcgcagacgctgcaaacaacccaggcaggtagacaccgacatcaaggcggaatgtcagcgcccggcgaggcgtgggatgacgattatattgtcggctcagacaacgacaaccacagaacgcgcaactacaccagcgaggctgaagaccacattcacgaagtcactgtaccggcgcacgctcacaccgtttgggcgcaaaccgaagcactcggccaaggccaagcgatcagcgtcgtcgagcgccacaagctgcaaatgctgtggcaccgtgtggcctga

SEQ ID NO: 431388 - DNA, 687 bp, Serratia marcescens
atgacgagcaccacatgcaagaagtgtgggagtgggatttctgggaaagaaaaagtttgtccttactgcggagcgaagaaccctggtagccggtggtggcatggcgcccttggcttagttgggctcgcggctattttgcttgcgttaaaggcatgccctggcacatcagaagtcgaaggagcggtctctttcaattatggagatgtgaaccttaaagaatggcgtacaaaggacaaggatgaccgctttaaaatcatagataattatcttaccgttaacggcggcctacgttccgccgccgatggtttttatagctgcatgagccagtactcttttactaaaaatgatgatgttaaggtctcgcaagcacttgattggtgcaagcaaagttatgacaaagagccgctttcactggctcgtatggttaattttgatactttcaaaagcaatgttagatcgttcgacagttcatatcgcccacttactgcggcaattaaagaaagcatgaacaacccatcgacattcgaacatgttgagaccagctatagatttgtgcttgataactcggcaccgtatgccgtggtttctacggtctatcgcggctctaattcgtatggtgccttggttaaaaattcggtatctgccaaggtagatttaagaaccggcaacatagtcgagtacctataa

SEQ ID NO: 431389 - DNA, 267 bp, Serratia marcescens
atgaagataaaacttcagctgagtgatttattcgtcagcggcatcgcccttttgatcatgagcactattttaaacacgctgggattttcctggggtttatttgctctaccgcctggcgtcgatagttttgtcatcatcccgtttaccttatttggctcattgaagttggccgagtgcctctataagccaatacggtggctgctaaatgagagccgtaagcctcaaatcgaaaataacaaccctaaaaataatgctaagtcgcgttaa

SEQ ID NO: 431390 - DNA, 192 bp, Serratia marcescens
atgtgggtactctatgacttttatttcgcttattttttctgctatcgcctttctgatgtattcatctatatcccatatgggtatcgcggagctgttatcataaagtactttttcgttagagttagggatggatacttcttttttaaacaaacgaaactgctcttcgttaccatcaaacagttgcctgtttga

SEQ ID NO: 431391 - DNA, 2811 bp, Serratia marcescens
atgataaatttaaacccactttctttttctgaatatgatttgaacgagatactgaattctagccaagataataagttggttctttttatcggtgctggtttctccaaattcagcgaaacggaattagtgaagatacctacttggagcgagttaataagtgagctaaaagacgacttaggtttgtctgaagaaagtgattttttaaaaatagcccaactttactatcttaaatacgggcaaaactcttatgttaaaaaaatcaagtcaacaattagagatttggatccaagtcttttccataagatgctatttgaattaaatccccactatataatcactaccaactgggatggtttgcttgaaaaaactgcacaagacatagggcttgcttatgatttagttagttctgacgttgatctggcacaaagtcatttggacaagaaaattataaagatgcatggggattttcgacagaataattttgtttttaaagaggatgattatttacagtacagccagaattttccacttatagaaaattttataaaaggaattttctcaacaaacaccgtggtttttttagggtactcttatagcgattatgatttaaaacagattgtttcatgggttaccactatatcaaaagcaacaccaagaaaatatttgctccagaaaaatcatgatgatgcccaggctctttacttaagaaaccatgggatatccttgttgacaccgatgaatacagacattagttaccatgaactttactctgaatttttcagtaatttcaagcttgttaaaaaccaagatgagtttataaagaggaccctgatctatgccgagtcagaggtaaaaaaaatagaagataacatgagtatttctgtttctgataaaaataaactcaagaatgatattgaatgctctgtaacaaagaaaataaacaaatatgttgataataaactaaaagcattaacgcaatacaaagtattgctccctgaacagatcagtaaaaaattaaccaatagcaccattgattataataaatctggagttacactgatctcacacgataattttttgacgggtgactatgacaggtacagcaggaaaataaatagcatataccttaatgacatattgagtaaaaatactcagtttaaaaaaacgttctcctcaattttagaaaaggcatttataaatacagttagttataactcgaaactccatgaggtggttagttcttcagaattagagtctgagctatacaataaaatctctttcgcttattcaaaggatagcgctgaaatactccttattaataaggagcatggcaagcttctagaaatacttatttcgaaagtaaaacatcatcttaatgagaggaactatattctcgccaccatttacatgtctaattttgatgatacttacaggatgttgaagcggaatttacgttctaacggtgaggccattgatgaagattgtaaagcaataatagaaagccattccccatttgattttaaaagtaaaataattgattttccacggggtttgcaaagtgatctgcaagatttagtggggatgcttgaatttaatgaaatatacaaagcttactatcgatttgacgttgaatcgaagaagaatttaggatactcacaaatcagaaagaatggtggaatggcattttccgatgatgagtttaaaacacgagctaaactgtacccttacgtttatttcattttaggtaatgaaattttaattgaagaatatacagagattaaaagattattcgagtttaatattcttagtagcctcgaacactatctatccgaagggagattctatgttaacataattgatctatttattttaataaagtattgtgatacaaaaaaactcaaagaatttttagtttgcttaactaaagacaaaataataactagcgccagtacaattgacaaaaaaaactcttctcagattaggaggtatttactcaatactctcgagaacatatgtaacttgatgagtctgaaaaataaaaattctattcataccacttcaatagagcgttggaccaataacttattgattatattagggtgtgttcagtggagttcaaatcagttaaaaacaataataaatagtttgattcctttattagagtgcagaacaaataatataaatatttatgaaaacatacaaacacttctaactgtgaatgagtttttgtatcaaaaatctcatcctgacatgttaaagattttggatgtgatacttgaaaaaatcaatgcgggagagtttaatggttatgaccatcatattattaacgccaatgttctacgaagcatttacatattatcagaaaaccataattacacatatgaaaatactgaactattaacgttggcgctgacaaaaatacaaccacttggtgattattggaaaaaattcatcactgatagcttattattaaatatcaaaagaataggttccattgaggttgtagagattatagataaatttgttgtcggtgatattttaaacctgccaatcacgacagtaaaagatattatggagcgtttgcatttgatcgcaaatggatatccgatgcccaatcaattccttgatgttattaacgaatttgtttctgaaaatatccccggtaaattaagtgaatcagatttcattattgctggcgtcgaaagggatttctctaacttaattaaactcattataaaggacagaggctttgttgaacttcaaggtgcattggatatcttcaatgaacgaatgcaatgtttaaaaaaataa

SEQ ID NO: 431392 - DNA, 3840 bp, Serratia marcescens
atgcaatttataacaaacggccctgacattcctgagtctcttttgcaggctcatgaggaaggtcgagtggtatttttctgcggcgcgggaatctcatatcctgcgcgtctgccgggctttgaagggttggttcaggaaatttaccgactgaatggaacaaaaccttcagaacttgaacaagctgttttggagcgggggcagtatgatgccacattagatcttcttgaacgtcgtttgcccggtcagagacttgccgttcgtcgcgcacttgtaagtgcactgaaaccaaacacccgcatcaaaggtgccgtagatactcaggcagcgctgttacgtctggcacgtaatcgtgaagggtcactaaagctggtcacgacgaactttgaccgtattttccacgtagccgccaaacgtactcgccagaccttccacgaatattcatcccctatgctacctattcccaaaaatagccgatgggatggactggtctttttgcatggactaatacctgataagccggatgatacagtcctgaatcggctggttgttaccagtggtgatttcggactggcatacctgactgaacgctgggctgctcgttttgtaagtgagttgttccgtaactatgtggtttgttttgtggggtacagtatcaatgaccctgtattgcgctacatgatggatgcattagcggctgaccgtatgctgggtgaaattaccccacaggcctgggctctgggtgattgcgaacctggacaggaagagcaaaaagccaatgagtgggaggctaaaggtgttacccctgttctctataatgtacaggccggtagcagggaccattctgccttacataaaaccctacatgcttgggcagatacataccgtgatggggtccagggaaaagaagcgatagttgtcaaacatgctcccgcacggccacaggatacgacgaggcaggacaattttgtcgggcggatgctgtgggcattatcggataaatcaggattacccgcgaaacgctttgctgatttcgatcccgttccttcactggactggttactggagacattcagtcttgagacacttgggcatgaagatttagcccggtttggtgtccctcctcaggaagaggtggatacgaagcttcgttttagtctggtccgacgccccgcttcttacacacgcgcaccatatatgtgtctggcgtcacggggcttgaccggtagtcaatgggatgacgtgatgactcacatttcccgttggctgatacgccatctggacgaccctcgactgataatttggatagccgagcgaggaggacaactccatgaacgctgtatgtggctgattcagcaaaaattagactatcttgctactctgaagctaaacgggaaggtcgctgaactggatgaaattcgtttaaatgcccctaaggctgttcctggccctcatatgtgtaccttatggaaccttctactcagtgagcggctaaaatcagcgggatataattctgatctctatagctggtttagtcggcttaaaagagacggcttaaccacaacaatgcgtttgaaattgcgcgaattactttctccaaagattttattgagaaagcccattcgctggaattacggcgtaagtgacactgatgaaccacttagcatcagacacttagtcgattgggaactggtactcgccgcagaccatgtgtactccactctggacgaagaggctaatggcaactggaatacagctttacctatcctgctgaacgattttcaacagcttttacgggatgcgctggatctgttacatgagctgggtgaggctgatgagtttagagatcgttcatattgggatcttccatccattatcccacactggcaaaaccggggctttcatgattgggttagtttgattacgctgctgcgggattcatggctcgcagttcgggctaatgacatcccacgagcagcaatcattgcgcaaggatggattgagctcccttatcctaccttcaagcgactggctctctttgctgccagccatgataactgcatctcttccgaagaatgggttaaatggttgttgagcgatgattcatggtggctgtggtgtgttgagaccaaacgggaagtcaacaggttgtttgtgttacaggggcggcatctgaacggacttgcgcaggaaaacctggaaaccgcaatccttgctggcccaccacgcagaatgtaccgggataatcttgaggatgggaggtggcaatctattactgatcattctgtctggttgcatctggctaaactaaaaatttctgatctggatctgggagaagcggcaacggcacgactggcagaattatccaacaggtatccagcgtggaagttggctgacaacgagcgtgacgagttttctcactggatgagcgggacaggcgatccggattatgatgacagccaggacattgaacctgcccctcgaaatcgacaggagttggttatatggctccaaaaacccgaacctgaacaccgacctatatacgaagatacctggagagatgtttgccgtactcgattctttcatagtgcgtatgcactttgcgaactggctaaaagtgatatctggccccctgatcgatggcgtgtagctcttcaggtttgggctgatgatggtctggtgttacgctcgtggcattatgttgcacctgtggtccagaccatgcctgattattttcttaaggagattatccatagtgtggcatggtggatggaaacggcttctaaagttataaaccaccacaaagatatacttatcggactctgccgcagaatactggcattaccacttgaagctggtactgatgcaaatattgtcagcaacggcattaaatcatacagcccggtcgatgctgcaataaatcaccccatcggacatgttactcagattctggtcaacctgtggttcaagcaagatccaaatgataacgagcaacttcccgattatctcaagtccattttcagtgcgctgtgtgatcctgatatcgagcgatttatacatgggcgggtgttgctgagttcacagctaattgcacttttccgtgtagaccgctcctggacagaacaatatcttttaccattcttcaactgggacaatccctttgaggcgaagtccgtttgggaaggctttctctggtcgcctcgcctttaccagccattaatgacggcctttaaatctcaatgccttgatagtgcaaaccactatgcagaactcggtgatcatcgtcagcaatacgcaactttcttaacatacgcagcattaggcccgacagcagattacacaaccgaagaatttcgtaccgcttttaacgcacttccgtcagaaggtcttgaaaagtgtgctctggcactcagtcaggcgcaagaaggggcggctgacaagagagaggattattggaaaaatcgagtccggccattgtggcaaaacatctggccgaaatcccgggatctggtcacttctcaaatgaccgtttcacttgcccggctaatcattgctactggcgacgaatttccctctgctttggatgacgtacataactggctgatacctgttgaacatccatactatgtcatacaccgactgcttgaatcgggcctgtgcacgcgctttcctgtcgaagcagcattgctactgggttacataattgctggtgagaaacgccagtggttatctgaggagttgggtacttgcctggatgacattattcaggctgcaccaaaccttgagcaagacgtgcaatactcacggctaagagaatattacaggaggaacagcgcccaatag

SEQ ID NO: 431393 - DNA, 756 bp, Serratia marcescens
atgatggatcttcgtggctataagtcaggaaacttcctaccaacaaaagattttgctatgaccgcatcggtggtgagagcaattgcgaacttccgctcctcgctcataagggacagccatactcaaatctctcacattgcaggagatttgagtatgaacacgtcaccgtggaacaaagaccgtatcatcggtcaaaaaagaccactccagatatctcatatctgggggatccgaatccgacttgaactggaaggtaaaacgcgtgatttagctctgttcaatatggccctggacagtaagctacgaggctgcgatctggtcaaactcaaagtatctgatattgcatatggtaactctgtttcaagcagagcaacggtgttgcaacagaaaactggtagtcccgtgcaatttgagataaccaaagggacaagagaagctgttgctgcactgataaagcttagcaatttgcatagtaaagacttcttgtttcggtctagggtcggaactaaccagcacatatcaacccggcagtacaaccgaatttttcatgggtgggtagaaaagcttggtctcgaagattcgctttacagcacacactccttgagaagaacgaaaccttacctgatctacaagaaaaccaagaatcttcgggtgatccaacttctgttgggccataagaaactggaaagcacagtccgttatctgggcattgaagtagatgatgcgttagagatctctgaatcgattgaagtctaa

SEQ ID NO: 431394 - DNA, 1920 bp, Serratia marcescens
atgtcagaagcattaggggttttggttttaaaggcagtagttgtcaaaagtgtcgaagttatgttacaacgggttttaaacgccaactggaataatagttttgagaatgcgaaagaaattattttagaacttcaggatgaatggccaaaactaaattatcttcgtaaacacgtacagcatacactgaaaatgcggacacttttgaatccgaacgatgatgtcacgcttgatgaagtttattatccattaaccctatctactgcatcacatagggataagataattattggtgataatcaaccgcttaagtatagcggaatttcaaatataatcggcattgcaggccaagggaaaagtacagttcttcgaaagctttttcttgaagaaattaacaatggagacagaattccattttttattgaacttaggaacgttgaggatggtgatatacttgctcattttaaaaacctcctccgagatttacagcttgatgtttctgcctctaatgttgaatatcttctgcaatccgggaagatagttttattgctggacgggtttgatgaggttcgccagcaaattacgacccaaacgttaaattcaataaaactgttaaacggttcatatgcatgtccactgattataaccagtagacctaatactgaaatttgcacagcgccaggaattaacaatctatttattgagaacatcgagttggaagataaaattcgtatattgaatctgattgaccagagggatgttaattcaaatggaacaaccttccgttacctgtgtgaacttctgatatcgcgggagtcctttgcagatactatatgcaatccgataatggttacactgctttatcactgttttccttatatggatgaagtgcctagtgacatcagtgaattttaccgtcagctgtttggggttctctatgccagacatgataaaacaaagggatacaattcaagggaaagagagtccgaggtggatgtggagcctgcccgcgaattattttcatatttaagcttgaaatcgttacttcaagaagagtatgaactggattcttacaagctgtatcagtatgtgacgactgcactgcaaaccaaggggtacgatgcaaaacgggcaaatgcgttcattaacgatatcattaagataacgtgccttttgcaggcagatggcaatgacaggtatgtatatcttcataaatcggtacaggaattttttgcggctttctaccttagcattatgaaggaaaaagtgataaaagctaaaatatacaaaagcttaagagagaaagtgcaactttctgaaaaatatgataatttcttgttttttttgtttcatctggataataattcatttatcgatgaacttacattagaaaccttcagagagtgccagttcaaagattacagtgatcttaattatgaagatttttccattccgtttaatcaaatattgaaaggcactatggtaagaggtgaatgcaaaaagaaagattcgcgcatcgaacttgtgagccatacttcaatgagtaaaattctgaacctaggcttccttaatgtcataaatggttgcgaaaggacattcagccatgaaattgacatgcctcttattaattcgatgaaaaatgagattgagaaggaggacttacacagcttaggtgactttgtaatgacggaatccagaaaagaaaataaaagtggagttaacatggaaaatgacacttcaaatcccacggaacattatggattttctttaattcaatatctgcgatttgcaaatctgtatgacttttacaaggaaaagttttttgaatccatcaatagttacaataatgacgtatacaagataaaatataaagagtctctggaaagaaaaaacgctatagataatagctttgattttctatag

SEQ ID NO: 431395 - DNA, 909 bp, Serratia marcescens
atggctgatcaagataaaagtaagattcccgattggaaagctctcgagcaacttgtcgctatgatacaaaggcaactatcgcctgatgctgtagtgcaacacaatgtgatgcttgatggtgtccagagcgaaaccaaaagacaggtggatgttctggtggagcagtccattggtcagtacaagatgcgtattgttattgattgtaaggactatgctaatccggtagatgtcaaaggtgttgaagaatttcacggattagtacaggacgtatgcgcacatcaaggggctttagtctgccctgctggttttaccaaagcagcgttacggcgtgcacagaaattacaggttgcgctataccgcccagtttctacaggcgaccataaatggcgggcaaaggtggcagctcctgtattatgtgatttcagaaatagcttcatgagttttggaattagatgttccgcccctaaacccctgctaattccaaatgagttttacaacttgcctgtctacagcgctgaaaacaagctattaggtacttcgttagaaattgcacagactcggtggaataatggttccttaccgagtgaacctggggagcatggggagttgctgatatttgaggaagctaaaactcaaattgataatggatacggtgacaaggtggaggttactttaactctacgactttttgttaaacaacatctttatctcggtcatttatccatcgaagatatcaacggcttacaggatgaacacaccgggctcattgttactaatgccttcaccttaggtggacttaacccggatgaggttgaacgagactggcaacgtgttgaagatatcagcgcaattgaatttgaacctttactgaaagtggttggctattactgttatgggattggatcctga

SEQ ID NO: 431396 - DNA, 813 bp, Serratia marcescens
atgcagagtgaaataatcacacagaaaaatggaaaaggtatcttcgatcgcaaggcttggttagccgaatctaaaaaactgtatttatcagcaaaaattttgaggactgaaggcgatagaaataaaaaacttcttcatgaaaataataaaaaccctgttatttatgaatatattgacatcgcatctgcaactgataaaaccagcagacttatgttgggttatgcattcgaaatgttattaaagtctgctgtcctgttaatgaaccttggtgctcagaaagacactatagaccttaaatttcgcgattatggacataagcttgataagatggctatcgatttggagctgtcattaacccctgacgagctgaagctattaaaaattgcgtcacaggatatagtgctgcaggcacgatacccgattggtaaagttgatgatgataagtatataggtgagttaaacaaaagaaatattgagctagcaaacaagaaaatctttggggatatggttatcctgtatgataaaataaaaaatgtagttgctaagtttgataatgatgttacaaactgtgcggagttcaacgtgcttagagggaacgattttgttctctttatgcgaaatggtggtggactctcatcaagagcaatagtgacctttgctgcccatttcccaaatggcaaaaaaagcaagtcatatttaaaagaggctattgagaagcatgctggcaagattgctttgttatatacatatagctgggcttcattttcattcttcgaagacacgggtaaaaagcttatctcgcttgcggaataa

SEQ ID NO: 431397 - DNA, 126 bp, Serratia marcescens
atgggcagcttaagcatttcttgtattcaaatcttctttctgataaaaaatgaccgattccccgtgcctgaccatcacaacactatcatgttagccatccgcgaagatgaagaacgccagcgctag

SEQ ID NO: 431398 - DNA, 810 bp, Serratia marcescens
atgaatatagaaacagttaaaaccgcttcgagattttcaataccaatcaaattaattctagccggaatagttagcgcgcttggaggatcgggatacattggttttctaagcgaatatgcaacttacttctatgcgttatcgaatggatttagaatccctgcggagggatcgccatacttaaaggtcacaatagcatcaataagtttctcggtcatgctattatgtgccaccatatatattatgttttattttatagtgaaaataaatctatcatcaaataagtgggcaaataaaattcaaaagaaaattattgactcacttcaattaaaaagtaaaactccgaaaggtatccattggttatataacacctcacaaaagacaatgggtattgcgggcgccattgtggttgcatttatttcatccattgtcattgcaatccttccttatttttcggtgagtaaggaaataccaatcccaattcacttgtttttattttgtgtttcatttacttattttatatgcacatcactacctctaattgacaagaaatatctcactgcagcatgtgtttttacaactttattttatttaatcagtactccattatttctgtttaatgacaacgtatatggagctatcttaaaggaaataaagtatggtggaggaactagggtaacgatttaccttgaagataaaaaagaaattaataccgaactattacttaggacaagtgatagcatcttcattacagaaagggatgataaagtatcggaaattccactagaaaaaataaataaaataacatattga

SEQ ID NO: 431399 - DNA, 3249 bp, Serratia marcescens
atgtctaataatggtttgccagtcactgacgtggtaggggtttctgttacccttggtcagcgccgcactgccggcgcatctgcaggtgatgcatacgcgcaggcagctcaaggtagtgcaatttcagcggctgactccgccgcaaaagccacccaggctgaacttggcgcggtggaagcagctgaaggcgtggctgagaatgcagtcatcgcgacagatgcagccaccaaagccgaggcggcagcagaaaacgcccaaaatatcgcagatgccaacaccttttacacatcaccgactgatcccgatggcacgattgcgggtattgtcgggacgccaaacgggaaatcctttcgcgtgggactggggaagggaaaaggatttaaatattatataaataataatggtgtagcattggaaatcagcgagtcaccaggtgctgattctttcaagagaatgatcccaggagcacgattagatattatcagttctggaaaaaataaatttgacaagagtcaggttgttcgcggctactatctatacgaggggagtgggcagccaacggtaaatgaacgttattgctactctgattttattccattaaatccgggtagtgcgtacagctcgacaccgccacaactcccaacgtctccggcgcgtgttgcgacattttatgatgaaaattataaatacatgagcgatattagctctgttgataatttcactgcgccgcaaggggcagcatttgttagggtttctgtgttgctggcagacctggaaacctatcagttgtctctcggtgttggttactctaactacgagaagtatgaatataacataaagcaaggtgtgaatctttacccggcattaggttttagttatgggaaaaacagattcaatccaaactctgttgtggatggtgttcacttatcatcaattggcactatttttttagatgcaaataaaactcgctccgtttcagattacatcgaaattgactcatcattaccatttgcatgcaaccaacagtggcttgcggctgcgtattatgatgcgcgcggagcattcattagtcgccagtacgattcagattttgcaacaaagccaattaatactctcatcattcctcaaaatgccaaatatctacgtattgaactgcccacggcggttgtagctgcaactcaaattgaatcaggggtagcattagcaactgaatttgaaccattccagttagagtctccgaattcctctacatccgggcctgtgctgtttggagctaagccgactagcatagaacggtctgggatgttcatggcaggggaaaacctattcaataataaaaccgttaagtcaggttatattaacgaatggggttctattttcccgggtggcgtgacctatgtatattctgattatattgcagtaacagccggtgaaatatttcgatcaggtaatacattgcggtttgttacattttacgatgctgcaaaatcgttcatcagtaccgttgctaacgtaactcaggcttttaccgcaccgcaaggggcagaatttgttaggttaacaatttctgcgggtttagctgctaatctgctgcttgttaaaggcgcatatttgccaaaacggcaggactacattcatgtaatgtcgggagcattaccagatggcgcatcgttgcgaattcccggtagcatcattttgcaagacagcctgtctcttgattttgttcagcaggggttgcttgttagtgggaaaaacctttacaactcgataaccactgatgcaggtttcattgatgagtccggtgttatcaacccaggaggtacagcttaccgttactccgcgtatattccagttaaacccgatgctatttattcgctgaataccggcgcgcgtttcgttggtctatatgatacgaataaaggatttatccgtaccatcgcagcgagtaatagcagcattttatctgtcacaactgatagtgattgttactttatccgtataacaatgaggacatctacctatgctgacttgcagctcgaattaggtagtagttctacagcatatgaaccgtttgcatactcgctgctgtcacatcttcctgatggtaccccagtaaatggcggaaatatatctgatgatggtgttacgcctgattcatatgggcttgagcgtttgcgcgaaacgcatatgcgactgctgaaactgtcctatggggatactactcgccttacctatgccatgatcggagatagctatacacggggacaagttcggtatgcgttaaaggtcgcgcagaaactttggaataaattcaacaatacggcgatcaccacaattgacccgccactgggatatggctggagatcattcgggttcgaccagtttggcgataacacggatatcatcggtaccttggtcaaccagtcggctaacgttacctgcgcgtataatactggacatggaccagatatctcgtcggtcacgatgggggcggcaggcgcgacaatttcttatacgcaagacctgtctaaagggtttacgtcaaccctctatgcggaaggcggcgccggggtagttcagtatcaggtgactggtatgaccgacccggtacagattgacctgtcaacctatccggccggtatgcaaatcattccgctgactattccaccaggtggcagcgcttctactgtgacatggacttgcgtgacggcgccggcggtactgtacggcgttaaaatcgtacacccgacggctagcggcgtgattgttcataagatgggtggcagtgggtcgcactcgaataactgggtcgcagcgatggatgcacggtggtctgccgcgcttactgacctggcgcctgatcttgttacgattatgcttggcacgaatgatcaaggagcgaaaatctcagcagctacgttccggtctaacatgctgacaatgatcgacacaatcagagctgttagacctacagctgacattttgctgatttgcccagctgagaataatcgaccgggagggaatatcatttcgatgaccacgtatgcagacgttatgtataaggtggctcgggacgatcgggatgtcggattcctcaatcttcaggagtcatttggggaaaaagcttcggactatgccgccggtagcgcgcgcccgtggatggtgggagatggtctacatccagcccctgaaactggtggttacgcaattgctgcagctattttgcgttcgctaagagttcctcagtga

SEQ ID NO: 431400 - DNA, 780 bp, Serratia marcescens
atggcgaagaatgaatttaaaccgtttgccatcggtgaatatgcgaacgtgctatcacagagtgaatatgaagcactccccgccgtaggggcaggatttacagccggcgttgcaaaaagtgaagaacttaataaggtgtggcgtcaatcttcagtgatgtcatctgtattaggtgatttcattgccattaactctggtgatgatgttttagatgatggtgacacgaacaggattttacagtcgctaattaaagcattatcaaaaccaataattgatgttagtcatcctgtcgggattgttgcttggtttgcacaaaataaaaaccctaatgagctatttcccggaactatatggatatatcttggcgaaaacaaaacgatccgcattggtaaagcggacggctccgatgtcggcaccctggacggcagtgacacgataaacatcacgcgcgccaacctgccgcagtcggtgctgaatgtttcgggaagcacaagcgagcaacctgcgcatacgctgaaagcaaaaatggcaggtcggcacgcacatcagggtggcatgaatggaccgggtgcaaaatacgatgaaaccgtaactggtacggataatagcggtagatacgcgctgacatggacaagcgaaaacggagaccacgagcatgatgttgatgtgccggcgcacgatcacaccctttcggcgcaaaccgaagaacttgggcaaggtcaaacaatcagcattgttgaacgccatatcaagttgatgggctggtatcgcactgcataa

SEQ ID NO: 431401 - DNA, 210 bp, Serratia marcescens
atgcaacagcgggtaagagagcttgaaaaagacgtccagtctatcaagacagacttggctgtcatgaagtcaaactacgccacaaaagaagacgtcagcaacgccaagaacagcatcattatgtgggttgttggtgcggttatttttgcccaattaatacctgcgcttcctggaattcttgatgctgtcaaaagaatgttgagcagttaa

SEQ ID NO: 431402 - DNA, 879 bp, Serratia marcescens
gtgagaaaaaataaatggtgctcccgagccattgtttcactgtcatgttacgttgttctctctggctgtacctcccttggcgccagttccgacacagacgccatgtataaaaaacgcccaggatgggctcagctaaaaattttagcctctgatgattgcaacacatggaagaatggaggcaactcattgataaattggagtggagaggaatgctctccaaatgggttgataaaatccatcaataaaaacccgggaatcattccggtgttttatgcggcctatcacgaatatggacatgatggcgtcagagcaatagatgtgagggatacttcaaaactgaattatttaaattttgctcatgacctttcaaagcaagtttcatcgtcatctgttgtttccaggatttatggcgattacgttatagatagaaaggcgatggggttgagtgaagtttctcaagcgcattttgttgaaaaactaaacgaattttctttgaagaaagatgccatataccaagagatgaacagggtagccaaagttgattttgacaggggcaatgcatccacccgcgcagaaaaactcggtgtagactataaagccgtttgcggtccgttcacgatagatctctctccggatgatggctggtctcgcatcaatggcgcaaaaccagagtcgcaaaaaattaggcgaataggcccaggtaaaggtgtcgaaaatgttaaaatggagtggcgagtggctaccaaccagcctggaaaatggcttggactggagttcatcaagcgtgatggtaaagcatttttaaatgcccaactgctccaggccagcatggacgcgccgcgccagtatgcgacttatgactgtgtgaaagttcagtag

SEQ ID NO: 431403 - DNA, 129 bp, Serratia marcescens
atgttgacgctaattaataaggtgcttaatagtaaagtttctgggtatgtagttggtttgcttacaaccatatggcttggtgtgagccatgtggaaaccctggaagaagcagagaagttcgcaaaataa

SEQ ID NO: 431404 - DNA, 582 bp, Serratia marcescens
atgaacgaacagctgcgtaatgcacttccgcataaagacacacctttttttcgcgttttgcatatcatcgttgcgtttctaattttattgcagattattaattcaaatcttactgagagtagctctttaggtgaccctactatagtcgggattgtgacgtggattcatgtcatctcaggatttgcgcttatcggactcggttttgtcatgctcgtctggatgctggttaaccgtgggttccgctactattactcttggcttacgctcgattttcgtggcattacggaggatataaaaacactcttttcacttcgccttccagaggcgcacgctggcggtatagctgcattgattcaggggcttggagttctggccctgttgggagtagcgttatgcggtggactctggtttgtgctaaacgcaaatcttgggtcgtcgtcggtattggtacgggatgtgcttcattttcataagtttctaactgtgtttattgagacttatttctttgcacatggggcgatgggattacttcatatattccttacagtacgagatcaaaggaaaaatccagttactgaatga

SEQ ID NO: 431405 - DNA, 201 bp, Serratia marcescens
atgttcggtttattcctgctcgtttgctacacctaccagccgtgcgattacgttccgcaggggtgggtatatcccgatcgttccaactgcctcgaagatattcggcagcagtccctgcccgggcagtatgagtgtttgccagttgatgggataatttccgctgctcgtctccgtgacaacgataggggggcggagcggtga

SEQ ID NO: 431406 - DNA, 246 bp, Serratia marcescens
atggacaaatcgacacaagcaaaaatcctaagcgtgtgcagccagtcggagttagggcgccgtttgggtaaaaaatcccagaccgtgagtgcatggttccgaaatggcgttgcacgtgcggaagttatcaacgtatgccgcgcgctcaattgggccgttactccgcatcaactgaggccggatatctatccaaacccgcaggatgccttaccaccagaattgcaggataccaagcctgcagcctaa

SEQ ID NO: 431407 - DNA, 390 bp, Serratia marcescens
atgatcttcgaacaacgtctacagcaggctctagatgagtctggaatatcccaagcagagctagggcgccgcgttggcgtgaattcgcaatctgtcagcggctggtgttcagggattttcccgcgcaaagataagctggaaatgctcccagaagccctgggcaaacctctgtattggtttttcttaacagaggaagaagagaaacagcttggcgacggcaacttaggacggaagatcaccgataagcatcaagagcttattgacttatttgaccaacttcctgctagcgagcaagaaaacatgctcagtgctttttcagagaggctcaaagagctcgactcattcgttgagcaatatttaaagagaagaaagaatccatctaccgactaa

SEQ ID NO: 431408 - DNA, 669 bp, Serratia marcescens
atgacgttacgcgtaatagataccgagacctgcgggctggacggcggcgtggtggaagtggcctccctcgatctgctcgacggccagttaactaacccgatgagcgatctggtcagcccggatcgccccatcagcctcgatgcgatggcgattcatcacatcaccgagcaaatggtggaaggcaagccgcgcatcgcggtggcgatcggccgctatcagggcagcccctactacgtggcgcacaacgccgctttcgatcgcggcgtgctgccgaagatgaacggcgcctggatatgtaccctcaagctggcgcgcacgctgtatccggacatcaagtacggcaatcaatatctgcgctacgcgctgaacctggacgtgcagctaccggcagacgccacgctgtacccgcaccgcgcgctgtatgactgctacgtcaccgccgcgctgctgcaacgcatcatcaaggattcgggctggacgccggagcaaatggtgcagatcaccgaacaaccggtgctgctgaagaagttcaaattcggcaagtatcgcgggcaggagatcgatcgcatcgcccaggaagatcccggctatctgcgctggatgctgaaatccatcgacgatctgagcccggacatgaagcacacgctgaaatactatctgattggctaa

SEQ ID NO: 431409 - DNA, 1935 bp, Serratia marcescens
atgtcattgataaattcttgtaccgaagatttgtctcttaagcaagtgaatgaagtttgtaagagcatactttttagcgaggttgatgcgatagataacttgaggctttttgagccggttgatataaatcagatagtgagagtaaaaggtttctacttaggttcaaataaaggtggaggggatttttactatgatgctgacgacgctataagtactgataataacttctcggttataattactcagttaggaaaatgttggaagcgagatatctcttatggcgtagatgtatactctgcaggttatgacgcagttaaaaacaacctgtctgaggtggtgaattcaattgctgcctatttggtcagtattgcaatcgatactggtgttagcagtctgccaacgaatacgattctaatacctcagaatataggtggccaaccatataaaactaaaacaatcattgttccaagttttttaacgttaatgtttgaggggggagtaacgctggatttcagcgcaagtgatcaaattggtatacaaattgacaactctatgttttccgggcttaatgatgccgctatatccaaagaaggtttccaaattggaggcagtactgtcatcactacgaatggcggtagggtttatataaaaggtataggggcagccttatccagtcaaggcggaatccaattggggaatactggaacaggttatttaaatgcacgtgaggttattgttgaaaatgcgaatgtatttggatttctctcaggaattagaattcgttcgagagatacgtatattaatgaggttagaaatgttaaatttgcaagaaataaacatgcattgctagctgatgacaccaccgctgcaaattcaggagaaaagacgacattcgttaaatgcattttctcagacagtgattcagatggcattcgcataaattgctcggcgcaggatttcgacttcgtttcatgtcatgtagactacaacgaaggggctgcaatcaaactttccaatagcgcagcgtactgtgatctggctttttatggcgggcatatcgaaggtattggcagtgtattggtctcacaagaaaaacaaatagcagatgcgggccccaataagattaacttcaccaatgtaaagtttgatttgaggagcgcaaaaaataataaaatatgggaaaatagatcgttaaggcagatgttctccgctaactcaagagtctatgttaatattttgaactgtagctttggatttcagaactcaaatgcgactgactatggaacactaatatccctcaaggataacgtatcttccaataatgtgagactaagcatgataaataaccagtcaaactatccggagtttttatcatcatattctaatgcgctaaatccgcatctttttaatggggcggaaggtgtggacattacatcaggagcggattctgctacgagaatttcagtcatctcttcaggcggtagtacggttgtctatggggcggaggacattgatggattgacgccattggaaatcacatcaacacagagcacaggaaccatacagttggtctttgacaaaaaattatacctgacaaagcaagacgctatttatggtatgatttcagttaggcctaactctgcagtaggcaatataaacgtgtcttgtggacttcgtgggtttaacgattatacttttaatgtcagctcagggttaatcgttgaaaacttcatagggacatcatatgataatactattgatgttctcacctattttaaaaatggcgccattgctaaagataagtttgtcagcacggagcccttgcaaacatcaacatatggaagttttatttcgtatagcaagcctgtgataagattaaccggttttgttggcaccatctctgttaaattaccggcattttggctgaagaactaa

SEQ ID NO: 431410 - DNA, 2196 bp, Serratia marcescens
atgttaaacaagaatacagtaaaaaacgtcggtaacgataagtccgatgaatttgacttgggaaggttgctcggtgaggtaattgatcatcgctggttaattacaggtattactacggctttcttaactttaagcatactatattgtgttttttctactcccatatatcgtgcaaatgctttaattcaagtcgagcaaaaacagggtaatgcgattttagacaacttaagtcagatgctacctgacagacaacctcaatctgcacccgaaatctctttgttgcagtcacgaatgattcttggaaaaactgtcagtgatctgaatttacaaatagttgcagaacagaactactttccgctatttggccgtgggtttaatcgtttagttggaaataagcctggtgagattaagattagccacttaagcatcccgaaactaaatgacgaagacaagaatcgtgatttgaaaattgtgacgctagagggcggtaaattcaaaatagtgagtgaccgctttgaggatgttgctcaagttggtgttaacttcaacaaggatggtgtttcactgactgttgataaaatagatgcgccagccgggacagaatttaacgttcaacttttaactcagctcgaagcaattgttaatttacaaaaagattttactgttgaagagcagggcaaagatacggggatgcttaccctggctatgacaggggacgaccctcaattaatcgggaagatattagaaagcattagtcggaattatttgcagcaaaatattgatcgccaggcagctcaagactcaaaaagtcttgatttcctagatcagaaaatccctaaggtacgttctgagctctatttagctgaggataaactaaattcttatcgacgtcagaaagattctgttgatttaaatttggaagctcagtctgtattaaatcgcatagtcaatgtagataaccagttaaatgaactgacatttaaagaagcagagatctctcaactttatacaaaggatcacccgacatataatgcactgatgcagaaaagggaaacgttacagcaagagaagtccaagcttaacaagcaaatctctgcaatgcctgcaactcaacaagaagtattgagactcagtagagatgttgagtctggaagagctgtctatatgcaactcttgaacaggcagcaagagttgaatattgctaagtcgagtgctattggtaatgttcgaatcattgataatgcgatcactgaacctaaaccggtaaagccaaagaaagcattgatagttattatcggtattttcttgggcggttttatttctatcggtgttgtgctgattaacgtcttcttgcgcagaggcattgagtctccagaacaactggaagagcaaggaattaatgtttatgccagcattccggtttcagaatggctgcaaaagaacacattgagcaaggcaaaaagcaaacggctgacggttagtcagagaagaataaatgaatcaggtgcattcctcgccgttgagaatccagcagacttagctattgaagctattcgtggtcttcggacaagtttacattttgcaatgatggaatcaccaaataatgcagttatgatttcaggtgcgagtccaagtgcaggtaaaacttttgtcagtacgaacttagcttcggtgattgctcaaagtcatcagaaagtattgctaatcgatgccgatatgagaaaggggtatgtacacaaattattcaatgtaaataacgataacggtttatctgactatcttgtagggaaagctaagttagaagatgctatcaagcctgtaacaagtgctggcttcgatttcatttcaagaggacaggtaccgccaaatccagctgaactattaatgcatgatcgctttaaagagttgctggagtgggctacaaaaacatatgatttggtcatgatcgatacgccacctattttggccgtaacagatgccgctattataggtcgatatgcaggaaccaccttgcttgttgcacgctttgaaaataatacagtcaaggaaattgatgtcagtataaagcgttttgagcaaagcggcgtcccagtaaaaggatgtatcctgaacggtgtcgtgaaaaaagcaagtagctattatggttatggttataactattatggatacaattacgacgacaagaaaagcaattag

SEQ ID NO: 431411 - DNA, 828 bp, Serratia marcescens
atgaatgaaggtcttacagactcagttaaacaagcgctggagcaaaggctcaaaaatcctttgtggggatttattcttctggcgtggatgtggttcaattggcctaacttagcgatgttgttcatgagtgatgcgcctgtaaagttcagaatcgattatatcctttcgcaggagtatttctatctgcattacatgattgcccccatcctttctggcagtattttggctataatctcgccatatgcacagtggctcctttctcaggcgcataagtgggctgatgatagatatagtgccaacacattcaaaatcaaagagagagattttcaagaagcaatagacctgtcaactttaaaagtaaaagctgatagagctgaagatttagcaaaagcaaaaagtgatgctgacatacaagagcaaattgagcgagggaggcgcgaagaattaaaaactgaagaactagaatcaattaaaaatgcactgtccgacgaattagaaaatttgaagacttcagtttctttacaacaagctgaaattgatagcctttcgaaagacaaagcagggatccaggatttaattgttgagtcattgtttattatggaaaatattttcagtatttcagattctagttcaatccagaagattaaaaaggaggtagagaaactttactctgctagtgaaatagaaatatcttctatattgaatgctatcaatgcgaaaagagaacttacacctcaacaaacaatgatattttttgataagctggacgaaaaattaaaaaaagataggttaaaggaaggggtaacaagttctttagacaatgaatga

SEQ ID NO: 431412 - DNA, 192 bp, Serratia marcescens
atggaaaatacaattaacgaaccaattacctattacgactctaacggctgtctgattatcggggctaaccttatcgggaagattcatcctcagctaatggaaaagctaatcagacgttcgggggatgactcaaaacgtagcctgcaagcccgaatcacatcttacctcgaagaggttttagccaatgtgtaa

SEQ ID NO: 431413 - DNA, 279 bp, Serratia marcescens
atgagtattctaatgaaagggctgtccaagcgtggcagctataatcaccttactgactcaatggaattcaaatacttcaatggtcaaaatgaaatcagtgaatcaacttataagctacttgcttcaggtaataaacctaaatcatcagttaagccagctaaagcggtcaccatgtataaggtgaagcctaagccaacaattgaacagcaaagagatgcagctttgaaggctgctattaagcaaatgacaggggggttgataaatggaaaatacaattaa

SEQ ID NO: 431414 - DNA, 564 bp, Serratia marcescens; identical to SEQ ID NO: 186486

SEQ ID NO: 431415 - DNA, 633 bp, Serratia marcescens
atgacttcacgtgtctacgcttacctcagagcttccaccactcagcaagacgcaacacgcgccaaaggtcagttggatgaattcgctacagccaacggtatgactatttcaagctacttcatagagaatgaatcaggcgcatctctacagcgccctgaattgttcagactgcttgagattgtacagaagggagatgttctcttagttgagcaggtagaccgtctgtcacgtttgagcggtgaagactggaacaagttacggtcactgattaatgagaaaggcgttagagtggttgccttagacctgccaacaagccaccagcttattcagtcaggagatgaattcaccagcaggatgcttgaggcgttaaacgggatgatgctggacatgctcgccgctattgccagaaaggattacacagaccgtaagagaagacaggctcagggcattgtaaaggcaaaatcagacggaaaatacaaaggacgtccagaggacacacagcgcaatgagagaatagccaagctgttacaggctggtatgtcctacagtgacgtaatggaaacagtgagctgctcaagggcaacggtggcaaaggttagtaagagcctcaaagaggcggttttaacgaactga

SEQ ID NO: 431416 - DNA, 1035 bp, Serratia marcescens
atggatgatggtttgaaggagtcggtaactctggctctcaaagagaggctatccaacccgttatggggttatatattactatcatggacagggttcaactggcagaacatcgcaaagttgtttatgagcaagaaaacagtagaagagcgaataactgatattatatctcaggattggttttatgttcattttcttgtcgcacctttaatactgggtgttttcttggctattatatcaccctatttgaaacaatggctttccgcagcccataaacgcgcagataaaaaacaacgagaagaactgaaacaaaaaatcatagataaatatgatgatgatattgctatagccgaaaagaaagttgaggcaaataaagcccaagagcttgctgaggaaaaggagcatacaaaggtcattcaggagcaagaaaaacagaaaagagaagttctcgacacaaacgtaattgaagaaaatctcaagcaattggaaaagagaaaatacgaagtcgaatccgcaataaaaaaactagaagagcaaggggaaaatagaaggcatgaaattgaatcctcgataaaaaatctagaggaacaacgagagagtgttcagaaagagactgacttctggagaaatagagtttttgaggtcattaaactagttaatagattcaataatgtttcagatagccgctcactgaacagtatcaaagatgagctttccagcctattcagtgatgaagagttagaaattgctggctatgtcgtagagtatcaggaagaacgaaacaaaatcctcatcgatacagtatcgaatgccttatctcttgttaagggaatccgtgaatcttatagccaagagcttgattatggtgttaccacgaacgccagcaaacacaaagaaatggatttacttataaatgagcttgcatcaacactgaaaattatcaataaaaatgttcatatgaataaccctaaaaacaaaaagagcagtataaacaacatcaaaaattggagtacaattaatgggagggcagtgaggtaa

SEQ ID NO: 431417 - DNA, 1203 bp, Serratia marcescens
atgacttacaagcgtgacagatatctgattctcgaccattgtggggtttacatggtgcgaatcgttataccgtcctatatgaagccttacttcaacggtaagcgatactacatgaaatccacagccaccaaagatatcaggcaagcaaggcttttcagggatgctgtagcggtagagttcatcaagctaagggaacagctcaagccaaaacaaaacggctcaaaggttgagcagataatcaatgaactacgtggtatcagcaactttgcaaaggaatcaccgatgaattacggggctaatatcgagcgctgccctacactgatacaaatacgtgacctttatttactgcaatatagcgataaacgcaaattaacaacgcttttaaagataactaaagccgttgagttgattctttctcacattaagcaacgtgattcacagcttcaggatattaacagaacggtagtaaccggatggcttgaccaactgaaaaaagagaaagcaactcaaacgctacaaaactatataagtgcattggctcaactattcgattttgcaaagaatcgctatcacgatgcgcctaaagaaaatcctttcagagggcataggttagaggccaatagttcacatgatagttatgagcctttccttatttctgagttaaacaaggtctttgggttactcaatgaagaaatgaaacaggttacgttaattggcctttattcagggatgagattgaatgaaatttgtagcctcaccactgatgatattgttacagaggaaagcgtaaggtgtttacgcatctcaaaaggcaaaacaaagaatgcagcccgattagttcccattcatccttcaattaacggacttattgacaagttgattcaaaaccatacggataagtttcttttcagacatgcagcgctaacagacagggcagatggtaagcgctctacatggcatacgcagcaattcaccagagcaaaaagaaaggctttaggcgagaaggaaacagagaggaaagtctttcactcgttgcgtgggatgttcatcaccgaacttgaccgcctcaaagtgcctgaagaccggatagcgcttcttgtaggccatgagagggggagtacagagtctttcaagacttacagtcaaggggcttcactcaaagagcttgctcagtacgtggaacaggtcaattttgacctgtaa

SEQ ID NO: 431418 - DNA, 192 bp, Serratia marcescens
atggaaaatccatattgggggattgcggttgatctgtcactggtttttcgcgcgaaatgcgatcgcggcgcagaggaaaaggttaccgtgcgcaacgcccaggccgtcgacatgaaacaaccgcgtcaaaaacccgcgccgcgcaaactgaaatcgatcggcaacgtcaattccaccgtgccgttgacgtaa

SEQ ID NO: 431419 - DNA, 1215 bp, Serratia marcescens
atgccactaaatgcacgacagattgatactgcaaaacccaaagaaaaagaatacaagctcaccgatggtggtggtctgtatctgttggtgaagcctaacggtgcgaagtactggcgcttgaagtaccgttttttagggaaagagaaaaagctttctatcggtgtttatcctgatatctctctggccgacgctcgcctgaagcgtgaggaggctcggaagatcatcgctttgggcggtgatcctggagaagaaaagaaagctgaaaagttggctaaaaaaaccaatgccgaaaatacctttaaagctattgcactggaatggcatggctacaaacggcccaactggtcgaaaggctatgctgacgatctgatggaggcgttcgagaacgatatcttccctgatattggtaagcgccctattgctgagatcaagcctcttgaagtgctcaatacgctgcgcaaacttgaaaagcgaggtgtgctcgataagctgcgtaaaatccgccaggcctgcaatcaggtgttccgctatgccattgttaccggcagagccgaaacgaaccctgcctcagaattggcgagcgcgctgactgcacctaaatctacccattatccccatctgctagctgatgaactccctgatttcttacaagcccttaccgcttattctggtagcccgataacccgactggctactcgaattctaatgttgaccggcgttcgcaccgtcgaactccgccaggctgaatggaaagagtttgatttcgataaacgtatttgggaagtcccggtcgaaagaatgaagatgcgccgcccgcatctggtcccgctatccgatcaagttgtggtatcacttcgtgagatccaggcagtgacgggccgttacaacttagtgtttccaggccgtaacgacattacgaaacctatgagtgaagcgagtatcaatcaggtactgaaacggattgggtatcatgggaaggctacaggacacggtttccggcacacgatgagtactattctgcatgaacagggctataacacggcatggattgagttacagcttgctcatgtggataagaacaccattcgtggcacctacaaccatgcacagtatctggagcagcgtagggagatgttgcagtggtatggggattatattgacaacctagagctcggtgggaaagtggcttgcgcggagtttgggcgtcgtgcttag

SEQ ID NO: 431420 - DNA, 1650 bp, Serratia marcescens
atgagcgcaatcacattacgtaaagcgttgagtgttcttgcaaagtcatcttcgttttccgtaacgactgtgacgcatagaaaaaaggatgagttcgatcaactcaaggagcaactctttgttaaacaagagattgaagcagagctgcaacgttatctggataccgctaaatctgatgaaatcatttttttgtgtggcagtagtggggatgggaagtccgaaattttaacccgtcttaagttggatccacgttatgagcaacgatttcgtttccatctggatgccacacacagctttgccccccaacagtcagccattgaagctttgaatgaattatttagtatccatcatcaacaatcatctccactgctggtaggcatcaacaccggaatgctagccaactttgccagagaaggcgcagaatgtcatcaaatgctccgctctgcgattgatgcattcttatcggaacaacaggaaacatgtcgcccttataaccacgggtattgtaccttctttgattttgagcattaccctaaatttcagttttctgaaaatagacaatattcatcgtttattaaagaattattaagaaatttaaccagtgatgatgacagtaatttatttcattttgtttttaaaaatcaagagtcagttaaccctaacctaaaagaagttgtaaatttcaagttgctttgtatgccgggtgtacaagatgtattaatcacacagctctttaaagctaggttgatgaaagatcagtttgtgacgactagagctctactggattttgtacatcatttactgatgggaccaggttatttgtttgataacctctttacggggacggagaatgacctgatcaaaaaagttgctgattttgatcccgccagattgcacacttatgaaattgatcaatttattttgcgttatgagcttggattagttgatcctgaactcgatgattttttgacaacgcttgagaaactacatattaaattcgatcgtcagtatgttaaatctggtgatgctacctcgttggtacgccttttctggctgttacaatatgagtcattaggggatgattatcaccggaaattttcagaattctttaatgaatccgtgtttgaacgatactcagagatctggcacttgcataaaaactataccgcaagctcagagcagaaaaagttactgaatcgtttttattcatcagaacttgtcgctggtatccagcgttatgcaaatcgtaaagctccagaattaagtatgcaaaaagaggagttttttttgggtgagtttggcggagtaaaaatgaccgcaccgctcgcattgaaaccggactgggatgctatccgtaataaaaatacggcgcatccaactggtttcgacatccatttaaaactaggccaaaattcacttggtcccattcgtatcgggcttaacctttttgagttattaaataagctgaataatggctatcgtcctaacaaatatgataaaaatgccattgttttattagatgaaattgttgaattgattgcgaaacaggctaaatccagcagcgaaataaaattctatgatggtgggcaacgtgtttatcgtgcgaaggaggatgaaggcatgatcaccattagcggtatggaggggtag

SEQ ID NO: 431421 - DNA, 1326 bp, Serratia marcescens
atgtatcctattgcaacaacactgaaagtgggtaataaccagctagatagttacctgccggttcgaaataaaaacaacgatattgactgggcgtttgtcaccggtctggtactcagctgtgctctgaagcgcaaagttgaagcttattatgatgagcatcaattccgtgatgattgtaaaactcatctgcaagagctgctggatgaaccatctttctggtcagtattggaacggatgtacttctccagtcaagatatctttcgtgtatctccgctttttctactgtttcacgctcagtttgacggcgagaaaataagtgcgggttcaatgacggacaaacgtcttggaaagttgtttgccaatctgatgggggacttcagccttcgttatccaatgcaggataagttgaacttcatcgagcagcacatgctggataaactcaaagaaaaagtaaaagtattgagggaaggcccgtttgccaaagagcaaccctatcttccctatatggcgatgtgctttcagtctgacttggcgtttctggcggaacatccgcagtaccttttacaagagttgaccaataccctgcgcttgtacgcctttagttggtgtgcccaactggcgcttaatctggataattggcagaatggtgaaccacagagccagtcgcttttttttattctggataccgagaaagccagttctgaacgagatcaaatacagcgcttcggttataagctattttctcgccaaagtgaaaaactttttcctatgctttctgcactagaagttttgcagtggaatgataaagataagcataaacgtcccttatggcaggtgtatcaggattgtttaactcacccagattccttccaggttttacggcagcttaataattatttactagagtttattgagaaacgagaactccctcctcgtgcaagtgcggagaatatggaaagtgctttcaaacagctattgtccgttgctgttgaacagtttcaggataaaaaatctgaccgtgccacagtaaaccgaaaatacattaacgagctggaaagccagatttgtactggtttcattcaggttcgcggtcgggccgggaaagtgttggtgctgaatcaagaccgactattgctactgaccaatctcaccgtgggtaaaaatgaaaagctccgattgcatgaactattgcgtggtttcaggcagcgcggattttatttggacaaccagtccgcacaagcgctggtagcgttttatgaacgcatgggtaacgtagagcgaatgagtgacagtggagacgccgtatatgtccgtaaaacagtatga

SEQ ID NO: 431422 - DNA, 5088 bp, Serratia marcescens
atgtccgtaaaacagtatgaaacctatctggcggaaacctttattgaatgggttggtggtatcatccagccgggtgaacgttaccagttcaaatctcccgatcctgataatgccctaaaactctggctggcttttgtcgcgcttactgacggcaaccaactggagattagtgcagagcaatgtctcccttgtatctcctgcaatggtatccagcttattccggtactgcacggtaccgatgctccggcgtttactgaaaactatatttctcacttacgagatgaagttgccggtcgcaatggtttttttgcccaaacgtcgttgctgataattcataatagtatgcttgacaccctgattaacagtacaaaagatgtggctgcaccggatgcaatctggtaccccaaaaccttcagtcatcaactggaaaagttaatcacaaccgacgatagccgttcagtattgtcgcgctgtttgctggaagatcaacttgcaacggtattagatgaaggcgcaactgtattcggtttttcgtcgttataccgttcgctggacgatggtcatttggatttctcagaactccaactatttaatgatgtcgagttattaaactatgatcagaaacagctacgctcccgcttgaacgaaaaccgtaaactgtatcgccaggtggaggactgcgttgaacgctacaacgggcaactggaaaatgtactgactgaattcagtacaaaatttattcaggagcatttcgttgataaagatgactggcgcgagcttgatttctccgtctggctagatgagaaaaagcagaacagcgaacaaaaactggtttttgatcaagttactgttgagaatggtgaggtttggccacgggaaaaaagtgccagtaaggctggcaaacgtgacatcagcctgctggtgcaaatacagccaggacagtcgctggtcgacctggaattccgtttccagggaagtgacctacaggatgatcaaataaaaattgcccataacagtcggttaaagaaacaacgtttctggcgtaccagtcgggctggaggaaaaacttcccgaatcattgcgtcggttcctttcgatggatgcccctgcttcttcagtcttgaactgactaaccgtaataatcccgctgaagagtataaattccgcctgctgctggttgagcaggggcaattctggctgaaggatattcagaattgctaccgtgttgagcctggtaaagggaaagggcaactgacgttgcagatggaagacaacgagttacgtattgccgaatccggcgatacgatctatatgctggatgaagagtgcgaagatggtatcgattgccagcattatgcaagggtaaattttgagacgctggcaaatcaaagcgacctgatccagttttctctgatttcgggtgactcccgtttgccactgaacattgaaggaccgggcgcggaagagggagagggattaacgttgccattgctgtttgacctgagccgtttcaataacctgttcagagaggtggggaatgcgacgtataaccggatgaaaggacgtgtcatcctggataacactgagcataatgtggttggcgtgcgtcagcaattgttgctgctggagttttccctggttgaacaacgcctccttggtacagggcatgatggcagcgtgctggcgctggatgaattccttgtctgctatcctgatctccataacgcttattatcagctttttgcttactatcagcagcgtggtactttgccgagtctagtatcttggtcaccggaatatcgcgctctggtcaaccatgtcatcgccacgtttgaacaggcactcaagcaaattagccagagcagagcgctaacggcagtggaaaaaggccttctgcatatgggagtttgccacgttgagactcatgaacgtctctcgccattgcatcccttagtgctggcttatcacttacaactggtggaggccatcatttcagaggcggaaggaaccaactcggtttcatttgccacgctaccaccgattactctcgatcgcttggtggtctctggtctaatgccatttgtttatcatagtgagcatgaatacgcgcagttaaaaccggtggaggaaaaccgcttctggattgacattgtccctcagcgccaggtgagccatgactacgttaaacgtctggtaaaagacaaactcaatgaattcactgatgcttacgagctgttattccagaacgttggaaacaatgcgttgataattaacgctattaatcaggggaatgcgagagagatttttctaggattggtggaatacttcaagcaggaaaaagatcgtgccatttcggttcatgtgaactgctacgatgaaagcttacggcccaacatgtttgatcattttgctgaaagtggtagccatgaacagcttaaaaatgacctcggcctgaacagtggtccgtggcgggctgaagccgatatgttggttgagttgttgcgcagccgtttaacgttcagtaaattcgttcttccatcagaaagtaacaagctggcttacgctcacctggcgtttttcaccaataccgcgcctgtggattgccgccagatctgcattgaagatgcatccagtggagtgctatgccatgggttgattgcaggagaaggtgaagagacgcagggagatgcctactttactgcgtttggtctgcgtggtgttgatactgagccctactgcgccctacgtcttgcccgattattgggtagcctgtggcagccagcacgtcagagcaacagccagtaccacgggcagggaatcggcttagccgtgagcggtaactttaaacagctactaaatgactcttataacagtgctctttggactactattgtagatcctaaagttacccttgatttctttaccagccagaaagacgtggtgcttatccactattccgatcagtataccagttgcgcaggctatgacgccgtgactgttacaaagcaggttgatttattcttgcgtctgctccagactgcgggtcagtctgaacagcccactgttgacagtcagcgcctgcttgccgaatttaatgcgttcaacggagaatggttgctgaaaatgctgcgctccagtgaaaaagaacgcaaagagaagcacggtattatcggtgcgtataaatttgtgcaatctatgctgcatcagtccgatatttgctgggtgccgttgtcagtggctgaaatgatccgtgtttccggcaacgtcgggttgaaaatgaaagagggtgatttatcccggaatctacaggggtatcgtaacggtgcaatctctgatgatgttctctttgtcggttttaaagataaccgcctctatttgttaccgcttgaagtcaaaactggggcgcgacctgattataactatgcaggaaagcaggcctgtgaactgaaacgctatttacagcaggatatcctggccccgcaaacgctggcatcacaactgtatcgggcgctctttattcggcaagtattgatgcaggtagagaagctacgtttgtacggtgtactagacagcaataaattatcaccgttgctagaacgacgcgagtggtggttaacgggtgactatctgttaggggagttgattgattatgccgatggttttgtcgtggcgcatgtagacagtggaagttgttttgatctttcttataaattgacgaaggataatatcttacagattgaaattccttactcactactgcctacactgattgctacgaaaggggatgaacagcaactcgctgaacgttatcgtgtaccagaacaataccgacttaagcctgatggtgatgtagagacgtcaaaatctgctttagtagtagatacgacatcatcgggtgatgaaccaatttcggaatcggagccgccacagcctgatgttcatacactgactcctacaccattacagattctgtttggacacgatgctgtgcgccagagcccgttgtactgggagccaaccaacaccgcgaaattcatgaatactaataccggtattatcggcacgatgggtaccggaaagacccagtttaccaagtcacttgttacgcagctgatgcgcaatcaatcctgtaacgttgatggcaaatcggttggtttgttgatcttcgactacaaatcggactatgtagatgatgtttttctggaggccactggcgctaagaaatatcagttatctctgctaccttataacccattgtcactgttcggtgatatgccaatgctgccaagacatacggcgatggcattttctgaaacaatggggaaagcctataaccttggtataaaacagcgtatgaaactggttacgttggtcatggagtgttatgagcttgcaggcattgtcccacatgaccgttcaacctggaatcgtattgctcccactattgaagatgtttggcaacgttacctcgcacaagagaaagtagatgaagattctctatatgcggcgctttataatctggcaggtttccaaatctttgaaaccaatcccgaaaaaatgaccagcttgtacgatctggttgatggtgtcaccgttattgaattggcgggatatccttcagaaattcaaaacctgattgtcgcgctaacgctggatttgttttatgcgcagatgcaaaaacgtgggaaaccagtggtacgaggcgattatcgtcagttaactaaaatgattttggtggatgaagctgataactttatgcggcaagacttttccagtctgcgcaagatccttaaggaagggcgggaatatggggttggtgcaattctgtctacacaggagattacccacttcaaaacaggggataataattatgcctcttacattttgacttgggtgatacatcgtgtttctgagattaagaatgcggatatcaaggcggtatttaacgttgatgataaaggtgatcaggagtctttgatggggcagattcgacagctagagaagcattttagtctgtatgtggatggggacaagaaggctaagaagatgcgagataaggctttttgggagttaggcaatgaaagatga

SEQ ID NO: 431423 - DNA, 525 bp, Serratia marcescens
atgggtaaagtgaggtccaatccttgggggagtgtttttaaagaattgtggttacgggttgttaacacgtttaatagcattccgttcattgctttttttttagcgggtattatttttgttggaggtgttggtatatggcttccttacttatcggcgatgctttctggggaaagtaatatatttttacttgaaagcgtaaatgtgtttacttattcttttgcgatactcgggactttatgtgttgatgttattttaaacaatcaaaagtctaaaaaagattttttagggctagggacgattttcggattggttgcctttgttttttgtgtggttgggtatctgacaacaaaaacaggaagctcaactttattaaatcttggagccttacttacgttggttatattcatctgtgctaacgtaaatgatgataaatttgataatgatgcttcccggcctgagcttgaccctacggggtacagaaaagctgaatcatccaaaattaaagacggtgaaaaaaatgaatga

SEQ ID NO: 431424 - DNA, 1092 bp, Serratia marcescens
atgggcttttacgttaggaaaagcattcgcgttggaccgataagattcaacctatccaaatctggagtcggcgcatctattggcataaaaggcctgagattaggtactggtccaagaggaaattacatccatgtcggtgctggcggagtctattatcgtgcttcgctttcaccaagtatgatcccacagagcggtaaaaaggttcaacgtgtacctaatgaatccccaacaaaacatgacaatacacatgcacctcttgaggaaatcgagtcatcccatatttcggaaatcgttgattccagttcccgagaactactggatgagttgaataagaaacgtaagaagtttcaaatatggcccttcgccattttcctttcgattgcgatattactctacggtttttcagaggcatggcctgagtggtgcctggctataggatttgtcgtaggaggagcagcctctgtttttgcttacatgtacgatcagcttagaaagaccactgttcttttttatgactttgatgaccaaatgatgacatgttaccagcaacttcatgacagtggagccaaactcgcaagttgctcaaaggtatggcatgtagaagcatcgggagccgtttatgaccctaagtatcatgccggagcaggcaacctactacgaagaaaagccacctctatcagcaaagcaaagcccccctttgttaaaacgaatattgagacgattgctatcaaagtcggtcgtcaaacattacatttctttccagatagagtattggtttttgatcctgatggtgtcggtgctgttggttataaccagctattcgttaacgttggtgatagtcgattcattgaaagcgaaggtgtaccaggagatgccatagtcgttggcagaacgtggaagtatgtgaacaagtctggaggcccagacagaaggtttaaagacaatttagaacttccgatatgtctgtatgaaaacctttcgtttacaagtcattctggactaaatgagttattacaactctctaaaactggctatggggaaagcttttcacattcaattgaaacacttagcaaaaaagtcgcttcttcttag

SEQ ID NO: 431425 - DNA, 192 bp, Serratia marcescens
atgcaagatatcaacctgatccctgaaaaggaggtcatggcgaagcttggcatttcgtcacgatcgaccatgtacacctaccagaacaaacactgtttccctaagccggttcgcactcacccaaaagcatatttagagagtgcggttaatcagtggatactcaacggcggcatcaaccagaaagcttcttaa

SEQ ID NO: 431426 - DNA, 564 bp, Serratia marcescens
atgaaccacttaatgcttgaccttgaaacgctgggtaagaagcccagcgcccctatcttgactatcggcgctgtgctttttaacccgcacagcggcgaacttggcgagcagttctacaccgccgtagacctgcaaagcgccatggccggtaaggcgacacctgacgctgatacgattatttggtggatgaagcaaagcagcgaagcccgcgcggctatctgtgttgacggtgcgccgtcgttactgtctgcgttgtatgacctgaataagtttatccgggccaatgtcaccaatccgcgtaacctacgcgtgtgggggaacggcgctgtattcgataacgtgatcctgcgtgagtcttaccagcgtgaatgcgttccgttgccgtgggagtggtacaacgacagggacgtgcgcactatcgttgagcttggccgcgtagttggctttgatcccaagcgtgatatgccgtttgacggcgagcgccacaacgcattagccgatgctatccatcaggcgaagtatgtttccgcaatttatcagcgccttttcccagcagcagaataa

SEQ ID NO: 431427 - DNA, 516 bp, Serratia marcescens
atgagcactgagaagctgagcgaactgagcaagccggtggcgtggctggcaatttatcacggagatgtgtacgacgaagcgatcagcattactcgctccgttgttgaggctcaagcggatcgtttcggctgggagtcggcgctgacggaaatcaccccgctctactcgcaagagtacgtctccgccctgctggcagagctggaagcgtcaaagaaaagcaatgcattcctcaaagagcagttggctaaattggcaaacttcaatcccgattgggacatgcttgaagcgtgcagagaaagctggcgtgaggtgtcagctgcacttaaggaggctgaggccaagctggctacgccggtgcggttgctgggtgagatgttaccgcatgagtgggagagagccgaacggcaggccactttcgagcacaggaaaatagcgtgggacgcccgcctggcagaagacaagaaagcaatcctggctgctggcttcaccttcaccgtagagggggatgaacagtga

SEQ ID NO: 431428 - DNA, 222 bp, Serratia marcescens
atgagcaaaattaactttaacaatgcgcctttgtggattactgcgaaggcgctggaaaaattaaaacagttccgcgccggtcgattattccccaaaataacctatggcaaaaaatacctgacctttcgtgtaaataaacgctggcgattactttcaaaagacgacggccataattggctgttgctaacccacaatgattacaactgcgtaatagacaaataa

SEQ ID NO: 431429 - DNA, 363 bp, Serratia marcescens
atgtctgaaagcaaatgcactccctttagccagcagctggcttatatcaacaaaggcaccttagaccaggagcttaccgaagcgctggccgaggttattaaaatggttcgcgaaaccggcaagaaaggcgctgttactttgacgctgaattgccagatgttgaacagccgcgacgaaaacacgatgaaaatcaccccgaacgtcaagaaatccattcctgaactggatcgggctgacaccattatgttctcaaccgctgatggcgatttaatgcgtgatgatccttctcaagtgcaaatggatttgcgtgttattgacacctcgccatctgttgcgccgattaagttgacgcaaaacggctaa

SEQ ID NO: 431430 - DNA, 207 bp, Serratia marcescens
atgaaaaataaagaaccaaaaataattgctgatggaatttccaatgaagcagttcttgagtggatgcaggagaaagtaagcgcatctcgacatctgcaaacagcaatattagaacgcgctcacttacagaaagcccttgcggatgtagaggagcagatatcacagctgactaagaaagtgtctgttgaggtttcccgctacagctaa

SEQ ID NO: 431431 - DNA, 213 bp, Serratia marcescens
atgtctgagcagttgaagagatttcatggagctagtttcaccgatagcgaatcggaaggtagtaaagtgctgaatagctatatttactcaaccgataagaacggagaaattgacggcaattcagagcaggagcacgttcgctggcttatctcaaaagaaaatatggaaaacctttacgcaatgctcaaagttgccctgggtaaagctaattaa

SEQ ID NO: 431432 - DNA, 210 bp, Serratia marcescens
atgagcgaattccttgattttgactcaccgagctacaaactgaagcagaatgaaaatggtaactgggaagcgagacggactagtaattcatggtgcgtagaatttactaacctttaccgtaacatccgcgacaactacgaactgatccttacacatcccaaaaatcctcgctttgatgaggatgttgattatattatattcagaaaataa

SEQ ID NO: 431433 - DNA, 198 bp, Serratia marcescens
atgtataaggagagcggcatattattaaaagaaaaggaaagggtggtattgaaaatatcgagtgatatgctaatagagaatgaggatgaaggggaggtttattatctagaagattttacagtacttgatattcaagggaaggaacacaaggttaaaaactcaaaagaattagttaaaagattagtgagcaatttatag

SEQ ID NO: 431434 - DNA, 525 bp, Serratia marcescens
atgggcttaacacctgaaattagagagaaatgcaagcaagcgtgggaaaatcgtctaaaagcggagacagttggaaaaagggcgactgtctgcattgaatggttgacctactctaatttcgcccgttggtggcttgatacgcacgtggacgactggtgcatcgataaagattggctcattgcaggcaatagagaatatcacccggataaatgcgtttggattccaaccaagattaataatcttatgaacgatagaagtactaatggattgccgaagggtgtcagtattcatcaaataaagtactatcgagcaacgtgtaaagttaatggaattcaaaaatataagaatttcaaaactacaatagatgcccatagacaatggcagctatggaagattgaagagattaccaacgtcctacgcgagtttgcatttgaccatcgtctggatgggcgagtaattcaacgtctgaccgaaatcagggataatatccaatctgattatgacaacaatattgaaacacaataa

SEQ ID NO: 431435 - DNA, 504 bp, Serratia marcescens
atgtctaatgcaagaattgactctattctcagtacattggttgatagctacattaccaatatgattgaacctactgggtatagtgcccatgttacaatgtacattgataatgaagatgaggagtctaaattacttcttattgatccagaatcagacacaggtacatatcggttctataagaaagatggtgcattagttgtaaccgattattttgattctgatgtagtgtatggtgtatataaagacgaaatgcaattcaacactgattatgatttaccagttagttttcaacatatcacggatttgttagatatttttattgaaaataatgggtatgcatacataggtattgattctcattttattacacatgaagagcttatgaagcgtgagggatggactgatcgtcgtattaagaaagagttcggtatcatgccattggatgagctagatcgggtacggtactatcggcttaatgaggtcattgcaaaagaacaaatctga

SEQ ID NO: 431436 - DNA, 1515 bp, Serratia marcescens
atggggaaatcggcctttactgggagaaactggaaaccttctagtagcctcggccgcttctatgaatctgtcatgaaaagggagattatagagggaattctcatcgtagaaaatattgaccgacttacgcggcagtctaattatgaagctgcacgtaaactgattaacttgattactaatggtattactattattgaagttgaaagtggcatgtgcttcagtactaaaataccggaatcactttcaatattgaatatgagcatatcgcgtgctcatggtgaatcactacgcaagtctcgaatgataaagaaatcgtgggataacaaaaaagctaaattacttgaacaaggaatcgcacctagtaagaaagtaccgcgttggttaaaggtgatagacggtgcatatgtagttgatgaagtacttgcaacgttgtttagggaagcgtttgtactgtacgacaagggacacgggaatgctgcaattgttgcacgtttcaatagtgaaggaagactcaataatggtaagcaatggacaaccattaccatgcatcgtgtacttcgcgataaacggcttaatggaataatgacattcggtaaaaacactgatcgagataatgaagaactacatgtatttccggtagtggttgagaatgagttattcaatcgagtacaagaaaaaattaatggtaagactaagtatgatagaactacaaagagtcaaaaaaatctatttaaaggaatgttgaaatgttcattgtgtaaacaagcaatactaacaactactgatggctctcgtaatacacacgcaagatgtataggcagacgtgaccataaaaattgtactgcacgtggctttatatacataccatttgagcgtggtttgctccagtacatacgcggtataaattggagttctatttacaatagtggtgttgataatagtcaggcaattgagaactgtaatggaaagattgcaactattgattttgaaattaatgaactatccgaagaacttaaagttgctgatgatgatgtagtactagcattggtaagaactatcaataataagaagaagactcgtaaaagtttaagtgatgaacttgaattgcttactcgggagttgccaaaagtagatttcgataatattaaagataatctgcatgatcctagtaatgttaaagaaagacagcatgttaatattgaactgcaaaaagtagttaaagagataagagtacttagaatgagtgactatatttttgctaatataatttattatacaggtactgtgatacatatgattgcattggatatgaaaggcaacctgataactacttcttcaattgacgaaaatttaaggttccattccgactttattgaatgggatttgttgaacaataaaatggaagtgatcaatacctcatggactgatgttcaccaaatcctatgggatctttggagtgacattttcgatgaagcatttgagcaagcgaaagggatgtttgacgggaagcattga

SEQ ID NO: 431437 - DNA, 810 bp, Serratia marcescens
gtgctgtgcgacgatgggcaatggcgccagattgtcacggttgaggatgcactgaccggcggctgtaacctgttcgacctcgatcagctgtcgctcgaatacagcccggcagagtatcagaacctgctgatgtgtgaatttgtggatgataccgcgtcggtattcccgttcgccgagctacaaggctgcatggtcgatacgctggaagagtgggaggacttcaccccatacgccgtgcggccgttcggctatcgcccggtgtggatcggctacgccccatcggaagccaacggtggcgacaacgccgggtgcgcggtgatcgcgccgccaatgatggccgggggcaagttccgcgtgctcgagcgccaccagtggcagggcatgaactttgccgctcaggcccagaagattaaagtccttaccgagaaatattgcgtggagtacatcggcatcgatgcgaccaccgtcggccaaggcgttttccagctggtgcacgagttcttcccggccgcgcgggaaatcaaatacaccccggaaatcaaaaccgccatggtgctgaaggcaaaagacaccatcaggcgcggctgtctggaatacgacaccaaccacaccgacatcaccgccgcctttatggcgatccgcaaaaccatgaccgccagcggcgcgcgctccacctacaccgccagccgcagcgaagaagccagccacgcagatgtcgcgtgggcaatcatgcacgccctcttaaacgaaccactgaccgcaggcagcgtgctgcgccaccgtgcatcacagctcgccgatgtacgctaa

SEQ ID NO: 431438 - DNA, 804 bp, Serratia marcescens
atgtacgctaagcgcaacattttggcgtctacgttcatcccgctccggctgttaagtcagcaggagtttagccgctatgcgctggattatctggtgttcggcaacgcctatttagaagagcgccaaaaccggctcggcgcaccgctgcagctgaaatcatccccggccaagtacacgcggtgcggcgtggatcgcggcacttactggttcgtgcaagactggaaagaggcgcaccgtttcaagaccgacagcgttttccacttgattgagccggacatcaatcaggaattgtacggccagccggagtacctcagcgcgcttaactccgcctggctgaacgaggcagcgacgctgttccgccgtaagtcttacccgaacggggcgcacgccggttacatcctgtatatgatcgacgcggcgcagagtacgagcgacgttgacagaatgcgccaagccatgcgcgacaccaagggcttggggaacttccgcaatctgttcatgtacgcaccgaatggtaagccggacggcattaagatcttgccgctgtccgaggtcgccaccaaggacgactttttcaacatcaagaatgccagccgcgacgatctgctaagcgcgcaccgcgtaccgccgcagatgatggggattatcccgaacaataccggcggcttcggggatgtgaaaaaggccgctcaggtgtttgcccgcaacgagctaacgccgctgcaggggcgcatgaaagaggtgaacgactggttcggggaagaggtgattagattcgcgccgtatgagttgccgaccgaataa

SEQ ID NO: 431439 - DNA, 732 bp, Serratia marcescens
atgagcaaattgataatggccatggcgttaatatttactgttctcatgatgcaaggatgtaaaaaaaacatggaatatgagccacaggatttctttgaaggtcgccaactggaaatagctcggctgatttatgatggcgacgaagtgaagctgaaagagaaacttccttccctcagccgggaagaattaaatcgcccggcgaaagcaaacatgaccctgttgttctggtcagtgctcaactctacatacgataataccacgccggaaaggttaaggattataaccgatttggtcaagtctggagcagacccattacaacccagaccggaaggagggagtagtccggctgagtttgtcctacagggcgataaaggcgtctggataaaggcgatgttggatggtggtttgtcagcgaattctagagatagaattcataatgagccaattatatttgaagtgttagacgcaaaaaacactgagacgttaaaaacaatgtttgagcatggggcggatttaaatataagaggcgcaatgaatcgaactttgttaattaatgcattgtatcaaaaggatgttgagcatattgtatttttattaaagaatggagctgatacaagccttaaggattcatttggcgaaacctttgtttttttgattaacaaagaaatatcgcaaaaggataataataatcagtatataaaagagttaattaaaattcgtgattcgctttaa

SEQ ID NO: 431440 - DNA, 1542 bp, Serratia marcescens
atgaacaggctaagatgcagcaagcaaaggaatagacacaaaatgttttccagtttgaaactgttgtatatcgccgatgatattatttcacccgatgaattcccccgcatagtcagtccttcgagtgcatgccacaaactatcatacatgccggacagtgacattctgtcacttttctctggttttcgtggtggtgaaaggatccgccgtgaaatcggcgttacgcaaaacgggataagttccaatctgcgtgcaagggtgcagagtgacctgatgagaggtgctatcgtagcggttgaaacccggccaggtgtgttggcgacgatggggccattttacgctgacatcgacggttacctgataccacaggggcggcaagagcccaactatcctattgacaggatagtgaggcgctacgaggatgtcgtaaagtcttatggtggccgccgggcgcgcccgtcagtcttccccgcacaagtcacgcgggcaaaatcggctataggcccagatacccctgcgcaaggtggaagagtttcacaacaggtagtgtctggacctttgaccaaagcgcagcgatggcaggaacgaaaatacctcattggccgagggcaacggagtatctaccctgacgcccgaatcgcctcggaacggttggcggaaaataatgtcgctgtcgagaaagcaaagttagctgagaatatctacaagaccactaatcctctcaaagatactcctggggttcccgaaggatggactgatatcagtaacgatgaatcggcgctaaacaagttggggcttagaagttcgatgctttatgataaaaacctttcccctgattttcttgctcgagtatatcaacctgatagcggaattttcggtaaagatatgaacccaactgtcgtgtttagaggttcaagagcaccagaatttccggaagggatcggcagtgcagcaaaaaaagcattactcaaaggggatctatctggcattaaaaatgccaatgactggataaataatggctctcaggcaataggtagaggttctgagtattataaaagagctgttgagattggtggcgtgataagagggaatgtcgatatatcaggccattctttaggaggcggaatggcctccgctgcatcaatgaccagcggaaaagccgcatggacgttcaatgctgccggactcaacaacggaactgttgaaaaatacggaggtgaaatcattggttcagccaaaaacatacaagcctaccgagtagaaggtgagctattaaccactttacaagaggttaataacgagagtgattatgaacttataaaaaattccctgccagactctttgcaaaaaccatggggtgtagcattgcctttcacaatgaaagagtggtcatcacttgcagttcctggtgctgttggtaccccgcacacccttaccggtggaacaggaacgttactcgataaacacggtatagaccagacaataaagttgattgaagaccagaaagacgatgatatcgccactatcagggggagattatga

SEQ ID NO: 431441 - DNA, 588 bp, Serratia marcescens
atgcaaattcatgcacctaatgcatgcatgaactactcattgatttttataacagccatggtttatgttacctgcaatgactctgaaaattatttcattaattacaacggattagtgatggaacttgaatttaaacggcttagcgatataaaacgaagcgaaattgtcgccctaaataccaacccgttagttttgcgccagatgccattgggagacaccagctttgacgatgcagagtgtttggaatgggtaaaaggcaaagaatcacaatgggatgaacacgggtatgggccgtgggcatttacagtaaacggtaagtttgtaggttggggggggttacagtgtgaaaatggtgatgctgacttagctttagtgctccacccagatcattgggggcttgggaaaaaaatctataacgaaattatcgctcgtgcttttaacgagatgggttttaagtcaatcacaattctgttacctccatcaagattgaaaattaaagcgatattccgtctgggatttaaatttgatggtgacattgaatatgacggcgttcctttcaaccgttatcgactacacgcccctacttaa

SEQ ID NO: 431442 - DNA, 225 bp, Serratia marcescens
atgaaacgagatttgcacatgaccggggcgtttatagaagcgctgaaatcaaccgataaaggccgtagaattaagacggtagactttatacacgcagcgacaaagcaagggacgcacgtcaccccggaggaggcgaattactacattaaaaataggtctggtcatgtcttcaagttgattgaagagggccgctatcagcacaatgagtatttaatgctttgttag

SEQ ID NO: 431443 - DNA, 393 bp, Serratia marcescens
gtggagctgtttttaacaaaagtttttgtggcgcttgggtttgtttttatcttgctatttttagtaagtttagtgctgtttgttaagaataagtctaactacgctcagctagtcgagaactatctcgatgcggggttgctcatgccaagctatgataagttcttggcccggatggggttcttggggagttttcctgtcgcgtggttctttagaaaaattcttgagcgtaagaaaattaaaatcgctgctggagagtatttgccggaagcttcttatgctttcctccaacagcaacccactgaaagggtcggttgggttagaaagtatacggccttgtacttcagtttgtttcccattttcatcgtgctggttgtgttgtctttttggatatga

SEQ ID NO: 431444 - DNA, 330 bp, Serratia marcescens
atgaaccgcgacacacttcctagtgacgcactgctcaaagggatccagtgtagtacggcacacatcaccgatgaggacaacacgctgctgtatcacatttcacatcgaagagaagagttcgggcactgcgagtggtgtcatttcaccggtacggggtacctgattcggctcaacgcctggctgcacccggtattgcagcttaaacgcctggggctatcaaaagccggctgccggctggttgttacgctgatgcaacgccaccacatagcattcctgcacttggacgctgcgggcgatcttttgcctggattttccacgtttgactggtga

SEQ ID NO: 431445 - DNA, 954 bp, Serratia marcescens
atgggacacattgatttgcccaaattgcatgcccgtagcatccgtgaagccctcttttacttgcacccctaccgtgagcgtgtagccgtagacggatgcaatctgacggagctcaatgagaagctccatcactttttctatgagaccgttctccatgataaaggcgatagtaagctcgaaggcattgactatgagcctcggccggaacacgtgacttatcttataatgatcaaacgagaccaatgggccagaaccgcgatcgacaataagtatttttcctggattgctgaagatgaactggcgggcatgtttgtctggtttcattttctggaggtgcagatcaatgacggttacctccacatcacatggcaagagaaggatgaatgggatttgagagagtggtcccgcattgatgatttaaatattgttcaccccgacacgccagaggaaaggttgcttggcatccagaatctctttgatacatccccggccccagtccagatgaaaataaacatcatctctgacttaagaaaaaaatggacaaacgtcggcccaatgctcagaaaagacttccgattcttatttaaagataaaacagtcagcccagaagccattaaagaggttatagagcaagccataaaaaagagatttccatcatttggtctggtctgcatcagtcctgagtccaagcggctggccatcccactcatgttttacttcagcgatcgcgaaagccgtaaaaaagcagaagaaataaaaaatctgagccgtatttattcagtgaaaaaatatcaggaaaagaataaagaaaaacagctggtcacactgttacttgatcccgaagtcaaagacatgttgtatgagatagcagaaatcaggggcatcagcttgcacaagttgattacacactgggcacgtcagcactatagctcgctaaggaaacccgtacagtaa

SEQ ID NO: 431446 - DNA, 570 bp, Serratia marcescens
atgagctacatcacgaacaaaaaccaccgagccgataaatttttacagaataccttactggcgcatcaggatgcattgtttgaccgctattcaaaactgctgatgctccgtgtggatttcgcctatcggcaagatagcttgtcatttcactttgccgatgaacatcagttagccgccgagatgacttacttaatggaacagtgcgctgatattgcagggatcgtcggaagtacatgggtcatggaatacacggaacggcatcgctttcatgtccatgccgcattttatatcgatggacagcaccaccggaagatctggttgttctgggaacagataaaacatctctgggaaaggatcacggaactggagggatatgcacatcggtgtgagcccaagtcctgttatcgggttcggggcgagagagttgtggcggcgtctgacgttcgaggccgcagagggatgcaatacattctgagctatatggggaaacaggagcaacgtacggcgcggcccatttaccgggtgagtactgttccagcccctgtcagaagagggcgacctcgccgctga

SEQ ID NO: 431447 - DNA, 1959 bp, Serratia marcescens
atgtttttgaacgatcaggaaacggcaaccgatttgctgtactacgaagcgattgccaaaacagtggtcaagctcgtcggaaacactccaacggcgccgatcaccatcggcgtccatggcgactggggcgcgggaaagtccagcgtgctcaaaatgctggaggcttcctatactgatgacgagcgaaccttgtgcctctggttcaacggctggaccttcgaaggattcgaagatgccaagaccgtcgtcatcgagacacttgttgatgaactacgtcgggccaggcccgggagcacaaaggtcgccgaggcggcgaagaaggtactcaagcgcgtcgattggttgaaacttgcgcgcaagaccggcggatttgcgctgactgccgtcaccgggatcccgacgctagatcagttaaagggggcctacgatatggtctccggaatcttggccaagccacaggaccatatttcagccgaggacatcaagacctttgctgagcgggctggtgacttcatcaaggatgctgattctatggccgaacacttgcccgaacatatccatgccttccgcgaagagttcaaagaattgctcaatgctgccgatatcgacaagctggtcgttatcgtcgacgacctggaccgttgcttgccgaagactgctatcgctacgctggaggccatccggctgttcctcttcgtcgaacgcacagcgtttgtcataggagcggacgaagcgatgatcgaatatgcggtgcgcgaacatttcccggatctgccgcagagcattgggcctgcgacttacgcacgcaactacctggagaaactgatccaggtcccattccgtattcctgcgctaggcgtcgcggagactcgcgtgtatgtaacgctgttgttggccgagaatgcgttgggtgcgggtagcatcgagttccagaaactgctggaagttgcacgcgaggacatgcgacggccatggatgagtcgaggcctggacagaagaatggtcgaggacaccctgaagggtaatgtgccgaaggaggtcgatcaggcgttggtgattagtgcgcacgtgaccagactccttagcgagggaacgcgggggaacccacgacaggttaaacgcttcctgaactcgttgatgctgcgccatgccatagccgaagaacgcggcttcggtaacgagctccaacgacctgttctggcaaagatcatgctcgccgagcgtttctacccagagttttacgaacagcttgctcgtctggcggcggctcatccggagggtaaaccggaggcacttgcccagtttgagcagaagatccgcgtagtcggtaaaacggatatcaaagaggggtgcgaaacagaaccccagagaaagacgcacaaggtcgccgatgtgcactcaacgacttccgaagtagaggtgtggagcaagaacgaatgggcgtccggatgggcggccattgagccggcgctgggaggattggatctgcggccatatgtctttgtcacgcgggataagcgtagctcgctgggcgggttgatcgccgccagccatcttgaggccttggttgagaagctgatggggcgttcgctggcggtcagcgggctaactgacgagatcggcaaactgacacctccggaacaagaggaggtcttcgaaactatccgggcccgggttcttcaggaggatcgttttatccggcagcctaagggaatcgatggcctagtacgcgtcgtggagattcacccgcagctgcaacgccggttgctggagttcgtgcgcgacctgcctgtcggcaaaattggcgcatgggcggcttccagttggagcagttgcttcaaggacggagggatcgctgatgagtttcgccagatcctggcagcctgggctgtccaggacggaaaccagaagcttcgtgtcgcggcgcagggtattctcgatttcggccagagaggataa

SEQ ID NO: 431448 - DNA, 546 bp, Serratia marcescens
atgggatcttccctggcggcggccaggggcttgctcggcattgtccgcgatatacagagccagggtgccgaccagacattacgtcaacttaatctcggtggcttggctgggcaaccggcggcggacgtgttcgtgtcactggtggagttcctctgtccgccggggggaagcgtcgatgagggtattgcccggcatgcgatgatggagacgatcacagacatggccgaagctgggctgggttcgttcgataccctgagccgggaacaactcaacgacatgttcctgaattttatcgctcactcgatcgaggggcgggttattgccgatctgggacaccgcggcgtccaggtctcgaatgatatcgcggcggttgagcatatgcaggacgaactgcacgatttcatttcgggtgcaacacgtggacagcttgccggacgtctggagggcattgtgagcctatcggatcgcgacatcgagcagcgagtcaatcaaatctatgaggcggcgttcaatctgatcgccatcgcaggggaggacctcgagtga

SEQ ID NO: 431449 - DNA, 1377 bp, Serratia marcescens
gtgacccatcataccatcatcgccaggctcggtaacgcagatacatacgggatcaatcttcgcagacagacgacacagacgacaccgatcaacttcctggatggacaaggtcgtcttggtttcggtctggggcacgcgttggatgcattgaacgagcttggcctgacacctacggaaaccgctgtcgatctggctctgctagccgctgcggtaactgcggctgatacccgaatttctcgcaatacggatgctcaggattcttggacccgggaaatcgatatccacctgccggttgctgacccggctctgtggaacagtcagacttcgctactcgaaacattgctgaacttccttaccggggatcgttggagcattcacttccaccgccgtccgcccaccttaggcaaatttgtcggagagcaacagggtcttcgccttgttgaaccctcctccgtgtgtctgttttccggtggcctggacagtttcatcggtgcgatcgatttgtactccgacgggcaggctcccttgctggtgagtcattactgggatggggtcaccagttcgcatcagtcgctttgttccgaacttctgacgtcccgctttggggaactacaccatatccgcgcgagagttggctttcccaataacaccgtggacacgaatggtggcgaagatacgttgcgagggcgctctttcctcttcttctcactcgcagccatggcggcggatgccgtgggcgatggttccgaggtagtcattcacgttccggaaaacggcctgatctctctcaacgtaccgctggatccgctgcgtgtaggggccttgagtacgcgaacaacgcacccattctacatggcgcgtttcgacgaattactacattgcttggggatccacgcacaccttgaaaacccttatgcattcatgacgaagggggagatggcggcacaatgtcgcgaaccagcgctcctgcagagcacagccgctagcaccatgtcctgctcgtcccccttgagtcgccgttatgatcccgatccgacagagcgccagcccaagcactgtggtcgctgcgttccatgcctgatcaggcgtgccgcgctgctcgaggcctttggcaccgatgctacaccgtatcgaatacaggatttgggcgcacaggtgctcgatagtactaaagcagagggcgaacatgtgcgttcgttccagctcgcgttagcgaggctggagaaaaatcctggccgggcgcgattcgatattcaccaacccggaccattgatcgactaccccgacaggatatcggactacgccggggtctataccagagggctgcgtgaagttgggcgcctgttgcaaggtgtacagtcgagtcctttatcatga

SEQ ID NO: 431450 - DNA, 768 bp, Serratia marcescens
atgacagccccaatatccataccagccccccgcttggtcgactttcattgtcacttggacctttatcaggatcatgaggcgctcattgccgagtgcaatcgcgaacgggtggcaacccttgccgtgacgactacgccgaaagcttggccgcgcaactgtgaattggcgtgggattcaccctatgttcgggtcggcctggggttacacccgcaactcgtcgccgagcgagcgggagagcttcctctattcgaacgctatctgccagatgctcgttatgtcggagagatcggcctggatgccggaccgcgtttttacagtagcttcgaaatccaggaaaggatattcacgcgtattttgcaggcatgcgctgaacacggtgacaagatcctgagcattcatagtgtccgcacagtcggcaaagtgctcgggcaccttgaacgttcgctcttgcccgatcgaggaaaagttatcctgcactggttcacgggttctgttgccgaagcccggcgagccgcagagatgggctgctacttctcggttaacgaggagatgcttcgctctccccggcaccgcaaactggtcgccggcctgccagtggaacatctgctgactgagacggatggcccgttcgtcatacgcgacggcaggtcactgcgccccagccaagttgatcgcacggtggaagccattgccgagatacatggactggctgtagaacagatggcaacacttgtcttgcgcaacctcaaacgactggttactccctga

SEQ ID NO: 431451 - DNA, 978 bp, Serratia marcescens
atggtgagcaatatctccggcctggggggcacccgtcaggtcggcaaattgttggaaaacccggcagagagcgcgggcgaagcgctatggacgccccaactgcgtatcgggacggtgaatttcggcaatgcgccgatgcagcaggcggagttgccggaagcgatgccgcaaagcggcggcctgttccagcagttgctgatgctgatcgggcttcagtcgttgctgcaggggccgccggcggatatgtcggcgatgtttggcgaccaaggtgtcagcgagacagaaaaagacaccagcatgccgccgaccgataataacctacaggggcggccgcttggtgatacccgcagcgcgcaggagattatcgacgccaacccggtgctgaagaacctcggcgatcagaaggatatcaagcgcagcgagctgaaacagcgctttggagactggaccgaggataatccggatccggccagccgtgccgacgccgcttacaatatggcgcgggtgctgaacagcatcaaggggctgaacaaccgtgagggcggctcgcgtggcgatttggcgaacaacggcaagattgacggcatcaccaaaggtggcgatgcccgtcatggcaccgaagccggtgtattgaaagatatcgccgaacaggggctgaaggccatgccgagtaacggtaatctgccgcagaccaaagacagccatgtacggctagacggtaccaacaaggataactttcagtgggcgatgagtgagttcggcaaggtgctgtctaatataccgctcctgaagtccgtggtggcgccgatgtttaacaatataggcgaagcccgtagtctggaagacgtgtttaccggtgcgctgaaagggattggtgaaggtgcaatgagtgctgctcgtggcccggtcggctgggcgatgacggccacgaaggatgccacccagatcgtgatagacaatgtgaaaaataataaataa

SEQ ID NO: 431452 - DNA, 684 bp, Serratia marcescens
atgacactcaatatatccggttcaggcggcaccccgccgctagtgcaagcgctgattgacaatgtcagtgaaagcatagagaaaattgaacaggccgtctctctgccacagcaaaacagagcggtgaatttcagcaatggtaacaacgcggaatttatgcagcaggtgacggcgttcgatggtgcggcgcagcaggggggactgatgcagaagctgctgatgttgattggcctacagcagttgttgggcggcggcgagacgcaaccgcccaaacagtcggcacgccagccggaaaaaagtgcgccggtcagacagccgtcatcatcagacggcgtgatccagcagctgttgcagatgctccaacaggtgatgagcggtaaagacgcgcaggacgctgacggtgtgcagagtggtcagaacgaacagcaaacggcgtcgaccctcggcctgccggaggcgccggcatctggcaagcactcccaaggcggtgtgaacggccagatccagaagatgattcagcaactgatacagatcatgcagcagttggcggacggcgggctgaagaacgcacagtcggcagaggggggcaacatactgagcaaactgctggatacgttactgcagatggtcgggatggacgcattgatgtcgaaactgggcggcatgcagcacaacagggagtga

SEQ ID NO: 431453 - DNA, 969 bp, Serratia marcescens
atggttaagcctatttattccagaatgcccgttcgagctccggctgattgcgccagggagcgttatgtctcggacgtggtgccccccgtggtcgacgatatccacggctatctgcatacgttaaccaaaatcatcgccccgctgtacgtggatgttctgctcgaaggggaaaccggcacaggcaaagatacgctgtcccgacgtatctatgaactttcgggtgtcaacgggccgtttgtccccgtcaactgcggcgccattccggaaagcctggcggaaagcgaactgttcggcgttgaagccggcgcttacaccggcgccattcacgcccgcgccggttatatcgaaacggcgaacaacggcattttgttcctcgatgaaatcgacagtatgccgctcacggtgcaggccaaactgctgcgtgtgctggaaacccggacgatcacacgtctcggtagcaccaggtccatcagtctgaagctacgggtcatcgtcgccgcacagacgccgctggagcaactggtggaagcgggccgcttccgccgtgatctctatttccgcctgaacaccatcaagctggaaatgcccacgctgcgttcgcgccccgaactgattattccgctgttccgccgcttcgccatcgagtcagcacagcggctcagcatgccgcacccgccacgcagcaccgcgctggatgaggcgctgctactgcactgctggcccggcaatctgcgcgaactgaaggcggcggccgaacgctttatccttggcctgccaccactcaagcagatgcagccgcaggagagcggtgcggtgctgctgaaagagcgtctcaaacgcattgaacgcagccttatccacgactgcctgcaccgccacggccaccgcatcgacgacgtagtgcacgaactgggcatcccgcgccgcacgctttaccaccgtctgaagcagctcaatatacacgcctga

SEQ ID NO: 431454 - DNA, 258 bp, Serratia marcescens
atgaaatgtatgccatgcccatcagtgggcactagcctggccaatggcatcagtggcggcgccggcgtcgccacaaaactcagcggagccaccagcggtagcagctttatgagtcaaatgcagagtgtgcaggcggaaatgcagcaaaaccaggtcgacaaggcaaaaatggatgcggaaaaccagcgcatcaacgggatcgccgacagtgcggctcaggcgggttccgccgccgcacagatcaaaattcagtactga

SEQ ID NO: 431455 - DNA, 267 bp, Serratia marcescens
atgcatgccttcagcaccgcgctcaatgcgccggctggcaataaccaggaaagtctgctcagcgccctcagcggcaccatcagcgataatcagcgtgcacagcagcaggcgttccgcaatctggaaatcgcctcccgctccagcaacccaacggattttagcctggcgaacgccaccctgtccgattactacattcagagcctgatgaacgctaagatcatcgccaagggtacgcaaaccctagataaactcactaacctacagtaa

SEQ ID NO: 431456 - DNA, 774 bp, Serratia marcescens
atgggacaacctctggtgaaatacctgctggcagcactatgcgccctgctgcttagcggttgcggtgatgaaaccgtgctaaacagcaacctgtccgagagcgacgccaatgacattatcgcggcgcttaattactaccagatcgtcgccggcaagcgcgtggagaagagcggcgtttccgtgctggtcgccgagacggatatcgagcggtcggtaaacatcctcgacgccgctggcctaccgcgcaaagcgcgcaccaatttaggcgaagtgtttcagaaaagcggcgtcatctccagcccgatggaggagcgtgcccgctatatctacgccctgtcgcaagaggtggaatcgacgctgtcacagattgacggtgtagtggtcgcccgggtgcacgtggtgctgccggagcgcatctctcccggggaaccggtgcagccggcttcggcctcggtgtttatcaaatacgctgatgcgctggatcccgacagcatcgaaccacgcatccgtcgtctggtgaccaacagtattcccggtctggtggggcgggaagataaagatctggcgatcgtcttcgtgccagccaaaacctggcgcgaccagacgccgatggtcagtctcggccccttccccctaacactcggccagtattcgctagtgaagacgctgtccagcgtactgagcctgctgctgttgatcagttttggcatcgtcgcgctgcggcgctcggcgaaaaaggcacgatggcaaacacgtgaaaaccctcatgagtga

SEQ ID NO: 431457 - DNA, 582 bp, Serratia marcescens
atgagtgaaaccgacgtcactctccgctggctcgactggtggcacagcggcttctggcgcgacgcgcaccccagctggcgtcaggtgctgcctttccccacgcaggccgccgctttggcccgcgtgcacggcgctgcgctgcgccagcggcttggggtaacggatacgccgctgccccggccgcagccgcagttgctgacattgctcacccttgacaccgacactcgcacgctgctactgacgctggtcgccgagatttgcatcggtggcacgacgctacccggctcactgaaaatctggtgtcggcggctggccaaaggactgcgtcctgaaagctggctgccgacgccacccgcgggacaaacgctggcggtcactagcctgacgttgctgcaagcacactaccccgactgttggcagcgcctgcgcctggcatttgaacatgatgatgtcagccgctgtccaacgttgccgccggtgctggaatcccgacggctgcagccactgtgggaagccgcgctgtggcagtgtcaacacactctggcgaagaacggcgaggagcattggcgtgtggcaacttag

SEQ ID NO: 431458 - DNA, 594 bp, Serratia marcescens
gtgtggcaacttagaaaaatttccctgcgtcaacctccggcaccgcaggacatcctgctcgaccgcgacgcgctagccgtcagctgtcaggccgagttgctgatcgccgacgccgagcgcgaggcgcagcttctactcaacgaagcgcgggcgcaggccgtagcggaacgcgatgcgctactgacgggcgcgcagaaggacttcttacaacaagcccagaggctgtttgccgactggcagcaacaacgccgcgccgagctgcagcagctgctcgacgccgcagatgggctgctgacgcaggcgttcggtcgcctgctggacgatgtgccgcaggtcgggcaactggatatcctgctgacgcagttgcgcgccaaacaaccgtccgccgtcaccgccacgttgtactgtcacagcgagcggcatattgcagcggcacactggctgacgcagtggccggagctgggctggaaattggcaaacgatgacgagctgccatcggacactctgctgctaacaaccgaacagtgtgaattacatatcagctggcaagcactgcgtcaggcgttgggctcggcgggcaccgaggccggctga

SEQ ID NO: 431459 - DNA, 228 bp, Serratia marcescens
atgtattccgacgatttattacaacgccgcctggccagcaccgccaaccgcagccacaacgaaacctatcagttcgccaaagagatgtcagacgaaccttacagcctcagcgatatgtatgccttccagaacctgctgcaggatatgtcaaacaccagttgggccagctcgcagtacacgcagttcaagttcggcatgcgtaaagccattatcgatgccattaattaa

SEQ ID NO: 431460 - DNA, 2046 bp, Serratia marcescens
gtggtgctaaccctgccctcgatcccccacctgcgacgtctggcgcaagcagcgctgctgctgtgcgtcggcatcagtgccgtacaggccgttacgcccggcgaatggaaaaacggcgcttacgcctattccgccgacaatacgccgcttggcgtcatcctggaggactttgccgacagtttcggcgttatgctatacgacagcccgctgcccgacgccaacgttaccggcaaactgcgctccggcagcccggaggcgttcttgaaccggctggcactggaatatcattttcaatggtttgtctataacgacacgctctacgtcagcgcacagtcggcgcagatatcgcggcggctggaaatctcgcccgacgcggcgccggatatcaaacaggctctgaaaggcgtcggcctgctcgacccgcgcttcggctggggcgaactgccggacgaaggcgtggtgctggttactgggccgccggaatatgtcgccatgatcgctgacttcaccaaaaaatcggaaaaaccgaaggatgataacaaagagatgatgtcgttcccgctgaagtacgcctcggtgggtgaccgcaccatcaaataccgcgatcagaccctgatggtaccgggggtggctaccatcctcaatgagctgctgggacaaagcagcagctcaagtgccagcggcatgaacagcagccagggcggtgaaagcgaaatggctcagatgcgcgcccagtcacaggatatcctcagccaactggtaagacgcggcaccagccatagccgcgccagcgataaaaatccgctcggtaatatggctggtaaagtctcggcggacgtgcgtaacaacgccctgttggtacgcgataaaccggaacaccgcaacgcctaccagtcattggtcaatatgatcgacgtgccgcagaagttgatcgagatcgatgcgttgatcgtcgatatcgatcgcagcgagatggcacgcctgtcgagcagttgggccggccagttcggcaacgtcaccagcggttcgacgctgctctccggccccagtacactgttcgtcaccgacttccggcgctttttcgctgatattcaagcgttggagggtgaaggcaccgcgtcgattgttgccaacccgtctatcatgacactggagaaccaacctgcggtgattgatttcagcgataccgcctttgtacgtgccatcggcgagcgggtggcggatattcaagcggtcaccgcaggcaccagcctgcgcgttacgccgcgtgccatcagcgggaagagcaacgacacctcgtcggtgcagctgatcgttgacgtcgaggacggcaaactgaataaaaacgacgacggcgatgcagagggcacccgcaacggcgcaatcagtacccaggcactggtacaagcaaaacgctcgctagtgatgggcggcttccacaccaaagagagtggagatcatgaacggcgtatccctattctcggcaacattccgttgatcggcaaactgttcaccacctcgcatcatgaaacattgcagcgcgaacggttgtttatcattaccccccatctggtgggcgatcaggtggatccttcccgctatatcgccagtgaaaaccgtgatcagttgaagggcgccatggacgagatcaatcgtcgccataaagactccagcatgaaggacatgctggagtccgcgatgcgcgatctggctgaaaaccgtcagcctagcggcatgacggccgacggcagcggtcaaacgctgaacacgcagtgccgcatcccatccggtttcagcaacgatacgcagcgccaccaatggtacggtaatcgttcggtacaaatcgcagtcggggtgatcaccaataccagcaatgtcacccgacgcttcgatgaaggcgcctgccgcagcgaccgaacccttgccgtcgccgcttggccgcattctcagctgcgccccggcgagtcggtggaggtgtacgtcgcgtttgagaaaaatgccgtggtcaggccgggacgcgcccccctgatcgccagagcccgataa

SEQ ID NO: 431461 - DNA, 198 bp, Serratia marcescens
atgaagaatatggttatgcgatatatcgccgccctgctggcggccatgcaactcgccgcctgcgccccgaaagcgccgtcaggctgcgtcagcgtcgagtgtcggccacagtccgacgacaacagcctgaccatctggtggcagccggccctgcgcaacagcccgaatgactacacccgggtaccggttaacctctga

SEQ ID NO: 431462 - DNA, 4980 bp, Serratia marcescens
atgacgacgtcaataaatggcaccatcggcgatttgttcaatcgaatacggcggactgacggtgagaacgtcacgcgcagcggcaacgacgtctgccgcagcgccgttacgcctacgcagcgcgctcccctctattcgccgccccgtacgccagtcggcctgcgccagcgccagaacgccacgccacagctgcgtgatgtgttgtcctctgaggccggtgattgggcggttcaactcaacagtcggttcggcggcattaacggcgtgactgaggagccacagcgcctcaccccgaaggaacaggaagcgttgacgcaaaagcagatgctacgccaccagatggagcgcagcaccctgcatcagtggcaatcccaagcgcctaccgcccaactgacggggcttagccgccgggacgacggcacgctggatatcgacgccggcgaagcgctcggacctctgctggaaaacatcctgaacactgaccgtcaacgttaccgctggcaccatcacgataagcagcacggccatatgctgctcgattggcagggacaactaattaatctgcacgaagacccgctggcgtttaccgctgtcagccaccatctgtcggtgccgccacagcaaacgcccgtcgctggcaataacggcaagatcagttggggcggtgccgagtcgaagacgatcgccatgccgacgcaggctttgcgagaaaggcttaccggcatcttccgcagcggccagggtgagcaggcactacgcctgcacgacaaacgcttatatcattactcgcccagaatctccgtcgactggcagctgatgcacgatatcgacgccaaacccttcagtcaactcagccgccagggcaacggccagctgtttgcgttggaggacaacaaaacgcttctgaaccttaccactggccgtacggagtatacattcagccagaaggtctccgcttatgcgctcaaccgctacggcgcattgctggtactgacggaggacaaggctgctggcgagcaacagctactgtttcgcgcagcgggcacggccgaagatccccggcctctgctactgcaggtggataaagaaggcaacggcgaacggcagccgtttcaccccgccgccatcgccctacgcgacaatgaactgttggcgttcgacaacagcggccgtttgcaccacgccttactcccgaacggcgaaataccgcggtccctggaactggagcaggatcgccgcgatacccagattcgctatctgttctccgaccccgacgtacagctgaccgcgttgctgaatgacggcgacgatcgcatccacgtagtggtgaaaaaccgccataatcacgaattcagctgccagttgggcgataccggcgtcacccccggctggaatctgaccgacagcatggtgatggattatcagaaagggctgcgcctcagcacaccgcggccgcacaacatcgtcgacctaggccggctgggcaaactggcgctgattgaaggcaaggtacactttcgcgatgaggccaccggccactgggaggccagcaaagaaaaggccgaccgtttgatccgcggccatgacggccaggcatataaaatggaggacggcgaagtaaaaccgctgaagatcaaacaaaccagcaacaaggcctctctccagagcaacctgtttcatctgaagcgggtacgcaacagcgtggaagccgatctcgccctgacagggctgggcaagaacagtcagactctgaccatcacttcactgggcaacgggcgtctggcctcgctgcgggaagacggcagtgtacagttgcaccaaatcatccccggcgcgcggcacgagcgcataccgccgatccccatcaaaagtgaaggcctgcccgacgcccagacacagtctggcaggctgaaagatctggccagcaacgctacgcatcagctgttcggcctgactggaggcggacagctgttatgcttagagcccgctggctggctgccatccgcactgcgttctggcaactggcagcaggacaaggcggcggcaggctggctgtcggtcatgtcgccgctgaatctcgggccgctgaccagtttgcacaatgatgcgcagggccgcttggtggtggcggatgcctccggccgctccgccacctgggataacggcaattggcaagctaccaacgagacggcgcccgagtcctaccgcaacgacacctcgcagcagaccttcaaccggctgagaaccagcggcaaaagcggccgcatccccggcaccggcattacctatcaacgcgagtttgaagtcttcggcgccagtggcaataactctcgccaggtgaacaacccgtttaaaaagcgcatgcaggcctttttacttaatccccagggcaaaatgccgcgtccgctgaaaaaccttggcaacgaaattatccaccgcgccagcggtcgtgacgggctgaaaccctactatcaggcccaacggcagctctccaccaagatcgccgccaaaccggccccgcccgcagacaacaacgccgagctcagcaattggccaacgctggagacacgtctcaacgcgctggggctggcgcaaagcaccgaagccaggtcccagaagctgcataacgagatcgccagcttcggcgagatgctgggacacagcctgaacctgtacagcaccgcggtgggcaaacattacggcgtggtggatgaacacaaccaggtgatcaaccatccgcaaaagctgctgcacacccgcggcggccagtttaaccgccacagccagcgcgatccgcaactggccggcatcctacggcatctactggacaaccacggttcagaatcagcgcgggacgcgctgcaaatcctgagcgccatggaaaataatggtgtggtgatcaaccatctgaaggacgaacgcgactatcacgacgatatcggcctgctgaaatcacgcctgtttctcgatctgctgacgcaggaaaagctgcaccaagcgttgagcgactttcagtctgcccccccgtctgaccagcagcgcttgaacaccctgcgcgataccgtgcgcaacctccgtgacgcacagtgggatcagcacccggtgaagaaactttctgatcagggcttccagaatatccgtcagcttgaggcctattacgacggcatgaaaagaatggtcaaagccttctccaagcagcaccatggcacttacatcactgccagcacgctgttccaaaccagcaatcgcgaagagctgacgcagcggatcggcgaggagctgtcggcgctgaaaaacggcgaggcgttgaccttcggcaacggccacagcggctttgtctccagctttgtccttcccggcacccaggttatcggttctgtcggcacgcgcggaaatctggatcgtgattacagcctggccttcacccgcgaggagagcgggctgacggtgaccgtcgcccgcagcggtggcggcagcctgaacgtgttcggcgccgttggctttaatgcgctgaccggccacctgaatgagaacagcttggatttcggcccggggggcgaccacaaactgtcgccggcggtgcgcttcggtgcgtcgctaccgctaaacgtgcagcgccagtcacaaaacagcatgaccttcagcctgagcgataacgagctgccgcagtttctgcagcaactgaccaccaatcagctcaggccgatggatatattggacaaggccatcgaccacaaggtgaagaacggcaatgtctggaacctgagcctggatcttaacgcctcggcgcaggccagcctcggtctgccgatactcaacaaaaacgagaccgccaacgtcgccagcgcgcgtatcggtggcggcctgtcggccggcgccaatctgcttcacggtcaacgtgaacgcagcggtgtccacaacacggaaggcagcaaagtcagccgcagtgataaccgggtgcgctatctgaatcagggcaatctggacgcccgcattatgctgcccgtcggcgttagtagcaaaactgagcacgcgcgcgtgccgattgtggcgaccagtgcgctggcggcacgctacacttttgacggccgcaccaaaaagaaaatcaatatcgaattgacagagccgccgacgctggagcacacccatatcgacaagatcgcggagatcctcggcaaggcctttaccagcccggccgacggccgggtgctgaccatggtgcaaaaaaacgcaggcgacgcctcaccccaagcccggctgacgacactgaatgaccatttccgccatcacctgctcggcgccaaaacgctgaacaacagccagcatgtggcgatccgcgatctgcaaaaactgatccaccaacgcgaagctatggataacaaggtgccgctgcccatcgcgctggagtataagtccacctacaacaacctggccaaggtggacagcaacagcctgccgcactggatccataatgccttccgctttgaaatgcaggacgacaaccacgccaacagcaacgccaaccgcataggcaccatgatgacgcaggatccgcgtctcgccgaactgatcggccagatgcagctcagcaccgacaccaaggcagaggtgacgctggagttgaaggacgaggcccgatggcagctggtggaaaactggctgcacggcaatatccagcgtcaggatcttgaacgtcaattgctggatcgcagcaatatgcgcatcaaatccatcgcctttatcgaaaacacgtccaagggcgacggcatcacctccccgcgctttctgatcggcggcggcagcaacgtcagcatcgagaaagagcgcaggctgggcaaaatcagcttcagctacggcatcgatcaaaacgcgccactgagctacagcttggaaggcgaacttgccgaccgtcagaacgcgtcgttaagcgaaccgctgaaccgggcgtgggaacagtggcgactgttgaaagatgcataa

SEQ ID NO: 431463 - DNA, 426 bp, Serratia marcescens
gtggaaacgcgccatatacaaaaactgctggcccgctacagtgcaagcctaaacatcaccgaactgcagctggaaaacggcgtctgcgccctgcaggatgaacgtggtcaggaactggcggtgctggagctgccgccaccgggcgaggtgctgatgctgcactgtctgattctgcccgccgatcctgcgtggcaaacaccaacgatgatgccgacgctactgacgatgaactttgagatcggcgcaatggacggcagctggctggcgctggatccggcgggcaacctgcgcctgtgcagccgccgcgaactgagcttgctggatcatgccagcttcgccctgctgcttaacggttttatcgaacgcggccaccaggtgcgcgactttatgccggaactgctggaacgcctgtaccccttaatttga

SEQ ID NO: 431464 - DNA, 1095 bp, Serratia marcescens
atgagtgaaaaaaccgaacaggccacgccgcaaaagttgaaggaatcgcggaggaaggggcaggttggtcagagccaggatatcccgaagctgctgatctcaatcggcattctagagacgatctttgcgctggtggaggacggcatgcagcgaatggagtctatgatgctgctgccgctggtgcgtcttcgtgacccattcggccatgcgatggaggaagtgcttgccgacgctttgctggtactgtcgctgttttccgccatcgtctgcagcatcgcactgctattgcgggtactgggaggttggatccagttcggtccgctgttttcggtggaggcgctactgccgaaacccgaatcgctcaacccggtgaaccacttcaagaatatgttttctggccggcagatggcgcagctactgatcggcctttttaaggcggccgccatcggtgtggtgctttggctgtcgctggctccggagatgggcagtttggtgcgcctggcccagagcacgctggacggcttctggcacggcgtgttgcagctgtttatcagctgtacacgccgggtgttgctggtgttattggcgctcagcctgatggacttcggcgtgcagcgcttttttttcctcaagcagcagcggatgagccacgaggatattcgcaacgaatataaacagaacgaaggcgatccgcatatgaaagggcaccggcgtcaggtggcgcaggatatcctgaatgaagagccgagcgcggtgcgcaacgtggcggtggaagaggccaacgtactgctggtcaatccgacccactatgcggtcgggctctattatcaccccggtgaaacgccgctgccgcgtttggtgtttaaagctcacggcgacgatgcgcactatctggtggatcaggcgcagcgcgtgcatattccggtggtgcgctacatctggctgacgcgcaccctgtaccgcactacgccggaaggcagctggatcccacgtgagacgctgaaagcggtggcgcaggtttaccgcctgctacgcgagctggaggaccgttatctggatgaagtgctcgaactggaagaggagccgttcccgtaa

SEQ ID NO: 431465 - DNA, 813 bp, Serratia marcescens
atgctgtggggcgatctgttggatcagttgttccagtatctgctggcgctgctgttgggcatggcgcgcgttttcccttgcgtgttgttgacgccgatcttctccttcaacgtgttcaaaggcgtgccgcgcgcggcgatcgtagcggcgctggcgctggttatcgcgccggggctgcaggctgccatcgctgccaacccaccggaactgctgacgctgacggcgctggggctgaaagagctgatcctcggcgcgctgctcggtctggtgctggggctgccgttctggatgatggagtcggtaggggcgctgtttgacaaccagcgtggcgcgctaatgggcggtcagctcaacccgctgctggggccagatgttacgccgttgggccacttgatgcagcagacgatgatcctgctgctgatggtggggccggggctgggcaccatgacccaggtgctgtgggacagctaccgcctgtggccagcgctggcgtggatgccgctgccgggcgtacaggggtggggtgtctggctcggcctgctgaagaccacctttgtcgatatggtactgtatgctggcccgctggtggcgctgctgctgctgctggactttgccgtcggcattatcagcatttacagcccgcagattcaggccacggtgctgaccattccggcgaagtgcctgctggggttgctgtttttcgtcttgtacctgccggtgctcaaccacctggcgggcgagcggctgtttgagctgcgcaatatgagcgccattcttggcatgctgctgccgtcagcggaggtcagcagatga

SEQ ID NO: 431466 - DNA, 261 bp, Serratia marcescens
atggatatattgagtttttttcgtcaggcgatgttgctggtggtggtgctatccgcgccgccgctgatcgtcgcggtgctagtgggggggatcacctcgttgctgcaggcggcgatgcagctgcaggatcaaacgctgccattctgcctgaaactggtggcggtgggagtgacgctgacgctgaccgggcgctggctcggggtggagctgctgcagctgacgcagaacgccttcgacatgatgtcgcaggtcggcggttga

SEQ ID NO: 431467 - DNA, 654 bp, Serratia marcescens
atggaagcgcagtcgcttaatccgatgatgctggcgctgtttctgggcgcgctgtcgttggtaccgatgttgatgatcgtctgcacctgttttctcaaaatttccatggtgctgctgctgacgcgcaacgcgatgggggtgcagcaggtaccgcctaatatggcgctgtatggcatcgccctcgccgcgacgctgtttgtgatggcgccggtatttaacgatatgagccagcggctcaaggcgatgccgctcgacttcagcaatatggaacggttggagtataccttcggcaacggcgccgagccgctgaaggcgtttatgacgcgtaataccgacccggatattctgacgcacctgcaggagaatggcgtacgcatgtggcccaaagagatggtgcagtcgttgacgccgcaaagcccgctcctggtgatcccggcgtttgtactgtctgaactgcaaaacggtttcgagatcggtttcctgatctttattcccttcttggtgatggatctgatcatctccaacgtgctgctggcgctggggatgcagatggtgtcgccgatgacggtctcgctgccgctgaagatcctgctttttgtgctggtcagcggctggacccggctgctggacggcctgttctatagttatctgtga

SEQ ID NO: 431468 - DNA, 1053 bp, Serratia marcescens
atgagcacgccgctacggctgcgtcggcagagcgccgccgaggttcagacgttgggtcttatcggctacgggttacgcctgccttttcaacttggcgacagcgctggcgagctgcgtatcggactgatcgccggcgagccgcagacggcggacgttgcgctgcgttgtgtggctggcccgctgtggctgagtgacgcggagggcgtctgcgcattgctgtccgactgcccgtcgctgccgccctgcaatgatgaggaccggctctggtactggccgctgttcaaccacgcgctgagcgtgcaactccgtgtgctgttcggtgagctgggtgccgccaacggcgaaccgcctgccgatgcgctcagcgtgcggctgacggtgacgttggacgaactacgggcgcagagtgtgctgacggcaacgcccgacgtgttatgcggcttgctggcagcacctggctggcagggagaactgaacaacgcgttggcggcactgccgctgactctgccgttttgcgtcggtgcgctgagcttatccctcaccgagttggcgcgactgcggcctaacgatgtgctgctgccgcgtgaagataccttcactccgcatggtgcggggacgctgcgcttcgcatatttccgtgcccagggtgaactggtcggcgcggaagagcgaagcactggtttttatcttatcgatctggagacaacatctgtgacatttccctaccatgataacgagacaaaaagcgatgtgcaggacgagaatcgtgtggagtggagcgccgattcagagccggccagtgtaacgctcggtcctctaccgttggcgctgaccgtgcgctgtgggcatctgcgcctgaccgtgggtgatttgcaacgtctggcgcccggcaccaccattatggtggatcacgttcagcctggcgaagcgctgctgtgtcacggtgactacccgttggcgaaaggtgagctggtggatgtggaagggcggctggggctgcagattacccatatgctgccaagtggcgtcaatccgctggggcagggcctctga

SEQ ID NO: 431469 - DNA, 636 bp, Serratia marcescens
atgatttccctaacgcagcaggaatgctgcgcttctcgtgagcgcgccaaagagtgggggcaggaacagcagcgcctggcggtgcgacagctgcatgacgggcatcatccgcttcgtcaggcacgcctggagaaaaacatcgcccgagtgccagagcgcggctgcgcggcggccgaacgtccggcgttcacggttaggcgggatgaagagggctccgaggcaacgtcgaacggcgatctgttcagcatgctgatggagcacgacacgccggcatttcccggtgtgtttcacgctacgcagcacgccgccaccatgtcgctccctgcggcaacgcaggaaagcgcccgtaccggcgcgtcgatggtgctgtggcaagcgctggagaatgaattggatcgggcgctggttaatccgccgaccggtccggtctccgtctcgctgctgctgccccgtctgggatatgtggatgtccgcgtgcaggcgctgccggcgggggggtgggacattgcgctgcgttttacgccgacggtgctggacgcgctggctgcccatgaggagcgctgtcgaaactcgctgtgccggcgtctggcgtgccgggtacgtctgcgttttgagttgcgggaggagcgggcatga

SEQ ID NO: 431470 - DNA, 462 bp, Serratia marcescens
atgcgccagaacaggaacattgatcacgaaccacagccggatgacggcgatcgggtaattgaccaggtgctgatgttgctgctgccgatccgccgccagcgtctgcagcgcagcgagcgcaagcagcggcgggaagagcaactgctcagcgcctgccgacgacagctgcagcagacgcagagccagctggcggcaacgcgacaagactatcagcagcagcgggagctgtttgaccgacgttatctgggctggcagcagctggaacgcctgcagcacggactggagggcgagcgcagcgcggcagcggcggtggtcgcaggccagcagcagttgctggtcagccagcagtgcagcgaagagcagcagcaaaagctgcaggcagcgcgggccgagacgtgtcgccgccagcgcgagctggagaagctggagtatctgctacgggatgcggggggcgcgccatga

SEQ ID NO: 431471 - DNA, 1368 bp, Serratia marcescens
atgacgaatttttccgacgagatcgccgcatgggccgatcgtcagcggcgtcgtcttctacaggcagatccggtaacggtctacggccgggtaactgggatcagcggcatcctgctggagtgcagcctgccatgtgcgcgcatcggcgatctatgccatatcacccgccgcgcgcaagagagcgtgctggcggaagtggtgggttttaacacgcagcatacgttactgtcggcgctcggtcccctggatggcatcgcccgaggtgcacgggtggcgccgctgtggatgccgcacagtatcagtgtgtccgacgcgctgctcggcagcgtactggacggcttcggccgttcgctggatgaacagagcgttggcgcctttgctctcccgggagtcagtagcgataccgcgccggtgatgagtgacgcgccgccgccgacggcgcgtccgcgcattgcacaggcgctgccgaccggcgtgcgcgctatcgacggcctgctgaccctgggcgtcggccagcgggtaggtgtgtttgctggcgcgggctgtggcaaaaccactctgctggcggagctggcgcgtaataccccctgcgatgtcatcgttttcggtctgatcggcgaacgcggccgcgagctgcgcgagtttctcgactatgagctggatgaggcgctgcgcagccgcactgtgctggtttgcgccacctcagaccgcagcagcatggaacgcgcccgtgcggcttttaccgctacggcgatcgctgaagcgttccgcgcgcaggggaaaaaagtgctgttgatcctcgactcgctgacccgctttgcccgcgcccagcgcgaaatcggcctggcgctaggggagccgctagggcgcggcgggttgccgccgtcggtctataccctactgccggagttgctggagcgggcagggcagaccatggcgggcagcattaccgccctgtattcggtgctgattgaagcggattcgatgaacgacccggtggcagacgaagtgcgttcactgatcgacggccatatcgtgttgacccgccggctggcagagtgcagccactatccggccatcgacgtgctggctagtcttagccgcaccatgagcaatgtagccgggcgagggcagattgctgacgccatccggtttcgccgcctgatgtctgcctggcaacaggtggagatgctgacccggctgggggagtacgagccaggccatgatgccatgaccgacgccgctgtggaggcgcaggatgccattaatggttttttacgccaggggacgcgcgccccttgtgcctgggaagagactttgcagcaactgacggaggtaagcggctatgcgccagaacaggaacattga

SEQ ID NO: 431472 - DNA, 852 bp, Serratia marcescens
atgtttgaactgcgcgtattgtccggctatcactgtggtgccgccttgcccctcagcggtgcatgttggcgaatcggcaacgatccgcaagccgatttgtacctcgacggcgtggatttggctggccagagttacctgttgagtcgtgatgatgagagctggcgtctgactgtggaagaggtgacacaggagagccggacgctagaggcggataccccgttccgactggtcgatgtctggctgtgcgtggccagagctgaaacgccgtggcatgaggcggcggcgttgtcagccccttcgaaggaaatctccacgccgtcgcccgttactcgtcggcgtccatccggcgcgatgcgtgggttaatgatagggctgttcctgctgctgagtctcacggttgccagctggatcttgcagccgacgatggcgcaaacctccaccggaggggggcgcaccaccacctggaatagcgtggaagagctgcgcgtgtcgctgcagcagcagttgcgagaacgcgaactattcaaacaggtgcgcatcagtaagcagggtgatgatctactgctgaacggcgaattaagcaagccgcagatggtggttttcgaacgtatgatggcacggttttatgcacactacggtgcggcggtgccggtgaaaatcgcagtacggctgcaggagaaaaaactgccgtttcgcatcgtgcagatcactaccgggtcgcgagccaatatcgtcacggaagacggtcagagaatgtttatcggcgatgaggtggctggactgaggctggctgcgatcaccaacgatcggatcgaattcggcggtcgcgatccgttaacggtgaaatggtga

SEQ ID NO: 431473 - DNA, 2124 bp, Serratia marcescens
atgaacagcctgttttccatcctcaataaaatcgccatcagcgcgatgcaacgttcggagatcgtcggggcgtcgtttgccctggcgctagtgtttatgctgatcgtcccgttgcctctggggttgatcgacatgctgatcgccaccaatatctgtctctccacgctgctgatagttctggcgatgtacctgcccaagccgctggcgttctccacctttcctgctgtgctgttgctgactaccatgttccggctggcgctgtcgatctcggtaacccgccagatcttgatacagcaggatgccggccatatcgttgaagcgttcggcaactttgtggtgggcggcaatctggcggtggggatggtggtgttcctgatcctgacggtggtgaattttctggtgatcaccaaaggatcggaacgggtggcggaggtagcggcgcgtttcacgctagacgccatgccgggcaaacagatgtcgatcgacagcgacctacgtgctgggctgattgacgtacatcaggcgcgcaaccggcgcaacgagttggcgaaagagagccaactgtttggtgcgatggatggggcgatgaaatttgtcaaaggcgatgctatcgctgggttagttatcctgtgtatcaaccttatcggaggattttgcatcggtgtgctgcagctggatatggcccccgccaatgcaatgcatacatactccattctgactatcggcgacggcctgattgctcagatcccggctctgctgatatccctgaccgctggtatgatcattacccgcgtatccgctgaaagcgacagtacagaaacgccgaacgtcggccgcgagatcgctgagcaattgaccagccagcccaaggcatggatcctcgcctcgatgggaatgatcggctttgcgttggtgcccggcatgccgggcgtggtgttttcgctgctggcactgatcactctcggtgcaggaggttttcaggtgtggcgcgcgcgacaggaaatgctactggcaacacctcagatcgaaaacgaagtgatcccacctgagttgaatggccgtgaggatctgcgccagttcaacccgacgcgaccttggctgctccagttccatacttcgcggcgcggcacggcggagacgcgggttctggtgcaggagatccgccggctgcgcaaccgcatcgtttatcatttcggctttactctaccagcgtttgatatcgaatttacagataagcaatcgattgatgagttccgtttctcggtgtatgagatcccgaaagtgatcggcaccttcaataccgctttaacggcgctggatgtccgtcagttggtgagcctgagcgataccgaacgcgaggggggcatctccggcgatgaggggcgcgccgaggaagattatctgtggctggaggaggggcacccgctgctggcgcgtgaggatctggcacgccagagttctatcgaactgctgttggtgcgcatggaagacgccatccacgccagcagtccgcactttatcggtctacaggagacgcgggcgctgatgaactggctagatgccgaacaacctgagctggcacaggagctgcagcgggtgatgccgttgacgcgtttctcctgcattctgcagaaactggtggcggagcgcatcccgctgcgctcggtacgcgccatcggcgaggcactcatcgaacacggtcagcacgaacgcgatgtcaacctgctgacggaacaagtacgtgtcacgctgaagacccacctttgccatcaatactgccagccggacggcattcacgcctggctgttgacgccggagctggaagaggcgctacgcgacagcttgcgtcagacccagaacgacattttcttcgcgctgagccaacaacagatccagctgattcatcaggaagtgaagcaggcctacgcgccgggacaggacaggcaggcggtgctactggtggcgcaggatctgcgcggaccgttgcgggcgctgattcaggagcgtttccacgcggtgccggtactcgcttttgccgaactggagccggtgctggcggttcaggtgttggggcgccttgacgtcgagccggcattttattcactcactccctgggaagattaa

SEQ ID NO: 431474 - DNA, 162 bp, Serratia marcescens
atgaacagcctatttgccatcctccataaagttgccatcagcgcgatgcaacgttcggagatcgtcagcgtggcgtttgccctgacactcgtgtttatgctgatcgtcccgttgcctctggggttgatcgacatgctgatcgccgtcaattcgatgcagtaa

SEQ ID NO: 431475 - DNA, 1119 bp, Serratia marcescens
atgttgaaatcccccagcctggcctttactacaaacccattgagcgccctgtcgaagcagggagaagtcgaacagaataaaaacagcggcagggcctctgcgggcacgcccagcgtcgacgatatcaaagaagaagcagggctgatgtttagtgaaaaggcggaaagtaaaaagaaggcggaccagaggcgtctgaaccagcataacgtgcaccgtcgtcatctgctgaacaaagtcgagctgaataaaatttacgcgatgcttgatgcgcgcgacgccgagcgccaacaggctttactgctgcgactacgagataccttaaaacgcaaggcggaaaccgacgatctgcttgccatgctgtatgacgacccggcgcgctgtgacctgctgctgcgggtgttggagcgcgaggcacgcagcgacggcgatgaggaactgtgccgaacggtggagcagcatctggatacgttggaacaaaatcatggcgaacggctacgggctgggttgaatactgcctggtcgatcgccgaactaaccgacaatccgcagcacaaacagagcctgcgcaatatttattacgacagtattgtgcatcagcagtcggcgatggcgatggtagatctgctactgggccatttcgctccccaggatttcagcattgggctgcgcacgttgcagcgagcgttggccgacgatattgccgcgctggcttcgtcaatctgcaccggggcgctgcgtcacattcagaccgggttgttcgaatccgggcaggtcaatcacaccttggaagagagcagggcgctgctggaacggatggctggcaaaatgaggctgggcgatatggaccatgtggaactggcgcggcgtctgctgcatatctgccacaacggcgctttcctacaggacttcagccggctcggacacgaggtggtgagcgatgcgttaccgcgcaacctctccatttttttcaacggcatgctgccgctggtacgcgatctgccgatcggactatggaagatcaaggaagggcgccagacggcgctgacgttgttggcgaaccacaacacggaactgctgaagaatgagtaccggcaggccaggcgtgaattaaagctataa

SEQ ID NO: 431476 - DNA, 549 bp, Serratia marcescens
atgagcaattcattaactgaaatcgctatacaaaccagagcaatgaatataccggtggattgggacgctattttaaaaaattcgaacaaaaagctgattaattttattcgaaggagagtcgctggcacggaggacgtagaagacattgcacaaatgacctacctggaagtgctgtgcaaccggcataagtttaccggttcttcgcagccggaaacctggatgttcggtatcgccatcaatctaatccgcaatcattacaagcgtaaacaacgccaatatctttttgatacactgaacgatgagatgttggaaaatctactatacgacggcgatcccagtgagctgaccgcaaatcagaggctgctcaccacgaccctgagatcgattgacagacagccagaagaggtcaaacgtatgctggcacttttgatcgaagatgaaggcagttataaggatatcgccatgcagttgaatataccgattggcactgtgcgttcccgtttgtcacgggccagaaattcgctaaaaaatcaagtattccatcgttag

SEQ ID NO: 431477 - DNA, 1314 bp, Serratia marcescens
atgggatatgcccaaaagtcgctgcttggtaacaactttgccactatcgctcctgaactgttagatggcgatatatctggattgtggtggaaaatgacgatgcgcccggagggcatcacttttttctctcagcaccgccatcgtaatagcgagctcatcgccgtccaagtcagttccagccaatatcagcacggcggccatcggcatgtactgtgcattgtcagcgatgttcgcgagcagaaaaagaaagagacgattttaaaactgaaggaaaaacagttccgtgcgttggtcgaaaactcaccggatatggtagcccgcttcgatctttctttccgttgcatttacgccaatccacgagttctgacgtggtttaaccgcactgaaaatcagattttcggttggcaactgaccaaaagcgtgccgcaccaccatgcaggcatagagttgctgcatctgatttctcaaaccataagctgcgccacctctactgatggggaaataacactggaacatcagaaccggcaacacgtttcgcatgtacgctgcgtaccagaatttaatctggagggtcagctggagagcgtactggctatcggccgcgatatcaccgacatacgcttggctgagaaaggcctgcgagaagcgcaccagcaattacgtctgctgacgcgtaatcaggaagcgcggcgagaggcggaacgtaaatacctagccagtgaaatccatgacgaacttggccaacacctaacctcgatacgggttgggctgtccttaatcagcatacagtcgccggaaaaaaacgctaccgtacacctgcaggtggaaaatctgatgcgcctggtggatagaaccatccaagtggtacgtgacgtctccactcggttacgaccaaatatgctcaatatggggctactgccggcgctggagtggctgcgcgacgaatttaacctccagcagacgtgtcgctgtattctaatcgtcaccacggaaaaaaagctacagttggacgaccccagcgccaccgccgtcttccgcgtagtgcaggagtcgctgaccaacgtcacccgccatgccagagccagcagcgtctatatctttgtgcgtcagcgcggcaacaaactggaaatcgaagtcgttgacaatggtcgtggcttcaatccgcagcgcgcgcgcgccgacgcttggggactggcggggatgaaagaacgcgcgaaaatgctgcagggctctctgaccattgacagcaaacagggggaaggtactcgcgtacgactcagttgcccactcaaccgacaagattttgatgaataa

SEQ ID NO: 431478 - DNA, 639 bp, Serratia marcescens
atgactcaaccaatacgtttaatgattgccgaagaccacgccattatgcgtgaaggcctgaaacagctgtttctactggacacctgtataaaggtagtcgcggaagccgcagacggtggccgggtgatggaactccttcgcaccgaaaaagttgatctgctattgctggatatctccatgccggggatcagcggcgaagatctgatcaatcgcatcagcagtcaacatccccgccttaagatcctggtgctaagtatgtttaatgaacctcagattgctcagcgcatgctggagtatggcgcgctgggttatattaccaaggatcgtaacccggaggcactgctgaacgccattcgcagcgtcgccagcggcgcgcgctatatcgatcacgagttggcgcagaaaatcgtattcgctcagtaccagagcaacagcgccccccacgagaacctgacctggcgcgagcggcagattatgattatgctggcccacggcgagtcactaaacgccatcgccgataccctggccatcagcaataaaacggtcagcacctataaatcgcggctaatgaaaaaaatgaacttcagcaccaatgccgatatcgtcagatacgccatcggttataacctggtaaaatag

SEQ ID NO: 431479 - DNA, 615 bp, Serratia marcescens
atgatgaaaattccacagctaccaaatattttcaacgacaatcgagtcaatttgccatcacagcgtgaagctagccccgtcgccaccgtggaaaatctattgcagcgcggcgccaacctgaacgatcctggggttgatccgaccggtttcagttcgattcacgatctgcgggatttcgtccgtaataacccactacccaacacgttgtatcgtgcccattttggtgagaagggggagattgacgcttatggcttggagcgttccgacgaagctgataaaaagcgcggtgacgattatctggcggatattatcaagcacacagcgcgcacaggcggtagtggcggggcagtgttatctttgtctggttcactagaaactgcgcttcgtttcgccactaaccgtatcgtagtacaaattgacgcaaccgccttccctgggcgctttaaaagcaccgcccagatccttctggaggatgctgatcgcttaatggccgcgaaaaaagtctcgccgagcacggtcagaaaagcgctagaaaatttacgggctgagactgagtctgaagcattttatttggacggtgatattccccgcagtgcggtgaaaaagatttattaa

SEQ ID NO: 431480 - DNA, 183 bp, Serratia marcescens
atgtgtattgtattttggctggtgtttttgggtgggtatgggctaaattatctcccgctcatttgcctaaatatattctccagatccctgctaagatatgattatgacaaatttataacttcttcactggtgactcgctatgagatgctaaggctgatgttcgacagttgcagaaagagttaa

SEQ ID NO: 431481 - DNA, 1143 bp, Serratia marcescens
atgtcggatgcaaactctgcatccgcgcctacactgcaacaaaaaccagggaacgggatagggcgagtcaatgggcagatggtgtccatgacggcattgaatgaatctggttttacttcagcattttcgacccacaattcttcttcaatcgccgggcgtagccgtctgggcataaatcctcaacgtgtccatcatttgctaagtcagcgagaacaattggctgctgaggcacaacaggaaatggagtatattgttgcttctcagttaaacaacttcccttatacaaaaaagcaggtccacaatctaagtcaacaatattatttcgcagtacctgaatactatcgaaatagcatttgtgaggcactggaggattaccagggtgcgcacggagataatgttctaatgaatattgctgctatggggttttcggatatccaatcttacttaaaaaaacgtgatcctttatttgtaaacgagagcgaagtggatgagtttatgacggattttggtcatcattacggtgcatttacaggaatggatgatgaggaagatgagcttgaagagcttaaatcaagaatagatgatcgccttatggagctcacccggaaactggatcattacttacataatgcaccacgccttcgggatggtattcctttgataaaaggggtcacagggggagataaccctatcacgacgcaaatgaatggaagtgaaatgctggcatccgttctgcggggggatgcattgcattttaacggcttcctaagcaccagctcaaattacgatgttgcgctggagttttgtggaaaaatgccctccacggcgttggggggggcgtgctatgttattgacttaacaaaagatgatgagaaaaatgaaatactcagacgtcatgcttcgagtgaactacaaaaaggcaatgtagataccggctcattgcttttcttgtttaaagcgaataacgtcgctggcatcagtattaatgctacgcaacatgccgaaaaccctggtagtgatgagcatcgtctgagtcatgaggatgaagttctaatggcacctggacatttctttatgccggaaaagatcattataaatgaaagcggtgttgctctttttggtagcctgaattatgggcgttaa

SEQ ID NO: 431482 - DNA, 810 bp, Serratia marcescens
atgaaccctctgcaacctgggcgttcagtgccgcgccagccagcccttgccggagagccttcgggacaggatacgccttcaaccccagccttacctgcagccttacaggtgggtgaccacaccttcccggtcgggcgtgttgttacggcgctgtccggctttgaaactgaacttttgcatcatgcactccacggcgacacgccaaaagagccgctatcggattcccccgatagcgatggcgtattctcttacaccctgggggcaaaggactattttgacgacgggcgtttgcctgcatacttccctgaacggatgatggccacctgcgcccttaacgcaacctctgggttagagcaaatgattatccgcgatatgcacagcgagaatatctactgccatgcccattttgattcctcagccacggcacagcgctcagaacctgaggccgtcactttccaggcaagccaatgtaaacacaaaccgggtggaatgatcagtctggagacctttacagggtgtgacgtaacggacgatgaactggggcgtggcgacaagaaagccaaagtcagggttcagtcgcgaaaaagtcgctataaaaaagcccaggagctcggtgtcacgacgtttgctgatgttgaccggatgcaaaaagacattcatgccaaaaacagtggttttaccagccggcaagaggctaatcgggcctacagagacaaccaggccaaagcaaaaggctatatcgactggaatgatgaacagcgagctctataccattccagaaaaacagcgcccaatacagagaacacttag

SEQ ID NO: 431483 - DNA, 870 bp, Serratia marcescens
atgaaccctctgcaacctgggcgttcaatgccgcgccagacagcccttgccggagagccttcgggacaggatacgccttcacccccagccttacctgcggctttacaggtgggtgaccacaccttcccggtcgggcgtgttgttacggcgctgtccggctttgaaactgaacttttgcatcatgcactccacggcgacacgccaaaagagccgctatcggattcccccgatagcgatggcgtattctcttacaccctgggggcaaaggactattttgacgacgggcgtttgcctgcatacttccctgaacggatgatggccacctgcgcccttaacgcaacctctgggttagagcaaatgattatccgcgatatgcacagcgagaatatctactgccatgcccattttgattcctcagccacggcacagcgctcagagcctgaggccgtcactttccaggcaagccaatgtaaacataaaccgggtggaatgatcagtctggagacctttacagggtgtgacgtaacggacgatgaactgaaacgtagtgaaaaaaaagccaaaagcagggttagttcacggaaaagtctctataaaaaagcccaggagttcggtgtcacaacgtttgctgatgctgaccggagtctaagagatgcacttgccaaaaatagaggcttcaccagccgacaggaggctgagctggcgcaaagaagtgaacgagctaccaggctaggcttcagcagccggcaggaagctcagcgaattgcaaaagataaacgagctaaagcaaggggttatacagatagaaatgaggaacggcaagcaataaaccactccaaaaaagcagcacccaacgcagataacacctag

SEQ ID NO: 431484 - DNA, 654 bp, Serratia marcescens
atgcatatttcccgtctaccacaatcacagatttcgcaaccctcaccactacatcatgccgttgagaatgaagatgccgagaaaattactcagctgcgccatcaaggccagaggccgattttactcaattcacagcgagaatcgccaattgatgtgttggataaaaaaacgcatttggacaaaaccctacgcgacaagcttcacagttccctgcttggatcacttaatcccactgcgcctgctggatataaaaaacccgaagcgttgcacggtacaccatggggactggagatattgaagtccggggcattaaaaggtggagtcaacgatgccaaaggcggacggcagtcgctagagggaaaagtttttttctctgaccgcacgcctgaaacgcaaaacagcaataccacacgtgccaacctgcgcgctaaaccacgaacttatgggcggggtgcatcaatgcaaatctctggcgtggcgtctcgcgccattcagcaccgcatgagcatggtaataaaccagcaactttcccaaggaagaacgctgaatcacaacaccacctctgcggcaatcaagctcaatgatcagaccaacgaaccggaagctcttgccagctggctgcagaatataatttatgcacaaacccttacctaa

SEQ ID NO: 431485 - DNA, 933 bp, Serratia marcescens
atgtctgtcgatatttcctcgttttaccgtcccacgcagggctggaacagcgctccggcaacggacgacaaggtttgggctccgacctctgctgacgagcgcgcaggtggcgcggtacagttctcagtgcccttcgtcggcggtagcgtcaacttcggcgcgccgagcagcaatagtgcctcgtcgccagacggtggcagcgatgcctcgtccggcaacgacgaaacgctcagcaaattgattcacgccctactcagtcaggtgctggcgcggctgctccagggtcagaatggcgaacatgcgccgccgagtagtacatcgccaacccctgagccaagcgcccccagcaaagacgccccgccgtcatccggtaccaacgggtcatcgtccggcaacggaccgcatacctttaatatcaccaatacccaggatcacgacatcagcatcggtcagttcgatcagcataatcagttggtcggcgagttgcgactgaaaccaggcgagagcgggcagatgcactatcagaacgactttaccgggctgctgaaacaggccgacgccgacggcaactatcaggacagcgccagcaggctggagttttataatggcttcgtcaacaccagtgacatcgacggccgcaacgctgctatctacgccaccgaccatcaaggctttgagatcggtgaccagcagagcattgccgaccacgcgccagcggggatcgtcacacaggattcggccggcaataagaccatcgctggttattacgacggcagcaccgacaccatgcgccagggcggacagtttatgaccgacacgctcggcaccggcatgacctatatgcacccggacgacgatcggctgccacaggggcaaaatccgatgcgtcataccgatgccatgatgttggacgtcaccttcggtaaggcctaa

SEQ ID NO: 431486 - DNA, 1203 bp, Serratia marcescens
atgttcatttcgacaccgtttaaaaacgggatggccacgattaccgtggactcgtttttattttccttcacctactttatgacgctggcgattttggcactctatatggatgcctaccttggccttactgcactggaaacggccagtattgtcatggtgtcatccattggctccaaggtcacccgcctgttgatttcgccattcctcgatgtgatgacgccggcctatgtcgtctctctctctgccttggtcatgagcctgagctgcttgatgatcgcactgtcacagcaatatctggtgctgctgtgcgctatcggcacgttcgggattgcctatggaacgaacagcatactgatccgagccgtcgccggcgcgacagaaaacgcgcaccaacgtgccgcaatttttgtccgcttgtccgttatcaccaatctggcgtcaatgttggcgccattaatcgctctctatctttataatcacgtttctccccggctgccgttcctcattgcttccgcactgatgttctgctttgcactggtcgtggtctggggacgcgccttctggccgacgctggcagcgcagaaaaagtggacccatgcactgcgtgaacagctgcataacgtcacattgcgtcactattttctgctcacggcgctatgctggatgatttattcacaattgtttacctctttgccgctgcaggttaaccaactgctggacgataccagccagttcggctatctgctgacattcaacgccatcttgtcgatcctattggccccccggcttcaggcactgttcacccgctataacgtcaatgcgtttcaaacgctgtgcttttcgctgatagcccatgccgcaggctctttatggctgcattatgcgacaacgcaaacggaactctacctcgcactctttgtctggacgctgggtgagttgctgctgatcccgacgttgcaaagctgcatttccggctatgcggcgaaagatattctgatcagcgtgctggccatcaattcggttgccatgggcattggcgaaggtgcgggcggatttctcggtatttatttaatcaaaaattccggttactgcttcctgattttcagtgttctgaccctgtttacgttagggtatgttatagccttcagggccttattttcgccgaatgatgaattggtagcccagaataaaccggtgagttga

SEQ ID NO: 431487 - DNA, 1230 bp, Serratia marcescens
atgaaaaatgtcctcatcttattcggttgcgcctcacaccgtcaggggccccgcgccattgctcaggctcagtctctgggtttggatattattctggtcgatactcatgagaatctcgccaatctgtcgtccagaacgctaccgcaggttcccgcttatgccgttaaatcaaaaaactacgatgaatgcttgccgcagataaaaacgctgtgcgccacattcccggtagtgggcatttacacgttcgaagagtactcggtggaaacctgctcacaactctgtgccacgtttggctttgcccacaattccacggacgccatcttgcgaattcgcaacaaaaacctctgtcgccagatcttggccgaacacggtttgccgcagccggagtcacgcatttttaacggtctggaaccggcggaagagtttttaaacgcacgggcccccgccgattggatcctgaaacctatcgacgcctccggtagccagggcgtcagccgcatcacccataactcgatacgggatctgtattacgccttttcccgtttgctgcccgagcaacagcaacaattcctgattgagcgttttattgaaggcagagaattcagcctggagggattcttccaccgcggcaaagccgtctttcaagggatcacggagaaaagcctaaaacccggcggcgcttttgtagaagacatgcatgtcttccccgctgcgttgccgacagaaacgcgagacggcgtttatgccctggcacaacaggccctggagtgcatcggtctgacgtttggacattttcacctggaattttggctcacggatgaaaatatcatcatcggagaaatgcacggccgtccaggcggtgactacattcatctgttgacggagatcgctacggggatccccacttatgcggcggtattcgaacagtatttgccgttatcctcccgcggtaacgccactcctccggcgatcgcctacggctgtgccgccgcggtgaaatactttgatgctcccgagggaaaactaaaggcgatccatggtctggagaacgtgcggcaaaatacccaggttttgctgacggaactgatggttaaacccggagaaacgctcgtgccctgtacggactccggcaagcgggcagggtgtgtcgttgttcgcgaggcaaatagcgataaagcaagacaaacagcaatggagatggcggcacatgttcatttcgacaccgtttaa

SEQ ID NO: 431488 - DNA, 1239 bp, Serratia marcescens
atgaacaactgcattttgtacattaacggccgacaaaacccccatgagcggttggcggagatgcgggcggcacgcgctttaggtttgagtattatcctgatggccaaacagatccccgcctatgccgcggagttggctgacgagaccgcgctggtcgacttggacgacttcgccgcctgcctcacggttgcccgttcgttgcaccagaaatatgcgtttagcggcatcgtctgctggtctgaaaccgacgtgccgttaaagaacttccttgcccgagagctgcatttggcggcgatgagtgaacaggcagtgcgacatagccgcgataaaattgcgatgaaacagcggctgcaacaccttggccccatgatccccgctttccggaaagtcactaccctgaaagatgcgcaacaggcagccaggcaatggggttatccggttatcgtcaaacccgcctcgggttccgggtcaaaaggcatctttaaggtaagcgacgacggtgagttagcgcaggcgctggcgcagcttgccaatatcgctaccgataccttcgataccgtctttagcgccttcggagggcagattatcctggaggagtttgttgacgggccggagtttagcgttgacggctatgtggcagacgagcagattaccgtcatcggcattaccgactaccagtcagaccccgtcacctttgtggaaaaccgccatattttcccttctcatcatagcgatgacattcaggaagagataacagagtgcgcccgtaagattgtgcgcgagctcgggattaatcacacggttttccacctcgaaggcaagtattcgagcaaggggttcaaatttatcgaatgcgccgccaggcctgcgggggggtacatctcaacccatctgttgcagtacgccagccgctaccagcacctacaaaattacgttcaactctgccgcggccttcaccccgccgatctgcagctcagcggcgattttatcggcgtacgctatctgtttgctgaaaaggccggcacgttgcagagcgttgacaacgttgcccgagtgctcaaccaccccgccattcagcatctgtatttacattttgcaccgggacacgcggtgacattgccgcctgaagattacagcgcttaccggctcggcgtgctgattgccaccggcgagagctatcaacagcttgccgataccctggaatgggcggccgaacaaatcaggtttactattcaatga

SEQ ID NO: 431489 - DNA, 780 bp, Serratia marcescens
atgaaaacaggtgttatctcggatattcatgaagatgtggttagactcgaagagtcgctgaaattgttggaaaaactcggggtcgatgaggtggtctgcctgggtgacattgtgggttactccgtgcccttttatggttatttggcaacgcgagatgccaaccgctgcctgacgttggtgcagcagtgctgctccgaggttgttatcggcaaccatgatctctttgcgatccgcaaaatcccctccgcagcggcaggcttcaactatccggccaattggtatcaacttgacttctcactgcgtaagacattggccaaaaatagaatttttttgtacgaagaccatgagttaccgagcctgctgaatgacaatagcctcagctatctgcactctctgcctgaaaccatcgttaagccgttccgtactcacaatgtcttgctgtctcactatgccttgcccgacctgaccggctcatgcacttttgaagtcaaccaccatcacgatcttgccgcacatttcgctttgatggaggaacgtcattgccgacatgggctttccggcaatgaccatattccgggtatgaaaattttcacccctgaacgtgtcgtacaaacgggtttcgaaaggtacgagttgggatcctgccccacctggatcaccggaccgacagtctccagaggcaccatggcgaacggcatcatgatctatgacagcgatgagatgactctttccgctatcgcgctgggcacgccgttacatcagatccccaccagtatctga

SEQ ID NO: 431490 - DNA, 1065 bp, Serratia marcescens
atgatcacgatgacaaacacccgtgcggataaagccaagctgtcgttgatggcagttgaaaaaacgcgtgtcaagcaagcattcacgtcggcgtttaccgcggctggttttgcttttcacccgcctgacgcgctgatacccagccatgacaagtccaccctatttaccggctccactatcagtaccttcaagccctacctgcttcagcatgcggagtatgagctgaaacccatgtttaccgtgcaggactgtctgcgcacgcagaacaatcatgcgctgcagctggctaacagctaccccaaatggtcatcgctgttttgtagcgtcggcgctatcgggagataccaagatcggtttctcatcacccaggcattgcacgctttcatgactcagttggggcttaacgcgccggatcgcctgcggatcaacatctcaagtcaggatcatgaccttatcgagattctgacggcggaaggcatgtcgcattaccttcattttgacagccactcccccgcgtactatcaccataagttcggaatggacggagtcaccggccgtaattgcaatctggccgtcagttgcgatggcggcgcgtttatggatattggcaacctaatcgtgatagaaacgccgcaggcgcctctcgccgtggaagcggcattcggggtggaaaccatcatcacccgtctgcatgggctgagcagctccattctcgctctaagcgccgcgccgcgcttctctcatttttctgcggaagaactgtacattatcgatgcgctgatcgcctgcgtggccatcatgtcactcgatatccggccgatagcggataaccgcggccgggtcttgcggcgttatcttcaaggcctcaacaggttgcgcttaaacgtcgccatgtcgctcgattttatcgtagacgtcgccagggagttcgaagccagccattacggcactcagcatatctacacgcgtattgaacaatatctgcatcaacatacgcggcttgcaggccaagagcatacgatgccggccatgaataggcatatttcccgcagcttgtataaataa

SEQ ID NO: 431491 - DNA, 513 bp, Serratia marcescens
atgattcttaccggcagcgaaattaaaaagagaaacgcctgtaacgatattaccattgcgccatttaacgaaggccagctcaatccaaacagctacaactatcgtttggggcccaagttgggcattccacgcatccagggcgagaacgtcacgttcgattttatcgatatcccgcccgaaggctatgtgatggaggccggtaccacctacctgggccataccctggaaattcttggcagcgataagtttgcgatgtcgctgatcggacgcagctcgttaggacgtctgggcttgtttttgcaggtttcagccaatcttggtcataccggcgcatgtcatcagtggacgttggagctcgtcgcggctcgtccgttccgtctctatcccggtatgcggataggccagatatctttctgggtcaatcaaggggccctggggctgtatcacggcggatattccgcctataacaacccgcaggtgtcgaaaatcatgccattggttgaatccgtatga

SEQ ID NO: 431492 - DNA, 381 bp, Serratia marcescens
atggatcccaaaaaggaaaatcgtcatgacattatcgaatgcggtgcggaaggaattatgctgaataaaggcgattttgtattagcccacagcgtggaaactttgggcagcaataaatacgtccctatcattcatgccaaatcaagcatcgccagactggggttgtttgtgcatgttacagcggacttaattgatatagggtcattcggctgcgtaacttttcaattgcacagtacattgcctatcaggctgttccctggaatgaagataggccaggtaaccttctggaaaccgttgggcgatatcattccctacaatgggaaatatcaaggttctgaagggccacgggtctctctggcctattcagacttcaagcagtaa

SEQ ID NO: 431493 - DNA, 789 bp, Serratia marcescens
gtgcctatccataacccgatctggcagcaggaagagctcgccggtaatatagagtacaatcaagatctggcttcaataatcaagagaaatgcatggcatggcctctttgagtcgcctaaatggattttgatgaatcccgccgacgaagtcatagacttttaccataaatatatcgtcaacccttccctggcattacgccaacggttttctttgacaggaaataagctccacgacctgggttgcggcggcggccgtcatttattttatttcaatgaacgcggttttgacgtgacaggaagcgatctttctgaaaatgccattgcgtttactcaagcagaattggcacgccgtcagcaaactgcggagttggtcctttgccccatgaccgaactgccgtttgagaatgatactttcgatatcaccatttcgcgcgcagtgataaaccacgcgtctttacaggacgtcaaaaaaactatttttgaagttgcccgaaccaccaaaaaaggtgggttattcttcgtcaccttctcttcagaacgcgcatcagactggaaaaaaggcacggaagtcgaagaagacgtctcctatatcccggagtcgggccctgaaaaaggcttgattcacaccttcctcaatgcggccaacaccgccgctttgctggaaccgtttttccgtatcgaagaaatatacctttacgagcacccttcctgggtaaccgatgcaccaggcgcttccgatcccaatgaatattttgggtctgaatatgtcgccatttgcgtacgtcgctaa

SEQ ID NO: 431494 - DNA, 2100 bp, Serratia marcescens
atgaataagctctcgttcaaaaaattggttagccagttggatctgcggctgcgccaccgggttccgatggtgcatcagaccgagtcttcggagtgcggactcgcttgtctggcgatgatttgtggccactatggcaaaaatatcgacctgatcgcgctgcgccgacagttcaatctgtcaacccgcggtgccacattggctggattgagcggtattgccgaacagctggggttgagtacccgccctctgtcgctggatctgaacgaacttggcgcactgaaaatgccttgtctgttgcactgggaattcaaccactttgtggttctggttagtgtcaaaggccaccgcgcagtgctgcatgatccggcgcgcgggcgccgaactgtcagcctgacggaactgtcgcacagcttcaccggcgtagcgcttgaggcctggcccggcagcgcctttaccgccgacagcgttcgccaccgcatacacctgcgtacgctgattggcagcgtacacggtctcaagggggcgctcggcaaaatcttttgcctgtctctggtgttcgaaaccatcaacctggtgatgcccatcggcacgcagctggtgatggatcacgccattcctgctggcgatcgcgggttactgacgctcatctgcgccgggttgatgctgtttatcttgttgagggctgccatcggcatggtgcgttcctggtccggactggtcatggcaacgcttatcaacgttcagtggcagtccgggttgtttacccacctgctgcgcctgccactcggttactttgaacgtcgtaagctgggtgacattcagtcacgcttcggttcactggatacgttgcgtagcactttcaccaccagtatcgtcggcgccatcatggacggcatcatggtgatcggcgtgctggtgatgatggtactgtatggcggctggctgacctgggtagtgctcactttcaccgcgctttatgtgttgatgcggctgcttacctatggatattaccgtcagctgtccgaggaggcgctggtgagagaggctcgggccggctcgtattttatggaaacgctgtacggtatcgctaccgtcaaaatgcagggtatggcagaacgccgcatcgctcactggctaaaccttgaaattgataccatcaacacgggtatccgtgtcacgaggatggacatgctgtttggcgggatcaacaccttcatagcggcgtgtgaccagatcgtcattctgtggctgggaaccagcctagtgatcgataaccagatgaccatcggcatgttcgtggcgttcggcgcctttcggggccagttctccgaccgcatcgggtcgctgacggaatttttgctgcagctgcgcatgatgagcctgcataatgaacgtattgctgatatcgccctccatccgcgggaggaccgcaaacctgaccttccttatgcaccggacttaaagcctctgggattgatgacccatgctctgagttatcgttacgacagtcagtcaccggctatttttgatggcctggacatcagcgttgcgccgggcgaaagcgtggccatcgtgggtccgtccggtgctggtaagacaacgttaatgaaggtgctatgtgggctgtttcccccggatgcagggcgtgttgaggtaaatggtatagatatccgccagatcggcattaataattaccacaagatgattgcctgtgtgatgcaggacgataaattgttctccggctcgatccgagaaaacatttgcgggttcgcggacgagatggacgatgcttggatggaagcctgtgcccgtgccagctatctgcatgaagtgattttacgcatgcctatgggatatgaaacactgattggcgaactaggggaggggctgtccggtgggcaaaagcaacgattgttcattgccagagccatttacaagaagccggcaattttgtttctggacgaggccaccagtgcgttggatcaggaaagtgaagcgagtgtgaatcaggcgataaaggcgcttagcattacgcgggtgatcattgctcaccgagaaacgacgattgcttccgccgatagagttatccgattagtctag

SEQ ID NO: 431495 - DNA, 1275 bp, Serratia marcescens
ttgtttcgccaggaagcgatcgataatcagaaaatgaaatggcgtggtcgggcattgctgttgcctggcattcccttttggctcacggcagggctcagcctcttttttctcgttgcttttctcaccttcgttatcgccggcacttatacccggcggatcaatgtgaccggagagatcagcacctatccccgcgcggctaacgtttactccacggttcaaggggtagtggtcaaacaatttgtcaccgaagggcaggtgatcaccgttggtgcccccatttaccagattgacgtcagcaaaagcacacgcagtggtgtagtcagtgataaccagagacgggatatcaatggccagttggcacgcattgcgcaaatcatcagccgactggaaagcagcaagcaggccacgctcatcatgctggaacaacagaaggcgcaatacaccgctgcattcacccgttccaccgatatcctcaaacgtgcccaggaagggatacgtatcatgaaggaaaacatggagaactaccggcactatcagaccaaggggctgatcaataaggatcaactcaccaatcaggtggcgctgtattaccagcagcaaaataacctgctgggcttgtccggccagaacgaacagaatgccctgcagatcactgcgctggaaagccaaatccatattcaggctgccgaatttgacaatcagatttaccagatggagctgcaacgttatgagctgcaaaaggagttgctcaacatcgatgccggcggggagatcatcgttcgtgcgctggccgacggtcgcgtcgattcgctgagcgtcacggttggccaaatggtcaacgtaggcgacagcctattgcaggtacttccccatgacatcgatcactatgccctggtgctctgggtgcctaacgacgccatcccttacatcgccgccggcgataaagttaatgtgcgctatgacgcctttccggcggagaaattcggccagttcgccggtacggtggccgtcatctccaaagccccggcctcgccgcaggaaatgctgacctaccagggagcgcccaaagcggcgctgaccgctgccgtgccgtactacaaggtgatcgttatcccggaaaaacaatccattgcttacgacggtaaacgtctgagcctggaaaacggcatgaaagcgcaaagcaccctgtttctggaaaaaaggaagatttatcaatggatgctgtcaccgttctacgacatgaagcacagtgcaacggggccggtcaatgaataa

SEQ ID NO: 431496 - DNA, 492 bp, Serratia marcescens
atgaagttgttccatggaaccaaattcactttcgataccttcagcgttgactaccctggcactggtgaaaacggtaaaattcacgcgatctggtttgctaataacttttctgcagcacgtaatcatgcttggcgggtgggcaactatagtcagtgctgggtttatgaatgcgaattggcagaggacgccatactgatgaaagcagatattccgctcagccaacaacctatcattcagaaaaagctaaccaacgttttgcctgtttgtatttcggtacagccctattacgataaacttttttcagattatttccagtttaacaaaattgatcagggtcatcatgaagaacatgaaataaatttattacgcttcgcaggtattgatgccatttatgattatgagcgtggatggcaagataaccatttacacggagttaccacggtagtgcttgcgccggaaaaaatacgtattttggcagtccatagcgtgtaa

SEQ ID NO: 431497 - DNA, 1086 bp, Serratia marcescens
atggctaacatcgatgtagactattgctactcatttccagcgatacgcggcattcaagcaggtaaacccttctatgtcgctatgtgtcgtatgcgcgtcattcccaaaatttttaactttgatgaaaatgaagtgcctccagagctacgagcccagcgagtcttgaacaagtcacgcattcctgaaatgacaagatatctaattgaaaatccaaatgattatatcttttcagcactgactgcttcaattgccattgatatacagtttgatgaattccccggatccaacaatcttggaacgctacgagtgccaatggaagcacagatcctaatcaatgacggacaacatcgccgcaaggcaatcgaagacgctctagagcaacgtccagaactgggccaagataacatcccagtgctattttttgtcgatgaagggctaaaacgtagccaacagatgtttgccgatctgaacaaatatgccattcgtcctagcccttcgttatccgctctatacgatcatcgtgacattagttcaaatcttgctcgctacttagcgatgtcagttcaaccgtttgtcgggctgactgaaatggagaaatctagtatcagcacgttatccaacaaactgtttaccctcagcagcattaaacaggctactcgggcactattgggtagagagccaaaagaagacgactttgacgaaagcactcagatcgctgcactgtactggcaaactacgtttcaaatgatgccagattggcagttggcagttaaaaaggaagtttccccaacacaattacgtcaagattacgtccatgcgcatggtatagggcttcaggctttgggattgctggggcgtagcctactggagatacaccccgactgctggcaggaaaaaatgcttaaactgaaagaattcaactggcgtaagagcaatccggaacttattaagcgagcaatgcagcacggtaaactgagcaagtctagtaccgccattcagttaacttctaatgcattaaaaacggcactatcccttccactcactcctgaagaacaggagcttgaagcccaaatggttgtatcatga

SEQ ID NO: 431498 - DNA, 1635 bp, Serratia marcescens
atgagtaaattggttcaggccttcgaactggccgagtacgaagactttattaatcaggagcagttcgctggacgcccgctgtccgaatatgttgctgaagtacagagaatttattgcgcggataaacgtccgtgggtgattggctacagtggtggcaaagactcttcagcggttattactctggtatatctagctttactgggactccctcccgagatgcgcagtaaagatgttttcttagtgtcatctgacacgcttgtagaaacgccagttgtggttgatctgattaagaaaaccatgttgcagatagaggccggtgcaaagcgcgatcgtctgcccataactcaacatgcagtcattccaaaaaccaatgaaaccttctgggtcaatctactggggaaaggttatcctgcacctacacgtagttttcgctggtgtaccgaacgaatgaagatcaatccggtcagcgattttattaaagacaaagtcagccagtttgatgaagtaattgtagtgttaggctcgcgaagcagcgaaagcgcttctcgtgcgcaggtgatcgcgaagcataaaattgatggttcacgccttgcccgacacaccacgttggcgaatgcgtttatctatactcctattgataattgggatgtagaagacgtctggaaattgttgcgcggtgcgtttcgttatgcaccagatgatatcgatgaatgggaaagcccatggggtggaaacaatcgccctctgtggacgctctacatggattcttcagcgcaaggcgaatgcccattggtgatcgatgacagcactccatcctgcggtaattcgcgctttggttgctggacctgtaccgtcgttaccaaagataaggccatggagagcctaatacagaatggtgaagattggatgtctccgctactaaagtaccgcgatctgttggcattcacgaccgatccagttaataaagacactttccgtaattacaaacgtcgaaccggtaaagttagttaccaatacgctaaagatggcgaagaaatcagcgcagaacggaagcatgtccctggcccttactggcttaaataccgtcagcaatggctgaaagaattgctggttattgagcgtgatttgaacgctcaggggcacacaattaccttaattactgagccagagctgcacgccatccgccaagaatggctgaaagaccccaatgaaccggattggcacgatactttgccaggtatctatcgcgaggtataccgtaaagatttagattggatagtagatgatcaatctcgttttgatgccagtgatgccgatttactcgcccaaatagcccaagggtttgatgtcgttcccgagatggtgatgaagttaattgaactggaagtttcaatggaggggctaagccgtcgtcagggtatttttgacaaactcggtacaattctcaagcaggattggggaagcttggaagaaattaaagagcaacagataatgttgcagaaacgcaacgaaagggatattcaccaagaagagatcgccaaactggaagcggagcttcaagtcttacagcacagaattaacgatgctggtgaagcattcccccctaccagagaggaaaacgaatatgctcattaa

SEQ ID NO: 431499 - DNA, 2001 bp, Serratia marcescens
atgctcattaaacagctggtattacataacttccgagtttttaatggcactcacacgatcgatctagccccccgaaaacgccgacatgatgataatccacgtccaattattttgtttggcggcctaaacggggcaggaaaaacctcgatcttatcggctatccggcttgcgctatatggccgcttagcatttggcccagcgactcaacagcaggagtatatcgaacatctcagctcgttaatccataatggggcgcataacattgaacgtcccacagaagcagctatagagttgacctttacctataataaagatgggtatgaatcagagttcacggtacagcgaacctggaaaaacggccataaagatcgcctatatctacaacaagatggtaaagttcttaatgaactaaatgatgaccaatgccaggggtttcttaatgaattaattccccatggtattgccgaccttttcttcttcgatggagagaaaattgcagagctagcggaagatgaatccggaactatactacgaactgccgttcgccgtttattgggcctagatcttatatccaagctgcgtaatgacttaatgatttttgttaaacgtcaacaatctagtcagctagcagactctcagcagcaacagcttgctgatctggaagttcaaattaaacagctagactatcaaactgaagaaattctggaaaaagccgattttactaaaacgcggttcgattttctttctaaagatattatccgttacgaagggctgttgaatgcgcaaggtggggcttttgcccacaccaaaacgcaggaaaaacaaaaagtcgaaacattgctaaaagacaaggagcgtttggaaaaggctctgcgtcaagaatgcgatggttcactgccctatgccctagctccaaataccttgtctcggctgctgcagcaaattgataatgaaacacagatcaaacaggcaagaaattttgagaaagaattaagcctgtttctagcacaactcaaaaacgacatagcgtttcgttctgaaagcactggaagaatagccgctgaatctattgctgataatcttaaagactacatggcgagtaagccgaaaggcgatttgctgtttgatatttcagaacgagaagcagggatgctccagcaatctattgagaaggacagcaaaaatgcatggcaacgttttgatctttatagaaaacagttgactgacgttgaacaacagttagaacaggctgctgcaaatatcgctcgcgctccagaagacgaacagcttctagatatttttgaaaagctacgggatcttgatcggcagcgagaagctctaggtcagaaatatcactctctattagaagatgctaagcatacaaaacagaaacaacttgattgcgttcgtcaggttcaaaaaatacatgataccgtgcgcaatcagcatgattttagcagcgcgtacaaaaatgctcaggaaacgataaagttacttgatagctatagcgaagtattaattcaagcacgagtaagaacactatcaacaaactttgaactcgcctatcgaaaactggcacgtaaggaagatttgcaactaaattcgcatatcaatccggagacatttgatgttgaacttgtcgatgataaaggttccatcattaaccgtaaattgctttctgctggcgaaaaacagatttatgctattgcgatccttgaggccctagcaaaaacctctggtcgtgatttaccagtgattattgatactccgttaggacgcctggattctaaacaccgggataagctgattaacaattactttccagaagcaagccatcaagttgtgctgttatctactgatacagaagtagatgaacgttattttgtcgatcaattgcgtgatgatatttctcacgcttacgagatcgtttttaatgcacataccaagtcatctacactgaaacccggctatttctgggaattaactaaggaggccatctga

SEQ ID NO: 431500 - DNA, 354 bp, Serratia marcescens
atgctcccgaatcgaatggtgcttagtcatcagactgaagaacagcttaaaaagttaaaaggatatacaggtataacgcccaatgttgccgcccgcctggcatttttccgttctgtggagggcgagtttcgctatatccctgatcgggataataagaagctggatggtgcgatgacgctggataaaattacatggctgggggaaacgctgcaagctacagagttgatgttaaaaatgctttaccctcaactaacgcaaaaggattttataaaagcttgggcagcgcatgttgaagatggcatagcgggattgagaaattatcgtacattgttatctttagccaaagccttataa

SEQ ID NO: 431501 - DNA, 534 bp, Serratia marcescens
atgagcacctggcgcccgtgcgaccaggtggagtcggcggtggcgtggcagtacggcatcgagcgcaacgacggcccgaccaccctggtgttctcgcgtcagaacctgacccagcagccgcgcaccgcagagcagctggcgaacgtgtaccgcggcggttacgtgctgaaagactgcgcgggcacgccggacgtcatcctgattgccaccggctccgaagtgggcatcacggtggaagcggcggacaagctgaccgcggcgggccgcaaggtgcgggtggtgtcgatgccgtcgaccgacgcgttcgacaagcaggatgcggcgtaccgcgagtcggtgttgccggcggcggtaacggcgcgcgtggcggtggaagcgggtattgcggactactggtacaagtacgtgggcctgaacggcgccatcgtgggcatgaccaccttcggtgagtcggcgccggcggagcagctgttcgccgagttcggcttcaccgtggacaacgtggtggccaaggcgcaggcgctgctgaagtaa

SEQ ID NO: 431502 - DNA, 654 bp, Serratia marcescens
atgaatgattcccagaacggaatgctgtttgtcgcgacggatgtcgccacgcaggatgatgcggatttcaatcgctggtatgaccgcgaacatgtggaggagcgagtgcgggtgcccggctttttatccggcacacgctatcgggcattgcagggggggcgtcaatatttggggttgtataaaaccgaatcgttggccagtttcacttccgaagcctatcgcgccgcgtttcaacaccaaacgccatggtcggtggccagcctggagaaaatgcgtgatccaatgcgccgagtgtgtgcggtggaggcggtcactggccaagggtgcggcagtcatctctgtatcttcgtgctgccgtcggcggcatcggaagcgctgcatgcccgcatttcgcaactgggcgcgcagctggctgaacagcccggattcgtgcgcagcagcctattgacgccggatgccgaactcagttccccactgccgaaagaatcgcgagaaaaccgccgaatgctaccgatgctattgatcgaaagcagcgacgccgaagccggcctgcgtttaagcgagcaggccgctgaagcgctgaacatgtccgccgccgatgcctggcactatgtccttggctggcaactgaccgcacaggagttgacatcatga

SEQ ID NO: 431503 - DNA, 822 bp, Serratia marcescens
atgtctgaagagaactcgcaaacaaaaaccagtcaagtcactgatattgttcatgctgtggcagcggtcaccaaagaggtgccaatctaccaagatgctatacagcctgcggcacaagaagtgggtaaggctttaggtaccgttgcaaaattagtaaacgttgcattggctccagttagtgctttggtatggggctatgaccaaataaaagagtttaccgccaccaaagttgccagaaaactagaaaatgtccctccagaaaacattatcacaccaaaacctaatgttgcaggccctgctattgaagcgttacgctatacaggacatgaagaatcattaagcgaaatgtatgccaatttattggccacagcaatgaataaagatacgatagagaatgctcacccggcttttgtggaaataattaaacaattaacgcctgatgaagcaaaaataataaatttatttcttgattcaggagttgtttttccgataattactatgcaatcagaagggaatggtaagtctgcgggtacgaacaatgtctatgagaattactctcatataggaataaaggctggttgcgataaccctcacctaacccccgcatacttaaataatttatgccgattaggattgtgtgagattcctaatgggcaatactattttattgaagaacactacaatgacttattgtcatctgattttctcaatggtttcaagaaagaaatagaaagcagcggtcttaaatttaagtatgataaatcctacctacatataacaaccctagggaaacaatttgcgaaggcatgcacaaataaataa

SEQ ID NO: 431504 - DNA, 1227 bp, Serratia marcescens
atgaaggaaaagttttcatattgctttgaaccaagaggaaatgatttggattcaatatggaaagaaggtatcctaacggttgatactaatgtcttactagacctttacagatatcacgaaaatacaagggatagtatagtttcgaatctagaaaaattcgaaggtgagctttggctttcgcatcaagctgcttctgagttttttagaaacagaaaaaaagtgattacatcatctgaaaagacatttaaagatgctattgctgaaactgataatttaagtaaaagtctcgatggcatagttagtaaactcaaaggcaatagaattataccaaatacaattgctgaagagttaagagaggccgttgataaagcaattgaaagcactaaaggaaaaattaaagaatcaaaagaatcttaccctaagtatcttgaagatgaccctattttagaaagaatctcaaaactatttaatgataaaattggagaggagccacaagatctgggtgaggatattaaacaagcggaaaagagagtcgaagataaaatccctccaggatataaagatatagataaggatgatgatagaccttatggtgattatttgctttggaaacaatctctcgattattcaaagaaaacgaagaaaccacttatattgattacatcggaacgaaaagaagactggtgggaaattatacaagggaaaaccgtagggccgaggcctgaacttcttaaagaagctaatgaagttaccggcaatcatgtgttgatttatcaaacagaaaacttcatcaaaatagcctcaaaaaaatatggtgaacctgccaatacagcggttattgatgaaataatagcggttggtaaacaaagaacaaacgatagcgagagcgcggtttcattaattagccacagcttaaatgagaatacaactcactctaatgtggggttgataaaagtagagttaaaacgtgaggtcaaaaactttacagttagtagagggttaactcctaacttagattcagcgcctcatatgattgttaatttattatcttcgccacatgataatatcgaatataaagttagtggttccacagggactgtatatgactttaatatacatatacactcaaaaaatagccattacttacctattggtatttatgagtttgaatacattgcgaaagtggagaaccaagacaccgaagctggtttggatgtatcaccgtaa

SEQ ID NO: 431505 - DNA, 369 bp, Serratia marcescens
atggatcacttccgagaagcgatcaaaaagggtgatcgcagcgccttcaaaacgctgccggcaaaaggctataaaaacggacttaccgggctgctcatcaaaactaacacctacgttaaccccgaatatagctttgctgattgcgatacggacaccgttattatctcggtgcaagaacacaaaacgctccctggttgccgcatatctctaaagctagcgactaaagattctgacggtagctatcacgataatggcattcgcatcgaatacagtattgcgaccggctccaaaaagtttatcgccaacaattcagcgtgggcgcagcatgccattagtggtgataaagtgctggaactttctctcaaatag

SEQ ID NO: 431506 - DNA, 873 bp, Serratia marcescens
ttgaaaaataatcatttaacaccatatgattggctaaatgcgctgaataatcttgaattgctgtcacttcattccgaaattttaacgcagttgcgttttagaggtgtcattcgcaccaagaataatcctgttggcgactatgctgaatggctggtttctaatgcactgggtatgactcttctcagtaattcgtcggcgggtgctgatgccattgatgctgatggcctgaaagtgcagatcaaagctaggagagttacgccggataatccttcccggcagcttagtgccttgcgtaactatgaggcagccgattttgattacttaaccgcggttattttcgatgagacttacaacattcttgatgcttacaaaatcccacatgaagtaatacgagattatgcacggcatagtgaccacgttaacgcacatatcgttaacctcaagggcgcgattcttgctgatcctcgtgttacttctatcaaagaaaacttaactgtcgggagttcagcttcagtcaatgaagcggctatgcaaacacttccacccgaacccatggaagaggttttgaatcaaccagagaagataacgagtagtgttaccttggtcagcctccttaaggctatcgggatggagtgctttgtaaactattaccatcattttgccgattcaaatttatcaagcgctgatatcattgagcaaatgcactcacgtgagggttatacagagaaaagttgccggggccgtctcagtaaagcgcgaaaagtgatcagggatggtttaagtattgaggctttgacgttgatcgctgactctgggcgaatacaagattctgtcagaagtaacgcgctaaaacttatcagcgttctggagtga

SEQ ID NO: 431507 - DNA, 285 bp, Serratia marcescens
atgaacgcagggcatgcacagcagattagggaactgattgagctggagtcatttaatccggaaacactgtgctcgggcgagagctggatgacaccttcagccagtgaagtcaacgtggtccgggcgctgatcccgctgacagacatccagctggccaaccggctggatgtggacgaacgcaccatccgcaagtggaaatccggcgagaccagtatggtgttcaccacctggtgctgcctgtgctggctggccgggctggggatgctgctggaagaaccggcttag

SEQ ID NO: 431508 - DNA, 1047 bp, Serratia marcescens
atgagccagcaactgcgcaaacgctctgagattgagaaaaaagtcacggtcggagaggctgttaaggaacaaccacgccagataatcagggacaagagcaccgggcaattcatttccaacgaacgggtggctgaaacgctccctacctatctgatagccatgcagtcgaacacccttatctacaatgatgttgatgtggaagcctttaaccgggaagttcgccagcaggcagcgaggatactggatgcaataaaggatgaacaatttgaaaatgccggcatagcctatcagcagtttatcgaccagtatgatgactgttttgaaatgccttcccctgccggactggctgatgtaagacgacgtggtattgatctctatgcggttctggagcaacacggaaagcgccttgcggaagatatgagtgtaaaaactctgcggaataataatgagaaggaggtaagccgcttttacgccatcaccgaagcccatattaacctctttttctatatactcatgctgaatctggcgcttaataacaagattgacagtgcccagaaacaattgcgcattaagctcggtcatctggaagaacggctcagaacgttgctcagagagtacatctatgccgacagtcgtggtgtcatatacaatggtgaaatagaaggaagcgagacgctttatggctggattttgcttcaacgaaattccctggacgaagcccgggaaatttacaagcgtgatttggggctgaaagaaaccacgagctttgccgagctgcaccatgaggtgatgagcatctaccacaagacaaactacttatctcaaacgccaggaaatcttcgggaagcggcattccgggggcgtaaattatccgatagcagagcagaaattgccctccagctgtgcttctacctgagccaaacagagcaaatccggttctaccttgatgaactgacgcagggcagcgagaaccctgagccggatgacgccaccgtggatgtcaggtcgctcctgattccatcctcccgccagatagccgcgccatga

SEQ ID NO: 431509 - DNA, 345 bp, Serratia marcescens
atggcatttttgaacgacaccgagggaacggttttattcccattccagactgaagtcgcttttgtacgcgcgattttcaataccgctaaacgtcttgccgtcagtgccggggggcacctctgccagaagcaatactggagcgcgtctctctgtgttttgcttcttgtggcttacgtgggacttactgcggtggtgttctgggttatcttgccctggttcaaggcctttgtcgtctcgaaactcgcgatttcggcgtactgtgcctggccagtcaagtgtttgctgctctggggtatcgataagatggttgcaaccatctgtcgaaagtttagcctaatcaaataa

SEQ ID NO: 431510 - DNA, 1002 bp, Serratia marcescens
atggtcgagccactaaatctgcagaccgatgttgtcaggcagcatacagttccccgctttttactcaagcacttcagtacacctgtcaagggaaaacgcctgcggctttacgcctttgacaaggctactggccgagcctattccaccacgcccgacgatgccaccgtgcgtaacacgttttacaaccttgataatcaccctaaacaggccagccttgagccgttgctggggatttacgaacatgaagcggcgccggtaattgccggcctcctggcgcataaagacattcgccggctgactgacgacgatcgctacaagctggccgtgtttgttgcagtgcagcgcgcacgaaccttcggtgagctggagcgtatctcaggcatgatttcagtaattacggataagatggaggcaataggctcgactaaggagcaagcattagaaactctgggcctgtcgtccaggggcgctaccagagacatttttctgcggcaacttgttcagcaggtgtcacatattgatcacctgctgaagaaggactggtatctcctggaaaccagccaggaacatccgctctacgtgtcagacaatccggtggtaatgaagaacagcaacgacttcggtccgtatggcaatatcggtctggccgttcgcgggatacaaatctaccttcccctgtcatcgacgctgatgctggccatgtattgtccttccatccgtgaagaaatggttcgtcataagcagcatcttcagaccctccttgctagagcgccgcacctgatcccgcgtcacatacgcccttttgaaatgctagagcataccaggagttatacagactatcttctcatgccgcttaccccggaccatgtcacgcattacaacgcactgcaggtggagtatgcggagcagtatgtgttctgcggtgaaaacgatttctctctggttgagaggatgctgtcggatgatgagcgttaccggacaggcccgcggtttgcattttag

SEQ ID NO: 431511 - DNA, 1071 bp, Serratia marcescens
atgctcagtcagatgaacctacgctttccgaaatccctgatcgccgccctgaaaaaccgggccgccgccgaagcggtgccggtcaacaccctggccgaacgtctgctgcagcaaacgctggccacctcggtcgccggcgacgaataccgcgcgctctgcgcggcgccgtacaccaccctgggccagctgtaccgcaaggtcgtgcgcgcggaaaccgtcgacggccaggcgctgagccgcgccgaactgcgctggctgttcagccaggcacagatcgcctatcgcgatggccgcgggccggtcaaccgggcgccgctgtccgcgctgctgctgatcaccgatgcgctgctggagacggcggtgggcggcgggctcgatgtcgatacccactattaccggcgcaccttcggcctgcgcggtgaggactggctgcaggcgctgcgtgaccgctttacggcgacacgcacgccgccggccggcagcgccgagttcttcgcccggccgctggccagcggcgtactgaacctcgatgatttcagcgacgaggcgttggcccgcgcctgcaccccggtgcggctgcaggcgatcttcccgctggcggtcgccgcgcagcgcgccgacgatcctgcgctggccgattacctggcgctgaccgcgcccttcgtggagcgccagcagctgatcgccgccgccggcgagctcagcaccacggtggagatcgtcgccgggcagggcgcctatccgagcgccgacgacggcccgctgccgttcctgtccctgcacatcagcggcgcggtcttccagtcgaccttcagctggccggtgttcgccgagttgcgccgcctgctgcgcgcgcgtcaggacggcgatcgcacccgcagctatcaggggcggcatgtctcgctgcatgtgccagagagcggcgacatcggtctggtgctgccgaatttgcggctgcggctggcgccggacaccttcaccgcgctcgaggccgatctgctagcgcagctggagcgcccggcagcggcagcggcgctggccgagctcgctgcgctgtacggggatctgtaa

SEQ ID NO: 431512 - DNA, 2241 bp, Serratia marcescens
atgacgcattcaccgcaagaaaaccggcaggggcaacatctcgatcgcgccatccgccataacgacgaagactgttatggtttcacccacattgccaccgagttagcccgcgccattcagggaataggccgggagggcagtgccgtgatcggtatcgagggcgcctggggaacggggaaaaccagcctccttaatctgctgcgcacggcgctggctgaacaaccggataaacagaccttcgtgctgacggtttccccctggctcgacggcagtgatacgcccctggtggcgtccttactgcttccggtcgccgccatcattgccgaggaagaagaacgccggcttccagcgaaggaacggaaggcactcagaaggaaaaaagcgctgaccggcaccgcccagacgctgatggactacacccgggcaaccgcccggaatctggcacctgtcgctcagatcgccgcagtcattcccggcgtccccaatgccagcggcgcactgaacgccgtggcagattcgcactggctgaaagaaaaagaaaaaaccacggccggcatgcgcgacgagattgcccgaaaaatcgaggaactggatctgagcttcatagtcctgctggacgatctcgaccgcctcgaaccggcccaggccgtggaggtgatccggctggtgaagtcggtcgcggattttccccgctttcgctacctgctctgttatgacaaagcggtgctgtcacaggccatcagccaggggctgggtgtcaaagacgggagcctgtacctgcagaaaattatccagatctcattcggactgccgcgcccggaatcctttgcgctgcgccagcaatttcgcaatgccgccattgagttataccaaacggagaataagtttcctccggagaagagcatgttggctgacctggcgacagttgcggatgtttatgccgccacgctgaaaacaccccgggaagttcagaccgtcctcaatgcgctgcggttccgttatgcaagcatgaaggactatgtgtatttcccggatctgtgtttcctgcaactgctccgcacgacgaattcgggtctgtatgactgggtggaagaatacctgtcggaacggagcgtggtggaggccggagatggccatgtcagtaaagaggagcaaaaagccctggtagacagccttgaacaacacctgaagcgctatttcccggccaaagcgcattccgcatatatgttgggccagtgggttccggggatctctggtggattgacagaacaccccgtcacgctctttgcacgaaacgggccgcaggaaagtgccatgcagacagcagggaagcggctgagcagccaggcatactggcgatactacttcgccttctccgcaccacaaaatgttctgccaccacagatttttgagcaactcttcacgctcgccggccagcctcaaaagcagcaggaacttgcggaatgcctgctcggttatatccagagcaagaacctatcctcccggacctggtttgaacacatcattacccagctgacgtccccccggattgagggcagaacgccggccgagtgccagggtctgctgcagttcttcttcgacaacggggatgtcatggtggagcgctatcggcaagacaacgagtggtttgcgctgcaccagctagatacctacagcgtggcggatcggctaattcaacgaatactgcgggaggatgctgcgtccaccatgaagttcctgattgcgcgactccagagcggaaaggcctggtactggtgcgcagaatatgtccgtcacctgctgtggcagcatgggatagtcggagacagaacgggtcatcagctggaagaggggatggatcagggtaacgtccttcccttacggaaaaccatggcaatgagactaaacagcccaaccatcacctacgaactgccggcctttgccctgctgggttcgtatatctgggcatggcgtgatatcagcggggtttcagcagtacagaaatgggtcgatcgccaagtcgaagaggatggggcttttctgaacctgctgctgcagctccggtatcatggctccagttcggaggatgggcaataccgcgcgctaaatctggctgagatgaccgaatttctgggcgagcctcaggcagtgcaagcgcgtattgcccgcattagggagggcggccagttcgcggaacaggttaatcaggtggagcagtcgatcaagcgaaaccgtttctaa

SEQ ID NO: 431513 - DNA, 1071 bp, Serratia marcescens
atgacgattgcggctattttaggctctatatcacagcaccgatttgcaacctaccagtcttccgtgttcaacggcgccacccctgaagagtgcctgggcatttatctatggaataagcagctcgctggtgcattccttcccgctctgcaggtgatcgaggtttcgttaaggaatgccatttgcggggccaaacaggatttcgaagaggatgaagtagaacggctccatcctcaaccaacctgggcgcagaggaaaggaaatatcgatgacaagtggtttgtaactgtaatgacgcaggcaaacaacataaaatcgtatagagctatcgcggcagcaaaaagtcaactaaataacgatgggaagccgcacacaacagaaaatctcatctcaaaactaacactcggattctgggtatcattggtcgataaaaaatatgaccgtactcatgccaattattgtaactatctttctttatggccggatttgactacgcgcgtttttcctcatgccaataaaaatggtaaagcattaacaataaacagaattggatcggatctccgggatataaatacgttacgtaaccgaatatcccatcacgagcccttatggcgttccgataaaacctactctgtcgaacaggccattaataaagttgctcgtgaatatcatcgctgtatcgaggtgattagatggataaacccgtctaatctaaaattgttgagcattattgaaaatacccaaaaggtaaacgaactatgcagtccgcattcgttgtggaaaaataagagactgccggctggactttcagaacttgacattattagtggcgaacagtggctgggaaatacattgctggaaacccgtcatgctggcgttattgttaatattaacttggcaagccagatagtgatgattcaaagcgaaaaggacagacagacctttacagcctttgccagtgccttcgtagggggcatgaatgcctattcgctgcatgatagggtttcttttgaaccggaacaaagtacacaacagggcggtcaaccaatagccactgttgttaaaaaggcctga

SEQ ID NO: 431514 - DNA, 1479 bp, Serratia marcescens
atgggggatccaagttttcttagccgacgttggcgtttgagacaaaatgggtaccgagctctgatagagcgctttgctaataagaaatgcaacaggttcagctttatgaagaaatccaaaccgtcgaagtgctcttcttgtgagcttgataccaaagccttcgttgaacctgtcatgccgctcccaaagggtaaggacacgaatgatgttaaagcggcagtactcccactacctcggttttatcatggcataaaacttaaaacggtcagatctgcaatggcgcctttccctgagttaggcacggtggcaatgcgtaatgccgccatgacagcggttagtacttcagcttggttcgacctcggggcgcttagcaaagcagctcaagtcgcagtaccgcccttttttggcttgggcccagagacaatacgtaaggctgccacggctgcggttggcgtttctgtttggtctaatcatgtggcgctgaacaaagcagcccaagtcgcagtaccgtccttttttggcttaggttcagagaccattcgcaaagcagccatggcagccgttagctcctctgcctggtttcgccatggggcgttcagtagagcaagcagactggccattgattctttctctgcgttggatatgagcgcaatacgcaaagctgctctggcagcggtaactgcggcagcacggatagatagagatgtgctcctcgcagcatcgagggctgtccctgagcctttccccgcactggatatgggagccatgcacaaggctgctgtggctgctctaaccgcatctgcccggatagataaagatgtactcctcaaagccgctcgcgttggaatgaatccaaccgcccagagaagcgatgatttagcctccttttcagccgaggagctgtttaatgggatactaaagtggggatttgagcatggccatattcctggcgtttctgaagtatctgcaaactcatctgcggtacagcagaacgagatgataataagtgaggtggatacatcctcagattatggcgaaaaggctaaaaccaggttattagaaacgttctcagccctacccccgatcgcacaaatgatagttttctggattgttattcaagtattcggcggcgctgtaactgactatgcgaaggggaaagtgttagaccatattcataagattgagctttacacgttgtctctaactggctcaaaacctattgggcgtaatgatatcttgaaagaacgtaatgatattacgtgggagcagcttaatcagttcagagtcattacgggggagaacgtcaggttgcggaatgccccatcaatgcagggtgaggtaatcgaaactctcaataagaatgctgttgtggcagtgttggatagacatggtcgccaatggttgtatgtacaagcgatattgggaggagagaaagttgaggggtgggtaaatagaggttatacaaaatcaattcgctga

SEQ ID NO: 431515 - DNA, 3246 bp, Serratia marcescens
atggcattgcaattacaaaacgaatcgccgtcagaatatgatatcttcgaaggacagcagcatgaacacgttgcacgtaaaatgtctgaggttatcgttaccgaaaatataaaaataattggcttagaaggctgccttggttctggaaagtccaccattattcatttcgtcaaaaaatatttgaaagacagtcaattccgttttattgagtttgacgcagagctgtatcatttcggtaccacaaaaaaagcgttgattgacctgatataccagggcttcaaaaccgcgcctgggatagacgtcaaggcactgaccgaccaccgtgataatgccttgggcaatacattgagctacacccgaagacagaaaagtaaaatcagtttctggaccatttcttttttgctgtccagtgtgctgtctgttcagtctcttaggtatttccttaatgatatcaataaattgttgaccggagttgctcagagcccctggttgttcctgcttgagttgctgtgcctgctttcgccgcttgctgtacttggcgcgtttcgtttttttggaaggcgatcggaagacttcacggtcagcgacattctgaaaaaaaacagtgaagacacgataaccgaaaaaatgctgattagccgcgaggttggtactcttgaactccatactgccttgaaggggttcattcaatgtttgccacctgaatcgcgcttcattctcatcatcgataatcttgatcgcattcattctgacaaagtcaaagaactgtggagtgacatggagctgatttcatccaccgtcggtgaaaagctaaaaatcattctgccctactccgccgatcatgtggccaaatccttgtcagaggatcgcggcgaaggccgagaatttattgccaaacgcattcctgtcaatttcttggtccctcctattttatcggctggttggcgtcatggcttccagaagctttgggcagaaacgttggcagatccggtacctcaagcctgctatgaagtggctgaattactggagcgctttttgccacagcaccacccgcagatcaccccacgtttcatgaaaaagttgatcaacgatatcaagataacggctcttaccttgccggagcaaccaaaccatcatgtgctcatcgcgtgctatctgctattggttcgttatgctggcgctccttttactcggctgatgctggagtatgaagaggagcccagcgttatgttcatggagcagcatagtttagagcgtgccttttgcatcaatatggccaagacgcagatgcagtttgctcgcatttatcatcatgacaatgcgttatggcgggagtacctcttgtgtgttcattatcagacttcggcaacgttggcgaaaagtgaactgctcgatgaaccgatgcgctctgctttgaataacagcgatctgccggcatttttggcgctgaatgacatttttggctttgataatgcctggcgccggcttttgcatggtactgaaccggctctgtggtgccgattgttggctgatgtgacacccgagaaatacaagaacattgaggggatcctgaaggaaacggtgatgttgctcgatcagaactacgctcgtcagcaacaggagccttactcaccgaggtttgtgaaggcattgtgtacgttgcatgccaaggccctactaacaggacaagagaccttcatcgtacaacaggcaaaacgattgatggacgaattggcgcgttacaatgacgcgaccgatttggacgatgagtcattcacgttcgcgttgtttgaagagattgatagctatactgttttgaccggtaaaaacctgcttacacaactcagcaaaccgctatctggccgcctgtattatcgtttcttgtttgaaagtgaaaacgagtttcctgcccttgagattgcttcgttaagcttgaatttcacacagctgtcgctggccctccaagcctacctggccgataacagtgaagggaacatttttgctcccggtatactgcgccatgtgaaaataggtaatgagcctcttaacaaactcattgcctcctcggtacccattcagagcagtcaaaatctggagagtttccggagcggaacagagttcaagacggtggctgctttccgtcagattgttttggcacagtcctggcataccacgtcttacctctcatcctatgcgcaccagaccaccttgctggagtcgaaccccgttgaggtggcggcacatgccttgacacatatggtggttctcagcgattttaccggcgtggacacttacctgccctatgctgatgtacctgaatttacgccgatattcaccagttacctgttatatgtgcaatctttcgagctcctgataacggctctctcccaacccaaggttgccccggtattaaccccggccctgtgctccctgatggagggggggcgtgtacatgcattgcatacctggagttatgccactcagcatttcactttgattgccggcgcagtgggacagaccctggcgttatcctttttcgccccctgggaaactcatgtggtcaagggggttgcgaaaaacggggtggcagatttgtctccggatttcctgcaggccgtctggtcatcggaagaatgggaagatacccagggtgcacttcagcaggcgttattcgacaatttagaagacaaacccggcgtgttggacgccattgatgatttacattcgaatgagctgattatattgcaacgagcgattgacgacgatatccgataccccggtaatcttgatattctcgcgttccacgactggtatgttgacacggagctgagccggttacttcaaccatcgtattgtcgtcaattgtttgatctgatctcaattgagcagcaagaggaagcgaccaaggcgctgatggatgtgcttttcacccgagatattgatgtgaagcggcatattgtcttgttgcaggactttggtgataaactggtttacgacgagggcaacacacagggggcacgtcgtacgatcgctcggctttttgcttatggttcgcaacatcccgacatcgctcgttggcttgacgctcagatatttcatttcagcaaatggcctcaagaagatagccggagcgcagttgccggtattttggaacatcaggaatgcttcccttccttagtggcaacacgttatatccgcgcacgcctaagcgagactgacgatgaaacgttagccactgaagaatga

SEQ ID NO: 431516 - DNA, 252 bp, Serratia marcescens
atggcgttatattttgtgagttatgatttggtaaaaacaaaagattatcagaaaattatcgatgaactgaagcgatatggtgcccgtcgtatgctagagtcgaattggtgcttcaagcggacaaactctggagaggccgcagcattcagggatcattttaagaaatttattgattcggacgatcgtctcgtcgtggctgaagtcacgcattgggctgggtttaatatgttagacaatcctaacaacctttaa

SEQ ID NO: 431517 - DNA, 705 bp, Serratia marcescens
atggcaagatgtacagctcctgtacgtgggcacagctcagcggcggctgctgctgcctgccctgcatgtcgcaatcgcagtggttatcgccgtagtagttacagttatgatagctatccttcttattcctcatcgggttctagcggtggtggcagttataggaacaatgcaggtggttccagtagtacaaagccacgctggtcaaaatcaagttcttccgtttcttacactacagtccaagtgcaatcactcacgccgattcggcaagtggttgagaaacttgctgtagagcaaccagatttacgtgatgtcttcctttgccacgcttgggatgatcgacaaggcatagccaaagagcttcatgatttgctcgaagcggcaggagtcaaagtatggtttagcgaaaaggaccttgcccttggtgttcctatgatgcgtgccattgataaaggattagcaaactctcgaatcggtctggtattggtaactcccgcattgttaaaccgccttcctaaagaaggtgttgctgataaagagctttctgctttactggcgggtaatcagctagtccccatcgtgcataacacgacatatgaagctctacgtaatgtaagtcccttacttgcatcccgaagtggcttagatacgggagaagatactctgtcagttgttgcaacaaaaattgcagagctgattactgtttag

SEQ ID NO: 431518 - DNA, 744 bp, Serratia marcescens
atgccatccaatagtaacaacagcgcctcaacactttctgtacttggttttgttgatggactatggaatttaaccaaagtggcaaaagttatttatttcacattatgttttgatgttctatttttctatctaaaaggaaatggcctatttggcattaaactaggtaaagaattcgacctctccattgctgatatggccggaatgatcatcgccttaggtgttttttcttcagttatactggaaataataacattgtgtttcaatctccttttaataagggtaaagtatagcaagttactgcaaagtaaggatgggggagtttatcggaaatcctcaactgaggtttttatacatgaattacgagatgacgctctagagagcggtgatgaaatttcattgaagttatatgctgaagagaaaaacaaaataaatattctccgtaaggaagaaaggttgaatgaaataatcgcgttcgggactgtttttgttttctctatagaatggtatttatcggtatcagacggttcaagtaagatgtttattgattggctctgggaacagtcaaaatatagagatccaacaacaccgcacttcataattggttttttagtgtcattagcattgcttttctatgcaactgtcatatgttggccaaccgaagataaccgtaaaatatattatcctaaacttgctcaaaaactgagaaaaaaagaggatgagtggaagaaaaaatttggtggttag

SEQ ID NO: 431519 - DNA, 126 bp, Serratia marcescens
atgctgaaacgcatatacgtaaggctattcgtgaactgctggatgatatctatatataaaatatatggccgctacgttgcggccattctgttgaaatttataccgtccaaactcactagcggttag

SEQ ID NO: 431520 - DNA, 267 bp, Serratia marcescens
atggtgataaagtcaacaaaacgtcaggtaacaaaacctgcctcttatgagctgaaggtgtataaatccggcatggaaggtgtagatgcagtgaacacctatacatctgaacagattgaccgcataacgcctcgcggcaaaccgattacggcttcgcaagaagaggttatcgccgttttaaaacaggcggttaaacaggttaacgcttcatcctctccggctgctgaaactctgggctgtgtccggcggcgccaggcattcaagtaa

SEQ ID NO: 431521 - DNA, 1260 bp, Serratia marcescens
atggaagggaaaaattacacttctgaatatctattaattttctcagaagaaagaaaactaatgcaaaatgaggaagatttaataagaggccttcaacttaatcaaaacttgaagattgaaaagaaaggttctaacaacaccatcacatttcagaatattgaattcaccctaaacgtaaaaaaaataaaatccaaaaatgaagcttaccgtagttatgtcattgacgtttgcaatacaaataaggttgcagatgagaaagaaaaattagcagtaagagacttaaataaagaaattattgctacaattagagaactacaacattcacagctaaatacactcagagatgacttggcaaccgagttttcaattgagggctataaacacatacatgaaatagaaaataaaatgaggaaattaatcaccatctttatgtctacaaaagtaggcctggaatggattaaatcaaacataccacaagaagttatcgactcaataaaaaataaagatataaaatctgaaactcaatcactaaacacgttcctttcagaaacggatttcattcaactatccaaattcctatttgataaatatagcacaatcaaaacagccgatgtacatcgcatattaaacagcacaaaaaaaaccattgacgttgagaaattaatggacttcgttcctaaaagcaactggcagcgatatttctccccagaggtttactcggagaagaccgattccaaagagcgaaacaaaaaagaagaaaaactcattgatgattgggaatccttgtatgaccttagaaataaagttgcacacaatcgctttattacctacgaggaaatgaaacaaattatcagtaaaaaaaatgacatcaatgaagtcatcaatgaagcatttaatgctattgaggaaatagagataactgagcaacaagaagaagaaataaagtcagaattaaagacaactattcatgagaaaactggcgaaagtgtagacataagtaaaaacgaagacccagaaaataagcctgttgataaaaaactgatgactgacggtgagcatcacataagaaagctaacaagatatatgtatatgaacatacatgattcatacaaaaaagaactaaggaaatacagaagtaaattaaacaaagcggtggaaaattacaagtcatcacctgacaacacccttacatataatttattagaacttgagttaaatcgagtcaaggattatttaaagacattagcctctattatttaa

SEQ ID NO: 431522 - DNA, 1701 bp, Serratia marcescens
atgctgaaggctatcaaagaactgctggttggaacccgggttatgccggcaaatccaacggcaagcatttcagcctctcaatgtcctgtaggttattttatgccggcatccgcagagcagcttttgagcacggcctctcgtcagcagtgtttgcagcagctgtgggagaacagcgcactgcccaaagatctctatgaacatttctatctgcaacccttgaagcagcttgttacgctgatgcaggtacttccggcctcgtcccagggggagtatgccagggaaggagggctggtcgatgttaccctgcagacgacgacgtatgcggttcgactggccaaggggtacatgttgcccccaggggctgcgcctgaagaacaatccgcccagaatgtgcagtggaatgtcgtggtgttttatgcagcgctatggcactacctgccgctgttgagccagctgcagggtgagttccaaagtggccgtgcctggttacctggtttgacggtaccgggtgaaccttaccgttttcgcttcagagccactccgttagccccgactctggccagcagtcagagcgcaatgattgcggcacgactgctgcctgaagagcttattgaatggttgtcaacactaccagcgtcgatacattcgttgatgacgatagcgtccaggcaaccgagcacattacctgcaattgacgatattactctggaggcggctaaactggctcgtggcgatggtttggccgtatcgcttttgccgatatccaaccccgacacattggcaataaccttaccgtcagtggcgccggcgacagaacatatcacttcttcagtacccgagactgatttgcaaagcgcagtcagcagtatccgtcccactctcgctcaggagcaactgccggcagagacattagatcagcccaacgaaaatacaccgttagtcacggaagtgtttcttagttcggccctggatgcgccggtcaacgataagcctttggctgagatggtcctggcgccagaaacagaggttggtgtggaagaagatatgcaggctttgttgtcattaatggcggtagaggtgtcagtaccgacttgcctggataaccaagaagagggaaacgcccctcagaaagagagcctccttcctgaagaaaagcaggggtcggtacatgacataactactgtaattgaagatgactgtgttttaccaggcgtaatagaaccggaactattaaatagcacggaaacaacgactattttagacgctcaacatttatcaaaggctccagggttggaagaaaatagcgtggaaggtattttgaatgcagagagtaatgttgggaacgcctttctacagtggttgagtcttgggataaaaaaaggtgatatatctgttaatactataggttccagggcacatattgttagtggtttcgtgtttctctgcgttccagatatttttcatctgtatatcaaagaaaataatttggagcgtagtgaccgaaatgctatccaaaaagcatttgaaaaactgggaagacatcggatccgtaaggggcagcgattctttattggccatctttatgaaaagcctgagggggtgggcacatatcgccgtatcaatggttacctgattaaggcaaatagtttgtatggtgggacacgcgtgccagaggacagtcagttactcgtgatcccgtag

SEQ ID NO: 431523 - DNA, 834 bp, Serratia marcescens
atggtaaccaacaataaaactgcacttggggaagtcattgccaaagcgatgacgatgaaaggaattccaaagcaaaaacacatcagccatacgagccacgtactggacatcacaacagctgcagcccagaaaaagatgagcggtgcctcaaactgggaggtatcccagctggttaaagtcattgattcaatcgatatgaggatgagtgacttctttgacatttataattatgcaataaatgaagtgcatgatgctatatggaatgatggcaagaacaacgttaaatgcaaaatatacctatctaatgtaaacgctattgatacaactgaatattctgccttaaaaattaatgatgagtgggttgtttttcatactaacgatataaaagatgatgttttttttgaatcaaaacgcaacattgaaatgattcagttatatcctcaaaaacaaaatgaagaaaaacaccgaatcgctattcttgatgatgacaaaaacatcgtcgatagcctcaaagaaatcattgtaaacaatgaatatcttgttgatgccttttatgatattaactcattagaggagagcctgaaaaataagccatatgatgcgtatattttggattgggttataggaacaaaaaccgtattcagcacgattaaagagataagaaaaactgaaaataataatgccatgatactggttcttaccgggcaactgtcagggatcgtagatagcgaaatcgcaagtgctataaatgattatgatataacaggccctcacgagaaacctatcaaagccagtgtaataaaatcattagtggataaacactttcccaagtga

SEQ ID NO: 431524 - DNA, 987 bp, Serratia marcescens
atgaacgataatttactgacttatacaggaagtctattgcttgatggaagatacatagtgtctccatatggagtgggtaaagatattccatgtggagaaatctctcccttgaatgactctattattcataataatgcaatcagtaaaatatcagttgactattccaccgtaaaaagccttacaatcatcaatgggttaggggtaacgctgggtgattcagttgttgggatatcagcactgcacgcaataaaaatattcaatccaagtatcggcatcaaaatcattcgtcctgaaaactgccctgactatgttaatgaagtatatacgttggcaaagcatataatagatgacatttcctatatgccgtttgacattaccagcgctaccgatgcagatctagtaatagatatcgggaaccaactatactggaaagattttaacacactggaaatgcatgacttcttcttaagaagtttaggcatagaacacaaacatgtatcagccagtttaaaaattaactcatggctcaatgaagcacctatcgaagatttaaatttgggtgagtatgttcttttctgcccaaacgctagtacaaaaataagaagcatacccaagaaatatcataaaaaaataatatcttacctaagtgataaatttaaggttaaggtcttagggttcagtgatattagccatgacaattacacgaacattacctctctatctacaaacacaacttattttacatccatcattaaaaatgcaaagcacctttacacgtgtgattcagcagccttgcatattggcgcggggtttaaaacccccacaacttgtatattcacaaccgtgaaacctgaacttcgcagcttatactacgataactgcacctctatttatattggaaataataaaacagagggcatacataacagtgaaaatatatttttactcgatttaatcagtaaggagtttgagggctattatgcgtaa

SEQ ID NO: 431525 - DNA, 504 bp, Serratia marcescens
atgcgtaaattaatatctctagcattgtcttttttagttattctatttatttcgaccccctctttcgcaaataaaggagatatctacattgatggcgcaataactaacaaaaattacgaagatggatacatcttatcagcaaaagagttcaacacgctggaaaaaagccatataaagacgacaacttcctggactgttccgggacgcgttgtggattttgaaggcgtaaaattcaaagacttgctgaaacttgttggtgctcgtgggaaaacgttaagaatgagggcattaaatgattactgggtcgatatcccagtctcagacatagaacaattcgatattctgctggcaaacaaaatggatggtagccctctgaaagttagagactttggcccatacttcgtcatttacccgatggacaaattttacgataagcttaatagtcctacttttcaagcccgtcatatttggcaggtcatcggcataacggtattagaaaaatga

SEQ ID NO: 431526 - DNA, 1713 bp, Serratia marcescens
atgaaactgaaaaggcttatcattcaatacttattagtgttcctggtgctgacaggtggatttgtgtggatgtatgaacaatacttctccacaagccataatatgaactcagcgggacctcaagagaactacgcatgggcaatcgcaaaattcacgatcagactagcaggatttaatgcaaaagttgagcgccagcttcggttaggtaacaatgataaagaggaattacaaacagaacttgacctcctattctcaagctcaaatgtgctgttgcataaaagcgtttcaaccagatatttatatgaagaggctggctatgccaatacggtagagcaaataaatgccaaccttgaaaatatcgacactgaactaaacaaaccgacacctgactattcgatcatacttaaaagcattgaattaataggtcaagaaaataaagatttagtggtaatatctgaccatgctgaggtcaggcaaagaaacataattcagcaagactatatcgacaaagctaactcaatgaagttcccaattgctacactgtacttcctatttttgttgatgctttttatttcatatcgacaagtaaagtctattaataatcaattagagtccgaaaagaaatcttttaacaacaaaaacgcattcctcggggtgttgggtcatgaattaaggacttcacttcaggcaataatttcgtcggttgaggtgattattcagaaaaaagattctatagcattcaaccactttgagcgattagagaatgcagccatgaaaatggagcgtcagatgaaagacctcgctgagttcgccaaagtcgataatggtaatgttgaaataaaaaaatcatcattcaacttacgaaagattgttcatgacactgtcgagcaaagcatttctatattgaacaagcaaaatgttagtgtaagcatagataatattccagatacatatatcaaaagcgatccatcaagggtcatgcaaatcatagagaatattgtcaccaatgcaataaaatatacagacaatggtctcgtgcaggtaagcgcaaacatccaagataaatcaagtttggttctcaaaatcaaagacacaggtcaaggcattccgaaggacaaggttgatacaatattctatccgttcatccgagttgggaatgataataaagttcccggttttggaatgggtttggctattgttcatggtgttgttaaagccatgaacggaacaattgatgtaaaaagtgacatcggtaaaggaagtacttttacagtatcattacccattgaattttcaactcctgaagagatttgcattacaactgagatcgcgaatgcgtttttctcagttcaagacatcagcattttaattatcgatgacaatgaaatggcatgcgaatcgctggtctctatacttcaaaatgagtttacagtagagtatacaacatcccctgaaagagctttggaaaaattatctcgaaaatctttcgatcttgttttgagtgatctacaaatgcctattattacaggtgatgagctatatagaatggtcaaagaaaataaaggtccaaataaaaacacaccattcatattcatcagtgcatacaccaacgaaagccccattaaagatgttgaatttctaaccaagccagtgagattgaatgacattaaaaaagccataaagtcagtgctggcaaaggatttagactcataa

SEQ ID NO: 431527 - DNA, 669 bp, Serratia marcescens
atgctgacgtttactgaagtacaaaaccaattcatcggcctctttggccaaacggcacgctaccatcaccggtacaaggtcttttctgactttgttcagtgcagcgcgatagcaatacacaaccgcttttgtccggacgacgcgctggagaagcagtacatgtcgctcatcaaagggtatgaacgtgaggatgtcgaacgcctggcgcacctacttgctctggtccgaatagcactggccgctgaaccttgtgattttttgggaatgtccttcatgaagttagagctcggtgataaacaccgtgggcagttttttaccccttggtgcgtagcgtccatgatggccaggctgcagttcactgagttggaacaactgttgctgactcagccgttcgtgacgatcagcgaaccggcatgtggggcaggcggtatgatgatcgcggccgcagtcgagatgcaggctttggggtatccgccaccaaagcatatgtgggtctcgtgcgttgatatcgatgtagtagcgatgtcgatggcgtatatccagctgtcttcgcttggcattcctggagaagttgtgttgggtaacgcgctagcagatgaacggcgattggtgatgtataccccgatgcattggttggaaaaatggccacttcgcttacaaaattcgtaa

SEQ ID NO: 431528 - DNA, 924 bp, Serratia marcescens
atgtcgaactggtgcaataaccgtttagtgatcactggccaatccgtttttgttgatgaactgcagcaatgggtcaatggccatgttgtccctgaataccgtcatgctgttcaacaaagctgccggctgttcctggccgggtgtgccggcatattgaagccggcgacaacaaaacccggtgtttacgtgccttacccggcactgttaacgcagccggggattgcatcgcctcagaatctggcctttgaacactggttcgggttgctgaaggcggatgtgccgttaacgggcgagaacattcgcctgatagagcgactctaccgccagtcgggtatcgatgcggttaaatgggagaacatccccaacgtggcgaaggcgcgtatggaggatgtgctttctcgccagtatgcggactggttcggtctggtgggggttagccctgatatcgatgccggcatctgctgggaacgtttggggatgatacctgaatatactgcaccgtgcgatatgctgatgctgatcccgacgcgtctggcgaccgaactgaatggctctggtggactgctgcgtgatgtgccgaccactgtcgagctctatggtcgacagtacggcgtcgaatggccggcaggccataatgtcggctgtgtacgggatggcattaacacgttgacagtgcactttgattccccatggtacccgccagccggcgaggttatcgggacagtgtcggagcagttcagctgccaggtggaacatacctggtatatgcctgatgcggaacgcagtggctacgatcgttacgaccgtggtgagcatgtcgacggtggacgaatagcggctgaggttgaggctggtgaggtgatccacctgacctacgccgataaggattctgtgccgttgtcaccgaatgcagccgccggctaa

SEQ ID NO: 431529 - DNA, 504 bp, Serratia marcescens
atggggcttgatatcaactttttccgtcagcgtaaggctgactatccgatgttgccggtaaacggcgactggacacccgtcggcgactggacacccgtcggtgactgggtgccgtgttcaccagcgtggctggaggacggcggtgattgtgcgcaggcgccgcgaatatacaaccacaaaacgtgtaaccactaccatccgccgctgctggttcacacctgtcattttcgcgggtttactgcgttgatgcattgggtggacaacagtgtcggggaggtcacaagcggtgagctgatggcgttcgaccgcaacgacgtccagatgctggatttgtgtctgtcgcggctgaatgaagcgaactgccatgaagagtttccttctgaatcgcgtgactacggcggtatttactggacgcaggtcgatttactgagggagtacgttaacagcgttcttgccggttttgatttcagtctggaccacctttacttccgggcttcgtggtaa

SEQ ID NO: 431530 - DNA, 339 bp, Serratia marcescens
atgtctgcttttacttcttcagttgttcctgatttcttctcaaccctgcaccgtgtcaaatcggctgtccagcgaataccttttcgcatggcgccgccgcgttttactgactggtacgtcaatgcagcaggtaattttgccgttcgcgcgcatgttatctgcagtgatgatggttcgctcagcgcgttactgacgctgcgcaaaggttggtacaaaggcgaatatacctacgcaagcacccacgttgtgctgtcttgcaagcataccgagcgcagaaaagcttaccgactagccagccaacatgctgagcatttggccagactgcgttaccgcttttag

SEQ ID NO: 431531 - DNA, 900 bp, Serratia marcescens
atgtccagattcggtaaacagctgggaaaacaacttgtcacgcttgctcgtcagggacgagggagttttaaaaccgttgctgaccgttccagaattgcagaccgtttttctgaacgtctggcaaagttgaatattcaaattagggatgtaaaacacattaaaacgacccatatcgaaaagtacattcgtagccggcaggctgagaatatatcgcttcgcacattgcaaaacgagatggcagccgtgcgttcaatcatgtccgctgcggggcggaataaactggccgatcccaaccatgagaaattgagcaaccaggctttagggatttcaggtgctaaccgtgatggaacaaaagctcctatttcggatgagaagttaactgctgtcataaatcacgtcttaaaaaaagacgcaggggtagcattgggtgttcagttgtctcgctatgtaggtttgcgaacggaagaaactgttcagtcagcaaagtcattaaaaacatggcggcaggctttaattaatggcgacgagcgtgttcgggttgtttttggtacaaaaggaggtcggcctcgcgatacaactatttttaatcgtgagaaggttttatctattttagatgctgcaataaagcattgtgatgaccacaatggaaaattgattgataaaccttcattgcatacagcaatagaacgttatcgaaatattgttcgtgaagcaggaatgacagggaaagatgctccccatagtttgcgatacgcttattcacgcgatgcggtgactcatcatgttaaaaatggaatgagtcgtgtagaagcggaggcattggtatcgatggatttgggacatggggatggccgaggtcgttatattaagcaagtctatttcaaaggtgatgttgagtaa

SEQ ID NO: 431532 - DNA, 972 bp, Serratia marcescens
atgaacaacaatataaataaagatgatgctataaaatatctagcagctgagttccagactgatgaacaatcacgattcaaaacaataaaacccactaaacaattgataaaagacattgcagacgcagtaaattatataaaacaagagaaaaaatacgaagaagaaaaaaagaagtggggagtcattagcacacttaacagcctagcgattttaaccattttgatgctaatattttcaatcaaccgagatagtgactctgaatatttgggagagtggaagttttatacatatcttgcatcagtttcctttacgaccatttggataggagttaacattgaaaaatcttattttttcaatgaactttggagatttagcataactaaaataatggtgtcattatcaattaccgcattaatagttttctccacagccacagcatcatttcaaataaataatatttttggagttgactcttcttacttcccatttaccagaagctttttaactgcgtacttattcttcacttacgcatccaagattatctacgtcttattaattgcagcatcattaaatttattattaatagtactttatataaaggacgttttaaatggtgggaatgaaagagagttcccttggggctcaatctgtttcgttatcctaacgctaatacttacctacttctcttggttttgggtaagtaacaatttcaacgataaaaaattaaatgaaaaaatatacctccttgcccaccaacttgattttaatgatagcaatttatgtgaaaatttaaggggtgaacatgttagcgttatattccttggttctgagcaaagacaggtgctggttgattttaacactataaaaccagacagtgtttcaagctttgttgagggcaagcattttttcagtatagaaatgaaaaatctgaaagtcatgccctgttcatatgaaaaaaaaaccattaattaa

SEQ ID NO: 431533 - DNA, 1512 bp, Serratia marcescens
atgatgaccaacagctatctggagtatttcctgacgttgcttggctggctgattaacaacggcctgtgggagctgctggtcagtacggggctgtttgtgctgccgttgctgttcaaggtggcggccatctggctgaaggtgcgtgaggaaggggaggatgagggcaacaaagggatgctgtctctgccacgcatcgaaaacctgctctacggggcattctttgtgatgctggcctgctgtctgccgctgatgaatgtcagcctggacaccatcaagtacgacagcagtcgggcggcgacctgtggcacctggaccccaaagaagccggatgaaacgggctacgccaacatcatgtcgagtatgaacggccagacggcgaaggtgccggtgtggtggttggtggtgcataaactctcaaaaggcatcacgtcggcggccgttgcaaccattccgtgtcggccggacctgcggcaggtgcgttttgaggttcagcacagccgggtcaataatcctgcattggcgaaggaactacaggacttcaccaacgattgctacgcgctggcgctgtatacctggcagaaccgcgaccagggacaaacaaccgacaaggccacgttacgtgatatcgagtggctggggtcgaaaactttcctgaatggtgggtactacaacaacctgcagtccaaaacgccgcgcgccagcttcccctggaatgaggggcgtgacagtggtcggccaaacaccgggagaggcggatacccgacctgcagcgagtggtggtcagccggcgaaacggggctggaagcccgcgtggtgaaacaggttgacccgggcgtcatgctgcggatgtctgccgcgctgaagatgatggggcaaccggatgcagattataaggaagccgtgatacgtcgcctggtcagcccggataacctgacggtctcccagggcggacgtgcttatgccggctacggcggcaatgcagactttaccctggacaactcggttaaccggctcgcgtcactgggcggaaccgcgctggggagcctggcggcctatccggcatttgatgcgatgcgtcaggcattgccgatggtgcaggcggtactgctgatggcggtctatatcatggtgccgctcatcctggcctttgcggcctacgagtacaagacggtgatcaccgtgacgttcgtggtgtttgcgctgaacttcctgacgttctggtgggaactggcgcggtggctggacagttggttacttgaggcattgtacagttcggactcgcacagtcgctggaatgtagccgggttccagaatagtgccgatgacctgattatgaatctggtgatgggctgtatgtttatcgtgttgccagcagtgtggcttggggcattatcatgggctggggttagtatcgggcaggcagttggtagtgctttaagaactggcgtttccaaagcccaagaaactgggggagatgcagttaatacactcaaaaaatccgttaaattgtaa

SEQ ID NO: 431534 - DNA, 372 bp, Serratia marcescens
atgaccggaacagagaaaaaagcggtgacgcctgccagggggcgccgatttggtctgcgggcaaagcgtgttctgcagatgttgtgcatgctggtgatggcgatgatagtcgcgctgggcatggctcactggggtgtcaatcatccgggagagagtgctgcgctgcgtgactgggtgcacagcacccgttatggctggctgagctggcgcctggcgctttacgccgcgctggcctgggggttctggaaaatctggcatgcgccgggctgcaaaccggaataccggcaacccctcaaacgcatggccattgcctgcgtgttttttgccttggcctgtgaatacagtctctttggtggagggctgtcgttatga

SEQ ID NO: 431535 - DNA, 1482 bp, Serratia marcescens
atgaataacacgatgaataaatctctctggggaaggcgcagcctgctgtctctgttggttgtcagcagtatggcattggccagcgtgaatgcgcacgctaacgacaatgacgataacggcaccctgtttggcatttcactgccccaggtgaatgacagcaatatcggttacgggaagaacgccagcggcgcggtctcggacaaactgttctattccctgggcggaggctcggtgatatcgcagccggcgacgcgtggcaatatgcagcgcctggggatgaacctgggctggagctcggatttgatgtgcggcaacttcgacctgaagagcaccatcggtaaccagctcaatggcgtgacggacgggttcaagagcctgatgggtaatgttattcaaggtgctaccggtgcggtagccagtctgccggcgatggctatccagcgtgctaaccctggcttgtatgaaatgctgacaaacggggtattgcaggccaacgtggcattcgacaaagcccagctcaattgccagaacctctccaaacggatgatggatatggtggataccggcggctggagccaggcggcggcgatggaggaggccaaaagcctggtcaacaacggggatgcggatgcgatccgatcgatgaacgccaccgagaaagtgaccggacaatccggccagacctggatcggtggacagaagcgcggcggcgccggtcagccggccatcaaaccgacgcacgatctggctgcagccggctacaacatgatgaatgcgttgccggtcaccagtacctccaacgtatccggcagcagctgtaccggcggagcctgtaccaaatatgccagcagtgaagaagcggcagccgctgtggtgaaggtgttgggcgacacctcgctgcgcacctgcaaggacgcagcgcaatgcaccagtggcgaagggaccgaacaaccaggcagcaccgtagccggtacaggttttgcgccgatgctggaagaggcaaccaaggcgaataacgaacagttggccagactggtcaacggggcagaaaaacccaccgcgggcaacctggccaaactcaaaacgggcagcctggcggtgaccgccggcgttatcaaggcactgcagcgcgatccggataatgccgctctggttgggcgtctggccagtgaactggcgatggcggataccatcgaaacagcctttatcatgcggcgcatgatcaccaccgggatgtctgagccgaacgcctctgcgcagaaagtcgcgatggaagaaggcgatcggcgtatcgaggcgctggatcgtgagatcactgcgcttaagaacgagatggagatgaagcgtgagattgcgcgtaacgcggtgctgaccatcatcgacagggagaacaaccgggcggaaaccaacccgcagcgtcagtcagttgacagcccggataccaagttcaaccagttggccgtgccggaaagcgaccagtaa

SEQ ID NO: 431536 - DNA, 1008 bp, Serratia marcescens
atgcaacatcactttcctgcctcttcgtctcctggtcaatcccggtttaacctcaaatccctcggtatggtcatgatgctgtcagtggccagcgtgccggcagcaaacgccgtgctcaacagcgcgcagattgttgccagtgcggtgtcacagtcctgcatcagctggcgcgtcagcggcatttgctactggttgttctgcagttggggtggctgcactgtcagaacctcggtcaaagttacccacttcatcccggaaacggtagtgtcggcgtacaacgctccaggaggcaacccgtggcgtgagatgtcgatggtcagtcaggccgccggcggactcgaaagcagtatcaccagcgcactgggcggggttgctgccggcggtggcaacaatgagctgaaaacccccgggcagcgtaaaaccaaccttcacttcaagtatgccgatgccattggtcatccggcgacgaccctgattggtggcagcattgccggctattcgtgccgcagtgcggcgatgccttttgtgccgtatttcctcagcacgctggacagcctggcatggcgtactggcatgccggaatctctctatcccgaagcattggtgcctggtcagcgcgaggttggtagtcaggcagccgcgaatatgtggggcaacgtctatccccgttcgggatttgtgactcaggtcgatgatgacaaggcgggtgctctggtggcacagcgggtggcggacatcattactcgctctggtcagccgcacgtctaccagcccctgataggtcagcgctcggaagggtactggccaccaggtgcggttcaggaaaatacaggaaccagcaaccacaaatggcaacgcctggcgccgcagctcagccagtcctgcgcggtattcccggacggtgaacatccgcctgctgcggatgcgaacgctgcctttgccctgtggcaaccctacagctgctgccagcgccgcgggcagcgtttcctctacagcacagatttctga

SEQ ID NO: 431537 - DNA, 405 bp, Serratia marcescens
atgaaaatcagcacgttgctgacgttgtttcctctgctgatgccggcatcggtgcttgccggcacggtactctataccgattcccaccatcccccgaccaacatcgatgcctcggtatccgttatttatcttgacggcccagaacagctgcaaaagcaaatgttcggcgagttgtcgtcaaatccaggtgaagccgagcgtcaggcgcaggccgtactgaaatccccgcaatggcaggcgaacgagcagcaactggccacggtttaccgtgcggtggtgcgcgcctgggagctgggtgtcaaaaaagtgcctgcggtggtgttcgatgacaccgacgtggtgtacggcactgcggatgttgcgcaggctgtggcgctgcgcgcccaggcgcagggagggcagtga

SEQ ID NO: 431538 - DNA, 396 bp, Serratia marcescens
atgaaaaaaacattgaaatttaatgtctccgcgcttgaatgttatgaagagaatgatgtacttaccgttgctttgggggatgatacgaaatcacctgaaaattatctaatcattactcggttggatgatgacgataatgactctattgatgaggggatcggcctgcaaacatctcagtcagcctatgaacaatcagctgcgattgagaaagttattttacaatcgggtagtttagaagtggttattactcctgattcataccagcatttcggttgctctagtctggttggtgagttttctgacactctgagtaacaactctgaaaagctagcactgttgagaaagtatcttgaggcgattttcaatggtactcagacaaccctcattttttcatga

SEQ ID NO: 431539 - DNA, 4260 bp, Serratia marcescens
atgaccgaagcggctcgcgtcggcgatattatcgggcattcccatgccctggccggcatgattgccggcacccttgtcggcggcctgatcgccgccgcaggcgcggtggcggcgggggcgctgttcgtcgccggcctggcggcttcctgtatcggcgtcggcgtactgctcatcggcgccagcctggcggtggggtatctcaccggggaggcggccaccgcggcgcgcgacggcattgccgacgccggtgccggtagtctgacccccaaaggcaatatcgtcaccggctcccccaacgttttcatcaacggcaaacccgccgcgctcgccacccacagtcaggtggcctgcagcgacgacggcccgagcatgcagatggcgcagggctccgacaaggtcagcatcaacggccagcccgcctcgcgcgtgggggacaaaaccaactgcgatgcgcaggtgatggaaggctcgcccaacgtgtttatcggcggcggcaccgtcaccaccttgccgatcaagcccgaagtgccggattggctgtacaaggtctccgatctgacgctgctgttcgccggcctggtgggcggcgtgggtggcgccgccggcaagctgggggcgctgggcaaactgctgggcaagctgcccggcatcaataagctgggtcgcattgcctgccgctttggcacgttaatgactgccacggccgctgccggcattatcgcccggccggtggatatcgtcagcggccagaaattcctgtccggggatgacgagctggattttgtgctgccgtcgcgcctgccggtcgagtggcagcgttactggcgcagcggcaacccggcagagagcgcgctgggacgcggctggagcctgttttgggaaagcagcctgcagctgtatcaggacggcctggtgtggcgcgcgccatccggcgactatgtctctttcccgatggtgccgcgcggccataaaacctactgcgaagccgaaaagtgctggctgatgcacaacgccgacggcagctggcaggtattcgacgtcagcgagcagagctggcactacccggcgttgagtgatgagccgagccagctgcagatgatgactgacctcaccggcaacgcgatttctctgttccacaacgagcaggggcagttggctgagttggtcgacagcgccggtcagcgactggcctgccgctacctgaccaccgccaatggactgtcccggctgagcacggtgctgctgtataccccggagggtgagctgccgctggttagctacggttatgacgatgaagggcaactggtcgctgtgaccaatcgcgccggcgaaaccagccggcgctttacctggcgagatgggctcatggccagccatcaggatcgccagggtttgttgaatgaatatctgtggcaggaaattgatggattaccccgggtgattgcctggcgccacagtgccggcgaagaactgtcgttgcactatgactttgccggcggcatgcgccgggccgtgcgtgatgacggcaaacaggctctgtggcacctggatgacgacgacaacgtggcgcagtttacggattttgacggtagaaaaacggcgtttatctatgagcgcgatgaactgtgcggcgtggtgctcccgggcggcgcgcagcgccagagcgagtgggaccgttacggccgcctgctgagcgagacagacccgctggggcgtaccaccacttaccagtattcccgcaacagtgggcgcctgttttcggtgacctggtcggacggcagccaggtgttccaacactgggataccctgggacgtctgacgcagcagattgatgcgttgggtaacatcacccgttaccggtattccgacgatgaagaaagcctgccagagagcattattgatgcgcaggggggtgaggtgaaactggcatggaacgggcaagggttgctgacgcgctacactgactgctctggcagcgtcaccgcctacgcctatgacgcattaggccagctgacgcaccgcatcgacgcggaaggaaacctgactcgatatggctgggaccgcgccggccggctgcagacgttgctccatccggacggcagtgaagagcggtttgcctggaacttgcaggggcaactggccgtacaccatgatccgctcggcagcgagacgcactggcagtacaacctgctgggccagccggtcagtatcaccgaccgcatcaagcgtacgcgtaggtaccactacaactgccgcggctggttgaccaacattgagaacggcaacggtggggaatatcacttcagtcatgatgccgttggccggctgacggccgagcgtcgcccggacaataccgatcatttttaccgttatggccccgatggccaactgaccgaacaccgggaaaccgggccacaggatctcactgcaccgccggcgcagcgcctgcaccgattccgctatgacgaagcgggtcaattaacctggcgcagcaacgacagcgccgaatggcactatcagtatgatgccgtggggcgtatgagctgcctgacgcgcacgccaaccgttgccggcgccgagctgggcatcgagccggacagtgtgcagctgcgctacgacaaagccggcaatctgctggccgaacaaggggtcaacggcgagctgcagtaccaatgggatgcgctggccaacctgcaagcgttgacgctaccgcagggcgaccaactgcagtggctgtactatggttccggacatgccagcgccatcaagttcaatcaacaactggtgagcgagttcacccgcgatcgcctgcaccgggaaaccggccgtacgcagggcgcgctgcatcagcagcggcagtacgatgtgctggggcgccgcagctggcaaagtagtgctctcagccacgggcagataaccaaaccggaagatggcgtgctgtggcgggtgttccgctataccggccgtggcgaacttgagggtgtcagtgatgcgctgcgcggcgaggtgcactacgggtatgacgctgaagggcgcctgctgcagcatcgggaaagccaccaaggcaaggccggtaaccgtctggtgtatgacggtgccgataatctgctgggctggcgaagcccaaatgacgatgtcgacaggcatttaccgctggcgccgatcgccggcaatcgtctgacgtactggcagcagctattctaccgttacgacgcctggggcaacctggtcagccggcggaacgggatgtatgaacagcattaccgttacgatgccgataaccgcctggtacaggcgcgcggccggggtcctgggggcgagtttgacgcgcagtatcactacgatgcgctgggacgccgcacacgcaaaatggttacctacaaaggtaaagcgccggtaacgacgcgttttctgtgggagggctaccggctgctgcaggagcagcgggacaacggcacgcgcagaacctggagctacgatcctgccagtgcctggacgccgctggcggcgctcgaacaggcgggtgatggcaaacaggcagacgtctactggctgcacaccgatctcaacagcgcgccactggaagttaccgacgtcgaaggtaacctgagctggtccggtaactacgacaccttcggcaagctgcagggacagacggccgccggcgttgaacaacgcaatggggttgtctacgatcagccgctgaggtatgccggtcagtaccaggacgacgaaagcggtctgcattataacctgttccgttactatgagccggaggtggggcgttttaccacgcaggatccgatcgggttgcgtggcgggttgaacctttatcagtatgcgccgaatccgctgggatggattgatccgttggggttggcttttggttcgggtaaaggtacccataacgctaaagcaactttgtttgatagcaatggtaatgttaaagcgactggcgtttggcaaagtgggaatatgacaccagatgaggctgctttaggattcccacagagtacacttgccacgcacacggaggcgagaatcactcgtgagctacatccgcaggcatcccctggagatcgacttgttattgatggggaatatccaccttgtaatagttgcaaagggaaaatgaatgcctttaaaactgctacaggtgctgaggtagaatataagtggccagcagaccatggtgatggaactaaggtctggaatgctaaatcgaagggaaccaggaaaataccaggtgcagattgctaa

SEQ ID NO: 431540 - DNA, 432 bp, Serratia marcescens
atgactgatttctcccgttgtgcctttaccgaaggctgcgttgccttgccggaaggctatgtcgaccgtactgttaacgtactgctgcctggcgatgacgtttccccctcaatcaatatctcccgcgatgcgctgcagccggcggaaaacctggaaaactatgtcacccgccagctcgacgcgctggcgcaggggctgaaaggctgggcgttcaaaagccgcgagccggcgacgctgggcgatggattggccgccggcgagtgggtgcgtgccagctatctgcgggacggcaaacgcatctggcaaaaccaggcggtgttcgcgtcggcggagggccgggtgctggtgtttaccctggcgacgacgcgcaagctgatgccgcaggacgacgcgctgctgcagcaagtgctgaacagctaccgggcggcctga

SEQ ID NO: 431541 - DNA, 405 bp, Serratia marcescens
atgatgaccctgaaatatcctgaaccggttgtgcgttctcaagacctggtcattcgagaaccggcgttgtttacccttcccccgcagggggtggctaccctgagcgcaacagatgcgcagggactcgacacgttctgtacggctattcgggctcggttgtcagggccagttcggcttaccgcccacccgcatcgcatcgggagtcgtaccagtgtggctctgcatcttgaggggcgactggggcgttgcatcgatgtgctgatcacggtgaccggcagtacgttgtggcctcagccggaagagtatgatcacccgcgctggtatatcaccgtgccagacgcggcggatgtggtgtacctgcttctccacctgagcgagctgtgtgagcgattcaggggcaattga

SEQ ID NO: 431542 - DNA, 2856 bp, Serratia marcescens
atgcggttttccctgtttgataaaaagcgcctggcgcgaaaaaagccggcagctgttgcccaggacgcactgaacgtgaccgaggacggtgtgccgctgtctgtcgacggccgtgagccattacggcgccagggcaagatgacggtaaaggatgagcagcaggtgtaccacgccaatccgtccatcgttgattacctgccctgggcggagtttctcgaccgtgagcagtgtatcttgctcgatgacggcgtatccgtcggggcagtttttgacatcacgccggtggcgaccgaagggcggacggacgatcgcctggagcagatgcgcgatactgtagaggatgccctgcaggactcgtttgacgaacatgatgaaaacccctggatcgtgcagttcttctgccaggacgagaacaatgtcgaggcgtatatcgacaggctgcgacagtatgtcaaaccccacgcgcagggcagtgcgtttactgaagactggttgaaagagaccgagcgccatctgcgcgggattgcccgtccggaaggcctgttcaaagatacgctgataacagaccagccgtggcgtgggcagcagcgacggacccgcatggtggtctatcgctggattggtaagagcaatcatgatccgatgccaccgattgccatgctgaatcagacctgtgagcgcgtgaccggtgccctggccggtgccggcgttgcctgcgtacgccagaacggtgcgcagttccatgactggatgctgcgcctttttaaccccagcccggagtgggtggataaagagacgctatatcgcgatgccgcctattttgacagccgtgacacgccggaaggcgcgatgccggtgcagaatgattttgccgaaaccctgctgttcaccccgccagtatccgatcctgaccacggtgtatggtggttcgataaccaggcgcattgcgcgatcccggtcgagaagctgcgccgtccgccggagccgggcacgatcaccggtgaaatgaaacgcggcgagaagaaaatcaatgcgctgatggatctgttcccggaggggacgatggtgtgcatgacgattgtggtgcagcctcaagacacgctggagaatgacttcaatcgactggccaaaaatgccgtcggtgagaatactgaatctggccgcgtgcgacaggacgtggcgcaggtgaaagagtacctgggcaatcgccacaaactgtaccgtgccggtatcaccttcctgctgcgtgccggcgatctgaccacgctcaatcacaaacgtgtcgagctcaccaacgtgttgcttggcgccggcctgcagccggttcgtccggaatttgatgtggcgccgctcaatacctacctgcgggcgttgccgatgtgttttaacccggagacggacaagaaacactggtatacccgcctgacctgggtacagcatctggccggcctgttaccggtgaccggccgcgaaaccgggaccggtcaccccggcatgagcttcttcaaccgcggtggggatacgctgacgtttgacccgctcaacaagcacgaccggagtcagaatgcgcacatgctgtattttggtccgaccggcgcggggaaatcggcgacgttgtgcgcgaccctgtcgcagctgatggcaatacaccggccgcgactgtttattgccgaagcggggaactcgttcggactgctggccgattatttcgaaagcctggggctcagtgtcaacaaggtgagtatcaaaccgggcagtggcgtctcgctgccgccgttctcctacgcgcataaactcgtcgacgatgcgttaacctcgctggccctggatgaaaatgacctgccggacatcgatgccgatgacgacgaggatgaagataagcgcgattacctgggagaaatggaaatctcggcgcgcatgatgatcaccggcggcgatgcgaaggaagaacatgaactgaaacgcgccgaccgcgcgatgatccgtgaagccctgttgatggcggcgcgtcagacctatgacgaaggacggcagatgttgccggcagacctgcagaaggcactgtacgccatatccaaagacgaagggagtgatatccgtaacgtccagcgccgggccaaagcggccgaaatggcggagtcgctcgggatgtttacccaggcaggcagttttgaagcagagctgtttaaccgtgagggcagcctgtggccagaggcggatgtgaccctgattgaccttgggcatctggcacgtgagggctatgaggcgcagatggcgctgacgatggtgagcctgaccaacaccatcaacaacattgccgagcgagaccagtactcggagcgggatatcgtgttcgcggtggatgaggcgcacattgtgacggtgaacccgttgctggcgccgtatatgaccaaaatcgtcaagatgtggcgtaagctcggcgcctggctgtggctggccacgcagaacctgaaagacttcccggatattgccgagaaaatgttgaatatggcggagtggtgggtttgtctgaccatgccgccggaggaggtcaacgacattgcccgcttcaaggcgctgactgaagagcaaaaggcggtgctgctgtcagccagcaaactctccggctgttataccgaaggtgtggtgttgtcgaaaaaactcgaggcgctgttccgtgcagtaccgccgagcctgtacctggcgctggggatgaccgaaaaagaagagaaggccgaacgccgcgcgctgatgcaggaatttggctgcagcgagctcgaggcggcgcgaagggtagcgcaaaagcttgaccgcctgcgcggcctggcggcgaacggggaggcacgggctgcatga

SEQ ID NO: 431543 - DNA, 426 bp, Serratia marcescens
atgcggaaaaatctgtttaatcgagttatggcgatcactgtcattgtcagcgtcatggcgttggccggctgttcgacgtcgaaagaggaaatgctgccaccgggcgacagctcgatgctggaattgtggcagggtgaggatggcggcggaacggcgcgcaatgcggtggcggcgcgcgacagcctgcgccgaccgctcaccgagaacgaaagccaggcaacagccgcgagcgatcgcagctacagccgcacacaggaaagcgaaatcagccagcagttcccgcgcctgccgaatcccgatcttgtgatgtacgtgttcccgcacctggcggatggcaacgcgccggtgccggggtacagcaccgtgtttcctttctacagccaggtgcagtatgcgatgccgggtgaacggacggaggcttactga

SEQ ID NO: 431544 - DNA, 1503 bp, Serratia marcescens
atggctgatgtgaaatctaacatgttgccgaaagtgattgtgttcggcgtgctggctaccgcgatcctcgtcggacttaaggcctgcagcggcggtaaaacacaggaggagactcagcaggcgcataacgttctggccagcatgtcgccggaagagctgcgggcgctgggcgtggagggggataccccggaggacacgttgcgtaccctggtgggcaccctacggactacccgaacccagcaggccgagctgcagaaaaacattgataaagtgctgaaagaaaacgaagaacttcgcaagcgcaataccaatgtgtccggtcaggtcaatgaggccgtggccggcttccaaaaacaagcacagcagcgccagcagcagcttcagcaagagcagcaaacgctgatgggaaaaatccagacgctgaccgagcagttgagtgcgaacaaggacaaggcaaaaagcgacagtgatattccgctggggctgggactggatggcttgggtgccggggacggtggggccgctcctggtcaggatggcttgatgtgggtcggtccgaaagacatgaaagaacccgacccgcgtaatccgaacagcgtcaaagacggcccgcagttcccgacgtcgttcctgtcggacaatgcgatcacacgccaaaaagctgcctatgagcagcaggttaaaggacataccaatgaaaaaggggcggaggagaacgccgagccggtgtttaccctgcctgagaattccaccctggtgggcagccgcgccatgacggcgctgctgggccgcgtgccgatcaacggcacggtgactgacccgtacccgttcaagctgatgattggcaaagacaacctgacggcgaacggcatcgagttgccggacgtcgagggtgcgattgtctcggggaccgccagcggggactggacgttgtcgtgcgtgcgcggccaggtcaacagcatcaccttcgtgtttgcggacgggacggtccgcaccctgccaaaacccaacaccaacatgaatgccaacggcagtaacaataatgccggcagtaatgcgaaggaggtcagcaccaccgccggcatcggctggatctccgatgacaacggtatcccgtgcatcggtggagagcgtaagtccaatgcctcgacctatctgccgacgatcgccgccttgtcggccgccagcgccgccggggaagggatcagtcaggggcaatacaccacgcaaaacaatgtgaatggcatcacctcgaccatgaccggtaatgccggccaggccgtgctgggcaaggcgctgtcaggcgggatgaaagagaccgccgactgggtgcgtgagcgctacggcatgatgttcgacgccgtgtacgttccgccgggccagaagctggccgtgcacattactcgccagctggcgatcgactttgagaccaaagggcgcaaggtgcgttacgacgacttcagcctgcctggcgaagacggcaacaccggcgggctggattaa

SEQ ID NO: 431545 - DNA, 909 bp, Serratia marcescens
atgatgaaagcacgtgttctggcgctttccctgagtgtacttcccctggcggcgacgtttatcgtgccggttacgcaggcggaagagctgatgaaatgggagcgtatcccgttgcaaatcccgctggccgtcggcaaggagcgggtgttgtttgccgataaaaatgtccgcgtcggattcccgccggcgctgaacggcaagctgcgggtacaaagcagtggcggtgcggtctacctgaaagcggatgcggctttcccgcctacgcgtctgcagctgcaggacgtggaaaacggggaggttattctccttgatgtgacggcatcggacaaaggctcggctgaaccggtgcgtattgtctacagcggtgacgtgacctcagtcagcagcagtaatgacacgcctgctgcttcagggggaaacaacgcggcgcttggggcggataacggcacccaggcgaagcgtaaaaaagtcaaatacaacgcgccgctgccggttgtcctgacgcgttacgcagcacaaagcctgtacggcccggtgcgtacggttgaagcggtgcccggtattcatccggtcaacccgcacctgccgaaacgtatcaccacactgtacccgtcagagccggtgaccatcacgccgctgggcggctggggtattggcagccgcaacgtggtagcgctgaaggtgcaaaacaccgccagccgcaaaatcacgctcgatccccgggtactgcaggggcagtttgtgacggcgacgttccagcaccgctatctcggcccggtggggactccggaagacaccaccacgctgtacctggttactgctggtcgcccggacggggcgtttgtcgcggagccatcagcggttcgcaaagccgtaaaagcggcgaagaagggggcaaaccatggctga

SEQ ID NO: 431546 - DNA, 672 bp, Serratia marcescens
atgagccgtttcagacatgcggttaaaaaccgcgatcagcatattctcacgttgcgggttgcctgcggtgtgctggtcgttttccttctggtggccagcatcggctggatgcgggcgcctgataatttgaccatccataacccgccagacctgcgcagcggctctacccgcgcctggtgggaggtgccaccgtccacggtttacagcttcggtttttatatcttccagcaactcaatgcctggcctaagaacggtgaggtggattacccggcaaaaatcaatggcctgtcaccgtacctgacgccgtcgtgtgaacgctttctgaaagcggatgccaaaaagcgtagcgaaagcggtgagcttgccggcaggacgcgcgtggtattcgaaatccctgagcacggttacaacggccgttataaccagagcccagtgacggtcaaaggccgtgataactgggtggtacgccttgatctggtggcggacgagtcctttgccggcgaaccggtgaaacgcgcactgacacgttacccgctgaaagtggtgcgcgcagaaggggatccggaacgtaatgagtttggtctggcgctggattgttacgacagcatgccacagcgtcttgctgcagcgccggcggaacccgcgcctgagaaaaaaggagtattccaatga

SEQ ID NO: 431547 - DNA, 366 bp, Serratia marcescens
atgcagactatccgatttttacctgaccgcttaaatgccgagcccgtcgttttccgggggtttacgaccccggaaatggggctggcggcgttagccggcgtgggactgggtctgctcgtgtcgttgccgtttcttcctcttgccggttgggtcgtgatacccaccggcatgctggtgacgccgcttctcgtcatctggtttggaggtagccggctgacgcgccttaagcgcggtaaaccggagaattatatctggcagcgcctcgaggcgcgtaaacgtcgcatggggtggggggatcccaccctgattatcgacaaacagggctggtcgttgcgtcgcagccgcgttgttaagaggtccacatga

SEQ ID NO: 431548 - DNA, 366 bp, Serratia marcescens
atgaatgctgcagttcgtcttttccgtcaactctgcgcgcgtgtcgcagtagccacttccctggtgtatgtcgccagccagccggtgcaggcggctctgccgtcggttgagcccccgtcctccggtggtggcggtggtctgatggataccatcaaaggctatttccaggacgggatcgttattatcggtctggtcgccgctgcggtggccttcctgattgtcgccaacgctgcgatccatacctttgccgaggtccgtgatcagaaagcgacctgggccaagttcggcgccatcgtgctggttggtgtggtgctgctggtcaccgtaatttggctggttggcaagtccgccgaaatcctgttctaa

SEQ ID NO: 431549 - DNA, 243 bp, Serratia marcescens
atggccatgaccggtgcgcaggagcaggccttcaaggcggccagcggcggtgttgaagtcaatattctgtcgctgatttgcatcggtgggttactggcggtgctgtttgtctgggcggcctgggctctagttgatgtttaccagggctggagtaacgaaaaagtacgcaatggggcgttggttcacttcgtcatcaaaaccgtgctgttgctggttgtttcaatctggatgtttgccagctga

SEQ ID NO: 431550 - DNA, 330 bp, Serratia marcescens
atgcctatccccgttgttcgtggtctcggcgccggctgtgtgctggggctgactttgctgaccgcattgcctgcctttgctgctgaaaaagatgagctggcctctgcccagcggatgctgattcaggtacaggcagcgcttgaacgtgcgcgtgttgccgccgtgcaggcggacccgtcggagcgcggtcgtttcttcttcgactatgcccgcgctaccgccgatctcaaaaccatcaatgccggtatcgatcgttacctcgagccttcacgcgcgcaaccacgtgatggcagtgcggtggccggcaactaccgtcgggagcgcccctga

SEQ ID NO: 431551 - DNA, 285 bp, Serratia marcescens
atggaattggaactttacgctgctattgctctccaggctcttatcatcggcacattgctgaaacctatcttagaggatggtccttcgaaaaatcgtgctcaacgttggttacgtgccctggaattattcgggatcttgtgtcttggcgtttctctgttcgctttcagtatggcaatgtatatcagcgattttcgtgatttcgggctgattctgacactggtattgctgccgttgggggttattgtgatgattatttcatattgctggtcgttgaaagctaactga

SEQ ID NO: 431552 - DNA, 759 bp, Serratia marcescens
atgtcgcaagcggtgaataatcaacctcagcagcccgtacaaccccgtaagcatgggctgttttacaatgtactgtggggctggccctggatgctgatcggtatgttcctggcttcgcttttggtgagcctggtgatcgaatatgtcgggatggcattcttctggccagagcttggctcgtcgcacagtgaagcggtgatgaacaccgagttggggtacctgtcctctgaatttacgcgtagtctgctgctgtctgaaccgtcagtgaccgtcacccgttggattatgacggcgtatcaatggaccttcgtggacagcggctttttgggctggattaagcaggcgtatgatacgcaggtacacagccagaatgccgttgccagggagctgaacagctggagcggttggctggcagccacgcttaatgagtacctgatggcgacggtgtacgtcaccgtgatcaccctggtacgtgtgaccattttggtgctgtccatcccgctgtttatcctggtggtcctggttgcgctgaccgaggggctggggcggcgtgatattcggcgctacggtgccggctatgagtcgagctttgtgtaccaccacgccaagcggatggtgaaaccggcggtgtatatcccctgcatgctgtacttgtcctggccaacagcggtataccctaatctgctgttgttgccggccgctatcctgctcggcattgcggtgacagtgacgacagcgtcgtttaagaaatatttgtag

SEQ ID NO: 431553 - DNA, 2115 bp, Serratia marcescens
atgagtaatcgtcatgtcatggaagcgctgctgcgcccggcggtagaattgaataccgcgatcgttgccggtgctgcggcagcgatttgttttgctgctccctggtcggtcgccctggcgccgtcggtgagttatgttactgccagcgggtttgcggtgctgtccgcggtacgagcacggcagggcctgcgggtggtccgttatcgccgtaatctgcgtcggttaccgcgctatgtcatggaaagtcgacagatcccggtgagcaggcagcggctgttcctggggcggggcttccgttggcagcaaaagcacacccagcgcctgatggatacccgtcggccggaagtggaaaaatatgtccaaccgtcgcagttgtaccagatggcgcggcgactggagcttaaaaccgaatataccctgccgtggttgtcccagctgctgcgcaaagactccccgctgaacccggtgcggccgctgccaccggtcggggggaacccggcgatccatggtattgaacccgatgagctcgatgtctcgatggcactgggtgaacgcgtagggcatagcctggtgttgggcactacccgtgtcggtaagacccgcctggcggaactgctgatcacccaggatattcgccgcggtgatatcaccattgtgtttgatccgaaaggggatgctgacctgctgcggcgtgtctgggctgaagcccaccgtgccggccgtggggatgagctgttcatcttccacctgggctggccggatatctcggcacgctataacgccgtcgggcgctttgagcgcgtgtcggaagtggccgggcgtatttccgggcaactgagcggagagggcaacagtgcggcgttccgtgagtttgcgtggcgattcgtcaatattgtggcgcgtgccctggtcgccctggggcaacgtccggactatcagttgatcacccgttacgtgaacaacatcagcgagttgtatgagacctacgcgaagaaagtgattgaggcgcgtatgccggcgctgcagcaacaaattgacaacagcctgcaggtgctgacggaggacgatgtcccgcgcaatatgcagggccagccgaacgcgataaaaatcatggcggtggaaatggcgctgagttccgaggccggcaagcagctgtatgaccccattctcgatggcctgcggtcagccgtccgttatgaccgtacttacttcgataaaattgtggcgtccctgttgccgctgctggaaaaacttaccaccggcaagaccgccgagcttctggcgccgaactatatggatatgagcgacccgaggcccatttttgactgggagcaggtcatccgcaagcgcggtattgtctacgtggggctggatgccttgtcggacggggtggtcgcctctgccgtcggcaacagcatgtttgccgacctggtgtcggttgccggtcatatctataaacacggtatgcacggcgggttgccgacccgggcagacggtaaactgccaatcaacctgcactgtgacgagttcaacgagctcatgggggacgaatttatcccgcttattaacaaaggcggcggcgccggtatgcaggtgacggcctacacgcaaaccgagtcggatatcgaggcgcgcatcggcagtaccgccaaagcggctcaggtgacgggtaacttcaataccctgatcatgctccgcgtgcgtgagaaccggaccgcgcagctactcaccacacagttgccggaagtggatatctacaccaaaaccctggtatcagggcatgccgatacggccgatgtggagaagggacaggattttacctccaacacccaggaccgcgtcggtactgtgaaagcccctctgcttgccccggcggatgtgattaacctcccgaaagggcaggcgttcgcgctgctggaaggtggtcaactgtggaaaattcggatgccgctgcctagcggtgacagggatgatgctttgatgccggccaacctgcagaagattgccgaggagatgcagcgcaactaccgtaccagcgagtcctggtggtctgccagcacggtaatgccagatgttgccatcaaaggggggctgaatgtcgcaagcggtgaataa

SEQ ID NO: 431554 - DNA, 627 bp, Serratia marcescens
atgatattggcgcaacacattgctgcagcattaatggtaaaccctgtgctgacggttgtgctggttgtgttgtttgttgctgtcatgattgggctgaactgccgtggccgggagacagccagccgtcggcgccaccgccgatatcaggcgacggccacgcgggtactggcgcgcttaccgctgctgggcggtgatggccagcgtctggcctatctgcgcaaaatcaacccctatgtatttgaagagctgttgctcctggcgtttgaacgtcaggggtatgccgttattcgcaatacctcctacagcggcgacggcggcctggacggtcaggtcattatcgaaggcaagacctatttcatccaggccaaacgttacggacggacgatctcaccgtcccatatcacgcgttttggtgcgttgctgcgacatcaccattgtgatggttttttcattcataccggccgtaccggtcaactgagccgggtgttgttgcagaaccatccccacgtccacctggtcagtggccgaaagctgcttgcgttgctagccggcaatacagagtggctgctttttttaactgtgaattcggtcaccaacctgaatgataaggaaggtcgtcatgagtaa

SEQ ID NO: 431555 - DNA, 525 bp, Serratia marcescens
atgaaaaaattgaattttctgctgttcggcctgagtctggtgaccaccacggcattggccaacctgaacgtgatcgccgatgtcggtggcgatgatgcatcaccttattttgaggggattaatcggcagggtgtcgcggaagcgccgccggccatgccgcaagcccctgcctctgctgatgaagttgaagtgaccgtattgccggtgatgacaccggagctgacgccgggtgtggtagcggcgcgcccactgcaactgcccgggattggttcgttgtttattgtgggggatgacgatgccagtcgcctctggctgcaggcgaatgcggaacaactcaaatcccggcatgctgcggggctcgtcgttaacgtcagtaacctgcctgcactgcaggcactgcgtgagctggcgccgggggtaccgatggcgccggcctccggcagtgagttggcgcgccggctgcagctgtcgaattacccggtactcatcactgataccggtttgtcccagcaggtcacaccatga

SEQ ID NO: 431556 - DNA, 228 bp, Serratia marcescens
atgaaaacgcttgagatgattaaaaacctggcggaacgcaacaccgttgttgccagtgctgacgtactcgctgtgtttgctgcgctggaaaaatcgcatcagcgcatcggggagctggagtctcagctgcaatcggggtttacgccggaggcgctggctcaggaagaacgagcggaaaatgccgagcagcgcgtagcagagttggaattcatgctgaggaacccataa

SEQ ID NO: 431557 - DNA, 183 bp, Serratia marcescens
atgatgaacgtgaatgtgacgaagcaactggaagaactgaaagaacaattgccggcggcgctggctacatggcagcagtcgaaaggcgggaaaatcaccgttggatggatgcatgccgctaaccctgaagtcatcggcgctttgcttaagctgctcgatggccatgagcaggaggacgcatga

SEQ ID NO: 431558 - DNA, 693 bp, Serratia marcescens
atggacactcgccgcgttctgacccgggggctgttgcccctgcttgccctccttactgttgtgagcggtggtgtcgtacatgccgccacccagcaggttccttccggctaccgggaggtggcgctgcgccacggggtaccgcccgagtccctgtattcggtggcgctggctgagacttcgatggcgccgaaaagcatcatctcggtgacccgcggggccggcccggccccggatgtggagcgcccctggccctggactatcaacgtggccggcaaagggtatcgttacgccagccgcctgcaggcctgggaagcactgcagcactttttgaaaacacatcctcgcaagcgcatcgatgtcgggattgcccaggtcaatctgggctggaatggccatcatttcatgtcgacctgggaggcgtttgacccttacaccaacctcaacgcggcagcggccatcctgcgggaatgctatgaccgcaaccctgggagctggctggttgccgccgggtgttatcaccatcccgccggcggcgcaccggcagcccggtataaatccatcgtgagtggcaagctggcacgcctgaacggcaggggggctgctccggttcgggtgaccagtacaacccccacggctacggtgttaccggtacaaacggcggcgctgacatgggttgagccacggagccagtaa

SEQ ID NO: 431559 - DNA, 711 bp, Serratia marcescens
atgaaactgaaatacagcgtaatttccctgatgctgctgagcccgttatcacaggcggcgcagcagtcggccattgagaacagccaggctaccctgagtgagattcagcagagccagtcgagcaagacggcggagcagggcaggcagtggggcctcagtggggaagagtaccagcgttatcagcagttgatggatggccctcgcgggacgcagtctccggggcttgatccgctaactgcccttggcatcgaggcacagagcgatgccgagcgtaaaaagtacgcgcagctgtgggtaaagcaggagttcgcccgtacagagaaagaactcaagttccagcgtgaggtggatgcggcctggcagcgccttggtgtgttgccggtgaacatggggaatgcggccggtatcgcacatgacaccggcgggcgactggcgttgttcgtgaaagcgaaggactgcggtcagtgtgatgcacgactggcagcggtgctggcagataaccggccggtcgacatttacctcgtcgacagtaaaggggatgacagcctgctgcgtaactgggcgaaggcgcatcacattcccgtcgacaaggtgcgcgcacgtcaaattacgctcaatcatgatggcggccgctggatgaaattcggcaacggcctgatgccggtggtgctgcaacaaggggaaaacggatggacactcgccgcgttctga

SEQ ID NO: 431560 - DNA, 744 bp, Serratia marcescens
atgactgagcataatgacgaaatgatgccgatgacaccggcaaaaaaagggttgctgcgaagcaagaccttctggggggcaacggccggcgtcgttgttgtcctggttgcaggtcttgtcggctcagggactatcaggcatgtcgaccagcgtattgccctgcttgagcaggcacagaaagcactggcgccgcaggatggcatgaactctatggccgatgagctgcaggcgcaggctaaacagcttaagagcctggctgagcgtcaggactcgctcatgcggcaggttggggcgctgacgttaaccaccgggctaccggagaaacttgagcagcaactgcaggctcaacaggttgagttaaatgcactgaaagacagcattgagtccgtgaaaaagtcagcgactgaaaagcttgtaccgactgtaaccccctcaacggacgtccccgctgcaccttcagcgaccgccaaaatcaccccaaagcacaagcccacgccaattaaatcctccccgcgtaatgcggtacctcgtgtggcgcgcaaagcgccattcgtgctgaccggggtggagcagcgcgggacgtcggcctttgcggctgtggcgccgcaggggttcagtgatttgtcgcaggtgcggttaatcggggaaggggaatcggtcgccggctggaccctggtcagtgccggttacgggcaggcgacgtttcgtgtgaacggccgcctgcagaccgtcagcgctcagtaa

SEQ ID NO: 431561 - DNA, 645 bp, Serratia marcescens
atgaaaaaaacaattctcttctcttccctggctgcactcatgctgaccgggtgcgttactcagcagccactgcagcaacgcgatatttcccctgtcacgccttcggttgccgtcacccgcaacgttcaaccggtcagcccggatgcttacgggcaggtgcctgaggtcgtgcgctacgaccgttatttactggtcagcaccgacccggcggctgttcagcgtgatccgctctcgcaaatcatcgatatccgtattccggcatcagtaaaaccgacggtggctgacgcgttgcgttatgcgctgcgccagtcgggctattcactgtgcgcgactggaccggcaaacggcgtgctgtaccggcaggcgttgccggcggtgcagtaccaactgggaccgatgcgtttgcgtaccgcgctgcaggtactggcaggccccgcgtggcagcttgaggtagacgacgtgcaacgtgttgtctgccacagcctgcgtgacgggtatcagttgccggcgacacagctgccgccagtgacggtggtgccggccagggcggtttcagcaccggtttcagcgcatcctgctgcgacggtcattgcacctcagcccgttaacgcggtaccgacaaccggcgggtggctgaaaaaatga

SEQ ID NO: 431562 - DNA, 273 bp, Serratia marcescens
atgcttactttacgcaatgaaaatgatctgcgtgtaatgaatgtccgcatcgatgatgaccgtctgtcggttgatttgatggatggccgaactatttcggcaccgttagcctggtatccccggcttgcggccggtacgcaggcgcaacgggaaaactgggaactctgcggggctggaatgggtatacactggccagatctggatgaggacttaagtacggaagggttgttgatgggagcgaaaggcgttactcgtaccccttcattatcctga

SEQ ID NO: 431563 - DNA, 237 bp, Serratia marcescens
atgccgacaatacttagagtaggtggttttcgcttttacttttacagtcatgaacctaacgaaccggcgcatgtccatattgataagggcaatgcaaccgctaaaatatggttacatgatgtcagtattgcgcgtagtgtgggatttgcatcacatgaactgcgtatactgcagcgtctggtgactgaacatcggacacttttacaggaggcctgggatgcttactttacgcaatga

SEQ ID NO: 431564 - DNA, 552 bp, Serratia marcescens
atggcgtctcgcggcgtaaacaaagtcatacttgtcggtcatctcggccaggatcctgaagtccgttacatgccaaatggcggtgcggtggctaacattaccctggcgacctctgaaagctggcgcgataaggcaaccggtgagcagaaagaaaaaaccgaatggcaccgtatcgtgctgttcggcaagctcgctgaaattgccggcgaatacttgcgtaaaggctcgcagatttacatagaaggctccctgcagacccgcaaatggaccgatcaggccggtgttgaaaaatacaccactgaagtcgtcgtcaacattggcggcactctgcagatgttgggggggcgttcgcaacctgccaacgccggacaatcaggccagggcagttgggggaaacctcagcaaccgcaaccttcgcatagcggtacgccggctcagcaaccccagccagctcaatcgggtggaaatgccgcgccgatggattttgacgatgacatacctttccttgggtttggttatggtatcgcaaaatcagccatttacgctttgtga

SEQ ID NO: 431565 - DNA, 468 bp, Serratia marcescens
atgtctacccaatctcagcaagcatctaccaaaactgaatacttcaacctgactatcaagggcatggggtacctcagcaacattcgtcaagtcaatgggccgaatggcacctttatcagctgtgtcgtcaatggactctccggtcctaccgataacgccagttacacgcgtttcgatgtaacggtcgccggtaaagaagccagcagcctgatcaaccgctgtcaaaaatcggttgatgaagacaagaaagtcctgattggttttgtgctcagcaatcccaagacggacatcttcacgctcaacagcggcgaacatgccggtgaacagcgcgtcagtctcaaagcccgccttatcaaggtcgattggatcaaaatcggtcaggaaaaggtatatcaggctgagaagtccgactctacgccgcctcagcagggttccgcacagcaacaatacgcggaaaactctttctga

SEQ ID NO: 431566 - DNA, 2040 bp, Serratia marcescens
atgcagctctacctgtgtgagaaacccagccagggtaaagatatcggcgccattctcggggcgacccagcgtaagcagggctatctggcgggcgccggcgtcatcgttacttgggctatcgggcacctgctggagcaggctcagccggagacctacggtgaacagttcggtaacccctggcgggagtctgtactgcctatcgtgcctgctcagtggaaaatgacggtaaaaaaagacactgccgatcagtttgcggtcatccgtgggttgctcaaacaggttgattctgtagtgattgcgaccgatgcggatcgtgagggggaagtgatcgcacgcgaattactggagcattgccactttaccggcccggtccaacggctctggttgtctgcgctggacgaggccagtatccggcatgctctggcaaacaaactcccaggcgagaagactgcacccctgtatgaggccggcctggcacgcgcccgggctgactggatgacggggatgaacctgacccgactttatactctaaaggcgcgggaacagggatacggcgaggtgttgtcgatcgggcgggtacagacccccacgctggcgctggtcgtgaaccgtgaccgcgaaatcgccaactttatttccaagccgtactggcaagtcagggcgaacctgcaaaaggatggcattacttttcctgcgaactgggtgccggctgccaactactgcgatgaagagaagcgctgtattcagcagaatgtggcgcaggccgtggtgcagctgtgtcagcaaacaggtcatgccgttgtgcttgaggtagggaccgagcgtaagaaagagtccgcgccgctggcctttgacctggggacgctgcagcaggcttgctcacgcaagtgggggatgagcgcaaatcaggtgctgagtatcgcgcagtcgctgtatgaaacgcacaaggcgaccacatatccccggacagattgcggctatctgccaacatcgatgcgggaagaggttgccgatgtgctgagtgcagttacccgcacggatccaacgcagagcgaaattgtggccaggctcgacagggcctttgtttcccgcatctggaacgacaaaaaaatcacggcgcaccatgggattatcccgactaagcagccgttcgatttgagcaagctgtctgccgatgagctgaaggtctatcagctgatccgtcagcattacctggcacagttcctgccgttacatgaagttgatgtgactgaggctacctttagtatcggcgggcaactgttccgcactcgtggcaaggtcgaggcggtggtaggttggaaagctctgttccagcatgacgtgagcgaggtgaaagaggagtcggcggacacggatgatgtccggctgccggcgctggtaaaaggtgaatccgtcgcggttgccggcgcggagcttaaaacgctgcagacgaagcccccggggcattttactgacgggacactgatcgccgccatgaaaaatgctgcggcgttcgtcagtgacccgcaactgaagaaggtgctgaaagagaacgcggggctgggtactgaagcgacacgtgccggtatcctggaaacgctgtttaaacgcggctacctggagaagaagggaaaaatcctgctttccacgccgattgccggcgaactgatagatgcgttaccgacggcgctgaccaaccccgggatgacggcgctgtgggagcaggcgctggacgagattgcccaggggcagatgacactcgagacgttcatgagccgccaggcacagtggacgggccatctggtggagaaagggaagacgcaggcggtgaagttcactgcgcctccttcaccgccgtgcccgacatgcggagggacgatgcgccggcgtgcaggcaagaaaggcggtggtgccttctggggctgcagtagttatcccacttgccagggcatcatcaacattgatgccaaaggaagccgtaaggccaagcgctataaagcaaaatcaccggctaaaaataaaacaaccggagcggagtaa

SEQ ID NO: 431567 - DNA, 573 bp, Serratia marcescens
atgagtatgaatcgacaggtaaagtcttttttgatgccaggtgtactctgcaccgcgttattgttaacggggtgcgcaggcaccgaattgggtgaatggaacaaaaaaatcagtgacgctgcccattccctggcaaccggtggcagcggcggcgcaagcgagggcggcatgccctggatgacccgggccggtatttccgggccccggcaggatgtgcatcatacttttagcctcccggtggacgttgataccgcggcggcgcgcctgaaaagtcattatcagttcatctcctccgaggaacttgagagtctgcgccagcgtgatcagcacggcgactggagcgcgagctccattgatgaagcacgcccggtctggtcagcaaatcggggaagttattacaagatggggcaggaatggaaaggcaatgatcgccttgagctcgaagtggtcaagtccggtgccggcagccgtctgaaagtgacatacagctcaccggatgcgtcgcatctgaccgacgcttaccttgggagattgatgacgcagctgcagcaggttgccaaaggtcagggatga

SEQ ID NO: 431568 - DNA, 750 bp, Serratia marcescens
atggttgaatcagcaaagaataatgaacaaaaaccggcggctgcacgcgctggtgcattaaaatccactcttaccgtagagcttcataccctctatgccattcgattatgggaagggcgacgtagccaaaacgctgatcctgaaacgtcggggaagcgacgccctgatatttatagtatgccccgttttattctacgagcagggcagatcaatgaggcttctggtgaagataacccttatgccgatgctgcaatggtcgccctggaagagaccttaaataaaggtacgcagttacttcaacaggctgttgccgagctggacaaaacactggcaaacatccctgcacaaatttctctttcagatgttgcttccgtgtctcctttaaatattggtgtatttagtcgcactcctgtgggatatcgctgcgttttccttctggtcggctatgaccagcttgcgatgaaagcctttcaagcctggcactatgggcttatatcacgttcggaacgcgacactttattggaccgaggggggcattggatccgtagcgtatacggtgtcgtccaacactatcgtcccgcgaaggtgactcgagatgatattcgtctcgaaacgcccgcaggtaaggatgcgatcgcccgtttgggtatgcctgacgaaggtattatgtcgggcgcaatacgctcctctttctctccaccactcaagacctctgcattaatttcctctaaaaaaggagctaaatcatga

SEQ ID NO: 431569 - DNA, 1275 bp, Serratia marcescens
atgagcataaacaacacacctgatgacagcctgatcacctttacgctcgaacaaatgaatgcccgcctggcggagcgaataggtgcggaaaagcacgcggggagccccgatgtcacgaatctgcgcagcggtctgctgtacatgggcaatgtacatgattccatcccccgccggttgctcctggacacccgtctgtcaccgctggataaaactgcgtggattatgatccgcttgtacgcgcaacagaatcagggcgccgtgttcccgacctatgacgagctgcagctgcagcttgcctcgccgttcaatggtaaggcgtctcgcgagaccgtcagccgcgtgctgctgatgttacgcctgaccggctggctcagtttgtgccggcgtgtacgtgacgacaaagggcgggtgagggggaatatctatgcccaacacgatgaaccactctcggcccgtgatgcggagacattggatccgacctggctggatacggtcgccatgggctgtgcgcataaaaaccgcaccgtcagccagacggcctggtcggtactgaccgatattcaacatgacccgacaatgcgtcatcagcattcccagatggcggcgattgctgaacggctgggatcgccacaaaccccgcaacagatggctgccagagtgtctcaacgacaggaaaatatccccagttcggacgccgaactcagtaacaaatctccgggttcggataccgaactaagtcaaattaagcccggttcggataccgaacccagtgtaaaacaggaaggcaagacaccgggttcgctttccgaactcatggtgaaatcagtaacttacggtgcatcaacgaaaccgaactgtaacgtacgttctttcacacagagtgtgaataaaacaacgtacgtacctgagttgccggccgaactgcagaacatcatcgcgacggatgatcagcggcagattggcgtccagcttaaggcattgcctgcagaggttgcccgtcaggtgctggagagtcttgagcaggcgatggccaaaggcactctgaataaccccactggctggctgctggcggtcatcaagcgcgcccgaaacggtgagctgtatgcgagtgcaaaatccccagaacctgccgggcctgtaccgcgacgccaaataccttgctctgcagcgccagcaaaagcaacaggtccggtccgtcaacacctggcgtcgcgggaacatgtaagcgatgttgtggccaaattacgccagcaaatgatgcgggcaaaaaattaa

SEQ ID NO: 431570 - DNA, 264 bp, Serratia marcescens
atgaagcccgtgatgttaatgccggggttgcaggtcccccgttcggcgccaccatcctgccagagaaaggcgaaggagcaggtcaggcgtttccgccgcggggaacgtaactacaagcaccttcatgttaaaggcaagcacgcccccgggcgtgcctggatgaagattgatatcggtaccagctggcgactgctcagccgaaacagtggtgatgactgggagctgttgacccatgaacgctacaacaacgaactgtggaagtga

SEQ ID NO: 431571 - DNA, 630 bp, Serratia marcescens
atgagtaatagcttgtctcaggcgacgaacagcctgctcactcagctcgtaatggaacttaaatcaggctatatccgccgctgtgaatctctggggctgaccacggaggagatgcaactgctgcacggtttgaccattgaagatctgcattacctcatgaacagctcggtatcggtgctgaccttccaaatccatcacgagaatttttctctgatgctgcaacatgcgcgccgtgagcagcaacgtatgcagcggattgatcgtgcactggcgttggggggctctatcgaaatgatgcagcactattttggcctctcgaccgttgaagttgcagcccgccgacgcatgaccggtatcaacattcgccaggggcgctgtgcagcgctcagcgacgacgagaacgcggcattgtggcgccagtggcaaaaagccgacatcgatgacgcctccagtgccgatggactggacgtcatgatgctggccgccgaacagatggatgtttctctgacggctgtctggcacgccgtccgcagcttcgatgcccctcagacggcaacggccagaaaagccattcaggcggtgcgtacgccacgcgctacgccgggaggaaatacaaggaggctggcatga

SEQ ID NO: 431572 - DNA, 213 bp, Serratia marcescens
atgaacctttatctattccttatcacaatgctgtccttcattttttggttcctgtttatgcgcgacgttcctgatcccagaacgtggtttaaggacaagggcaaaaacttcatttcagcgttgccattcctgttcgtttccatggtgttgctggcatgcttgtttgctgttttttcgagatatttttccaaaattcaggggggttcactatga

SEQ ID NO: 431573 - DNA, 723 bp, Serratia marcescens
atgagccattcacaacgacaggtgcgcctggtgaaactggtgcgcaaactgcttgagctggcccgcagcaacagtaatgcgcatgaggctggactggcgttagcccgggcgcaaaaactgatggagaaatacggtatcagcgagctggaagccagcctgtcatctattcagacggcaccgagccggggagcaccttccgaagcgaaacaaaaactgcctgaatggatgtccggtctggcgtgggcgattgcccgcgcctttggatgccgtttgtatttttcctggcgggatagcgagtcgggcccgcgccgcaacgtgacgttcttcggttttagtgagcggccggccgttgcggcttatgcgttcgatgttctgagccggcagttgaaagatgcgactgcagactttctgaaaacccagaataagcgcctgaaaatgagcacgcggcgtgcccgagctgagcagtttcgtgccggctgggttgccggcgttcgcagagtcatcacgacgtttaccgtgacagaacaggaatgcgagctgatgggagcctggctggaaagtcaaaagatgggggagctgcaaacgcgcgccccgaaaacctgccgcggtgatgatattgcccgtttacgtggattcgaagcaggccagaacgcccgtttacaccagggtgttcagggggctgtgaccactggcattggttatcagggaggacgcaattcatga

SEQ ID NO: 431574 - DNA, 1737 bp, Serratia marcescens
atggcgcgtactaaaaccaagatcctcgatctgaacagtgctttgctccagcagggcaagactgcagcaggcacgcaacctttagcccctgtgctggcggaaacccccgtcagtgaaatgccgttggtattgaccctggatgaagtgaacccaaatccggataacccgcgcaccacccgcaaccccaaatatgatgatattaaagcgtcaattcgggcacgcggtttggacacagtgccaaaagtaactcgtgatccagagcgtcctgagctgggatatttcttcagtgatggggggaatacgcgttatgcgatcctttccgaactctggcaagaaacaggcgaagagcgattctaccgcttttcttgtgtgttcaaaccctggccaggtcggctgtcctgtgtcattggccatttggctgaaaatgaagtgcgtggagatctgacgtttatcgagaaagcgtttgggatcaagcaggcacgtacgctttttgaagagcagttgggaaaaacagtctctttacgtgaactttcaacgctgttgggtgagtccggctatccggttcataattccaatatcagtcggatggaagatacgatccaatatttatacccttatattccacgtttactcgagtcaggtttaggacgtccacagattcaactcttgttagccttacgtgggaatgctgacaaaacatggcagcgttttatcattgatgttgaagtaacttgtacctttgatgcagtcttcggggcagtctgcagtcactttgatgaccctgaagtctattcactggatatgtttcgtgatgagttgatcggtgcgctcattaacgcgttgccacacccgttgctcaattatgaccgctggctactggagctcgatcccaaagagcaaaaccggcgtaagcacctcggtgagcctgagccggcattaacgcctgagctgtcaggcaagggcaatactgtcgagttggcgccagcactgcagcaggaaaataccgacggaccgacggcacctgaagtgcagggggagggctcttctttggtactggacagcgcgttgcctaggtcaacgggtgatgccgatgatgaatcacagaacgctcaggaagaggaaacgcctgcaactcaaactgaacgccgtgttgaaactcagccagatttatacggtgcgccttctgtgttgtcgggtgacgttgaaacggttttagacggtgagaataccagcgtccccctgtcggaccctcatgagtcgacagcccctcacagcaataccgtgacacagccaaagcaaggtgtaacccctgttgcagaggtgccttttgccgaggtaggacttgagccggtctcctccatttgggctatttctgccctgcaggatgatatcgagcacctgcaggtgatcaccttccgattggcattcgaactggccgaagtggcgggctgcgaggcggaaatcaaagctgataaagccgacttgcaggctgccggctacgcattgactgccgaacgtccctctcgcttcaccgcgttactcctgacccttgccggcaacaacccggacggcgcctcatccagctcgctcaatgaagccctcatcgggtcggaaaatgctgctgactggcctttgcttgacgatattcatgccgtgaaattgatgcgccttattcgcgtcttacgccgcctgcgtgaactgcagcgtgacttatctgcaacagaggagacagcctga

SEQ ID NO: 431575 - DNA, 1350 bp, Serratia marcescens
atggctgatatgcatattccttattcttcggatgccgagcaggccgttctcggcggcttgatgctggataacgagcggtgggatgacattctgccattagttggagatcgtgatttttatctggcggtacatcgtcgcattttccaggccatggctcgcctgatggctgttcagcagccgattgatctgattacgctccacgaatcactggaacaaaacggtgagctcgagcaggtaggcggttttgcctatctggcggagttgtctaaaaacacaccgagcgcagccaatattgtcgcctatgccgggattgtcgctgaacgcagtcgactgcgtagcctgttgcagctcgggcgtgaattgagcgctgatgctgccaatccccgtgcagattctgccgccctgaccgaaagggctgaacagcaattgttccatctctctgagcaaacccactcacagcagaatgtcagcctgaccgatgggctgaatgctgtcgtgacctatctggagacggtgaatggtggtaatgggatcacaggaaccccgaccggcttctcagagcttgatgtgatgacgtgtggtttgcagccgggggatttggttttgcttgccgcacggccgtcgatgggtaaaaccgcctttgcgttgagcgcctacaccagcgcacttcgaggcacggagaaaccggcattcttctttagcctggaaatgccgcgcgagcagttgctgcaacgcctgattgctgttgacgggcgagttgaactttcaaggctgcgcagcggccagttggatgatgaagattgggcgcgtatttccaaagcgatggagcggttgttgccattggaaaaccgcctgattattgacgatgaatcgtatttgacccccgcactgctgcgctccagggcacgacgctatacccggttgtatggtaatccgggtttaatcatggtcgattacctgcagctgatgcgttgccctggtcaggaaaatcgcactcaggaaatttcagaaatctcccgcagtctgaaagcgctggccaaagaacttgattgtcccgttgttgcgctatctcagctgaaccgacagttggaaagccgtgctgacaaacgtccctttaatggtgacctgcgagactctggtgcgctggagcaggatgccgatgtgatcgccttcatctaccgggatgaggtctattacgctgactctgatgatgccggcacggcagaaattatcattggtaagcagcgtcagggggcaacgggcaccgttcgcgtcaagtttgaagggcaattcaccgcgttcagtgacttccacgatggtcagtatgaccaatactcggggagggcgtaa

SEQ ID NO: 431576 - DNA, 666 bp, Serratia marcescens
atgaatattcaacagctagtgacctttcttaatgaacagcgcgagttagccgcacctgcaccctggcaggttcttgaactctatagcgatggcgttactgtcgtggatgtcaacggcttcgagcatgtggaaatccctaatgtcgcgattgttccagattgggaaaaactcgggcttgagcactggtcagataacggtgggagccgtgatgtgagtcttgaggagcaacgggctaatggttatctggccgctgcagcaccacagctactggcttacgtcaatgtgcttaaccgtaatttggaaaccacggagaatgcgctgcgccgcatgttgaaaatgcatgcgttgatgatggcaaaaaccaatcatgctgccagcttctatgatgctgaatgccttcacgaaatggccgaggctccgtatgaggccaccgcggttcttgagcacatctgtggcgccgatgctgacaatactcacctaaaagaggcaacttgcgtagggtgcggttgtacagatggccatgcttgcctggataaaaacagcaagccatgcagttggctcaaggtcaatcgtgaaaccgggatgggggtatgttcatgctgtccgacttttcttaagcacccgttaacaactgacggtgaaggatcggaggtgcgtcatggctga

SEQ ID NO: 431577 - DNA, 918 bp, Serratia marcescens
atgcatacattagctaaatccacaccgatgggtgttttccatccagcacctcatgttatcccaatggtctcaaccaaagggggcgaaggcaaatccactcaaagcgccaaccttgccggcttccttgctgatgcaggtaaaaagactctcctcatcgacggcgatcattcccaacccaccgcaagcagcattttctccctggaatatgaggctcccagcggtttgtacgaactgttgatgaagactgtcgacctcaatcaccccgaacaaatcatctcccgttctgttatccctaatctcgatgtcatcgtttccaacgatccccacgaccgtttatcttccgccatgttgcatgctcctgatggtcgtatgcggctgaagaatgttctgcagcaccctttgttcaacgagtacgacgccatcatcattgactccaaaggtgcggcgtctgtgatgcttgaactcattcttgtcgccagtacggagttcgctgtcggtgttatcaagcctatactgccggatacgcgtgagtttctgcgtggcacattggggttgatggaaggattattgccgctgaccagttatggtattgcgttaccgcgtatccgtattctgacgaactgcatggagtacactaacctggattggcagaccctgaatagtctgcgcggcattatcgcaaacgggcaatatctgcgtgcagataccttcgacgtctcccttctcgacaccatcatccccaagctggaaatttacaaaatggggcatgcttccggccaacctgttcatcgtctcgaaagaaccaccacccgtacatcaacactcgctgctgctgacaccatgtatgagctggcctgcgagttgttccctcactgggttgccgacttcgacattctgcgtcaggaggcaaatcaatga

SEQ ID NO: 431578 - DNA, 201 bp, Serratia marcescens
atgcagttaacgctgggccgatacagttttaccctgagcgataacgacgccttatttatggcggaagctattttgttgcagcgcaagcacccagacatcgttctgcctgagcaccacagccaaaaacacggcgtgatccgtctggcgaaccttcaggccgaaatgagtcgggaagtggttgatcactatgcgatcgattga

SEQ ID NO: 431579 - DNA, 1359 bp, Serratia marcescens
atgccaaataattaccatcaatacattgaagacgtcagtgatgatataaaaacttgccttgagggcatgggatgccagcctatacttttcgttggctcaggtttaacaaaaagatatctcgctggcccaaattgggaagagttgttaaaacaacttgcagacgaatgccctaacatagataaaagatttgcctattacaaacagaaataccctgagcttattgatattggaacagttttctctgatgcttataacgagtgggcgtggggtgacggggagagtgaatttccaccagctttatttgaggcgggcaacaacccaagcatttacttcaaacacaaaatatcaaatgtttttaactcactaatccaagagaaccaaattgtagacaatggtgagattgaacttttaaggaaaatacatccccactccatcatcacaacaaactatgatggattgctagaatcaatataccctgaattcacaccaataataggccagaaaattctatatgccaatcacggcagtattggtgagatattaaaaatacacggttgctcttcatcacctgaaagcatagtaataaaccgtgatgattacgatgattttataaagaaaaagaaataccttagtgcaaaattgctaacattcttcgctgagcacccacttctatttgtaggttacagcgctgaagacgcgaatataaaaaacatattatctgatatcgatgaactactttccgagaatggagaggtaatacctaacatatacatattggaatgggccgaaagacaaaatgagatcgaatacccacgcagagaacgattaattcaagtatcagcaaacaaaagcatcagaataaagagtatagttgccaatgatttctcatgggttttttcagcctttggagccaacagagcgcttgacaatataaaccccaaattactacgttcgttattagcccgtacctacgaccttgtaagaacagacatccctagaaaccctgtacaagttgactatagagttttatcaaacatcacagaatcagaaggtgaacttgcaaaactatatggcatagccacctcctctgatgggatggcatttaatgccagctatccttttacgttaacatcactgggacaagcacttggcttcaaaggttggcatgatgcaaacaaacttttagaagtagttaaaaacattacgggagtagacataaaaacctttgataataaatatcattacgcgataatgaacggagaggaaattcaatctcatagatattcaaattacctccgtgaacttcttgagaaggtaagagatggagaagcatttgaattaggaataaaagctccgtaa

SEQ ID NO: 431580 - DNA, 750 bp, Serratia marcescens
atgggtgcccgcccaggcgcccagcccgctgccgacggcgtaaaacagcatgtagcagcccaccagccggctgtgcgactgcgggtgcgcgctgaagatcatgctctggttcagcacgtggatcgcctggcccgccagatccagcagcacgatgcccgccaccagccaaaccaagccgctgccgagcaaaccgagcggcagccaggccagcgtcagcagcagcagacacacgccgctggccgcctgccccagcccgcgatccgccagatgcccggcgcgcaccgctgccagcgcgcccaccgcgccgaccaggccgaacgcccccaccgcggcatgggtgaagttgaacggcgcctggctcagcggcaacaccagcgaactccaaaagaggctgaaagcgccgaacatcagcagcgccaacatgccgcgaatttgcagcgtgcggtcatgcagcaacaggctcaacatcgaacgcagcagcgcgggatagctcagcgtactgggagcggtgcgcggcgcaggcagcagacgcgacaggatcggcagcaataccagcgtcactccggcagagaagaaatacaccgtgcgccagcccccgatgtccgccagcgcgccggacagggtgcgcgccagcagcaatcccagcaccactccgccctgcgccgcaccaaccacccgcccgcgctcctgcggcgccgccagggctgcggcgtaagcgatcagcccctgcgtcatggcggtgcccaataa

SEQ ID NO: 431581 - DNA, 381 bp, Serratia marcescens
atggatgatgagcgtatgacttacggtgaaataagagaaatggtactggggtgtttctatgattgctgtagaaacattcttgacattaaccaaaaaacaggtgaaaaatcatcttatgatggtttggaaattgggtatgcagcctatcaatatgaaaatactcctttttcgccaatagaaaagttaatgttcaaggtttttctcctaattttaatggccggaagagaaccgggagaggtggaaaataacattcggagtgttattaaacagattataaatgaatatcctctgggtgttttgactgaagatatctctgaaaaagaaaaaagcgatttgctttatgatatggagttgcttggattgcttgataagcccgagtaa

SEQ ID NO: 431582 - DNA, 540 bp, Serratia marcescens
atgcagttcagcgaccgcagcggcggcatctcgcgccgccgcgttattctgccgttcccggaggctatcgccccggaggagcgcgatccgctgctgctggcgaagatcaccgaagagctggcggtcatcgtgcgtcacctgatgcagcgctttgccaacccgaatgacgcgcgtgcattgctccaggcgcagcaaagttcggcagaagcactggaaattaaacggcatgccgatccgctggttgatttttgtggttacctgacggtgctgggtaccccggaagggatgatgatcggtaatgccaacatcaccccgctgaacccacgccgctacctgtaccacgcctacctgtcgtttatggccgcacgaggctatcagcacgtgatgaacctgacggcgttcggccaggcggtgccgcagacgctgaaagagtatgagcacacgctgctgaaacgccgtaccaagcagggaatacagaccaacctgatattgagcgaagagtgcgaagcggactggttgccgaagtgcggtgcggtgtga

SEQ ID NO: 431583 - DNA, 393 bp, Serratia marcescens
atgaaaacagcatcacttattgcagccgcgctgctcttactttgttggcttgttcaatatatttactctcgtcgctataaacgtgagttcgatgttttttatcaacgctatacccaacagggccactttgtccctgctcacgtcgcgattgccgatggccttggctctttaggtacttccattaaagcccaatggttcagatggatcctttgcggcaagaaaatcaaggtgaagaaaaaccaatatctttccgccaagacctatgaatttgttcgtctttcatcatctgaacgcttgcagacctggatgaaaaacaacggcacgcttttggcgctggaaggcgtgctcttcatcatggcattgatctttatgataatagcgagaatgtcgtga

SEQ ID NO: 431584 - DNA, 5877 bp, Serratia marcescens
atgagcatcacggcgcaggtaagtatcgcgcaaaaattgggcttcacctcccaccagaatgctgttccgatgttacgtgagcttgtcttgcataacgaatccgatcaaacctaccaaaatctaacgttgcacctgcaaacagcgccgtcggtgctggaagcaaagcaatggaatattgactgcctgctgcctggttcatcgattgatattcgtgagcgagatgtaaggctcaatgcggaatggctggctgaacttactgaaagtgtgatttgcgaagtcacgttaactttgcggcaaagtgacaaagagctcttcacgcttcattatcctctcgaggctttagcgaagaatgaatggggtggcaatgcaatgtccgaactgctgccctctttcattatgccgaatgatcctgctgtagatcgccttatcaaagctacatctgatgtcttgcgcagtgctgggaaaaaagatgcgttggatggctatgaaagtaaatcccgaacgcgcgtgtgggaaatggcttctgcactatggacagctgtttgtaacctgaatatcagctatgcactcccccccgccagttttgagcggaacggtcagaaaattcgcacacctggtgcaattctagaaggtaaagtcgctacctgcctagatacaacgctattatttgcctctaccctggagcaaatggggctcaatgctctggtaatccttagcgaagggcatgctttcgctggtttctggcttcaaccgcaagagtttgcacaactagttactgacgacgtatcttctgtccgtaaacgtgttgatttaaaagaaatggtagtgtttgaaactacgttggttactaaagcacagcctccttcctttactcaagctttcgaggaagctttaaagcatcttactgaagaggagtttcacgcagccattgatacccgtcgcgcacgtatgcaaaagattcgccctctggctctggggagcactcgcttagaaagtcggttagattcagaaccgaatgttcgacatggctttgaagatgcaccagtacttccttcttttgaacttgacatagagatggaaggtacgaaagatgccgctggccgtctcgtacagtggcaacgtaaactactcgatttgacgacccgtaaccgcttattgcatttaccagacagtgctaaaagtattcgactgatatgcgctaatcccggttacctagaagacaaactggcagagggaaaacgaatccgtattgtctcattacctgacctcgagttgggggggcgtgatgcggaattatatcgccagcaaacaaatgcagacctccgggaggagtatgcccaacaggctttggagcgtggtgaagttgtatcacctctcgaaaaagaacgcctggaatcatcacttattgatctgtatcgaaagtcaaaaagcgacttggaagaagggggagccaataccctgtttcttgcaattggtttcttgaaatggaaaaaatcagctgaagatacaagaaattacttagctccccttattctattaccgattcagctagaccgaaaaagtgtagtttctggtgtgactatgcgtttgctggaagaagagccgcgctttaaccttaccttactcgagttattgcacaatgactttgcactgactatcaacggccttgatggcgagttacctacagatgaaagtggcatcgatgtagatggtatctggaatgtggtacgtcgcgctgtacgtgatatgccaggttttgaggttactcgtgacgtcgtgattggtactttctcctttgcaaaatatttgatgtggaaagacctcatcgatagagcaccgcaactgatgcaaagttctctagtaaaataccttatcgagcggggtcaagaaaatgttgcccttgagacgaacggggagataattgaggtcaatagacttgatgatgctataagcactcaagagcttttcctgccattacccgcagactcctcgcaaattgccgctgtggtagcttctgcaaaaggtcgcgattttgttttggatggacctccgggcaccggtaagtctcagacaattgccaacatgattgcacataatctggccctaggaagacgtgtattgttcgttgccgagaaaaaagcggcccttgatgtggtctatcgcagacttgaagctcaaggattgggcgaattttgtctggaattacattccagtaaaacgtcaaagatggattttctcaaacagctggaacgagcatgggatgcccgcgatatgctcacgaccagtgaatgggaagaagaagctagcaaagttcaacgactacgtgacaagttaaatgaggttgtccgtctattgcatcagcgatggccaaatggactgacacttcatcaagcaatgggacgagtcatcagagatgccagtatagtcacacctcaattcacatgggttacaggcacattgcatacctctgagcaaatgacagaattcagagaaatcgccaaacgtcttgatctcaatcgaaatgcctttaagcaacatcacctgcattttgggagcataaaccagactgactggactaatggatggcaatcgttgcttattgctgaagctctgaccattccggataacattaagcacctagaaaatgctgcaggagacctaattaaagcaacaggaatcattttagaatcaaatgaacctgataaacttgttcaactggcatctctttgcgattcattgtcaaaagcagcaggtactgatctgagctttatgttcgctccagatgttgttagtagaattgaagctacgaaaatggcaatcagccttctcaaagagatcgaattagccaaatcaaaattgtctgttacttatccaggaaataactggcaaagtttaaatgttctccaggtcagaaactctcttgcagaggctgataagaaattttggttttttgcaactcatgcccgtaagaaagttattttcgaggtggtccggcaacatttacttaatgctactcccgatttatccgttgaccttcctattattgaaaagcttcaaattctatctcagagattgtcagagagcatacctttgacttcgactatgccgggatggtgtggtcttgacactgactattccgtcttacagaacaccctcgacttggccgacaccattcgcagtgcattaagtagatttgcttcatcacctcagcaacttgcagagcttcgctccacagttaaaacgttattgattgatgctaatgacttactgggttctcagggcattattgcaacgcttacccagaatctgctcgcctccgtgtcagctttcaatgaagccaaagcaagattctgtaatctgattaaaacgttagaacatgacttggagatcgcaacccttcgcgattgcgcattgggcatcgtgaaccatcaatcatctctgaaagcctggagtgactggagccgagttcgcgaagaagccgttggggaaggcttattgccactggtcaatgcgattatccaacttgacccaagtgatatcagtgcggtggagttatttgagacagcttattgccgctggtttgcttcgtgggtgattgactcagaacctctgctgcataattttgtacccgcagaacatatgagtgatattgatgcgtaccgcattcacactgaccgccttgccaggctctcggttcgctatattcgtgcacgattgtgcggtgtgatacctgcaaaaaatgaagtcagtaagcaagggggctttgctctgctcaaacatgaattgcagaaatcacggcgtcataagccagttcgccaaatggctgctgaaatgggcgatgctatgtcgaagctagctccttgcatgctaatgagcccactctctgttgctcagttcttgccctcagagcaggcgttgtttgatctagtgatttttgatgaggcatcacagatagctccttgggatgcgattggtacaatggcccgcggtaaacaagttgttattgcaggtgatcctcgacaaatgccaccaaccagtttcttcaaccgtgcggctaatgataccgatgaaactgaagaagatatggaaagcattcttgatgaatgtctggctgcaggcctgtataaccacagtctgagttggcattatcgtagccgccatgaaagtttgattgcattctccaatcatcagtattacgacggtaatctgatcaccttcccctcatctaaaaccaaacaaagttccgttcagtggcgcaaagtaatagggacctattctaaaggtaagggacgccataaccaggccgaagcagaggcaattgtctctgaaacagtgaaacgtctgaaggataaaaaatttatcgcatctggtaaatctattggcattattactctcaatacggaacagcagaaactgattaatgatctattagaccgcgccagacaaatacatcctgaaattgagccattcttccaacctgaactggaagagcctgtcgtagttaaaaatcttgaaacagtccaaggggatgaacgagatctgattatgcttggtattggatatggccctacagagccgggcgctaataccatgtcgatgaatttcggaccactgaaccgaaatgggggctggcgccgtcttaatgttgctgttacacgcgcacgtcaggaaatgatggtgtttagctcttttgagccttcctttatagatctcaatcgtacaagcgctcgagccgttgctgacctgaagcattttattgaatttgctcagcgcggcccgatagctctggcacaagcagttcgcggctcggtaggaagttatgactctccgtttgaggaggccgtagcaaatggcctaagaagaaaaggatggcaagttgttccacagattggcgtatcacggtttcgtattgatttgggtatcgtgcatccggataaaccgggagactatttagtggggattgaatgtgatggtgctacctatcatagtgcagccactgctcgtgaccgtgataaagttcgtagtacgattctgcaggggctaggctggaaactgcttcgactatggtcaacagaatggtgggttgataaagaaggcgcactagaaaggctagatatggcgattaatggtctgttggaggaatccagaactgcggaagaaaaaatcgcagataaagatgagctggatcaaccaatcactatagaaaatagtagtgcagacgtaactgatgagcagggatatattcaggttgttaatgatgaagaaagatctgtttctggtaagcatattaaacccattatccatccagtatcagcggaagatgatgcagaggatccattgccagaactgaaatatgcttattctgcgacattagaaaccgctcaagttggaaaaacatgtaagtatgttataaatgaattgaaggagtggcagggaaaaattgatccagagagattctatatcgcagagtacgatgaaacgctaaaaatactcatcgcagaggtgattaatcttgagtcccctcttctagataaaacgctagtacagcgcatagcgcgtgtacatggctttagccgtgcaggtagattgattcgagagcgtgttatggaggttgttgaccaaaactatcatgtagcgacggatcattttggtgaagattttatctggttatcagaagctcaaagagcggactggaatgccttccgtttaccttcaaccgatgccgatgttcgccaggttgatgcaataccaagtgaagaattgcgcgcattggctttgagtattgaaggtgaaaacaaggtctcggaaatggcaaagtcactaggtattaagcgtctgacaagtcaggcaagacaaagattagaatcgattatttaa

SEQ ID NO: 431585 - DNA, 1461 bp, Serratia marcescens
atggttaaaaccaaacagattttagtcgtcattcatctttgtagctttttggttcttctttatagtctgtcaatgatcccaccactggcagtagcgctattgtataaagaaaagagcgtattttcctttttctatacgttggcgatcgctggcatttctggtgccttggggtggttcactactcggcaagcgaaagtgcagctacgcacccaagatggttttctgattatcgtaatgttctggttactgttctctcttataagtgctttgccattgtggttcgataacactctgaacattagtttggccgatgcgatgtttgaaggggtatccggtatcacgactacgggggcttcagtgcttaacgatgtatcgggcgtaccaaagtcctttctctattaccgttctcaactcaattttattggaggtcttggcgttattgttcttgctgtggctgtattgccgttgctggggatcggtggcgccaaactttaccaatcagaaatgcctggcccattcaaagaagagcgattgacgcctcgcttggctgatacgtcgaaaaatctatggttgatctatctcgggttggggttagcttgtacctttgcataccgaatggctggtatgccatggtttgacgcactctgtcatggcctttcaactgtttcgttgggaggcttttccactcgtaacgagagcttgggctatttcgatagctctgcggtagaaatggtcggaggcattttttctatcttggctgctataaactttaccctatatttcgttgtcgttggtcgccgaagcttgaagcccctatatcgtaatacggaactgcgtttcttcttactggtactatctattattgcagtgatcgtgtgtattgagctttatcgttccggtatgtacggtgtgaaagattcctttgtgcacggtttttttcttactagttcaatgatgacagacaatggcctagccactgccgactacgctaagatgccttcacataccatcatgttattgctggcagccagcttttttggcggctgcgtcggttcaacatgtggagggataaaagcactgcgctttttgatcatgtataagcaaagtaggcatgaaatcaatcaactagtacaccctaatgcaattttcaccattaaggtaggcaatgtaccgatccaagatagggttttgcgttcagtatggagttttttcttcctctatatcttattcagttgtttctttatctggctgcttaacctgatggggtatgacatgatcacttcattcgccactgttgctgcctgcattaacaacatggggttgggatacggtgaaactgctgccggatttggaacgatgagcgatgcggccaagtggctaatgtgtgccgcgatgttacttgggcgtcttgagatatatccaatgcttatcctttgctcgcggaatttttggcgtttctga

SEQ ID NO: 431586 - DNA, 1887 bp, Serratia marcescens
ttgcacggccagtcgctgcgcgtcggcggtatcaccttccagtccggtgacctgctgttgccgctgcacaatgccgggggtgaagtggtcaacgtgcagctgattaacgcccgcggggacaagcgcatgctggcaggcgggcaggtgaaagccgcctgtcataccctgtgcggcccggacaacgcggttatctggctcaccgaaggctacgccaccggcctcaccgtgcaccgcctgaccggcgaaacggtctgcgtggcgctgagcgccaacaacctggcggccgtggcggagcagctgcgcagccactacccggatgcgcggctgctgctggcggccgataatgaccgcagcggcaccggacagacccgcgccgccgaggcggccaaactcaccggcggtatcccggcgctgccgcccacggaaggcgactggaacgacgtctactgtcagcagggcgctgaggccacgcgcgcccagctccagacgttcagccagccgccgcagcccagcccgttcgacacgctgagcgatgctgacctgaaagccatgagcgccagcgagaaggccgaactgctggctgagcactacggcaacaccctggcggtgccgccagtgggagaggagctctgccgctatacgcgcggcgcctggcaggtgcagccgcaccggcaactgagccgggagattgccgcgctgttccagaaggtgcgtgcgccgttctccgccgccggtatcaacagcattctggacaccctcaagctgatggtgccgcagatgggtgacccggcccgccggttgattggttttcgtaacggggtgtttgataccgtcagcgggcaatttagcgcccaccggcaagagcactggctgcgcaccgtcaacagcgtggactacacgccgccgcgtgccggggagaacctggccgaccatgcaccgcacttctggcagtggctgacgcgggccgccgggggcaatcacgacaaacaggagcgtatcctcgcggcgctctttatggtgctggccaaccgctacgactggcagctattcctcgaagtgaccgggcccggcggcagcggcaagagcgtaatggcagccatcgcccggctgctggcaggtagtgacaacaccacctccgccaccatcgataacctggagtcggcgcgcgagcgggccagcgtggtgggttactcgctgattatcctgcctgaccaggagaagtggagcggtgacggggcgggtatcaaggccatcaccggcggtgatgcggtcgctatcgacccgaaataccgcgacgcctacgcggcctacatcccggcggtgatactggcggtcaacaataacccgatgcagttcagcgaccgcagcggcggcgtctcccgcaggcgtgtgatcattaccttcccggacgtgataccgctggccgaacgagatccgcagttgttggacaaaatcaccaaagagctggctgtgattgtgcgtcacctgatgcagcgcttcgccaatccgaacgaggcccgcaccttgctccaggcgcagcaaagttcggacgaggcgctgaccatcaaacgccaggccgacccgctggttgacttttgtggctacctgacggtgctgggcaccgcagaagggatgatgataggtaatgccaacatcaccccggccaacccgcgccgttacctgtatcacgcctacctgtcgtttatggcggcacggggctatcagcacgtgatgaacctgacggcctttggtctggcagtgccgcaaacgctgagagagtatgagaaaatcctgctcaagcgtaaaacccggctggggatgcagaccaatgtggtattgagtgaagagtgtgaagcggactggctgccgaagtgcggggcggtgtga

SEQ ID NO: 431587 - DNA, 1407 bp, Serratia marcescens
atgctagaagaaagatttatatgttatcgatgtgtgccggataaacatgtcaaggccagaataaaaaatgaaggaaatcgaaagcaaaattgcagttattgccaaagaaagtttataaacgtcagtatcgaacaaatcggcgaatggatcgacactatgttcgacacctattatgaacagggtgggtatgattatgtaggcaatgctaggggggaagaggcaccatttataatagaggaagagttgggtgtcgattttaatatcgctgccgatatttatgagtccatgcagagcaatccgttaatcgatggttgttattatgatgacgaagcaaaatatgaatgtgatagtacttttgttcccatcaaaagtatacacggtaattatgatgccaaatgggaagagatcacgcggtcattaaagcacgagtctcgtttttttaataaagatgcgaaaatctttcttgatgagttgtttaaagatattcatacaatgcgcacagatgagagcggttcggcaataaaatcctatacgcatgtaaatgttttttatcgtgcacggtcatttacagaaatcagtgaggtagaaaaggcgctggctcagccagaacgttacctaggaccaccaccacccgatagcgcaaaatctgggcgtatgaatgccctaggtgtacctgtcttttatggctccctatcgcctgaaacggcgatggcagagatccgaccggtagttggcagctgggtcatcgtcgcccagtttcgccccttgcgtgatttaaggatacttgatctttcatcaatgaattttatcccccctgcaggggtcagtaaatttgacccgaaacatcttcaggtcagggaaaaaatccgatttttaaaaacgttagcgcataaactgacgatccctgtgttgaatggcgctaatggccatgagtacctcatgacgcaagcggtggcggaataccttggattatacgagggatttgatcttgatggcataacgtttaaatcgactcaggtaaatgataacgatgaagacattgataaaaccaatattgtgttgttcaataaatccgaaaaaataaaaaactcagactctgggggtaaagactcacaatatgctgtaaccctgtttgaatatgaaggtgaggatgataatgatgttccttattatggatttaacccaaaaatcaggagggtaataaagacaatagaaaacaacacctttagctcaagacagatcgcgaccaatgaatcaaaatttgtattggcactggatctggagaacatcatggttaagcgcctgaaagggataaagttttccgtagatgattatcaagtaaaactgggaagcgatatcgagccacggcgtggttattcatcagaaaatgatgaacgggaattctga

SEQ ID NO: 431588 - DNA, 300 bp, Serratia marcescens
atgaagatttattggacgctgaagagcattccggaactgaaaaacttaccactaaaagaaagagtgaagcgctggcgaaaagcatttttggggcaaaacatgtcagatacattaggtgtactggccatttccatgctcccatggtttatcatcattcttttaaatgatgtgaaatttaataatgaaatattacacaactcattcattgttatggtgggctatgtcgtgagcgcttttattggaatgaatgttataataagaaggatgttattgaaaaacaaggatgtatttaaaggctaa

SEQ ID NO: 431589 - DNA, 768 bp, Serratia marcescens
atgaacgtcatccaactcacaccgttacgactcccagatataacaacgctttccgccgtgacgagagagaaactcgcttctttggaagccattgtatcgacatatctcctctccagtgaaacaagtaaggggcatgatcgagttgttggttttcctaatgaagagatcaataggttaacacaccgactcagtgcccattacctaactaatcagaaagatataaaaaacgacggccgaacattgttggaaatagcactaattaatcagttctcagatgattataatcgcatgataatgcgggccaagttcgattgttttctggcctttttaactttctggtctggcaaaattaatcctataaaacctggtattagaaagacagccatgcgcacgtcatcagataaaaatgggcattacatccggtttattgatgcgaaacacttggtcgatggattgcgtaatatatgggccattattattaatgccccctttaataatctttactcagcggtgatcagttcaacagccttgcttgcctaccatccattttatgacggaaacggccgattttgcagattgctcatcaatgccatgttgaaacgatgccatgacaactatattccccttcatgatatttatcatctatcacaaggtgggtattttatccgtttgcggcaagcgctgatattctcagaatgggatgagattattttgtttcattataacatcgtcagttttttcaccccaaagccatgtaaacttagctaa

SEQ ID NO: 431590 - DNA, 3789 bp, Serratia marcescens
atgccggtactcagcgccgatgatgctcaggaagaacaaatacatatcgcttatgaacctctgaccccctcagtcattgaggatgaaaaagcgcaaagctatatcgaagcactgaattttgcttgttctcgcccggatatcagaaacattgctgtcactggcccgtatggtgcaggtaaaagctctgtattactgacgtgggaaaaagcagaaagcaatgacttcaggatgatgaccgtgtctttggctgattttgaaatgcagcaagcgtcatccggagataccagtgtgggggatgacaaaaccgacggtgataaagcagataaaaaagcggctaaagctgaagaaaaaacaattgagtacagcatcctgcaacagctgctctacaaagagaaaaaaagtgtgttgccatattcccgtctggagcgcatttctgacgttagcgcgcctcagattgccatgatggctgccagcctgttactcatacttgcattgacggcaactggcctgctttttctattccctgattacatcagtgcgaagctttctctgccgaaagagctgagtcagtttctcctggctttgcctatactcgccagggttggtggcgcagggatatttcttttttttgccttattccttgcactgaagaaattgcaccgtacaggggtatttgaccgccgcgtcagtattgataaagttgacgtactgaaaggagcgatttctacacgccccaccgccccctctcttctcaatgtgtacattgatgaaatcgtctacttcttcgagcaaacgcaatacaatgtggtcatatttgaggatctggaccgtcataacgacggtgctatcttcatcaagctccgtgagataaatcagctcatcaataactgccttcccgctgataagccggtaagatttatctacgctgtcagggataatctcttcagcacgcctgaatcacggacaaagttttttgattttgtcatgccggtgatcccggtaatggacagtgagaatgcttctgagcattttttggggaaatttacattggatgaacttatacaggatgggttcagagattgccttgccagactagctctttttattcctgacatgcgagtgatgcacaatattgccaacgaattccggctttacaggaatattgtgaataacggagaggatcttaagcgactgattgcactcatctcctacaaaaatctttgtgccgaagattatcacgaaatagatcagaaaaaaggattgctttacaacattgttaccgagtacatatctggtaaactaagagaagaacactgtactacacttatcacaaggatggaaaagtatcagacggaactttctattttacagaatgagaaggtagtatctgaacaagagttaagaagagaaatacttcaccaatatattaatgataaaacagaatctactttgtgcatcattcgtaataatggttctcaattttatcttgaaagtgttattgaagatgaagatacattcttctcaattttaagcggtaatactcttcatatccgcacaagggtatatggtatagatattgctatagtcgaaaaagcaacaattgagagtatgaaaaccgaatacgaggaaaggtgttctattatcctgaaaaaatcagatggtggcatcgctcgtttagaggaaaatatcaaaactcttaaatatgagattcagaataccttctcatatgatcttgcttttttcatcaacaagatgggcagttcaggcttcactaagtgggccacagcatgtgtatcaccggggcatgacgacggagcagtcttacctgataacgctggacaaatcgatttcttgtatttccttctatctcatggctatctttcggctgactatatggcctatcgttctgtatttatgccgggtagcctgagcacggaagacaataactttatcagggctgtgacggcgggaagatcgcctgatgaaacagtaaatatgccgctcagcaacattgctaacaccgtggaaaaattaagcggactaggcatgctgatgcgtgacaatgcttggcatcctcagattctcaggcaccttatgtacagcgataaggtttccctgaagactatattgggaatgcaggtggaacccggagcacaagagcggatggtaaggctagccaatgagatcttcccccgctgggaactcactctgcagctgaaatatatcaggttattggtcgacggggatggcaacttgtccacaatgatccaccagattgggggcttgaatgatatcgaagctcaacacactctgctcccattgttactgtccttaccggcactgccttggaacaccgtctctaagagaaatcgggaagaactacagcgacttattgattctcactttaatctcctaacagccattcctgaggactgtgctcagattttctgtgaaaacctgcggaattcagactgtcgcctgactagcatccctttggttcagagcaactccgtcaagaaaattctgcattcggtggcacaggaaaaactgtgggtctattccacatccaacctgcaaaacctctgtttttcactcatccatgagatagaaaacgacagtgaactcttacgaaaaaatcctttaaaaacaataaaatcacttcaaatcccgaacattgaagcctatgtttatgaaaacatatcatcgtttatccgtgatatttttattcactccgaagaaagagagctcattcctgacctccttaattcggcattggttgactgggatgatgcagagtgcctaacagttagtatgaagtttatgctggaagacgtaacggttatcctaaataaagaaaatagtgaaacaacagaaattaatcatgacaaaaatctgtattcacttctggcgcatcataatcacattacccctttgtggaaaaatgtaatttgtttacttgatgaagatgcctcagttgccgctgatacattgtgtgaatggctcaatattaattacgctctattaccaaatgaaacgatacctttgactgaggctcagctctcgcagttacttataaaagtagtatcttcagaaaacatcagtaaagttgcacttgtcgtggtaacaaagacattcaggttatctcttattaagttgcctgacagcttgccgctgaacaatgcggcagtactggtggatcagaaatggttggctccaaccgctagtgtctttgaacaactttatcaggcattttacgaagagggtgacggattgacaccgcttctttatgatctgatttgtatccgtcctgccttgttgaatgggaactacgagcttgttttgtatgctgatgaagaatttgaccggcgcattacccggttacttctgaatggcggtaagatatctgatgaacactgtatcagtatcctgaactggctctgggataaagatgaggcactgttctctgatgggccgcttctcagcctgcaaaccctggcccggctctcggtaaaactgaccagcgacccacagaagcacgcactgctgatgcaatgcctaaaagatgacaggccgccacgcgcatttatcaggtcagtgctgatgactttcgggcattcggattatgccgcttttctcattgagaggagtcaccgcagcattgtgtattcagactcgatgtggcatttggccatccagttgggaaaaagcgaatttatcaggccaccaaaaaccactcacgacagtacacgtatccgtatagagccattaactagcgctgaaaaagaataa

SEQ ID NO: 431591 - DNA, 696 bp, Serratia marcescens
atggaaacgaccaagaaaataattttggaaggtttagaacggcatgatttaagcgaactacccggccgtccttatgattgttccttcgaattgttagcatctaaaccagcaagaaagcgtttaatcatggtcgggttcaacggctcatcagcagatggcggttttacaaatgctgaagcagtgataaacggttttaattcaccttgtttctctaatgttcaggcaggtactgaaggtgaatggggtatcaaacatttggcaaaccgcctgcaatccgtccctgaacagctaggctttagatggcaagatactgtctacaccaatgcgctactcatgtgttctaaggatgccctgtcgctcaaaaaaagtgctcaagagtgcgcaattggcagcttggatcgactgattgaaaaatcgatgggtttctttgaaaacgttaccgtccccctatgcaaacctgaactaattattgcttatagtaacggaatgaactctcactcagcagcacgcttgttattaaaaacattcggcgatgtcgatgaacccgagtacataagccgaaacagctactactccacattcggctttacggcacggtttaagcaattcgatgtgcctgtggtaggtatccgccacatgtcgcgcttcaaacctgatgtgcagctcatcaaacaagcatgggaaaaaatgcgctaa

SEQ ID NO: 431592 - DNA, 1014 bp, Serratia marcescens
atggcaaaactcgctaagaaactcactgacactgaaatcaaaaacacaaaacctgcagacaaagaaatcaatctattcgatggcgatggcctaatgctacgaatagccccactctcaaaaggggggaagaaaaattggtatttcagatatgcagtgccagtaactaaaaaacgcacgaagatgagccttggaaccgaccctcacctcatgttagcaagagcaagagctttacgtgatgaatatctatccttgcttgctaatggcactgaccctcagatccacaacacagataaagctaatgcactaaaagatgctatcgaacacacgctccaagcagttgctcggaagtggttggatgagaagattaagacttccggtatatctaaagaccacgcagttgacatctggcgtagtctcgaacgaaatattttccccggtcttggaaatgttccaataaaagagatccgtcctaaactattgaagcagcatcttgatcccattgagcaacgtggtgttctcgaaaccttacgccgtattatttcccgcctgaacgaaattttccgttacgccgcgacagaagaactcattgagttcaatcctgctgataaccttggccagcgcttcagcaaacccaaaaaacaaaacatgccagcccttccccccagcgagttgccaagatttatggctgctctagctaatgcctcagtccgtctggaaaaccgtatgctaattgagtggcaattgttgacgagggtccgtccgggggaagctgtacgcgctcggtgggcagatatcgatatagaggacaaaatctggaacatcccacctgaatttatgaagatgaaacgtccgcataaagtgcctctcagcaaagaagcactccgtatactcgaaaatatgcagcctatcagtagtcatcgtgaatgggtgttccccagcataaaaacgccactgacccatatgcatgagcaaactgctaatgcagcactaatccgtatgggggcttcgcggtga

SEQ ID NO: 431593 - DNA, 1227 bp, Serratia marcescens
atgctttgtagcatttccaagataaatattccaattccatattcaagaaaaagagttgacattaagttagatggtatgagcctaattattacgggaggtaatggttgtggcaaaacaagttttataacagccatttataactacctaaagaaaggaatagatgacccaaacaacaatagcgttcaatttttaacaagtcaaattaacagctatgaatatcaattaaataatattggtagagatgctggaaactataattattacagcaatgagttggaaaaacatagagcccgactaaatgaaatcaatgattttaaaatcgatataaattctattgataacaaagacactcggtctttgcttaggttccatagcgcgacaagacaatcggcgatctcatcgccagatcaagcaccaaaacactcagtgcttgttgaagaaaataggcatttttctaatgacaaagatgggagccaattctttgaaagttacctgctaagtttgaaaaaaaatcaaagttatgcaatagcctttgataaaaatgaagccgaagcaaatcgaatcaaagactggttcgataaaatccaaacagatttgcaatcattatttgaagattcaaatctaattttggagtttgatacaaaagatgaaaaattttatctacatcaagaagggaaagataaatatacattccaaacactgtcagcaggatactcatcgatcttaagtatttatactgatctgattatgagggtcgagatgtggggagtttcacctgataacatacaaggaattatatttattgatgaaattgatgctcatttacatgtgtctctacaaaaacagatattgcgttttttcattaaatcatttcccaaaattcaatttatcgtaacaacccattctccctttgtagtcacgtccgttactaactcagttatttatgacctcacagccaatgaacagataatagacgtgtcatcttactcatatggtgtagtcatggaagaaatattcggtgttttaccagattcccatgcgctaacagataaactaactcgcatcgaaaatttggctaaaaatataacatcagataatattgatgaactagaaaaaatcatatcttctttatcctctgaaaaggaaaatatgagctcagatactcaagccttccttgacacagcacagttgaaattgattaaaactaaaaaaaatattagtcagtag

SEQ ID NO: 431594 - DNA, 654 bp, Serratia marcescens
atgttcaatgtaatgagaacaaggcctgcacctaattcattattggcccagaaaaaatatgatggcgatgacgttcattcggcactacaagaatgcttccatgaaaaatgttatttatgtgaaactaagaaacctttagatataaatattgagcattttgatcctcacatgggggatttaagaaaaaaattctcatgggataacttatatttagtatgctcacgctgcaacaacatcaaactaacaaaatatgataatcttcttgattgttgttcaggaagtgtctgggatagagtgaaattaataccaggattttctcctaaagctaaaaaattcattattacacctcaattccatgatgataagactattgaaacagcccaattgctagatgaaatttacaataatgataatacaatgaataaaagacttacagcctgctctcttcgagcacaagttgtccagacaacacacaaacttacacagcatatgattgcatattatagcgaagactcaacctatgaagaaaaagaaaatgcgttcaataaaattaaagttatgatagaaaaaacctatccttactcagccttttgtcgttggatgataaaagatgatgaagatttagataaattactatcccctctgatggattga

SEQ ID NO: 431595 - DNA, 243 bp, Serratia marcescens
atgtataaaaataatgacgaagctatcgactgggaagtaaaaagactgctcgatgatgggatctacactgatacggaacaagcctatttagcagcagaaaaaataataagccagattagggaacaagcaaagcaacgccagattaagcaacagtttaaacttcgcattaagtcaatcaagaaacaactgatccgtggttatgactatgctgatatcccttattcaaaaataaataaatattag

SEQ ID NO: 431596 - DNA, 1068 bp, Serratia marcescens
atgatatatgttaatgcgcggtttctcacgcaagaggtgacaggagtgcaaagatttgcagaaatgatatccttaagactgaaaaataaagttaataacattaccttcctttgtccatcaggtgtgctacgcgaatctgtagcaaaaaaattgaacgtaaaatttatcgggcacagccagggtcacttttgggaacaagtagagcttcccttattcttaaaaaataacggctccccgcttctagtaaacttagggagtacaggtcctattttctacaaaaataaaatagttacgcaccacgacattacttacttaaaataccctcgtagttattcagtggcattcttgatattttacaagatagtaatgccattcatactaaaaacctcacgccacttgataactgtaagtcaattctcaagaggagaaatagttagcgcatataactaccctagggaaaaaatatccgtagtatacaacgcgacagatgagtcgtttcgccccgcaagcacgacagatacgcctaacggcgatcgttacttgctatcggtgtcatcacgtaactttcataaaaaccaccatgggatgatcggtgcttttaaaagagcattacaagcttcacctgagaacaaaaacataaaaataaaaatcatagggaaaacagcaagatctttttcaaagcagggatatgcacttgagtgcaactcagagaatatagagtttttaggaagggtcaacgacgaagagctaattaacttatatcagaatgcaacagcatttatttttccatcattttatgaagggtttggcatccctcccctagaggctcagtcctgcggttgccctgtcatatcatcaaatgccgcatcaatgcctgaagttttggccgaaagtgttttatacttcgatccacacagcttggaagatatgagtcaaaaaattaatcgcataataatggatgaagatttaagggggagtttaagtcagaagggattgaaaaacgcaagaagattttcgtgggataaatcagcagaagagttaataaaaataatcaaccaattggcttga

SEQ ID NO: 431597 - DNA, 1005 bp, Serratia marcescens
atgcaaagaaacaacatagaccagattcagtggttgagaggtattgccgccttttcagtcgtgtttacgcatttaacggccaaggcatactccgttggaatgactgatttctcttttacgaaaggtagcataggtgtagatatattctttataatctctggatttataatgatgtatgtctgtgatcgcaaagagtacaactttctctcttttttagagaatagagctgtcagaatacttcctctccattatcttttactgctcccccttgttattgtatattttattaaacccggtttaataaatagtacctcttcgggtacatttgtttgggagtctttttttcttattccagtaagtgaagacggatatgaatatttaaatcctgttgtttggacgctgtgctacgagttcttgttttatttaatatttgcgtcattcctttttctgaaaaacatttatttggtttccataggtacagtctcttctatagcagtgattgttatttttggcgagtggtacagtggtagtaatccatttgttgttggggttacagacagtatatctttggagttttgttacggtgtgatactatatttactttataagcataacaaacttccgtgtagctctgctttatttttgattttttcttttgttgcatatttcgctttagctaagtttcagcttccccgatttatcaaagatggtattccttcacttttcttttttatttctatcgtcaatattaggaacttagaacttaagtggttggcttttttaggtgatatctcgtatgaaatatacctctgccatattgttgttctatcaggtatctatgttgtactcagtaagatgaacatacacattctttgggtgtattacactttatcgctactgacaattattgttgcgggttatctcatgaaatcaatgatttctgatagagttagtttgaaattcaagagtgtaactaaagcaagaaggcagtcaaatcctatttaa

SEQ ID NO: 431598 - DNA, 177 bp, Serratia marcescens
atgaagtggttgattgaatggctgggtaactcgttcgcttacctaatccctatcgtactcattattatcggcggggttattctcgtttcagtgttcccaagctctggtttttatctcaccctcatctgggccattgttgtttgtgtcgcctatgtaaagtggtctaagtggttgtag

SEQ ID NO: 431599 - DNA, 144 bp, Serratia marcescens
atgttagaacccacccgaaagcagcaacgcgatcactttgaagatctcaccgattggcatctgaaaaagtactatcccgaagtagtccagtactggcacgacaacatacgaatacaatataatgccagcacatacataccctag

SEQ ID NO: 431600 - DNA, 342 bp, Serratia marcescens
atgcattatgatcaagaaacaatgagtattttaatcgatgaaagtactgtgccagatgttaattcacatacgatgcatagtactttattgattaaaccactcaagaagaagttaaaggcatatatggccgagatggatgaaaggattgtgtgcaaggaatatatgaatattgggttcctagtacagaatgatcctgaatgggaaatgggtagtgttcatgagtggactctatttaatgaacagaaatatattgtcataatcgacaaacacaaacagtaccagaaaggattatatttctgggtttatacagtaggattactaaatgatagggatgataattaa

SEQ ID NO: 431601 - DNA, 582 bp, Serratia marcescens
atggcaacgacaagtactataacaggtgtacagcaaacaattgcaaatattcaacaacagggtattgattacgccaataactttaataaggaagtgtcaaacagacttagacagctttcacagaagatgcaaattgacatgaataatgcaattgatcgtgggccagtaccattcacgaagaatgcaatactgtttcgtttctatcgtgacagtactggacaagcagtgaatcaaatcttagtgaagaacattcaggctcagtatctgtacgatattattgtaaagccgtcgaggatcaagaaattcattcctaccagtactgcacgtatgacacagcaaggtaatatatctggacttaaatctggtatctcttctagtaagtataaggttgttgatactggcggtaagagaagattaattgacactagcaagaaagatacgaaaacaaagacaaaacgtgtaattggactacgtgaaacgaagaaacgtaaacttgtttatgacttctataaggaagcagagcagggggtacgtttagtactatcaggtgttcagggacactttagaatttcaaggatgtaa

SEQ ID NO: 431602 - DNA, 261 bp, Serratia marcescens
atggaatgggaatggttattaaccgtttttatcattccaattgggggttgggtatttaaagtactatataagcgtagtaagaatttaaatgatcgaattgatcaattggaaaatcgtgtttcgaaagcagaactaaaaattgaagtactcaacgatgatattgaagaaataaaaatgattaggtctgagttgaatcaagcacgtattgatattggcgtaattaagcagttgctacaagagcaaaacaataaaggggcataa

SEQ ID NO: 431603 - DNA, 636 bp, Serratia marcescens
atgagtggttttcaagcatacaatacatatgggaatatagttgtagattcagaacaaaaggggactgtgattagttcccttattcctcaaggtaacgttgaggttacaggctatttgatacctactgcttttggtgacgggcgaacacttgggtatatggtaagtgatattctatttcaaccgggcttgctatggtgtcgttttacacgtgattcatattgcttccccggtgcagaattgtttgaaccgaattcagtacaatttatgcgtacttcggtgaatggtactgtccagtcaggttatctagatgtgttcaatggtcaaggtactttaatctggagtgctgcaagtgctggtacaatgccacgagtattcgatcatctagtgataccgcaaggttacaatctacaaggacaagtgatttcaaaaaatttaggttggagtccgtggtttttactgtcaggtttgccgggtaacgtatctgaatcagaatctatgggattttctggattcttgcttagatataccaatggcaatattcaagttacttatgctgcacagtaccaagatggttatccgcaagctactaaccaacaactactaagaatacctttagcaatattcacaggatactaa

SEQ ID NO: 431604 - DNA, 3024 bp, Serratia marcescens
atgggtaagatttcaggaggcggtattctatccgccgttatgatggcagtaactgttgccgccgcagtatataccggtggtgttactgcatgggctgctgctgggtggggtgctgcggctggtgctgcgtcgttagtggcaacttcaatgatgacggcattaccgggaaccatgaaaggttatggtgacagtgccagtactcccaataggacaaccagcccgcaaacaggtttaccgattgtgtatggcggtcagatgccacacaaagatactagtaatggttcattcgttcttctaggttcaatcgtcccttggttcaacgtcaaggataacgattcacagtacttatttacagaacatgcaattgcatatggtggtgtacaaaagtacattaatcagatctatattgacaatgatcctattctaattgatggatcgccaattactgaagatggtattgttgatccgaataaattcattgataagtacaaaaacaacttacaactagaagtacgttttggtggcaattataccagtacaaaaacactagcacagcaatatgcaggaccgaaatggactgataagtttcttggtaaaggtattgttagtatcagtactgttatcaagaaagatcaatctagtctagaaaattcagtactggtaaatgacaactatactcttcaagtagagatgaaaggactagtgattaccgatttagttgatcttcaacaacgtgcatgtagtaatgcaccaagccaactatatgactatctcacgaatactacttatggaatgggcttagatccaagtctgattgatttacctagctttcgtagtgctgcacagtactgtcaaactaatcagtactggtctaatggtgcaatctcctatagcgaatcattcaaaagtaactgtgaaaagatgctacagacttttggaggtattacttatatccatgcaggtaagatatatttgacgcttgacgttaaaggattaccagtagctagttttgaggaaagcgttgtattcggttcagtacaggtaacaaccagtggtagtactgattactataatacaatcgatgcatcatataaaaatgcctattctcgctacacaaacgacgttctacgcattccttccaatatctcacaggatgatgtgattcgttctgatggtcgcgtgatcgcccttgcacgtgattatacgtgggtatatgacaaagaccagttatcaaaacttgttaatatcgaactattaaaatctaagtactctcagaatacaatcgtgtttactacttcagaaggttgggatttaaagacgtgggatattatcaacgttaaattggatgaatttaaaatcaatggtcaatatcgagtactggcaaaggatttggcaactacgaatgatcagattggatactgtcaacttacttgtgttgaatataatcctgcaatgtacgatggtgttgatcagggcgtatggagtcccggcggtgatatcaattctgtaattacagtacagccgcctcgtaatcttgaagtgactcggaaaggtggggtagttagtggtcaagtagttatcatggactgggacgaatcattagatccaaatctagtaggttattacatttactatcgtaaaacaggaaatacagattggtcgtttgttggcagtactaacagatacaagactgattatgaactatatggacttgtcgccgatcaaaagtatgactttgcggtagctgcgtataacaaccttggattcatttctgtcaaagtaacaaaggatggtttagtaccggactataacttcacactaccggcagttactggccttgttctaacaaatgcaatggcaacgagtaccagtactgaatctggtgatttcaatattgcatggaatgatcaatcgtcattacaagttaatggtcgtccaatgtccgagtacttgcagaagtacgaaatagtgatatatgatcaaacaggaaacaaacgtaattcgtacttcactactcagaacaatttcagttatacctttgcaatgaatcaggccgattatactgggcgtaacgttaccattggtgttattgcacgtggtttcaatcttggtactttcagtcaagaagtaaaaataactgtcagtaacccacaagcaccattgttacagggattaactgttaagtctggtattggggcattggtgtttgaatgggataacagtaataaacctattgattatgccgggattatgttccaagtatctgcaagcgaagatttcagttctggcgtacagacgtttactacttcagcagaattcatttattgggcggtcgtggaagatggacagtactatattcgtgcaggtcaatatgatgtattcggtgttgatggcattagatggactgccatgatcccatacaatcaacagacgaaagtaccgtactctaaattgaatgatgatgtaattgattgggtacttggatcatctgagatgaacgagattaaacaagaaatcattgacaatactgaattcaaaggctggcaattaagagttacaaacaatggatatgtatctggtattgcactcggtaataacggtactgaatcggtgtttacagtaattgccgatcgtttctctattatcagttctgctacggcgggtagttcaacgaaggtatatccttttgttgttcagaatggcacaacgtacattcaaaacgcgatgattcaaaatgcggcaattggtacagcacaaattaaagatgccgctattaataacgccaaaattgccaatgctagtattgatgccgccaaaattattgatggtcagattaccaatgccaaaataggtaatactattcaaagtaacaactacgtacctaatagtaccggctggcagataaataaagatgggacattctatatcaatggtaattctggtggtcgaatggtaattaataataacagaatcgaagtatacgacagcaacaacgtacttcgcgtaagaatggggttatggtaa

SEQ ID NO: 431605 - DNA, 390 bp, Serratia marcescens
atgattaataaaatagtagacatatgccaagacgcattacaacaaccatatcaacttgggaagaatgattgcaatattctagtactgaaggttattgatttaatgtgcagtactgaatacgtgaagatgtgcaaatacgacacactaagaaaaggtcgaaacattctaaagaaactaggagtacaaagtactttcgagttgattgaaaagtaccttgaacaagttgaattcccaatccccggtgatatttggattgatgaagatgacagtactgtaatgagcgtttatgtcagtaatcgaattttagttgtcgatgagcaacacacacattttgaattggactttccaacggatggaaagttttatcgagtaaggagcagtaatgggtaa

SEQ ID NO: 431606 - DNA, 624 bp, Serratia marcescens
atgaatgagttattaactaatccagaactattgaagtactggaatcttacgcgaggtggtaataagacaaagcttactattactgaattaatgtcattgggggtgcattgtaaggcaattgatgtatttccaaagaacagtatccctccaatcttttggactgatggttttgtagatctcaatatcaatggcacactatatacaagtttcccagatctaattagtgattcgtttccaaatttcactgaaacaaaagaaattaacaacaacagcattagttttaaagtaagtaacgtcaatgacagtactagaacattggcactaggtggtgcattcagagaagccaaggttaatatctatctcgtaatacttaatccgggcgataattcagtactgaacaccacactcatgttcagtggattcattgactatattcaggccgaggcagatccaaacaatccaaagaacgaaatgacagttaatctgaattcggtctataagaaactagacctacagccacgcacaattgcggctaactcagtgtatcaatcttactatcccggtgatgagtacttttcattacttggacaagttaatgcaaaccaatcttggagatataaatga

SEQ ID NO: 431607 - DNA, 555 bp, Serratia marcescens
atggcatcattttcaaataatattaaaatcaatggggtgacagtatccagtactgaaccgcgttattcaaatcgctcttggactggagttgaggttactcgcagtactggcattcagtactataaactcgaattcacattaactttcaaacaacaatcaatcgcagaatataacgaattcgttgccgagtattcacgcggtaagccttttactttttcattgggtcacatgggtatctataaaggctctcaaactggtgctatttcggcatctgcaacggctggaaaaggttcttatcaagtttccagtactgctaatactcttgaaataggttcattgattcagtttacaaaccattcaaagatttatcgcatcattggcagagcaggtaatgtactgcaactattcccaaatctacgtgaaaacgtacagactggtgaaactattctttataacaatctccaaggtacttttaccctagacattgataatgaatataaagtaccggtaaataatatcatgagtgttaacctcaaggcgacggagtacttataa

SEQ ID NO: 431608 - DNA, 2313 bp, Serratia marcescens
atggcaagcaacaataataataacatagtcgttaatattacaggcaatagtcaaggactaactacagctgttaatcaggcccaggctagtttgggtaatctccgttctgctgcacagggtaatctccagtctattacaagttcaatggctggtatgagtactggtatgaaagttggattcgcaggagccactgtagtactagctgcctttagttttgcacttacttcagtagaggtactacagcaacaagccaatatgctacggcaaaccgggttaaccctcgacaatatcgcagatcaaaataaggacttaaaggacaagttaggagatgccctagcaaacaacggtggcagtatgcttactgatgttatccagcctttgaaactaaacattctagaacttaaaactcttgcagatgcaggtgaagatgtttatgcaaagatctactttgctgctaaggcacaaggtctaagtaatactgaaattactaacctaatggaaaccataggtaatgatgcagtttcacgtgttcaggtatatgaaaagtatgcttctcagcaggactatttaaacgagcaaggaagacaaacagtatcactcacttctgaacaagttgaaaagtttaaagagtatgatgctcaatcagcccaacttgcaaaaacgtgggagtcatggaaaaacagtattgctagcggtttagtaccggcattgactcaagtacttacgttattgaatggcattacacaggctcgtacttcggaagatttcaaaaagatgtataacggctctgaaaccgtttatacagcggctggctatgaagacaaagcagctactggtgcattacgtgccgctttaaagctacaacgagacattctagctatccaaaaagaccaaaccaaagaagtcaagaagcaagatgaggtttcagttagtcggcgtactattcagaactcaatgcaaccactttatactaaggcagatcaagccaatcagaaactagcaaacttaacgcaacgttataatgatactaaaaatgcaatcatgaaatctaatgatgaagcatataaaagtaatcctgcattacgtcaaaaagatctttcggatcttgaacgtatgtataaacaacaacgtcaagaacagttagatattattaacgataaagacggtaaagacaaagcatctaaggccgcagagtcagcagcaactaaacaagctgcacttgataagaagaatgccgatgctcgaaagaaagcccagttagatttaagtactgcactaagtaaaattggcgaaactgaaatgcaacgtcagttaaatgcatttgacttccagcagaaagagatgcaacgcaagattgccgagaatgcaaagttgcttggtaaatctcaagccgagattgataagtacttagcacaggcgaaagagcagggtgctagacagcgtacagaactaattaataaacagattggctatcaagatccgaatcaaggattgaaggacttaaacgcaaatctaaatggtgtaaccctaaatgaccaacagaagaactatctagggcagcaacaagcccaacgggtttatggtgataacccatttgccgttgataatactcagtcaaagcaacaacagctagaagaccagtacaatcaagaaatggcactgaatgaacgtctctatgccggtactaaagagtttcaaaagcgtaaggcagcactacaggccaagtatgcacaggactcaatgaacacggctacagagaacacacgagcacagcttactctcttgggtaatgcagctggtgatatcggtggcatgatggccggtgcgtttggcgaacagtcagcagcagccaaagcagcattcgcagtgcagaagggactgatcatctcagagacgattatgagaatccaagcagctcttgctagtgctttggctacacctttcccagcgagtttagcagcatatgcacaagtcgccggtatgggtatgcagattatcagtactatcaaaggtgctagttctggacagttccacggcggcgtagacgagttgccaagtcatttaaataataaatcgtttgttttgcaacaaggtgagcgtgtcgtacaggcacctgcaaacaagaagctaacaagtttccttgataaacaggatcaatcttcgggcaataccagtaatggagaaatcacagttaatgctcccttgattgttcagggtggtattaatgacgacaagatgtttaatgagtatctaaaacgacatgcaaataacgttaatcaggctgtaaggtctgctcaatcaagaaatgcataa

SEQ ID NO: 431609 - DNA, 291 bp, Serratia marcescens
atgatctatgaccaacgcattgaacctagtggacttcaagtacaaagtgccatgttcgctaatctttgtcatttgataatgatgacttcaccaaacctatccgagaaaggacgtaaagaagccaaactcaaggactgggatctattcggttcattcgacaatctcactgcatccgaacgtcagaagaaacgcgaagaagaagaaaaagaacagaaagcacagaacattaaaaagtcattccgtgagttgatggatatggaaaaagggaagaagaatggcaagcaacaataa

SEQ ID NO: 431610 - DNA, 609 bp, Serratia marcescens
atgatccaaaaaggaccggacggagttgtctgtcaacattatatggttcaaagaactggagatggtaatgctggttttgttattaaccaacagggatatggtaaacaaggctgggtagaatttaaaaatgatgcatcagtaactataaacggtactgatcctaagttaaatatagcgggtgcaacagtctttgccgatggtaacatttatggttcaaaatgggcaaacaactttggtggtcaatggaataactatctaagtaactggctgggtgctaacggtgtttccgatcagagatataagaaaaatatccaaccaacacaacgtatcgcattagatacaatcaataaacttaaatttgtagattttgattggtctgatgatatgcgtggaatgaagaacactgattccgtcacaggtggttggctttcacaagaactagaaaagattgatccttcattggtaaatcatctttttgatggtgagtttatcaatcctgatatcagtactgtactaccacttgcatttaaagcaattcaagaactatcagaaaagaataaagcattagaagagcgtttgcaaaaactagaagaactaatgaataaataa

SEQ ID NO: 431611 - DNA, 696 bp, Serratia marcescens
  misc_feature (626)..(635): n is a, c, g, or t
atgtaccatactggtaataaaccaactgccgatgatgtaggacttggttcaacaagtacaccgacatttgctagtgttaaccttgttagtacgtctgatgccgcagttaatatgaatggcgttattttacgtggtaatgcacaaggtcaagctgtactttctactgcgaataaaccgattaacattagaccaaagggtgatgcggatgcaacaaaagcagtcgtaattgacccagcaactagtattgttaacttaactggtcttggtctaatagttgataatggcagtactttcaacgccaacgtaacaatcaataacggtctatctctacgtggatcaatgcgtattcgaccagttaataatacagattgggctaatattgggttatttgatgcggataatacaactcaacgtggtgcagtatggtgtgataaagacggatcgattggactaatggctaaaggcggtaaatctgtttcttatgcaaccaacggtgcatttaacgttacatatggctatctttccgttgggcagaacatttctaatgcaaacggtgaaggtaacgacggttttattaaagcccagtactataataatggctggatggagctttacggctctaatcnnnnnnnnnnaatccatatcaagaaaatggtaacgggcagtggattcgccaaatcaacggacaccgaatga

SEQ ID NO: 431612 - DNA, 615 bp, Serratia marcescens
atgaaaaaaccaactaagccgaagcagtacaaggcgaaaaagtgcgcccaatgcggtgaaacgttcacgccggtgaagtacctgcaaaaggtctgtggcccgctctgcgctatcgcataccagcgtgacgcgcgtaagcgccaggcggaaagggaacggaaggacaagctgaaggttcgcaaaaaagcgctgctgaccaggggggattatctcaagaaagcgcagacagcattcaatgcgtttatccgcgagcgcgacgaaggaaaaccgtgtccgtcatgcggccactatagcccaccgatgatatttggcgggcaatgggattgcggccatttcctgggggtaggtgctcgtcctgaattgcgctttgaagagaaaaacgcataccggcagtgcaaagcctgtaacggtggttcaggtcgattcgccgctaagaatgcgaccgtccacgcccgctatcgggaaacgctgatcgagtggtatgggctgtcgttagtggaatggctggaaggcccgcacgaagcaaagcattacaccaaagaagacctggaaaacatagcggctaagtatcgccgtaaaacccgcgaactaaaaaaacagaaggccgcagcatga

SEQ ID NO: 431613 - DNA, 795 bp, Serratia marcescens
atgcctgctaacgataaccctgggaaactgatctggcacgttgcatgtgacgaatcaggcattgatggtcagcgtttttatggattcggtagcctttggatgaaataccaaaggaggggtgatttcgctcgtataatccgtgaactcagagagaaacatggttatttcgaagaaattaaatggacaaaaaccaactctaaaaaattcgcaaatttccacatcgagttgattgaaaccttctttaagcataaatggctagctttccactgcatcattgttgaaaaatccatcgtggataaaagctatcacggcggtgattatgatcttgcaatgagaaagcactttacaaagctcatgactaccaaaatcggtaatgttatacgcgctcaccctgagcgtgattgcgttttccgagtcgaggtagacccccttccgtccagatataagaaggcagacgaagcatttcatgttattgctaataatatgatatgcaaatcattcggaattaaagacattatttcatctgtcgtaacgaaagactcgaagtcttctgagcacattcagatatcagactttttcttaggggctgtaatgagcgcttttcagggaaaaatcgaatctgaagtcaaaaagaacttggcgagtaacgttgcaaaacacctgggatgggactctcttaagcacgacacatggccttctgagagaaaattcaatatctggttcttctatgataagacgaaggggccgcgcgatattgaaacaaagccaacagaactactatatccattgtcttga

SEQ ID NO: 431614 - DNA, 387 bp, Serratia marcescens
atgtccgaaccggtaaccagtaccgccgcagggacttacatgattggcggtatcactattgctgggctggtggcgggagcagatacgggcgtaatcatcggtgctttcgcaggtgctgtgatttatgtcctgtcggcagctgatctttcaatctggcatcgtctggcgtcgttcctggcatcgttcatgattggcacgctggcggctgggttcgtcactgacgccatcaactacctgaccccggatgctattcacgctgaaaggccgctgggtgctgtagttgctgctgctgtggcggttcgcatcttcatgtacatcagcaagcagtcggaaaatccggggcagtggtttaagcggctgcggggaggtagtggtgatggccagtga

SEQ ID NO: 431615 - DNA, 627 bp, Serratia marcescens
atgacacaaaacgactttcaacgggcggcaggtatcagcgccgggttagctgcgcgctggtatccgcacctgctcgcaacgtttgtagaattcggcattaacaagccgttagagcaggcgatgtttatcgctcaaatcggtcatgagtcgaacggcttcacggccaaggtcgaatcattcaactacagcgttgatggcttgatcgctacattcggccccaaatcgaaagccaagcggctgactgactatcaatgccggatgttggggcgtacagctcagcagccagccaagcaggaagctattgccaatctggtctacggcggacgaatgggtaacagcgccagcggtgatggttggaaatatcgcggacgcgggccaatgcaaacgaccggcctgaaaaactacatggcgtgcggcccggcgctgaaacttgacctggttggtcatccagaactgctggaagaagacctgaacggcatgcgttcggctggatggtactggaaagctaacgactgtggtcgcaacgctggtgatgtcgagttgacaacgcggcgcattaacggcgggacaaacggcctgcaagacagacgcgaacgcttcgagcgtgcttgcaaggtgctgttatga

SEQ ID NO: 431616 - DNA, 174 bp, Serratia marcescens
atgatttacgtcctgccgccagcggtgctgctgcaacagtgcgatgacgcgccgttcaccggtacaacgttcggtgatgcagtgacagcgctgcacaccaagcagagcgaaatgcggatatgcgcctcacgcatggaagcgttaatcaagtgggcgcagatcgccgggagatag

SEQ ID NO: 431617 - DNA, 438 bp, Serratia marcescens
atgccatcagcggtgcgctcttcaggtggcggacgtaaacccaatttacccgtcggcaggaagagcaaattaacaaggattgcccctccgtcagaactgatgggggatatcgcaattcgtctctggaaaacacagagcaagattttaattgagcgtggagttttcgagctggaagatgcgccgatccttttggcttactgcaacgcgtttcatttgatggttgaggctgaaaacgttattgcgaaagacggcctgacagtatcaagcgaaatgggcggtgagaaaaaacaccccgctgttaacgtaagaaatgactctgtttcgcaaatcgcccgtctgggttcactccttgggttagacccgctcagccgtattcgaatgacgagcggcaaaaacgacccggacgatgaagggaacgaatttgatgagtttgattga

SEQ ID NO: 431618 - DNA, 1731 bp, Serratia marcescens
atggctacatatccgaacgtcaatgcagcgaaccaatatgcgcgggacgttgttggcgggaagattctggcttgtcagttaaccgtcctcgcttgccagcgacatcttgatgacctggagcgcgctaaagatcagcggtggccttaccgcttcgacaaaaacaaggccgagcgatttctccggttttcgcaaaaaatgccccacaccagtggtgagtgggcgcgtcggaaacagcgtattgagtttgagccgtggcaaaagttcgcgttaggtgtgccatttggctgggtgcgcaaagacagcggcttccgccggtttactgaaatctatatcgaggttcctcgaaagaacggtaaatcggcaattgccgcagcggtcggtaattacatgttctgcgctgatggtgagtacgcggcggaagtttactgcggcgcgacaacagaaaagcaggcatggaaagtgtttgctcccgcactggcaatggtaaaaaaactcccggcgatgcggaataaattcagtatcaagccctgggcaaaaaagatgacgcgcccggacggttcaattttcgtccctgtcattggcgaccctggcgatggggactccccatcatgtgcgatcattgatgaatatcatgagcatgatactgatgccctgtacacgacaatgacaaccggcatgggcgcgcgcgaacagcccatgacgttaatcattacgactgctggttttgatatatcgtccccatgttacgaaaaacgggcacaggttgttgaaatactcaagcgtataagagaaggcggagagaatgaatccatcttcggtattatttatacaattgacgatgatgatgattggacaaaaccagaggctttgataaaggccaatcctaattatggcgtttcgctgaaagaaggatatttaaaaagcaagcaattacttgctatgtctacgccaagccagacaaataaaatactgaccaaacactttaataagtgggtgagttctaaagctgcttattacaacctgcaaaagtggatgggtgcggcaaataaaagtctcaagctatctgacttctcaggtgatgagtgctatttggggattgaccttgcttccaagcttgaccttaacgctgtggttcccgtgttccgtagagagattgacggactaagccattattattgtgttggccctatgttctgggttcctgaagatacggtttattccactgaccctgcactaaaaacggtggcggagcgctatcaatcgtttgtaaatcaggaagtgttgatccctacagatggagccgaggtggattatcgagttatttttgaggctattttaaaattacgtgaaaccgtaaaaatagcctcgtgcccgattgacccctatggagcaaccagtatttctcatatgttggcggatgaaggtctagagccaataacgattactcagaacttcacaaatatgagcgaccctatgcgtgaaattgaagctgcaatagctgccgggagattccaccacgatggaaacccgcttatggcgtggtgtatttcaaacgtagtgggtaaacacccgcctggcagtgatgacattgttcgccccattaaagaagggaatggcaacaaaattgatggtgctgtttccctgatgatggggttagggcgtgcattgttgaatgagccgcgtgatttcctatcgactatcgacccggacgaagacctggtattcctatga

SEQ ID NO: 431619 - DNA, 1227 bp, Serratia marcescens
gtgatacttgacgcgctattccgtaatgaaccgctggaaaacccggcaaacccgatcaccgctgaaatggccgaaactgacggtattttcaacgctgatgtatatgtcagccctgaaacggcaatgaagttggcggcggtttattcctgcatttatgtgctggcctcaaacgttgcgcagatgccgcttcatgttatgcgaaaggatggaaataccgtttcacccgcccgcgatcatcctgttttttatttggttcacgacgaaccaaacgagtggcagacaagttacaaatggcgcgagttgaagcagcgccatgttttgggctggggtaacggttatacccgcgtgcatcgttcccggcgtggtgaggtgactgagctggaagcctgtatgccgtgggaaaccaccttgttaaaaaccggaggccgctatacctacggactttataacgaggaagggagttttgccgtcagtcctgacgacatgatccacatccgcgcattgggtaataaccagaagatgggcctaagcccaatcatgcagcatgccgaaacgataggtatggggatgagcgggcagaagtacaccagttcatttttcagtggcaacgccagaccggcggggatcgtatctgttaaaggcgacttgaagccggaagggtgggaccgtttaaagaaactttggcaaaaagcggcggtggcgctgcgaagccaggaaaacaaaacacttctgctccctgctgatttggattatcaggcgctcactgtgtcgccggtcgatgctcagcttatcgacatgatgaagctgaaccgatcaatgatagccggaatattcaacgtgccagcgcacatgattaacgacctcgaaaaagccaccttcagcaatatcacctctcaagccattcagtttgtccgttacacgatcatgccgtgggtggctaactgggagcaggagctgaaccgacgcctgtttacccgtgcggagcggacggcaggcttttacgtgaggtttaacctggccgggttgatgcgaggcacaccgcaggagcgcgcgcaattctaccactacgcgatcaccgacggttggatgagccgaaacgaggcccgagctttcgaggatatgaatccggttgatgggctggatgaaatgctggtcagtgttaacgcggcaaatcctacgaaattcaaactcaacgatgacaccaaagagggcaagaccgatgagtga

SEQ ID NO: 431620 - DNA, 600 bp, Serratia marcescens
atgagtgacagagaaatgcgctgttacaccggcgaggtgcgcgctgaacagcaggaagaccagccgacgcggattatcggttatggctccgtgttcaacattcgctccgaaccactctggggctttcgcgaaatcattaagccaggcgcattcgatgacgtgcttaatgatgacgttcgcgggctgtttaaccacgaccccaattttattttaggccgtagtacctcgggaacgctcaaggtttccgttgatgaacggggattacagtacgacatcgaagccccagacacacagaccattcgtgatttggtgctggcgccgatgaaacgcggggatattaaccagtcttcctttgcgttccgcgtcgcccgcgacggcgatcgctggtacgaggatgaggaaggagtggttatccgcgaaatccacaaattctcccggttgtatgacgtcagccctgtgacgtacccggcctatcaggcggcagattctgccgtccgttctatgaaagcatggcaggaggcgcgcgaaagcggcgctgtcaccaacgccgtaaatcaacgaatggcgcgcgagcgcctgctgactctgctcaacgcgtaa

SEQ ID NO: 431621 - DNA, 1239 bp, Serratia marcescens
atgtctgcaactaaattgcacgaactgaagcaaaaacgtaacaccatcgccaccgacatgcgcgcactgcatgacaaaattggtgaaaacgtctggactgaagaacagcgcaccgaatggaagaatgctcagggtgagctgcaatccatcgacgaacggatcgagcgggaagaatccctgcgctcactggatcagtcgtttatcgatcagcaggaagaggagcagcgcaagaaacagaaagaaaatccgaatggccaagacccggacaaacgggcacaagtattcgatcgctggatgcgccacggccaaggtgagctgagtgccgaagaacgccaggcattacgagagctgcgtgctcaaggtactgctcctgacgaaaagggcgggtataccgtaccgacccagttcctcaacaaagttgttgagtccatgaaagcctatggtggtattgcaggcgtggcgcaaattctcaatacctccaacggccaggatatcgcctgggcgacggcggatggaaccacggaagaaggtgaactgctgggcgaaaacaaagcggcttccgaagaggataccgagtttggcggtgcaactctgggcgcaaaaaaactgtcgtccaagatcatccgcgtatcaaatgaactgctgcaagacagcggtattgatatggaagcctatctggccaaacgtatcgctgagcgtatcggccgcggggaagcacgttatcttgtaaaaggtactggcgcaggttcaccgctgcaacctaaagggcttgaggcttcagttaccggcacggtcaacgccgccgccgctgacaagttcacctggaaagagatgaacacgctgaaacacagcatcgacccggcgtatcgcaatggccctaaattccgctgggcgttcaacgatgccacattgaagttggtggaagagatggaagatggccaagggcgtccgttgtggttgccgtccattatcggcggcgcaccggcgactgttctgcaggtgccttacgttatcgatcaggctattgctgatgttggtgcgggtaataagttcatcttctgcggcgacttcgatcgtttcatcctgcgccgggttacttatatggtgctgaagcgtctgaccgagcgttatgtcgaatttgaccagaccggtttcctggcgttccaccgctttgactgcgttctggaagatacggcggcgatcaaggcgctggtcggtaagccagccgctggcggttaa

SEQ ID NO: 431622 - DNA, 294 bp, Serratia marcescens
atgaaacctaccatcgaagaactgcgtctccagtgccgcattgacgggggagaagaggacagtttgctgaaaacttacgctggtgcggctaagtctcgggcggaaaattatatcaaccgctcgttgtacgacgaagaggtgccggaaagtgatactgacgggcttgttattaccgacgacatcaagttggccatcatgttggcggtgggcttttggtacgagaacagggagtcacaggcgttgccatcagggtttaaatcgctgcttgaaccctaccgtttcatcaatctgtag

SEQ ID NO: 431623 - DNA, 450 bp, Serratia marcescens
atgattgatgtgaatctggatttttctgggttacaggatatcgcccgagacctgcagaccctcagcaaagccgaaaacaataaagtcctcagggattcgacccgcgctggggctgaaatcctccggcaggaagtgattgatagggcacctgagcaaaccggaaagctgaagaaaaacgttgttgtcgttacccagaaaagccgccgtcgcggtgaaatttcctcgggggtgcatattcgtggcgttaacccgcgaacggggaacagcgacaacaccatgaaggccagcaacaggaggaacgctttttactggcgcttcgtagagctgggaacggccacggctccggcacatccctttgtccgtcctgcttttgacacccgcgcggaagaagctgcccaggttgcaatgaaccgaatgaacaaggcgatcgatgaggtgctggccaaatga

SEQ ID NO: 431624 - DNA, 348 bp, Serratia marcescens
atgacagaggatgatatctacgctttgctgacccctcttgccgacgggagggtttacccgtatgtagtgcctcttggtagcgacaatcttcccgccgtcgccgctccttatgtcattttctcgataccgactgacgtatctggggatgtgttctgtgggcaggccgagtcgacactgcacattcaggtagacgtgtgggcagaaactaacgatgaggccagggcgttgcggcttgaggccctttcccggctggaagtgctttcacctaccgaagtgagcaaaatccccggctatgacactacaacccacttacatcgggcaacgcttgaaataacggtcattgcctga

SEQ ID NO: 431625 - DNA, 705 bp, Serratia marcescens
atgtcagcactatttgaacgtgcccaaaaaacggtagtcatgattacccctgttccggtcactgcggcggagctggatacggcaacctggttaaacctgagttgcactatcaaacaggccagctttaccgctggtcagaaaaacgatattgacgtaacaacgctgtgctctgaagaaacggagaatattaatggacttccggcaccgtcagagatgtctctctccggtaacttctaccgcaacccggcgcaggatacgttgcgtactgcttacgataatgacggtgtatacgggtttaaagttgttttcccttccgggaacggcttcctgttccgcgccgaagttcgtcagcatacctgggactctcagactaacggtgttgttgccgcgacgttctccctgcgtctgaaaggtaagccgaccaacattgacgccactggcattttgtctttcgccacagaccttcccgcatcacagtcagttgcagcaggaagcgccctgacaatgggggtgatcgtccagggtgggacggcaccttatacctatgtctggaaaaagggcacctcgacggtcagcggccagaccaacgcaacgtttacgaaagccagcgctgtatccggagatgcgggtgtttattcctgtgtggttactgatgccgatggcactgttatcacctctgctgatcacactgtcaccattagctaa

SEQ ID NO: 431626 - DNA, 405 bp, Serratia marcescens
atgtctaaacagaatcttaaagcgttggctttggccccgatggcaggttttcgcaaaaaaacagtaatcgttccggagtgggaaaacgccgaagttatcattcgtgagccctcggctgaggcctggattcgctggcagggaattgccagcccggaacaaccaaaaccaccggaagggcaggaagcgccagatgtgccagaaccgaccccttcagagcgtgccttccgcacgatgcgggcagatgtcacactcttcattgatattctgctggataccgacctgcaacccgtctttaccgttgatgatactaaagacgtggagtcaatgtatggccctgtccattccagactgttgaaacaggcgctcgatctcattcgtgatgcggatgatgctaaagcaaagtaa

SEQ ID NO: 431627 - DNA, 297 bp, Serratia marcescens
atgcagttcctgatggcgctggcgctcaggatgggccgcacgctgggcgaactgcgacaaaccatgacggtcggtgaattcagaatgtgggctgaatacgaccgtatcagcccgatcggtgatatccgtggcgatattctcaatgctcagcttgtttcagcgatgtatggggcgcagggcggtaaagtcaccattgaagacgcacagattcagtggagcacagaagaggacgaggtaagcgacagcggcgatccctttgcaggactggaagcggcgttgtttgctgcttcagcatag

SEQ ID NO: 431628 - DNA, 3387 bp, Serratia marcescens
atggcaaccctgcgtgaacttatcattaaagtttctgctaactctcagtcattccagaccgagatagcccgtgcgtcacgtatgggggctgattattataagacaatgcagaatggcggacgccaggccgccgctgcatcgagagatactcgccgggcgattgtagagttaactggtcaactggattctgctaagtcatctgcattaggtttagcgggtgcctttgcgggggcttttgccacgggacatttaatatcccttgctgatgaatggagctcagtaaatgccagattaaagcaagcttctcaatcaaccgacgacttctctaattctcagcgtttgttgatggacattagccagaaaacaggcacatcattttctgataatgccaatttattctctcgctcagcggcttcaatgcgagagtttggttatagttcatctcaagttatcgacataactgaggctatttctactggtttaaaactttctggcgcgaatgctcaggagtccagttcggtcatcactcagtttagccaggcattggcgcagggtgtgcttcgcggtgaagaattcaactctgtaaacgaaaatggtgatcgggtcattcgtgcattagccgcaggaatgggagtggcgcgtaaagacctgaagtccatggcagatcaaggtcaacttaccattgataaagtagttccggcattaatcagccagctggacaacctccggagtgaatttggagagttgccacaaacagtttcttcatcagcgactaaaatcgaaaacgcctttatgcagtgggttggtggagccaatgaagccagtggagccacccgaacactcactggtatccttgacggcgtagccaataatattgatgaagtggctacggcagcaggggttctggtggccgtgggggctgctcgctattttggaactatggcattaagtgccagatcagcaaccgctgatattattaacgccgcgaaaagcgagattgcgttagcggaagcacaggtcaggggaacacaaatttctaccgcccgcgctcgcgcggcagtatatcgcgcccagaaagcgctggaagctgctcggggaactgacgcacaggcagcagcagaaaaacgccttgcggccgctcagggttcattatcaagaaacattacggcaagagcatctgcacagacagcgctaaattcggtaacttcagtgggttcccgattgttaggcggaacgttggggcttgtgggtggtattcccggtcttgtccttcttggtgctggtgcatggtacacaatgtaccagaaccaggaacaggctcgcttgtcagcacaagactatgctaaagccattgaccaagttcgagacaaaacaaaatcaatgtctcttcctgaagcttctgataatgaggaaaaaactagaaagtctcttgatgaacaaaatcgcctgattgatgatcaagcatctagggttaaaagccttagaaatgagattgctggctatcaatatgtcctgaaccatcccggaccaacgacaagcagtggtttcatgattaatcatttaacttctgtggaaaccgtaacccgaggtcttgaggatgcgacttcagcattagctgttgagcaggaacgtttgacgcagatgcaggcaaaatctcaggaaatacagcaggtacttgaggggcttgaacatcggcgagttgcgctgatccgtcagcaggctgcagagcaaaatgctgcgtatcagtctttgataataatgaacggtcagcatacagagttcaatcgtcttcttgggcttggtaataatctactgatggcgcgtcaaggcttggttaatgccccaatgcgaattcctcagaatgacctaacatcacagcaaacaacagcactggaaaaaagccgccgtgacttggcgctttcaaagctaaaaggcgaggagaaagagcgtgccaggctgggctatgctgcggatgacctggggctaacaaactcccctcaatttcagacaggaagacaagagctaattaataatgggattgctgagtggcgcaataatgagtcaaacaagccagtcaagaaaactccaaaaagtgaaggggtaaaagccgctgaaaaaacagaagacgtttataagcgccttattaaacagcaacaggagcaaattactctagggagtcagaacactgaactggctagggttaaataccagatcacccaaggggaattatcttctcttgaaaaaaccaaaaaggaaacactactgcacaatgctgcgctcatcgatcagaaaaatattgctgagcagctaaaaacattccgtgaggggctggctgacagtaattctgctgcgcgtgaccggggagatattgattttctcggggccgggatgggagacaaggctcgcgaccgcatgaaggaaatggcggatattcgtactgattttctcaaacagcagcgggacctgcagcgggatttcagcaaaggtcagatttcagaagacctgtacaaacagcaaacggaagcgcttcaggcggcgcttgctgaacggctccagattcaggaggactactacaagaaaaccgacgaacagcagtcagactggcgggcagggatcagcgattcgctgatgaactacgccgatcaggctgctgacctcagctcaatggctgcatcagcgaccagcgagattctgaataacaccacgaactccatttctaacaacctgactagtgtccttacgagggcgacctcattcaaagaggggatgtcaaatatattcagttctctgggagagactgttattcatacgctcattcagatggcgacgcaggcattgatcactaaagcaatcatggcgtcgttcggcggtggatttggggggctttttggtggagtgttcggcggtgccgcttctgctggtggtgtgggcgctatggggttaagcaccagtttttctgcctacgcaaaaggcggcgtacatgattcaccctctctgtcggcattcagtaatggcgtttacagtaccccgcagtattttgcctttgctaaaggagctggggtatttggtgaggctgggccagaggcaattatgccattgactcgaggggctgatggttctctcggggtccgtgctgttggtcgagaatcatccgccgtgagagatgccgcccggaaaattgaagcgcaaccgcgtatagctgtcagtgtcgatgctcgcagtacgtttaccggacagcccgatgacgcaacgatgttagctgttgatcggcgcaatgcagcgctggaaagacggattgtaaactcccttaccaacgaagtgcataacccacagaataaattcggacgagctatttactcaaatcttcagtcgaaaaaaccaacgtga

SEQ ID NO: 431629 - DNA, 381 bp, Serratia marcescens
atgtttgaccctgataaataccgttcagtcatctggctgaagggcggacgagtgttcccgcaactcgactgtttcggcatcattaacgagatacgctctgatctcgggctgacccgctggccggatttctctggagtgacaaaagacggtgatggcttaaatcgcgaagccatcaacctaatgaagtcgctgatccgctgcgagccctgcgaaggtgctggcgcggcatgctattccggttctgcggtaactcacgtcgggatcgtcgtcaacatgggaggtcagttgcatgtagctgagtgcaaccccggcatgaatgtcacttttctccctattacccgatttattcggcgtttcactcgtgtggagttctggcgatga

SEQ ID NO: 431630 - DNA, 3087 bp, Serratia marcescens
atgacgatccgtgtttacccatctcgcttgccgggagaaccgattgagacacatcagcatcaggcttgcactctgcatgactggatgcaggccaatatcccggcttacaaaaatgatagagttcatccggtcagcattgatgtggatggcgccactgtgccatcaggggaatggccgctctgttatattcgcgcggattctgatgtacgcatttacccgacgccatatggaacggggctagaaatagctgcgtgggtggcgattggtgtgtcggttgcttcagccgcatattcaatgatcatgatgacccagatggggaagatggggacatcaccgggcaacggagaccaattagacctcgcacccgcgaaagcgaacaccgcaaagcttggtgatccagtacgtgaggtgctggggcgttgccgcgtgtttcccgactatcttttacagccgataagccgctttgataaagatgatccgcaaatttaccgcactgaaatgtttctcagtgttggtgtcggtaattatgtaatcaatccgggtgatatcaagatcggcaacacgccggttaactcttttggtgaagatacatccctgaccatctatgcgccaggtgaggatgtcagcgcggaccggagggcagataactggtttaactcaaccgaagtgggcggaacaacatcaggcactgctggtctcgatctggcgtcaacagggccggataacgtgagcatcagtgcagatgctgttatcgtctccggaaacagtatttcactgattggacagacatcagatgatgaagatgagggaaacgacacctcagtaccagaatcatggacaatcggcacactgataacagtcattgtgccggattctttcactgcggtaacctcaggtggtcgcaacgttatttacggtaatttcgcagaactaaccccctcagtgggaatggctgtcagcctgcagtggggaacgtatgattatgatctgttcatttcgtcatatgacccagggacgcccgccgtgcctggtgtgggtggctctgccgcctcagtgacggccagctcagcgcccacaacatatgatttcagcgccgctgcattgtcgtttacgctgacctgggctggcgccagttatgtggtggtactcagcgcaaactacctaacgatgtctggcttgaccgatgcgattgatgatcaactgaccggctcaggtctgattgccagggatgcggggggcgttctccagatctctgaaaaaaacagtccttacagtggtaattcgattggcacagtcgtacttccgtcggccatttttggcgatgcgccagttaacgttgcaggtgttgcgtcgaacggtggtagccccgaggttcttccctctgtcacgctggcatggaacaacgcgacaggtaccgcgttctccggcattcctgatggcactcagcgcatagcatttggtgctaaaggcgatcaattccgcattacggatgttaacggtctgacgatcagtgttgaaaggatggttgaagatgcctccggcaatctgatcgtcgacgccaactggtcgggattcacctctcggacgttgctagatgccagtgtaactggcgtgaatgacgcttacgactggatggggccatttttgtgttgtccagagggcgaaaccaccacgcagattgagctcaattttgtgtacccgcaagggttggtagatatcggtagtaaggacggaaaaattcactggcatgacgtcgaaataaccattcagtaccgtctgtcaggggcagtagagtggacctctgtcagaattaaacacggaaatgacacggtcaatatgatcggttacacagaagcgatcaccctcccgatcgccggtaattacgaagtccgtgttaagcgcgacacgcctgtatgggggggcacgacgcgagactcagtgcagtggcaggcaatgagggcaaagctgccgacgcggccagttcgctacaataacctcaccacgatggcgctaacggtgcgaaccggcaaccgtctggcatcacaatcagatcgtcgggtaaatgctgtggtgacgcgcctgtatgacggacatacatcacgcagtatttctggtgcgttttatcacgttgcaagaagccttggttataacgacaaccagattgatatggccaccataaatcaattggaggcgacacactggacgccacgcggtgaacgttttgattatgaagccgcgagcgacagcacatccgctaaagacgtgttcgacaaaattgctgaagcggggatggggtattttctactgtctgatgggcttctatctgccggacgggagggaattaaaaactggacagggataataacgcctcaggaaacagttggggagatgcagacggcattccgtgcgccgtcagatgatgattacgacggtgtggatgttaaatatatcaacccagtgacctgggctgaggaaacggttcagtgccgatcagcggataatccggtgccacgcaaaacggagagttactcgctggatatggttatgagtgaggaccgggcatatcgcatcggcatgcgccgattgatgaaacacctgtatcaacgacggacatattcagcaacaaccgaactagatgcatggtgctatcagttcggtgacaggattatcttggcagatgacatcacggataaaaccatcagttgcctgatccagtccatgcagtatgaccaacaaaaaataatcgttacggtaacagaacctctgaactggtctcatgccagtccccgctgttggatacgatttcaggacggcagagcatcacgcctgctaacaccagagaaagtggacgagcacacgctcagcattccctacagtgatgatcttgaccctggaagctggctgatgaatgacccagacatagaattaccacgccttttgttctgtgacagtgagcaggcagcgaggcacgggattgttgcagaaatttcaccagacagtgacggcacatgccaactcagcgcgccagaatataaagagattttttatcagtacgatgatgaaacgtatccaggcgatattcagtaa

SEQ ID NO: 431631 - DNA, 2631 bp, Serratia marcescens
atgactttcaatacaggaaatgaaatcggttcaactgatccgagggatttatatgataatgctggaaaccttgataagttattgcttggtgaacagcataactatccagatagattaaataaacttagagtatcttggtctgggtttgagtattatataaaaaattccggcgcagcaatggcatttgctactgagcaggagttattggcattcacacctgttactgctaatgtccttgctcaagttacatctacaggtgttttttattactggaatggcacagcatggagtaagtctgcgtaccagcccacacttgatgtactaagaccatacaggctagggctgtttgcaagcggtaagaataaatacaactacaaaacatcactggatggaaagtatattaatgaagaaggggtggtatcggataatgatatttattcattgtctgattacattgtggtgagtaaaggggttaggtatttatctaattacaatattagatttgcatcattttttgataaagaccaggaatatataggtttcgaagagagtgtgctttccttcatcgtgccagaaggtgctgcttttgttcgtgtcacaacaccacttgcaaccaagcagctgatgcagcttgaggttggcgggagtaggactgtttatgaaagctatgtagataatttcagaaaagaaaatatagattttgccaaggtttctctgcgagctgcaatgggctatgagaggggtaaaaacttattcaaccctttgcttgctatgcagggctactttatcaacgcatcaggggttctgtcgcaatcagccacgaactgcacatctgattacatcccagtaattggtggcacggactacaaagcaaatcagaatctgcgttctgtggtgtattatgatgaaagtaagaaccgtatcgatggggccctggatatcacaggtttctttactgctccagtcaattgttcttacatcagatgctctgttttcttgtcgagaatgaactacacacagattgagcgcgggaaatatataaccgagttttatagcttcggggtcgaaccgcctgcatctatagatgcgatgcctattaagtacccagttcaaaatgttaatcctgataacattggtatcttcactcatgggaaaaacatactaaatccgtatacgcttgttagtggttttatcgatgaatggggtttttataatccagatggaacaacttatcgattatcagactacattgaaataaaaccaaattcatcatacgtctctaacaagtctatgcgttttatttcattctatgatgagaataaggcatttataagcacagcagtgagctcgttatcattcacaactcctgctaactctaagtatgtccgcgtaacagtgtctttaacaatccttcctggattccagcttgaaaaaggaacactttctacagattacgaagagtttcattatgaaatgaagcctaaacttgataatggaaccccagttatcatatcgccatcgactgataatgagattcctgagtattttggtctggaacgattacgcgaaacgcatatgcgactaagcaaattgacttataatgaatccgttcagttttcgtgggcaatgatcggggacagttatacgcgtggtcaaatgcgatatgcattaaaatgcgctcaaaagctgtggcatttatataacggcacggcggtatcgccgactgttccgccggttggttttgggtatcgttcgtttggctatgatgccaatggtgacaacactgacatcatcggcacaccgatcactcagaccggatttacgtgtgcatacaatactgggaacggtcttgatatttcttctgtcaccagttcaacggcgggggcaacgttatcgtggagcgacgacttatctttagggtttgcgtatacgctttatgctgaaggtggtagtggggtaatcagctataacgcgcctgggatgacatcagcagttgaaatcgatctgtcaacgtatccaaccgggatgcagatgatatcgatgacgtcaatgccagtcaccggtagcggaacggtaacgataacgctggtttccggtagtgtggtgctttacggcgtcagtatccagaacgccacgcagccgggtgtaatcgtacataagttgggcggaagtggttcccacacgaataactgggttcatgccgacgcaacccgctggcaaacggctttcgccaccctgaaggctaacatggccacaatcatgttgggcacaaacgaccagggcgtgaagattactccggagacgtttaaatcaaaccttctgacgatgattaaccgcatccgcacagcgtcgccgaccacggatatcctgctgatctgtccagctgagaataaccgaccaggtggcaacacgattgcgatgtctaactatgcccgtcagatgtacgaaattgctcgtgaacaagatgttgcatttttgaatctgcaaaattcgttcggtgttaacccagctgattatgcctatggttccgcacgtccgtggatcgtgggtgatggtctacatcctgatccagcaacaggtggccatgcgattgcatctgcaatcatgaggtcgttaaaagcgccactttga

SEQ ID NO: 431632 - DNA, 186 bp, Serratia marcescens
atgtttaatattataattctatggtttgttaggctcgctggggcaatgtccgtatgggccattatcaagtatcgattagacgtaccagcggaaatttttgttatgagcttcataatgatcgtgctatggattagtgcagaatatgatgagcataaaaaacgaaaagataagaaaagccggggttaa

SEQ ID NO: 431633 - DNA, 240 bp, Serratia marcescens
atgggtagcattaccctcgccgggcgacagattttcgttctcaatgagaatgacagatacccagagccacagcaaaacagcccaccttttttcgcaatccgcgaagatgaagagggccagcactggctttatgtgtggcataaagggcgctggccgctcgtctcagatgtgccgtttcagactcaaagtaaagccgttgatgcagcgctcgctttcaatttttccgcactctacaaataa

SEQ ID NO: 431634 - DNA, 288 bp, Serratia marcescens
atgatcctatcaacaacacaaacatttctaatgcaaaaagctttatatcaactaatcacattcgataatattcgtgtagagacacatctgaactttaataacacatgggaagtactaataagtggggataactttaaagtacttaaattcaatcgaacactcacggcattggatgaacctgaactatttcagtactcaacagtaatagacgccaaggtattacaatacatcattgatcagcactacgcattggagaacctactatgctattacaggacttcaccataa

SEQ ID NO: 431635 - DNA, 300 bp, Serratia marcescens
atgctattacaggacttcaccataagatggacagacaataacggaaatcaatatgaatgcttaccagcgttgttatccaagattgcagtgctcaacgttaaatacaatgactactatataacaataaccgatactaaactcacagccagatataaatacataacaatacacgatggctactatgcaacgattggaagcaggattgagtatgactatatgaactacacaggcagcgaacataagcaccttcaagtactgcaatcgatgatagacaccgtggcagaactctttaaggaataa

SEQ ID NO: 431636 - DNA, 795 bp, Serratia marcescens
  misc_feature (740)..(749): n is a, c, g, or t
atgcactcagagaaattggatctcttgaactctctggagaagaacaaattcaagaagatctacaaacgaacaataaaaaagatactacctccagaaagaataaaaccaagtaagtttgcagaagataatctagtatttccagatggacgcctagcaggacagaaacttagattatttgaatttcaacgtcaaccactcgatatgatcgttgaacctaatattcatcgcatagtaatgatgtcatcggcccaattgcttaaatcaacagtgatgcttgcagcgatgggttacttcattgtaaatgaccctgctaatatggcttatggctcacaaagtcaagcctcaacgcagaaattcaaaacaggtaaatggcaaccaagtattgatcagtcagtactaaaagattatgtaactctcaagtcagataagaatgccgcgaacaatgctaatacacaacagaacatcgacggcacgaatacatactttattaaccttaatgcacctagtactttacgtggcattacaaccaagcgaatcttccttgatgaaatttctggtagtactgacgattcagaaggcgatccgattgcattagcaagccaacgtataaagagttttgacgatggtttgatcatgatgggttcaaccccaacaaacaaattagatgcgatatgccaagaatacgaagcaggggatcaacgtaagtttcatgtaccttgtccgaagtgcaatcacttccnnnnnnnnnnactgagggtgaacgtgtacgggcaattgctggtgggcattggatag

SEQ ID NO: 431637 - DNA, 735 bp, Serratia marcescens
gtgctggtggggctggactcggcggcggcggccgactggcggctgggggtggcgaccggctacacccgcacctcgctgcacggcgggtacgggtcaaaggcggacagcgacaactaccacctggcggcgtacggcgacaagcagttcggggcgctggcgctgcgcggcggggcgggctacacctggcaccgcatcgacaccaaacggtcggtgaactacgggatgcagtcggaccgtgacacggcgaagtacagcgcgcgcaccgagcagctgttcgcggaagcgggctacagcgtgcagggcgagtggctgaacctggagccgttcgtgaacctggcgtacgtgaacttcgagaacaacggcatcgcggaaagcggcggcgcggcggcgctacgcggcgacaagcagcacacggatgcgacggtgtcgacgctgggcctgcgtgcagacaccgaatggcaggtgaccccgggcacgacggtggcgctgcgcagcgagctggggtggcaacaccagtacggcgggctggagcgcggcaccgggctgcggttcaacgggagcaacgcgccgttcgtggtggacagcgtgccggtctcgcgcgacgggatggtgctgaaggcgggagcggaagtggcggtgaacgaaaacgccacgctgtcgctgggctacggcgggctgctgtcgcagcaccaccaagacaacagcgtcaacgccggcttcacctggcgcttctaa

SEQ ID NO: 431638 - DNA, 1419 bp, Serratia marcescens
gtggccggaaatgttgttggagtagatttcccatccacagtgggagtcatcacatttcctggcgtgcagcgtaccggcatccacctcggcgcccctccccggaatattggcgacaaactgggtcgggccataggccacgcccgtcggatccgggatgcggaactccgcgggaatatcctcgacggtatagaacatacccgggccgttgatggccttgcccaggttgatcatcccccagccatagagcgcatcgatgcccggcgcgcccatgtcggtggcggtggttttcaacacgtcggcaatctgcgccgaggtcatgtacgggaagcgctgcagcaacacagccaccgcgccggtgacgtgcggcgtcgccatcgaggtgccgtttttattgccgtagtccgacaccaggttggccggatcggaaccgttggcgacggtgctgtagattttgctgcccggcgacgagacgcagaagctggcggtatagccgcagcgggaagagaagctgctgatggtgtaaggcacgctgttggtcgatgccgcatcctgcgccacgctggcaaccgacagccagttcggcgcgatgtccggcacgaagtaggccagcccgctgatcacatccggttggttgtagttgccgtcgttgccggcggcgaacagcaccagaatatttttgcgcgccgcgtcgatggcgccctgatagcctgcgccggccaggctgccaagcagcggtttgacctgatcgaattgttcctgcgcatccttcagctcaaagtgcagcgcgttaggatcgcggccgccgtcggacagaaagtcgggaatactgacgccccagctgttgttgatcacccgcgcaccgctcttgatcatcgcctgccagccggcattggtgacggcgccgtccaggccgagaaattcaccgtaggccgggccgtcgttgtcgttatcgacgctgatcacctgcgaatcgaaggccacgccgtgcatgccgacgccatcgcgcttggcggcgctgatgcccgcgacgtgcaccccgtgattgctcaacgtcgccccgttatagaaatggaaggtgccgtcgaagtaaaagcggtcgcctgcgttaatgcccggccggtgcggatcggtgtaggcgcgatagccttcggtgaccacgttgatcagtttaccgtcgccggcgaactcgggatggcggttgaccggggtatcgaaaatgcccaccttctgccctttgccggtatagcctgcggcataggcctcatcggcgtggatcgcccccagcccccagttggcgttgaattcggcgctgcgccagctggccggatcgccggcttggccgttcacctcgtgcggtgccgcctgcgcataccccgccagcgccatgcagcagaccagcgcgttcagccgccacggtga

SEQ ID NO: 431639 - DNA, 1197 bp, Serratia marcescens
atgaactcctctaaattaggtaaactcacttcaatcttactgctaatgatagtagcacctagttatgctttcgaacttggcgtaggtgtccatttaagaagctatggagaggaggcacaaaaatatgtggagcttgtagagcaaagtaactttaacgcgattagagaggactttacttgggatcaagttgagaaagttcctggtcaatatagcgttagtggtaaaatgcagaaagttgatgattttattaatagctctaggaagtataacatcaatacacttttagtgctagactatggaaataaaaacattactagcagaaattaccctaccacagatgatgagattagcaagtttgcgtcttatgctcagtggactgctgagcgatataagggcaaagttaaatattacgaaatttggaatgaatggttagtcggtagtggagttcctaagagtttcagtcgacctgacgatagcatatacttgaaactggtgaaggaaacgtctatggctatcaggaaagtggatcctgaagctatcattattactggctcgcttaatccgcttgtccatcgcgatagaaaatggatgctggatctgataaagaatgggctattaaattatgtcgatggaatctccttgcatccctattcctatatgttgccaaataaacagttaaatacaccaagcaacgctattttgaacatatcttcctttgaaggtcaggttaggaaggaagcagggcgtgatgttccgttttatatcactgaaatgggatatcctacatattcaggggcctctggaattagtgaagttgatgccgcaaattggattgttgaatactctatgttggctaagcaaactggctatattaaaggtgtttggtggtatgacctgataaatgatggcaataatgctgaaaataaagagtttaacttcgggttctatacgcatgatcttcaagaaaagaaatctgccgtgcaaattaagaaattagggggcgttatccgaagttcaaacctgttttcgcaaggtgagagaggcgcagtgcccatgaaaaattatcagttaaattcagaatcacagagtaatggctggtctgtgtataacttgcaaagtgataatggaaatatcactatacgctgcccaggtatagcaacaggcaattcagattctttgtgcgaaattagtaagtga

SEQ ID NO: 431640 - DNA, 771 bp, Serratia marcescens
atgaataaaatgcacgtgttgtacaaaaatctttttgctatagaaaatgtagtccctaaaggcagtaagatcatttatctggattttcctttgcatctaaacgttggagatcttttgattctaaagggagctgaaaagtttttctccgaaatggagtacaatgttattgctcgctattcagatcttggctctcatcgctttttcaatgattataagactgtgcctgagaatgttactattgttttacacggtggcggaaattttggtgatttatatccagcgcatcagcggttacgcgaggaagttatatcgcgttatccaaataacaaaatagttatcctccctcaaacagttcatttctcgaacgaaaaaaatatgttttcatcggccgagatattctctaaacatagagatttacatatattttgcagagatactcgtagtctcgatatattaagcactcacttctcgaagaagacagttctatgtcctgatatggcacattcactttattatgcatttcctaaaaaaaacaagtcgaagaatacatataatccgctttggatgctaagaaaagacattgaagtaagtaaaattccaagcggtctgaccaaggataagagtattaaaacagaagactggatggacatttgcaatcgcaaagaccgagccatacaaagttatgccatcatggcgagctcgttaataacaagcttggtttcagtctcattcctgctaatttcatatggtataaatacaccgacgttttag

SEQ ID NO: 431641 - DNA, 1455 bp, Serratia marcescens
gtgcgccgcgtaggcgtcgcgatatttcgggtcgatggcgactgcatcgccaccggtgatggccttgataccggcgccgtcaccactccacttctcctggtcgggcagaataatcagcgagtaaccgaccacactggcccgttcgcgcgccgactccaggttgtcgatggtggcggaggtggtgttatcggctccggccaacagccgggcgatggccgccattacgctcttgccgctgccgccggggccggtcacttcgaggaacagctgccagtcgtagcggttggccagcaccataaagagtgccgcgagaatacgctcctgcttgtcgtgactccccccggcggcccgcgtcagccactgccagaagtgcggtgcatggtcggccaggttctccccggcacgcggcggcgtgtagtccacgctgttgacggtgcgcagccagtgcgcttgccggtgggcgctgaactgcccgctgacggtatcgaataccccgttacgaaaaccaatcaaccggcgggccggatcgcccatctgcggcaccatcagtttgagggtatccaaaatgctgttgataccggcggcagagaacggcgcacgcaccttctggaacagcgcggcaatctcccggctcagctgccggtgcggcagcacctgccaagcgccacgcgtatagcggcacagctcttcccccaccggcggcaccgccagggtgttgccgtagtgctcggccagcagttcggccttctcgctggcgctcatggccttcaggtcagcatcgctcagcgtgtcgaacgggctgggctgcggcggctggctgagcgcctggagctgggcgcgcgtggactcagcgccctgctgacagtagacgtcgttccagtcgccttccgtgggcggcaacgccgggataccgtcggtgagggtggccgcctcggcggcgcgggtctgcccggtgccactgcggtcattatcggccgccagcagcagccgtgcgtccgggtagtggctgcgcagttgctccgccaccgccgtcaggttattggcgctgagcgccacgcacaccgtctcaccggtcaggcggtgcacggtgaggccggtggcgtagccttcagtgagccagataaccgcgttgtctgggccgcagagggtgtggcaggcggctttcacctgcccgcctgccagcatgcgcttgtccccgctggcgttaatcaactgcacgttgaccacctcgcccccggcattgtacagcggcagcagcaggtcgccggactggaaggtgataccgccgacgcgcagcggctggccctgcaaggtcaggacttccacctccggccagcctttggcactcaggtaggcgttgccggtctggagccgagcggcggccaccagtgcctgtgcctgtcgcgcggctttgcgctgggcctcggccttgtcttgcccgccgcccttctgtga

SEQ ID NO: 431642 - DNA, 246 bp, Serratia marcescens
atgatgcagctaaccttgggtcgccagcactttaccctgagcgacaacgatgcactgtttatcgcggaagctatcctgttacaacgcaaagagcctggcgtcgtcttgccggagcaccgcagcgaaaaacacggcgttattcgtctggcgagtcgccaggcgcagccgcgcctgttcagtgccgggccggtgccgctgacctgcgcggcggccgatacccgcaacgaccaactgactgactgttga

SEQ ID NO: 431643 - DNA, 204 bp, Serratia marcescens
atgacaaaacaagattggataatgcaacttcgccgttgtattagtattgaaacactcgagaaagtaatcgataagaacaagtatgagctttctaatgatgcgttagaaactttctatgcagcttctgaccatcgactagcagaaatcacaatgggcaaactgtacgataagattcccgcgagtgtgtggaagtacgtgagataa

SEQ ID NO: 431644 - DNA, 783 bp, Serratia marcescens
atgggtgaacgtggttatgttgtagatctacaacgtgataccactactactaacgctgctggtgttgtattacataaaaccgctgatagttacattgatcaactatgggcacaatcagtacttgcacaagttgcacaacctcagatctttgcaggtctagaaggtaatggtgaactagtaatcccagttgcaggtaaactaactggtggtaattttggtttcgttgctgaaggtgcagactcaccaatgcacgatgcaccatttactagcgtaagtctaaagccaaaaaccttcactggttctgtaactctaaccaagactctacaactaagtaataacgccgcagaacgtttcgtatctgaacaactaattaaaactgctgcttctgatctagaaaacgaaatcctaggttatattgctactaatgcaacccaacaaactgcaactgcatttggtgttgcagtaatgcacccatccgtatatgcagctctacgccaagtgccaatggctggtaacgtagccgcaaaaatgctagtagaaggtttccgtgatgaacagtacctagctgatgaaattcgtgtaatcgtatctactcgcgttccaactgattcaattctaattggtgatttcagtgaactaattattgctcaatgggccactaccgaacttgatcgcgacatgacaactaaacgtgcatctgctggcgttgtactacgttcattcagctacatcgatttcgcagtagctcacaaagaagctttcgtactagttaataaggcttaa

SEQ ID NO: 431645 - DNA, 336 bp, Serratia marcescens
atgaacacccaatcctgtttaccgattgaagtccgtaccgccgttttccgccgcgccgtggcgcaagcctatctggatacctgcgccttttaccgggtgagcctggggtacacgctggacgagctgcagatgacgattgctctgcgcctggagggacactttgtgcgtcagtacggcgcagaggatggcatggacatggcatgcaccatgttgagtgacatggtgcagccggacgttctggtggccgcaccgcgcttgaccgcgctggggcaaaagatgatggacgagctgtgctgtgagcgcctgtcggcggcacagaacgcgaccgtacactga

SEQ ID NO: 431646 - DNA, 810 bp, Serratia marcescens; identical to SEQ ID NO: 431482

SEQ ID NO: 431647 - DNA, 1416 bp, Serratia marcescens
atgactatttccctgcatacccaggctagcgcccctaacaacgcagcggcgaccagcgtatccccgctggagcagtcaggctcctcaaaaacgaaattttccaaaaacagaaccgatatgtatcaggtagttactgacagtatcattgcggcactggaagccggtgttaagccgtggtcttgcccgtggcagcgcgtatcgagcatgtcaggattaccttcaaattatgcgactggcgctgcttacagcgggatgaatatcatgttgttgtggagcagtgcgtcagaacagggattcaatgattcgcggtggatgacctacaaacaggcaaaagaggaaggcggtcaggtacgtaagggagaacacgggactaccgccattttctataccaccctggaaaaggaaaatgacgacggagaaacagactatatcccgatactgaagacgttcaccgtgtttaatgttgagcaaattgatgggttgcctgtgagtgacgaggcagttttcccggcagagacctttgagccgataccgcatgcggaagcgcttttccgtaacagtggtgcaaccatcattgagaagggacagaacgcctttttcgcaccatcaaccgacgaaatccatttaccggaccgtcgtctttttagcgatgccgccaatttctacgctacgggcctgcatgagctgattcactggagcgggggaaaaagtcgcctgaatcgtgaaatgaaaggtaagtttggcagtgaggggtatgcgtttgaagagttgatcgtgcgccgtagaggcgcgaatactggagtggatatgattattctggatagctgggaaaatccatgcgagcctgacttaccggtgccggtgatgaactggctgaaatcccgaaaggggaacggaaccatagcatgtcaggaaaaggcccaaactgccgaagccatcgtaggtcgggcgggtcatcgcaagatgcgtatggtgaaagctaaactgcctgaacctcagtcctcagagttttatcctcaacaacgacgtagcggtggctgcaacgtcgtaccgtgccgataccgggatgccatgaggcccggtctgaagaagatggtgcgaacaaacatcttcggcccagccagcacggtctgccccctgtcagggggatcaaaaggacgaacggggcacctgtccgcatcgtatctccatattcgcgtaactacgggatcgcctaaatgggcgcgagttttgcgacccacatggcgacagagctgccatagtagccaaatgcctgaggtaatgctcaggacagctatctcagggtggatgatcgggagcgaaaggtgccgggtgaccgggccgggagtatccgctgatcaggtgaagggcagcagtgtttgcgattcgggtctgcctacagaggggatgtgctga

SEQ ID NO: 431648 - DNA, 1860 bp, Serratia marcescens
atgctgtccgatactctgcaaaggcgactggaatcaattcccgtcctgtcgaaacaggggaagataatcaatggattgtcacggattatgactgcaccgaagctctggttgcaggcgtatgaagatattgcacctaaccgtggggcgacgacacggggagtcaccagcgacacgctggatggtttctctctggagcgtttaaccaaaattatcgatcaggtcagtaacggcacctacaggttctcccctgtccggcgggtactcattcccaaagccaatggaaagacccgccctctgggcattccaacggcgagtgacaaactggtgcagtcagtggtgaaaattattcttgagcgcatctatgaaccggtgttttcgccaaaatcatatggtttccggcggggatgttcgtgccatgacgcacttctggatattaaacatcactggaccggagttaagtggttgatcgacatagatgtggtcagcttttttgacaacattgatcaccgtgtactgctggcactgttatccaggaaaattgaggataaacggttcctcaggctgataaacaatatgctgaaagcgggttatatggaggactggaagttcagcgccacctatagtggaacgccacagggcggcgttgtttcacccatccttgccaatatttacctgcatgagctggatcagtttctgatacagaaaaaatcacagttcaataagggtgagcgccgtgcggaaaacccgcaataccggcgtcttacacagcgtatatatcagaggagacgcagggctgagaaattactgagtgaaggccgtgaaggtgacgctcaggtaatcctcacctcggtccgttgtcttgaagaggaacggtccgtcatgccatcaaaagacggcatggatccgggctataaacggttaatgttctgccggtatgctgatgatttcttgattggcgttatcggttccagagacgaagcacgggaaataatgcgcgaagtcacagcattcctttctgaaattctccatctggaggcgtctcaggaaaagagcaaaatcagtaaggcgactgatggaacgattttccttggttacacagtgagagcgatcacagacagtcggatcagaagaacgaaactgggcaggcgcgtagttcgttcaagggatccggcgggtcggatccatcttcttgttccgcctgaaaggctggtccggtttaatcagcgtaatggctatggcgatctcggtcgtctgaaagcgatacaccggcgtcatctggtggacagcagcctgctggaaatcgttttagcctataacgcggaaatgcgggggctggccaattattaccgtctggcttactgtgcgaagttcagcctgcgcaagctgtggttcctctgggaaaccagcctgctcaaaacgctggccttcaaattacgcctttccgtaaatcaggtggctcatcgtcttaaaacaagaaatggcctcgttgttcgcttttgtatacatggtaaagaacgggctgttgccgtgttcagtctgaaacacctgaaccagcttccgaatctcggaaacaaagttgataagctggcagtcccctggtttaccagcggacgttctgatgttatggacaggcttttagcccgacagtgtgaatactgcggagcaacaggcgttccatgtgaaatccatcacagccgtaagcttgcagatatgaaggatacaccactctggaagcaggtggcggcagcaagacggcgcaagcgaatcgttttgtgcctgacatgccacaagtctctgcatgcaggaacactgaaaccacgtaacgggaatgggaactggcaaacatggagagccggatga

SEQ ID NO: 431649 - DNA, 867 bp, Serratia marcescens
atgaagtatgtcttcatcgaaaaccatcaggctgagttcagtattaaaggcatgtgccgggtgctgcgtgtggcccgcagcggctggtatgcctggcggagccgttgcacagttatcagtgcacgccagcgcttccgacagaactgcgacagcctggtctgtagcgccttcagcctggctaaacagcgctacggagcaccccgcctggcagaagagctgcgtgcgcagggcctgacatacaacgtggaaacgatagcctccagcctgcggcgtcagggtctgcgggcaaaagcttcacgccggttcagtccggtaagctaccgtgaacacggtctgccggtctcagaaaacctgctgaagcaggattttaacgccagcggcccgaaccagaagtggtcgggagacatcacatacttacgtacggctgaaggctggctgtacctggccgtggtcatcgacctctggtcgcgggccattatcggctggtcgatgtcatcgcggatgacggcaaacctggcctgcgatgcgcttcagatggcgttatggcggcgcaggcggccaaaatacgttatcgttcatacggatcggggcgggcaatactgctcagcggactatcaggcgctactgaagcggcataatctgcacgggagcatgagcgccagggggaactgctatgataacgcctgcgcggagagcttcttccactcgctgaaggtggaatgcatccatggagaacgttttaccagccgtgaaatgatgcgggcaacggtgtttaattatatagagtgtgattacaatcgctggcgtcgtcacagtgcctgcggcggcctcagcccggaacagttcgaaaaccagaccctcgcttag

SEQ ID NO: 431650 - DNA, 297 bp, Serratia marcescens
atggcaaaaccaacggcgaccaaaaagccccgtaaacaacacacgccggagttccgccaggaagccatcaagcttgctgaacatatcggcgtggccgctgcagctcgcgagctcagcctgtacgaatcgcagctctacaactggcgcagcaagcagaaaaatcaggcaacgtcctctgagcgcgagagtgaacaggcagctgaaattgctcgcctcaaacgccagctggctgaaaaggacgaggagctggccattctccaaaaggccgcgacatacttcgcgaagcgcctgaaatga

SEQ ID NO: 431651 - DNA, 414 bp, Serratia marcescens
atggttcgggaagagattcttcagtattcgcaggctgtatgtaagggtctgagagacgatgatgatggtttgcggcgggaagtgctgactcatgcaggaagtcgctggtcgctgggtatcgtcaacacgcttggcgtttatggcagactgcgtcatgccgagattggcaggcgtatgcatggagtgactcagcgtatgctgacgcgcacattacggcagcttgagcgtgacggactggttatccgccatgatttcggtgaggttcctccgaaagtcgagtacgagctttctgatacggggatggagctgcttgttcgtatgattccgctatggacctggattgtcgagaatgcggatcgtttcagggaagacaggcttaaatacgacaaacagagcagcatcccaagttcttaa

SEQ ID NO: 431652 - DNA, 177 bp, Serratia marcescens
atgattatccaaatggcccgggaggttccgatcctaaccacatgtggcaaggcagaaataaaggtgctggggatatcgccaggcaaggaaaccctgatggccgatggcctgccaatcttatccatgatggcagtgatgcagtacttgcctggttccgggataaccctcagcaggtag

SEQ ID NO: 431653 - DNA, 126 bp, Serratia marcescens
atgcatgatattctgactcatggcgactgccttgacgtactgcgcaatatgccgggcaactctgtggacagcatcgtgaccgacccgccttatggtattaaattcatgggtaagacatgggactaa

SEQ ID NO: 431654 - DNA, 804 bp, Serratia marcescens
atgcttattcataacgttgctgaaagaaatgaagccgctaaacggagaatgcgggcattgctgtattttctcaaggaggaaacgttctctgatttccagaccttaaaaagagttgttggctataaagggaaacataaccatgcgatgtataacctgctgaataaagcggtttcaatgggtctcctgaataaacatgagtatccagtattgaccgggaaaaaatcattgtgggggatcaccatgcagggactggcaatggtggttagcgctaatgacagggttttccccgcctattttgagccgggcaaactcaaaaactcgacgctggaacatcgactgttaaaccagcgggtaaggatcgcccttgaggaaaaaggtggcacaggctggcttaacggcgaccggggagaatttatgtcgcgatacccaggcgtccggcaccgaccggacggcattattaccttaagcagcggtgccatcgttgcagtggaaacagagcgaacgatgaaaacccgcgcccgttacatcagcatcattaacagtcatctgaccgccagcgacgccggacgctggcattacgtgatatatgttatgccggatgataaaactaaggagtcgctggtcaggctgtttggcagcatcaggacggtgatgagaaagagcgttcctgttccatttgatgtgaagaaccgagaaatgtttatcttccgcgccctcgatgaactggaaaatagtgtcaaggataaacaagggcccccctccccatctgtcggtgatgatgaagggagggaacgccatgcatga

SEQ ID NO: 431655 - DNA, 1737 bp, Serratia marcescens
atgggaactcatctgatgcaaaggctgaatgccttttcggatgccttttctgtttttctgctgtggctgcaacacaacccggtaatattgtccatatttgccgggctgacgctgccatttatatttcacctgccaatagaagaaagaaaaaatgcccccttctggttaaaatcagtagtgggtgtatccaccttctttttcatattcggtactctgtcaccgctgaccattcaggggctgagttttttctttaaagcgctcgataatgacatcctgctcagattatcactctggatactgactgtcggatttacgcttgccggtctggcttttcatattactgcccgaaggctgctggccggagaagtcgacagtctgaaacaccggatgattaaaaaaagtaaactggaaagaaatgtcagaacggatgttcgtgaagtcagggacatgttgcctaacagcattgcgtataatccgctggattatattgacctgaataacggtatctttatcgggctggacaaagatgatcagccgcaatatatcacccccgaagaatttcaaactcagcacgcagaccttatcggcaccactggctctggtaaaggagtcagtgcctgtgtactgctttatcaggcaatactttcaggtgaaggcgtatttgtcgaagatcctaaaaatgatgagtgggcaccacatgttttgcgggaaacctgtcagaaagcgggaaaacaatttgttcttattaacctgaatgatcttaattttcagcttgatttactggctgatatttctcatgaacaactggaggagctgtttaacgccggtttcagcctgggtaaaaaaggcgaaggtgctgacttttaccgtatcgccgaccgtcgcgcagccagaaatgcggcagctatttatgaaaagggaatgacgttacgcgacttatttaacactgactttgtgaaatccctcagtgaagatgtgcctgctttttatggcgagcttgaagaaatcgctttagtgaattccattaatgccaataagggattttcactaaagaaaatatttgatgagggcggttgctgttacatcatcggctcgatgcgtaatcagaaaatcatatcggctcagcgaatgattttaacccgcctgattcagatagccgaaacgcgtgaccggataaaaggcaaacctcgtcctgtcgctattttccttgatgaactcaagtatcacctgtcccgccctgcacttgagggacttggcgcagcgcgggacaaaggtgtacatatcatcatggctcaccagtcggtaaaagatctatatgactgtccggcagatctggagggtgatgccgttgccggttcggtgattgagaactgcaagtttatgcttgtttatcgccttcgcgatccggacaccgccgactgggtggcaaggatgacaggctctattctggttgacgatgaaatgagaaaagttaaaacagatatatccctgacggagaagatggaaacggacaggatgatccgccaggctgaacgatattatatagacagcaacatgttgcttaacctccccaaatttgttggttttgtttttacccagaacgatctggcgaaggcaaccaagctattccacattccagctaataagcaatatatcgacctgttttcatttgaacataaaaacccgccgcataccgaaaaagaaaatcagattcataaaccctccattaacctgtga

SEQ ID NO: 431656 - DNA, 276 bp, Serratia marcescens
gtgctcagatcattgttcaccttatacacactctcaggcgtgatattactgtccggctgccaggaaaccaaatccgaagcctggtataagcagcatcctgacgaaacttatgtggtttatacgcaatgcctgaaggatggtgaggcaagcgataactgcgaatttgcccaccgggcagcacttatgtttgcacaggaaggccagcccggggttaaggagaaattcgaggcgatatttcagcaggaagctgaaaaacgaaatgcagtgacacagtaa

SEQ ID NO: 431657 - DNA, 210 bp, Serratia marcescens
atgccggatgagatcgaccgcgatcaggaatttaatgagcagcgactggaggagatgattgaacagaatcgttttaaacctgggtcagaaccgtcattactccactgtcgtgtatgcggtaaacccattcatgaaaagcgacgacagacattgccgggcgtaaccacgtgtacggaatgtcaggaaaaacttgagcgccgtaaacgttaa

SEQ ID NO: 431658 - DNA, 588 bp, Serratia marcescens
atgattccattaattaattacaccattttaactgatgcattgcacgctctgaaagaaggcaatattcgtcactgtgagtccctcggattcacgttcgaagaaatgaatgctcttaatcagttatcactcgatgaactgtttgctgtcagccgggcggcggctccctttgtttcggtcagtgtccgccatgatgttctgcatcatttattggcgcaggcccgacaggaataccgacagcagcagcagattaaccgggctatccggctgggcggttctatcgcgttgctcaaccactactttggcctgacgtctaatgatgtctgccttcagcgacggttgctgggtgtcagcgtgccatatggacgtacacctgagccggatgaagagacagatgccgagatctggcggcaatggcagaagtgccgggtgggcaacctcgaatcgcctgacgcactgattgccatgatgcaggtaacggaagccctgaagcgtaaggtcgaagggctatcactcaccatggtctggaaacgtatcgcactgtgcgaacaggacgctgccgctgacaggaggacgccacatgccggatga

SEQ ID NO: 431659 - DNA, 348 bp, Serratia marcescens; identical to SEQ ID NO: 201060

SEQ ID NO: 431660 - DNA, 1920 bp, Serratia marcescens
atggtagacccattcactgctaaaattatagaagccgcagtagtaaaatccgttgagttaatgcttcagaagattttcaactctcagtggccaagagattgcgaagatgcaaaagagatagttcacgaactacataacggatggtccaaaaataaattcatcgaaaaacacgtccaacatacgcttaaaatgcgtactcttataaatccgaatgacgatgtaacacttacagatatttatcacccactgacagtcgttactgcatctaacggtgactcaatatcaataaaagatgactttatccttcagtttagcgggatcgttaatattattggtatagccggccagggaaaaagcactatactgcgcaagctttttctagaggaaattaaaaaagcggagagagttccttttttcattgagcttagaaacgtaccggacggagatatactagcatacttcaagaatttacttaaaagcctccacattacggttacagactcgaatgttgaatacttactccaatcgaaaaagatagttttactgcttgatggatttgatgaaatccggcaggagaccacagttcaagctattaagtcgatactcgaactaaacaaaacttatgcctgtccacttataacaacaagcagaccaaacacgcaaatttgtcaaatgccaggaattaataatctggaggtaaagaaaatagatttagaagataaactgcacatacttaacctgattgaaagacaggacaacaaatctaacaagacaacatttcgaagcctgtgtaatctgcttattgagaatacatactttgaggaaaccatcagtaaccctattatggttacgctcttatatcattgctttccatacatggatgaagtgccaaaggatattactgatttttatcgccagctatttggcgttttatatgcgcgacatgataaaacaaaaggttataataatagggagagagagtcaggtattgaggtggaacccgcccgtacgcttttctcaaacctttgccttaaatcattattaagagaacagtactatcttgactcacacacgcttcatcaacatataaaaagtgctattaaaagccatgggtatgatgaaaaattagctgaagcattcactaacgacattgtgaacataacctgtttgttgcaggccgatggtaatgaccgttttgtttatcttcataaatcggtacaggagttttttgctgcattttttattagtacaatgcaggaaaaaaccattaaaagtgaaatttatgcgtttttgagaaaatccctccagtcatcacctaaattcgataacctactacaatttctctactatttagataatctatcttttttgaatgagatcacgcttgaaacattcaaaaccactgggtttgaaaaatatgctaacctgacctatgaagaaatttctgtactatttgacgaattattatcacgcggagggctttatggggaaagtacactgaatgatacatttgtcaccttaaccggctatactacgatacaaacaattttaaaactagacttcttgaacgtaataaaaggtgaaaaaagagataagtttgatatagattctgagtttataaaaataatcccagatattatcgacaaagaggacctttcatcttatcgttataataaaacggcctcaaaaaaaaataaaaatatttttatcggagagagattagatgataatccgagagaaagttataaatttgatttcaaggaattcctagtaaccactggattgtatgaatattataaaaatatattctttgagaccattgttgatttcaataatgaagtttataaggtaaaggaaaatgaagtccgcgaaatgaaggatgcaatgttcgatagctttgggtttatatctgatatttga

SEQ ID NO: 431661 - DNA, 303 bp, Serratia marcescens
atgccgctcacattcaaacgttcggaaaggctctccatcggcaccgaaatagagttacagctggtcgatgccgagcactacgatctggcggatcgggccgaccgggtggtcagcgcggtcggcgaccgccggcgcgtcaagcatgagctcacccaatcgatggtggagctgaacagctcggtgcaccgcgatctcgatgagctgcacgccgagctgcgcgccctgacccataccgtccggcgcagcgcgcagcgcctgggctgtgacgtctgcggcggtggtcggcacctgagcaacgactga

SEQ ID NO: 431662 - DNA, 1050 bp, Serratia marcescens
atgagtaaaatcagagtgttatgcgtagacgattctgcactgatgcgtcagctgatgacggaaatcgtgaacggccatcccgacatggaaatggtggcgactgcgccggatccgctggtggcgcgcgatctgatcaaaaaatttaatcctcaggtgctgacgctggacgtcgagatgccgcgcatggacgggctggatttcctcgagaagctgatgcgcctgcggccgatgccggtggtgatggtctcttcgctgaccggcaaaggctcggaaatcacgctgcgtgcgctggagctgggcgcggtggatttcgtcaccaaaccgcagctcggtatccgtgagggcatgttggcctacagcgaactgattgccgagaagatccgcaccgccgccagagcgcgcctgccgcagcgttccaacagcccggcgccggcgatcctcagccacgcgccgctgctgagcagtgaaaaattgatcgccatcggcgcttccaccggcggtaccgaagcgatccgccaggtactgcagccgctgccggccaccagcccggcgctgctgatcacccagcacatgccgcccggtttcacccgttcgttcgccgaacggctgaacaaactgtgccagatcacggtgaaagaagcggaggacggcgagcgcgtgctgccgggccatgcctacatcgcaccgggggaccgccacctggagctggcgcgcagcggcgccaactatcaggtgaagctgcatgacggtccggcggtcaaccgccatcgtccgtctgtcgacgtgctgttccgttcggtggcgcaatatgccggccgcaatgcggtgggggtgatcctcaccggcatggggaacgacggtgcggcggggatgctggagatgcaccgcgccggggcctataccctggcgcagaacgaggcgagctgcgtggtgttcggcatgccgcgcgaggcgatcgccagcggcggcgtcagcgaagtggttgagttggacaggatgagccagcgcatgttggcgcagatttccggcggccaggcattgcgcatttaa

SEQ ID NO: 431663 - DNA, 165 bp, Serratia marcescens
atgttcagtcatatgctggacaccaacattgttatctatgtcatcaagcgccggccgctggaagtgctggaggcattcaatcgctatgcaggtaaaatggtcatttcgtcgatcacctatggcgaattggttcacgggtggagaaaagcgctcgtccagcggtga

SEQ ID NO: 431664 - DNA, 225 bp, Serratia marcescens
atgcgcagcttgccgattcggttatccaatgaaattgacgacagcttgaacgacattgcccggcgtcacgggatggcaaaaaccgacgtcattcgcctggcattttctttaatgacgattgccgaccgtgagtggatgaaaaaagacggttcccgtcttgggatcgtgcgtgaaagcgacgaggggctggaggcggtcgccgtggtggtggggatttttccatga

SEQ ID NO: 431665 - DNA, 378 bp, Serratia marcescens
atgtccctgccatcatttcgcccctcgtcccacggcggcaaacatcgcggcaaagccgccctctggctggctgcggccgaggttctgctgatcgtggcctggagctccggtttcgtcggcatccgcttcgccgccgattacgcgccggtgttgctggtggcgttctggcgctgcgtggtcgtcgctctcgcgttgctgccgtttagtctgaacgccatcaggcgcgcatctccgctgacgatagcggttcacgccgggattgggttgctcgccatgaccggtacctggccggcgtcagcaaaggcatcgaatatggcgtgccggccgggttggccgcactcatcgccgatttgctccctctcggcaccgcgctgctga

SEQ ID NO: 431666 - DNA, 1716 bp, Serratia marcescens
gtggcagaaactaaaatcaatacactttccactgttgaggaattaagaacgacagaacccgacatggatgggcaagtcgtgttattacgcagcatcaccgatcgaatactgcattatgtccataaggccggcgacaaagcgccagatgatggaacattggtggtcgttactgcaagcggcaaacgctggcggttggtcagggatggcgacacgctccaactcgcctggtttaaaaccgctgtcaacagttgggacaatgcaatggatgcgctgctcgggttcgccgcaaccaccggacgaaacgttgctaaaatcgtctttcctcgtggaacagtgcaattcaagaaaccgatcattctggattatcgcaaaaactggttcttggaggggcaaggtgggcacggcgcttccggcagcgtactcgatttcaatattcctcgcagtgccggctatggtgaatacggcgcgattcactgttggggagagcctttcggatttcagcagctcacgctgcgtggcctgatggtgcaaggcatcggcacccgcatcgttgatcctactcaggatgaagccagccgggcctactgtcacggcgtttattgccgcaccacaggcactttgtgggaggacgtcgccattcaaaacttccgcggtgcagcactgtacctagacaacgcgttcgacaataacttcaaccgggtctccgtatttgcttccggtcgcatgaaggacgggtacagttataccaacctggatgatgtagccaaccctgatgccaccgcctaccctcctctactaatcatgagcactcgtcctggtgatcagagtaacttcaatcgtttttttgatggttcgatcgaactcaataatgtaactccatttgtcgaagtacgaggagggattcagatccactttacacgcatgcactcggaacgtcctggcggtgggcttgccgaagggcaatggccgttaggtacttttatgaaagttggaggcgaagtttggcttaccgactgcgggattagcaatttcacccgagcgatcgcctacggcccctatgcacagatgattattaacggctgcaatagactttcaggtgatatttatccatacgatacctccaccattggcagtgctcgcctcaagcttgataacaccatctgcaagggtctacatatttcaagcaatattcagggcgattatcaaatcagtaactgcgtactacagtacttaaatacggccgttatctctggttccactctggtcacaaattgtcggatcaatggtgatataaccgttacagggagggctggtataccacttggttcagccggtgggttaaaaattagtaatagtcaagttgcaggtaatctgatagccacagcaacggcccagcggatcagcgttgccggctgccatattttcggggatttatccttacccggcaccaactgcagcgcagtgcataacgtagtgctcggcacagagtacattgcctcaacgggcaataacgtaagtatcggcaagacttctccacccattatctacgttgatagcagctatagcgaaatatcaggcagtgttcagagaggcacattaattctcaaacgatcggcaacagcggctcaatccccaggttggatttgcacttctagcggtgcagtgggagccactttgaaagtagcagcgttagccgcattggggaatgaaatatga

SEQ ID NO: 431667 - DNA, 510 bp, Serratia marcescens
atgttggttattactgatttttgcatcacgcttagcttgtctaaaggcatctcttctactggtgccaatgtatgtggtttttttatttttttcagcaccacacgcactcaaccccagtggatccacccacatcagcgggttaggcgcatactgataaaggttcagcccgccgcgcaaccctatcggatcctgcgtggtgaaacgccccacctcgggttcgtagtagcggaacaggttgtagtgcaggccgctttcgtcgtcctggtattgcccggcgtagcgcagcggctgctggtattgcgcgccctgccgcttcgccgcgccggccaccgtctggccctgcagcttgccgaaggtgtcgtattgcccggaccagcacaggttgcccgctgcatcggtcacttccagcggcgcgctgttcagatcggtgtgataccagtaaatatccgccgagcggctgtcgcccgcctgctccagcgccgccagcgggctcgccgggtcgttatttaa

SEQ ID NO: 431668 - DNA, 432 bp, Serratia marcescens
atgttatctaaaaatattgtagtgcatcttaagaataaaggctggtggttcgatgatgcatctgaagactacaagaaagcccttgagaaattaggggttgagccatcatctgatatttctttattttactcccatgcggaagatgggcctactttttacagtcggaaaaaagaaatatatcaattgggctggtttttactaaattcaaactatgagtttgacttgaagagatgtcatgaagtccttgggttgccgaaatcatttattccacttgacagcttcgagggggaaactggttttttttacaacaaagaaactggtgaggtggttgacttagctttaggcgagaagttgcaagattttaaagatgggcggttgaaacctcaatggaaagatttcaactcatttttagaatggttctttgagctgtga

SEQ ID NO: 431669 - DNA, 1590 bp, Serratia marcescens
atgagttcggtagatataaataaagtgctgcggcagattgcaaaacgagctgaaaaattagaggggcaatatataatagagtcctttgtcgatacagggacgttattcgatgctgtcacagtcaaggaaaattcagttatttttgggcgtagggggacgggtaaaactcacctgcttagatatatggctgaacaggtcaaagagtctggagatttagctgtttatatagatcttagaaatataggatcgaacgggggtttgtactctgaggttgatgttccagaatcgcaacgagccatgacgctgattattgatacattgcaagctattcatgagcatgttaagaacgaggcgtttgcactgccagatgatattgatattaacgttacggatttgatatctggtttggatgaatttatagactctgcgtcgaagacaaagatcactggtgatataaaaaagtcatctgaagtatcatctagttcaactcaaactaataaattatcaggtgatttaaaagttcaatttgacgcattggttgctagtggggctatgtcacaagagctggtcgatgccctaatgaaaaaagaaacatttgaaataacaggtaaagaggaatttcacattgtatatcctgatattgctagagccacgagaaaaataaattcgtctcttggtaagagaaaactatggctattaattgatgaatgggcagagataccattggatctccaaccatatcttgctgatgtaatgaagagggcttttttctcacatcatagtataattgtaaaaattggtgcgattgaaaatagaagtagattccaaaaattactatctagcggatacacacttgggatagagttaggtgctgatgcaagcagccatataagtctagatgagtttatggtatttgataatgatgccaataaagcgaagaattttttcattaatcttgtacatagacatgccatggcctttgatgataacggatctattcctaaaacaacgaaaaggtttgtgtctcaagcttttactcaggaaaatgcagcaagtgaatttgctatgtcatgtgaaggagtagcgcgagatgctttaagcataatatcggagtgtgcattaaaatctgaaagagataaaatatcgatacctactatacgaagatctgctaaagactgcttcattcgagctaagaagaatacaatagaaagcatggagcatgcatcagatttattaaattggatcattgatgatgtaattaagggccgttcggcaaaggcttttatgcttgaatctaataaaagggatcctttaatagactttttatttgataacagagttcttcatataattaagcaaggtgcttcagcacaggatattgtaggcaaaagatataacgtttactctatcgattacggctgttatgttgatttgttaagtactatttacaagccgagaggagttatagcagaggaagatttcgatggtaatattatatatacagacgtacctaaaaatgactatcgttctattcgccgtgccatattaaatcttaacgatttctacagtaatgttaattatagagaataa

SEQ ID NO: 431670 - DNA, 195 bp, Serratia marcescens
atggaaactgatgaacaacgtgcaatgttcatagccaacgagattggagccgcggtgatcgatttgattgctaatggcgtggtggtgaaccgtcctaatattactgactatttagagatgaagcggaaaaacgttggcaacacgctttacaaaggtgtgttgcgagatgcggcagcccttgttcgggataagtag

SEQ ID NO: 431671 - DNA, 912 bp, Serratia marcescens
atgaaaatttccttggtagtccctgtatttaatgaagaagaaacaatacctgttttctataaaaccgtgcgcgactatacaccatttgaaaattataacattgagataattttcattaatgatggtagttcagataaaacagaaagcattatctcttctttatcgttggcagatgaaaatgtgaaggctataaacttcacacgtaattttggtaaggagccagccctcttcgccggattagagtcatctactggtgatgtgattgtccctatagatgttgacttgcaagatccaatagatgtaatcccacaattgattcagcgatgggagaatggtgcagaggtcgttttagcaaagcgcatagatagaaaatgtgatggaagaatgaagcgtaaaagtgcagagtggttttatagaattcacaataaaataagcgaccctgcaatagaggaaaatgtcggtgattttagacttatgtctcgagaggtggtagataatatcaaactacttccagagaggaatttatttatgaaaggaatattaagttgggttggtggtaaggtggacgttgtagaatacaacagagctgaacgcatcgccggcacaagcaaattcaatggttggaagctttggaacttggccattgagggaataaccagcttttcaacattcccacttaggatatgggcataccttggttttttcgttgcaactttatccttcctatatggcacatggatgattttagataaaataatttggggcaatcctgtagcaggctatccatctatcatcgtttccatcctctttcttggtggagtgcagctcataggaataggcgtcctgggtgagtatatcggtaggatttatattgaaacaaaatgtaggccacgttatatagtgaaaaagtga

SEQ ID NO: 431672 - DNA, 1440 bp, Serratia marcescens
atgatctgcaaaaacgacaaaaaaacattagcactgtactcaggcttggctctgttattcatatacccccttatccagtctggggtattttacagggatgacttagatagggctatcaccgggcaatatggatggcgagggctaggaagacccatggctgatatcctaatgaaaatactatctgcaagcggtcactataatcttgacctattcccgtacacaatgattatgtcctgtctgttcataggggcgtcatctttattgttaaaaaagcacctaaccagaatggatgttcaacatcctgttttcgtcgctgcgtttttgatattcaatccttacatgctgcaaaatatcgcctatagatatgattcccttggtatggctttggcttttttcctttctgttttagcctacacttatagcaacacaaaccaaatccgtgaagtggcagtaaaaatagtttccggagtacttgcgttaaccctatatcaaccatgtgcaaatatatttataggtctacttgctgcagatgtttttatatttggacttaaaaaccacttagagatacatcacgttacgaagcttgtcgcaagaaaagcttgtgaattcatttcattttacattatttacatgttgctattttcaacaaaaagcaactctcgctcagaactaataaccccagatactgatggctatagaacactagttagcactgtgaaaagtttatatgaaatcgttgcatcttactttcatggtcctgtgtatatttactttttaattcccacgttatttttaattgcacttttaataaaaaaatcaattaaaaacaacaacctaatttcaacctcaacactggcaattatttctacatttatttttttaacttcactattaggcccaacaatatttttgagggactcacccgttttcccgaggacattaatatcattctcggttctgtttgtgattatagccacttcaatcgttgagcttgcaccaaaaataaaacaccttgcgttaatacctttgattacagcctttgcttttagtgctcaattaagtagcgctatgaaatcgcagcgtgaatatgaagactttgtatttaacatgatatccagagacatcataaatcaccctgatgtgaaacttattggcacaaccggtcaagttaacattaacgagagggcaaggctattgatggataacaaaccattaataggctatttccttagtcctgcatctgaatttttggcatcattccagttaattaataaaggcttaccacaaaccctgcatggttatggtgacgagcaaagtaataaaaacaaacttgcctatatagtaggtaaaggcatcaaaccttttttatctaacaaggactattcactttactttttcgataatgaagtcatagtgtccttgggttacagtaaaaactaa

SEQ ID NO: 431673 - DNA, 528 bp, Serratia marcescens
atgattatgaaaaacttgaaaaaccttaaacagtacactcccaccgaaccagcattaggctctgcggtagcttatctccgtgatgaagatggcaatgattggtatgaaaatcagcaggagtttgccgccgataccctgaaagttgcttatgatgaagaaggtatcatatgggctgtggcacgtgatgtttctatgctttggccgattaatttatctgttgttgaagtgagtgaggaaattgcgccgcgtgggctatcagacaccgggaaatgggttttcaatggtaaaaaaatcattccccgtatctacaccaaagaagaatacaaggcgcaggcccaggcacaaaaggagttacttttggacgaggccaataaaaaaacacaggcttggcaaactcaattgatgttggggataattactgatgctgataaggcatctcttattttgtggatggagtacgtgcagaaggttcaggctattgatacacacctggcagataaagttgcatggcctaatccaccgctctaa

SEQ ID NO: 431674 - DNA, 1248 bp, Serratia marcescens
atgacggatgaaaacaccaattacaccaccgcagtaccggcggtcacgttttcaaaaacggggctgctggtgccggatgaggtagatattttaaacggccgcctggccgacttttcgaccgccctggggagttcgatgggcaccagtctgacgagcccgcagggacaattggcgatgagtgacgcagcaattattgccgacaagaacgatcagttactggccattgcgaatcaggtcaacccagactacagcagcgggcggtttcaggatgcaatagggcgcatctactttattgaccgtatcggcgctacagggacgacagtaaccggtacttgttcggggctcgtgggcacgctgatccctgccggcagcatggcgcaggatgaagcgggatatctttttatcagtctgtcagacgcaacgattggcgccactggcagtattgacgttgttttccagaacctcacgacagggccgataggttgcgccattggcgcactcagcaaagtctacaaagcgatcccaggctggtccggtgtgagcaatcgcgccgctggcgtgccggggaataatgaagagagccgggctgactttgagcaccgccgacgtaactctgtagccaataatgcccggaacacgctgaatgctattagaggcgagatcctttcaaaggtcgccggagtggtggatatctatgttacgcacaaccccacaccggcagaaaggaaagttggcgcgtcgaactacccactgaaaaagaactcgttctatgtgggtgtgtatggcgggaaagcggaggacatcgctggtgctatttggcgcaaggggccgccgggggttgatatgaatggtgaccagtcttacacccttgcggataccgacggttatgatcccccatatcctgagtatgtgatcacctggcaagggctaaagccggtcagtgtttatgtgaaggttagcctgagaaagagcgagtatttgccgtcagccattaatgaacaagtacaaaaatctgttgttgatgctttcaatggtgccgatggcggtaatcgggcgcgtgcggcggcaacgttagctgcagggcgtttctatgctggtatttacggtattgatccggcgaacgtcgacattctcggtataacgctgagcaggaacggcagcgcgtacagttcatcgctcacgtttggcattgatgaaatccctacgctggatccgaacaatatcagcgtggagctgaaggaggtctaa

SEQ ID NO: 431675 - DNA, 351 bp, Serratia marcescens
atggacagtctcattttctcggtaccccgttcagatgtaacactcgtggaaaatgcgctgacggtttgggggattgactatcgccatcacgtcacgctagcgttcgactccgctgagcccattcagtgggtggagttgattgtcgaggtggcaaagtctcctgccgcaatgaattgcctaagcgccgccattggctatttcatagccaggaataaaggcaagttttttgaagtaacaatgaaaaatggcacaaaagtcactgtgaaagggcatgatctagacgcaacgatcgcactattgaaagaggctgaaagactcgccgtaaaagatgaaaccccggataacgcctga

SEQ ID NO: 431676 - DNA, 678 bp, Serratia marcescens
gtggataattttcacgttaatggcgcggacttgaatggtgacgtcaacgcacaggagtttgtattgcgtcagtttctcgggcgccatgtgtttatcacgctgggccaggttgtgaaagccaagggagaaagcgtcgatattcgtccgatggtgatgtcggttgcgggtaacggctcgccgatctcacatgaggtgatttataacgtgccggtgtggaggcttcaggggggacagagtgcggtgatcatgccacccaaagcgggcgatattggctttatcgcgatttgtgatcgggatatcagcgcggttaaaaccactcgtcagccggcaatgccaggatcaaagcgaacgcatagcctgtcggatgcgctttatcttggcggggtgcttaatggcgcgccggtgcagttcgtcgagtttgccgatcagcagatcaatgttacttccccgtggaaaattacactgaacgcgcccgatgttgaagccaacggaacggggagtttcactgtcaatttcccgaaaatagctcttaatggcgagacggaagtgagtgaaggctttaccgccaaaggtaaaaccgacttgtctggcggcgccaccattgatggcattgagtttggtaatcacgtgcatggcggtgtgcaatcgggcggctcgcagacgaataagccagaataa

SEQ ID NO: 431677 - DNA, 846 bp, Serratia marcescens
gtgagctatcagcagcgaaaaatcatgattgaatttaccctggcagagggaaagaaattcgatgaccgaggcaatgtattgaccattcagaatgcccgctgttacgtgaacctggcggcttatggaggaattgctggcacccaggtcacattgtacctgtggggattgataccccagcaaatggctgcgttgagttacaagggtatttggatcgatggggccaagcctaatcgcgttcgcgtctgggccggcgaccggcaaatttttgaaggcttcatcagcgacgcctacgccgattacaaccaggtaccggacgtaccgctgatcattactgccaacatgatgttttatctgcgggcgaaaaaggtgtcgccgtttagcgcagagggcacggtaccaatagacgacattctgatgccgctggcttcttctgtaggactcaagtatgaaaatcagggggtgaaacgctcactgcctgatccctatttgcagggtgatatcacgcagcagatgttggaggcggcccgggccgttgacgcagagatcgacatcaacgttgagcaggtcaccatctggccaagaggaatgccacgtaaagagccgacgctgctggtatcaccagagcatgggttgatcggttaccccatatttaccaacgtgggactgagtattacgacccttttctcggccgatatattcattgggcgcaaactgtcactggaaacctcactaccgaatgcctccgggcaatacgcggtcatcggtgccgtacatacgctgacctcgtgggtagagggtgggcaatggagcactgcaggcgatttattgcgtcaaccgggagggtga

SEQ ID NO: 431678 - DNA, 1929 bp, Serratia marcescens
atgatccttgatgaactcgtcctcgccctgggtattgacgacaaaagtttccagacgggtgagcaggcggtggttgcgggacttgatcggctgaccgcggtgatggagaacgtggcgcaggcgtttgacaccggcgaaaagaaaaacagtgaagcgctggataagaccggcaagaaggcagaaaaaaccgcgaaggacatggagaccagcggcaagaaagcgtcgtcgtttttctccagcattcgcacccaggtattggcactggccggtgtcacattatccttgagcggtctgaaaggctttgtcaccggatttaccaataacctgaaccaactggcgacggcggccgatgcttttggtatgtcggcgaaatcactggatggatggaccaaggcgggtgaagcgtttggcgtcagcgccaatgaaattgtcggtgccttttcgcgtatcaacgatgccaaggcgcgtttaaagtctgggctggggttggatcctcagcttcaaagcctgctactggccgccaaccaggctggcgctaatgtcgatctcggccgggatggcactgaagacattgtccgcaaactaacggcagcgtttccgaaccttaacaaggaccaacagcaggcctacggtagcgagctgggatatggctatgctgcacagcaatggatgggctcggggcatgctttacaggacgtagaccgctttacgtcgcgttccggtgtcgatgaacagtccattgcggcggcaaagaagtttcgcgagcaatgggcggagattagccagtcgtttgagaaaacgggttatatcctgtttaacgcgctgctgccctatatcaagcagttcaatgactggcttaacgacctggccacctggatgacgcagcacccggatgaaatcaaggcggcgatacagggtgtgctcgatgttctatccagcgttgtcggtatcgccagcgaggcggccaaagccataggtggttggcagaacgccattttgctgttggtgagcgcctcagtcggaggaaagctactttcactgtttaaggggcttggcggggcgattatggggcctgctggccttattgccgcgctggtggcgctggaggagtttgtcgttaagccgctggaagaaaagtatccggcgctgaaaaataatcccgtcgcggacaccctgaacaatttgccattcagtgacatggttgatggatgggggaaatctgcccacgattggttccaggaaaaaaccggcattaacatacctcgcggtgacggctacggacaaagcaccgagccagagcagcacgcacaggcagttcgccggccgcagccaacgaaagaaggtgaggcgttgttaggctggctgcagcccaagctgagcaaactggaggaaacattcaagttaccgcctggcttgttacgcagtatcgcgatcactgaatcaggcggaaacccggaggcggtatctggcgcgggtgccaaagggctgtttcagtttatgcctgatacggcgaaggacttcggattgaaggggcgggatgtttacgacccggaaaaatccgcgcaggccgcagcccggtatatgtcgcagctgatgaagatgtttgatggcgatttgggcaaagctctggctgcttataactgggggcagggtaacgtcatgcgtaaaggccttggggcagcaccaaaggaaacgcgggagtatgtgccgaaggtgctggccaacctgcctcagccgggcgctggaatggccgcgcaatcgcgtcagcccgcagcgggacctcaatccaccgtcaccgaaaccacccatattggcacgctgcaggtgatgtcgaccgcggacaacgttaaagggatcacggacgacgccaggcagaagattaaccgctcaagcctggtgggcgcgtatgcatcgggagtatcgacatga

SEQ ID NO: 431679 - DNA, 405 bp, Serratia marcescens
atggcacgaaaagagaaatacatcacgattgagagtgaaaatcgcgatcaggggaaagccttccatgtgaaggaaatgcctgcgtcacaggcggaatggtgggccatgcgtgcgttgatggcgatggggcgtggcggtgttgaaatcccggataacatacgcaacatgggcatggccgcgatggcggtcgaagggttgaaggccatttcgaaaattcctccggaagaagcaaggccgttgctggatgagttgatgatgtgtgtgcaggcagtgccaaaccctgcggataaatccgtggttcgccccctgatcgagagcgatatcgaagaggtggcaacgcgccttaatctgcgcgctgaggtgttcaaactgcacgtggattttttcgctaccgccggccgctag

SEQ ID NO: 431680 - DNA, 1485 bp, Serratia marcescens
atggcaattccaatcagtaaagacgtaaaaataaatcccggcgtattagccgccgtcgggaatgcagtcgatcttaatggcctgctgctgaccgacagcccctatgcaccgatcggtgatgtggtctcattttcttcggctccggatgttgccagttactttggcggcgaatccgacgaatacacgatggcagtaatgtattttcagggattcaacaacgcgaccaaagcacccggcatgctgctgttttcgcgattcaacattgcgccggccgccgcctggctgcgtagcggatcgttcaaaggcgtcaccattgagcaattgaaaaaactgtccggtactttgacgctgtccatcaatggcaaaaaaactgatgctgatgtcaatttcaccagtgtaaccagtttcgctgaggccgcggcatccttgcaaacggcattgaccgccgcagtggccaccgtcacgtacgatacgaaccaaaacgcttttatcatcaccgtggcgggtgccaagccggaaaccacagcgatcacctttggcagcggaaccgcagcggagccgttgaagtttaccagcgcgaccggtgcggtattgtcgctgggggccgcggcggcaaaggtggcggatactttctcggggatcactgccaagtcgcaacaatgggcgggattttccacggtgttcgaatgcaagcctgaacagcacctggattttgcagcctgggcgagtggtcaaaataaacgctatttctatgttgcctggacgacggacggcaacgcccgggtgaagggcagtaccgaccatatcgctcaccagatcattactgtaaacaactacggtagcactgttctggtgtcggcgttggatgtgaaaaaaacggcagcggtgttgggctatgccgcagcgctggattttgtgcgtgtggaggggcgtgtaccgttcaagttccgtgaatatgacggattggccgctgatgtgaccaacgaaacggattatgacgcgctgatcgccaacgggtacaacttttacggcaagtatgccgccaacaatatcgtcgaggattattgggctgatggcaccatcaccggcgatttcaagtggctggacagtttcgccgggcagatctggctgaatgccaacctgcaaggggcggtactggcgctgttcaaatccaacaagacgatcccttacaacaacgcgggccgggcattggtggcgacatcgatggccgatgtcattgggcagttcaaggcctggggcggtattcgtgccggcgtgaccttgtctgctgcacagaagttggaaatcagtaatgccgtcggggaagacgtatcggcgacgattttcgccaccggctattacctgtatatcggcgatatgttgcctgcgctgcgtgccgagcgaaccagcccgagctgctcactgtggtatagcgacggtggcagtattcagaaacttaccctggcatcgacggaggtccaataa

SEQ ID NO: 431681 - DNA, 552 bp, Serratia marcescens
atgtctacagacgtaacgctctcgataacagaaagcgatctctacaaagcccttgggggattccttcaggggctttttgttggcgtcgagatcgagcggacacagcaaaatggcattcccatgccacagggggagtttatcgcgatgacttcgcttaattcggctgggttgtccaccgggattgttaactacagcgcgcctgtatctgccggtatggggcagcagcatattacccgtacgacacggtgggattgccagttggatttttacggtgccggcgctgaacgtaacgccttgctgctggccacactgtttcgttctgaatattcaaccgatgcttttcgccggggtggggcagttctgacgccgctctactgcagtgacccaaggcagacaaccatgatcaacggcgaacagcagtatgaaccacgctggacgcttgacgttcaggcacaaataaatccggtggtcagcgcaccgttggcatttttcgacaacgtgacgatacaccctattccagtggagtctctcgatggcaattccaatcagtaa

SEQ ID NO: 431682 - DNA, 366 bp, Serratia marcescens
gtgaatttgcacggaattgtgtcgcgcgctgtcggtgcgattaaccccttcattgaggcgcagattttcaaatctaccggcagcgtcaaaagcgcggattactcccgcgttccgggctatgccgatcctgtcccgatgatggtacagaaacaggccgttacccagggcgatatccgccacctggacaacctgaatattcagggggtgttctcttcgatatacaccaatggcaattggtgcggcgttaatcggccgaaagatcagggcggcgataagtttgtgatcggcgatgaaacctggctggtggtgtcggtaccggaaaactggccggactggacgagggtgattgcatgtctacagacgtaa

SEQ ID NO: 431683 - DNA, 480 bp, Serratia marcescens
atggcagccacggtgcgcgggggcgccgcgtttaaacagcgcctggcgcagattgcttcagacctctcttcgggcaaaagcctgaaggtcggttttttggctgatgcgacctatgacgatggaacgccggttgccctggtggccgcggcgaatgagttcgggaaaatggttgtgacgcgggagggcgagtcctatttccaactgccgaggccatttttccgcaatatgatttcagccaacagtgggcagtggccgggggatttctcacagctgatccgttcatcaaattatgatactcggatagcgttgggactgatgggcgaacggatcaagaaccagttgcagggttccattcgtgagtttaattcgccgccactggccgagtcgaccatcaggagcaaagggttcgacaaaccactgattgacactgaccacatgttgaacagcgtagattatgccgttgatggaggtgatgagtga

SEQ ID NO: 431684 - DNA, 324 bp, Serratia marcescens
atgaccgcacgagtgatgacaatggggggctatcccgttgaggtgtcgacccctggggacagtggaggcggggcggtaacatcagaccagatcaccgacgccactgatatcggtaagaaagtactgaccgctgccgatgcggctgctgttcggcacgatatcggggccggtacttctgaactgaaagtcgggacggcagccacggacgccaagccaggggattacaagccggcttcggcggatattagtgatgccagcgatattggtaagcagatcctcacggccaaagatgcgtccgccgtcaaagcgctgctggggttgtaa

SEQ ID NO: 431685 - DNA, 456 bp, Serratia marcescens
atgggcgtcgtaacttttgatatcaagacatttcgtgagttgtatccagagtttgcggcggccagtgacacgttgcttgaggcgctgttcaatcaggcctcaacgctttacctcgacaataccgacgaaagcgtagtgcaggatgtgaaagagcgcgaacagctttttttcttgctggtggcgcatctttgcgcattgcggggctttggttctggacagaccggcggacagggaggcggtctggtcggccgcattaccagtgcgtcggagggatctgtttccgtgtcggtggacagcagcggtagcaacgatcagtcctggtggtttctgcaaacaccttatggtgcaagttattggcaggcaacggcgccataccggacgatgcaatatcatccgggcgcatccccttcacgttacccggggcattattaccggcctgtgcgccgcgggcgctaa

SEQ ID NO: 431686 - DNA, 351 bp, Serratia marcescens
atggcagaacaagtcacagtcggctgcaaattgccgaacggtctggtactggatgttgaaggcaagcaagcgattgtcgcggggttccgtggtgaggatgtgcgcattattggtgggtatggtctcactgctgtggacaaggagttgtgggaggcttggttagaaatccacaaagatcagccttacgtgaaaaacgccgtgatctttgcccaggacaacggtaatagcgttcgttcgcaggccaaggagcaggagaaggtgaagtcagggcttgagccgttgtcgcagaataatccggcaccgggtatcaagcgtgacgatgaggccatgaaccaagcgagcaaggggtaa

SEQ ID NO: 431687 - DNA, 1029 bp, Serratia marcescens
atgaataaattcaagcaacactacgccaccgccagccgcgattacggcatcatcctgccgggcgcgcaggcgtacctgccgccagagtacgcaagcaattatgcgctggcgatggatgcgcagccgggattggttaccgccagcaactccgctgtgccggcctacttcaccaactatgtcgatccggagttgcttcgcgtattggtgacgccaatgaaggcggcgcagatcctcggtgaaactaaaaaaggtgactggacaaccttgtccgcacaattcccgatcgtggagtcgtctggtgaggtcggctcctacggtgactacaaccacaatggcatggtgacggcgaatgccaactgggtaccgcgccagagttaccactatcagacgcacacccgttggggcgaacgtgaactggatatgtacggcgcggcgcgtattggctgggcggcggaactgaatgtgtcgtcagcgttgacgctgaacaagttccagaacaagtcctatttcttcggcattgaaggcctggagaactatggcctgctgaatgacccgtcgctttctgcaccgatcacgccagatgaagtcggcggaaaactgaaatgggatgacaaggacggccaggcggtctacgacgatgtggtcaagctctacaagcagttggtgaagcagaccaatggtcacatcgagcgaactgacaagatgaaactgtgcatgtcgccgtcttcagaggtgaacctgaccaagaccaacggctacaaggtcaacgtttccgacctgctgcagaaaaacttccctaacctgacggtagaaaccgctgtggaatacaccacggatgccggtgaggttgtacagctgattgctgagcgtttgggcgagcaggacacaggttattgtgcctttacagagaaaatgcgcgcgcacgctgtggtaacggaatcttctgcatggcaccagaaaaaatcggcaggcacctggggggcgatcgttcgccagccgctggcctatgcacaaatgttgggagtgtaa

SEQ ID NO: 431688 - DNA, 1539 bp, Serratia marcescens
atgtggccctttaaacgaaagcaacaatatgaggcgccgccggcacaggaagcgcagacgcctccagacatggcgatcagtgatgaactggttgctacggtaggccaaaaaccacgccgggagttcgcgcaatatgagccaccggttggcgtgatcccggctgatattcgtagcgctgtgctggcaatggatgcgacgccatacgactcgctgaacggcagctaccccgagtttgtgtttggcggattccctggctatccgtatttggcacagctcgcacagctaccggaatatcgccgaatggtcagcgtgatcgccgaggaaatgacccgcaagtggattaaggtcaaagccgccggtgatggtgacgagagcaaggcggaacgtgtagccctgctcgtcgccgcgatggagcgctacaaggtgcaggacgtgttccgtctggccatcgaacatgacggcttctttggccgcgggcagatttatattgatgtccgctcccctctgggcctttcagcctggacagaccgagaagagctgcaatcaaagttattcgtgtccaacaaaaaaatcacccccggctcgctggtgggattccgcgttatcgaaccggtgtggacatatccgggcatctacaatgccgacaacccgctgagcgatgatttctacaagccggcggaatggtatgtgatgggaaaaacggtgcacgccagccgcatgctggacctggtatcacgcccggtaccggacatgcttaaagcggcttataactttggcggcttatcgctgacccagatagcagagccgtatgtcagtaactggctacggacccgcgatagcgtgggtgatgtgcttcattcgttctcgctgagcggcatcatgaccaatatgggactggccctccagggcaagaacgacccgaactatgccaaacgggcagaactatacaaccgaacccgcgacaatcgcgggctgttgatgctggataaatccactgaagagtttttccagttcaacacgccgctgagtgggttagacacgttgcaggcacaggcacaggagcacatgttcttcgtcagtgcgatcccctcggtgaagtttgccggactaagcccgacgggactgaatgcttcgagcgaaggcgaaatcaaggtgttctacgacacgatagccgccggagcatcccgattgctcaagcaccctctaaagcgcgtgatggatatcattcagctgtcggagttcggtgagattgacccggacatcacctttgaattcgaaccgctgcatgaaatgacccgcgagcagttggccactatccgcaaaaccgaagcggagacggaccagatttacgaaaacgtgggtgctgtcaccaataacgaggtgcgcgaaaagctggcctctgaccctaacagcccgtacagcggcttggatctgagtggggagattgaaattgtcgacgacgacgaagagccgggcaccgaaacggatattgataaagcggataacccggaaaaagaccctgaggtcgatccggcctaa

SEQ ID NO: 431689 - DNA, 387 bp, Serratia marcescens
atgaacggatggctatcaaaactggccggcgggggaatgttgctcctgctggtggtatcgatctgcctgggtggatatagctcgttgttgtcatatcgactggagctggcacggcagcaggtagcagaacagaaaaaaacgctggcgcagcaggccggactgatcgccaccatgcaggaacaggacgcccgtaaccgcaagctgatggccgaacagcaacagagagagcagcaactgcgccagcagggcgaaatttaccagaggaaatatcaggatgcgatcaaaaacaacaaatgtgctgctgagcgcatgcctgatgctgttcttgagctcctgcgcggaacggataccatcaccgccagcgccgatcgtcctgttgccccctga

SEQ ID NO: 431690 - DNA, 501 bp, Serratia marcescens
atgaacgcggacggcctgaaactgactgaagagcaagaggcttggctgcatccttggctggagcggtggggggcatgggtttataccggccgattggaacgccggcagagtagtatcattgccgaatacatggcaacggttgagccgaataattacccagagcgtccaatctgcaacgatgacgacggtatgctgatcactcgcgttgtggacaaactgcacgcaatcgatcgccgagcgtttggcttactgctgagccgttacgtacatggctcgtctgatcgggcgatcgcaaactactaccatgccgtcgcaaaaccccgacaaatggcccgtcggtgtggtgcaccagcctatcggaaaccgtcacacagaacctgcaggcgggaggtcgttgaaatactgtctgcagctgaatacttattgtatcaacccctgcaagatgcgtttatcgaacgcgaacaggaacgaaaaaagaaaaaaatgatgcgaacgtgttga

SEQ ID NO: 431691 - DNA, 966 bp, Serratia marcescens
atgaggatttcactctcagtaaaaaatctatatgagaaaaatgtatctcaatatgaggtgttgaaggatttttttgattcctgggttgatggtgttaaggataaaaagtggcattatgaaagcagagttaaacaaattgagagttttgcattaaagtttgagaccggacgatttgataaaaatagcatttttgatgatttttttgctggaatgattgtagtaacatcgcactcggaaatcattggggtggagaagattcttagggaaaattttgagttggtttctaaaaaaccaaatagttcaagtttttccgcttattcacccgagcactttgtttttgacgacttaagaatatattttaggttcaataaagataaattcatgtcaccaaaagtagagggtttagatggttttatttttgaaatacaaataaaaacctatctgcaacatgcgtggtctatctctacgcatgatcttgtttacaaaagtgaaaatatatcgtgggctaaacatagagttgcttatcaagttaaggctatgttggaaaatattgaaatatccatttctagcgtagaggatatctcacagaacaaattaatagataaagaaagtaagcagtttaagagtttagaaagattggttaaattggtaaatgataaatggactcaagatagcttaccaaaagataagaagagattggctgaaaacatccttatgtttatctcatcgttgaatatgtctatagtagaacttcgtgaattaatcgacgaaagcaagtgcaatgaattattaagcatatcaccatttcaatcaataattcaagcagtgatagttttgcgatgggataaagtgttaggtatggatgtaccgaaaggtggggtatttatttgtcaggaggttcaagaaaatataccaatggagagattgttagcattaaatgaaatgggtgccgttattacactatga

SEQ ID NO: 431692 - DNA, 1032 bp, Serratia marcescens
atgaaagagcgcagaactacaacgcaagatataacatggtttttagatttattcgatacaaataaaatagatcttgaccctccatatcagagacgtagtgtttggaccaggaaggataaacagtattttttagatactatatttaaaggctatccatgcccggctctatttttacataaaacccaagatgataatgggagagctatgtaccatgttgtcgatggcaaacaacgactacaaaccatatttgattttgtgatgaataaaattcccctgggcatggatatcggggatgatagacttaatgggaaaagatggagacagattgaagacggagagttaaaaaaatctttctgggattatgtaataccagttgatttattaaccacaatagataaagcaacggttgatgaaatttttgataggttgaacagaaactcgcggaaattggagagacaggaattacgtcatgctaaatatgatggctggtttatcaagttaatagaaaatattaccgaaagcccttggcttaaatcaataggtattgttactgctggacgagctaaaaggatgaaggatgttcaatttatttctgagctagctcttgttgtaataaaaaatgatatctctggctttgatcaagatgagcttgatactgtgtacgcccaatatgagaaccccgaagatgaagagtttcagtttgattatgagctttttgagcaaaatttctccaaggtattattagggttggaaaaagttaatgaagttaatggggttattaaaaaatactctaggcttaatattgtgtactccatattttcctatttggctattgataaactggacgagatagttgtagataaattcaaatacaccgagttcgctgatagagttctggatttcttggagcaagtatctggcgattctacagaagaaaatgtggtcatttttagaagtaacttagttggtgcaaatactgaattccaacaaagaatgcttagaatggaagcacttagaaaatatttaggatga

SEQ ID NO: 431693 - DNA, 1422 bp, Serratia marcescens
atgagtaacacgttaattgataaagaattggaatatattgagggggctcgggtaagtgcatctcttgctgttagagaaaagagacaaaaattaaatgagcagtactttacacctggttacgtatctaaatacattggtgataaattagtcagaaaagatgagtctcattataaaattttagatgccgcttcaggtgtcggcaatcttggtgctcatttggcattatcaattcgtgcgcagtgcgccaaagaagtaatacatgtttgttctgtggagattgataatgaactctcagccgagaatggttctttatataaaaaaattcttacaaaacacaatgtaagttataaatcagtcaactctgactttttctcattttataaagagtctttccatggtggaagtagatacaataggattgtaatgaatccaccgtatcgtaaattttcaagaaaagagtatgaatcgcatgagttcaatggcgatgaaattgtatattccccaaatatgtattctgtttttatctcatgtggactaagtttgttagaggatgggggcgagttgatagcaattgtccctcgtagtttttgtagtggggtccaatttagaaactttagagaaaaaatgtttcaggtctcaaggcttgaatacatacatctgtttaattctaggaccgaggttttttcttttgataaaatacagcaagaaacagtgatattaaagctttccaaaagaaaagtagaaaacgacttcgttaaaattacctttggagatgatttatcatctgtgaaagtaaaaaaatatcctttaagtaaagtgattttttcaaaggatgcatcatccgttattcatattccgcatgaaaattcagatgataatattttagatataattctttcgtataaaaataatctagacaccttgaatctttctgtttccactgggaaagttgtagattttagaaatcttgaaagtttggtagaaaataagcgtgatggtgttgcttatttattttgcaaagaaaaccttggaagggatgttttttggttaaattcctctaagaagcccaattatttatttgtaaataataacactcgtaaaatgttacttaacaatcaatgccatgttgtactaaatagaatgtttttcaaagagcaaggcaaggccgttgtttgtcaagttattgatttgaatgatgttaatgagtgcgttgctatcgagaatcatcttaactatatttctggcaaggaagggtttaagttaacgtatgaacttgccgttggtgttaaaaaatatcttgaatcagagttggttagcttgtactttaagaggtttataggaagtacgcaaataaatgcatctgatttaagacggttgccgtttcctgctaaggaacagcttataaaattagctagaagttaa

SEQ ID NO: 431694 - DNA, 240 bp, Serratia marcescens
atggccgggcaatcggattatctcccgcccggcttaccgtacaaccgcgggctctggccgcaggaatgtcgagatctggaaaacctcgacctacgtgccagtggccttatcaagaatctgtctgcgcggaagatccagcgcaccgcagtgactgacgcgattaacgcggtaccggagaaatatcgagatcatttcagggctcgcctgaactattggcgtgaacgacgggcatacaaatga

SEQ ID NO: 431695 - DNA, 492 bp, Serratia marcescens
atgagcactacagaattaatttttgcgaaagaccccggcgccgaaatcattgacgacggctgtgatcacactgcgctgattatctggcatatgaacgccaacgcccgggtacgctctggctcgacgttttcccggccaccggtaccggaacaggtagttcctccgaaatttgcccgtacgccagcgaaggcttcgaaacgggcttccagtaagaaaaaagccttcacggttgatttccctactcgcaacctggcggcagtgatgatgggcaaaacgttgtcctatcacggcattctcactgcgctaaataaacattaccccgatcatgggctgacacaccgtcacctacagacccgcatcctgacgatgatcaattcccctcacgtcgaaataacccggcatgaaaaaccggtaccggaattcaccctcactcacgttgatgggcagttctacgtcaactcagagaaacagcaacatttagcaagagggtga

SEQ ID NO: 431696 - DNA, 1416 bp, Serratia marcescens
atggattttggcaaccttccgcaaccgccttacagcatcgatctggaacaggcgattctgggctccctgatgctcaacacagacgacgatatgtcctcagcagtgttcggcatactgaaacccgaagcgttttacctggtggcgcacagagagattttcaaagaactgcgtgcgctgaaaaatgcttgccgaccgacagacctgatcagcttgcatgatgcgctggaaagcaaaggggtactcgagcaggttggcggctttgcctacttggcggaaaccaaccgaaacagcagcccggcagcgatggtgagctatgcgcatgccgtccgtgataaagctattttgcgattcacgctggaaaaactgcaggaatgcacctcgctggtgctggcaaacaacggtatgggcactcccgaaaaactggaaaccgtgcagcagatggttaccgccgtagccgatcatgcacgtaccggcacccgcggcggtttgcgtccggcgatggatgtggtggaggactggatcgagaagatgaatcgccggtttgaagaccccgatggcgcgggtggattaacgctagggatcgagagccttgaccggctgatgcaaccgaaacaggtgcttcgtggcgcgctggtcgtgatcggtgcacgccccaaaatgggcaaaacggcggtatacaacaaaattgccacgcactttgctttgaatcaccgtctgccgacccttgtattcagtctggaaatgacggacgacggcatcatcgaaaggatggtggctcaggaggcgtgtgttaattccgagatgttttacatcgggcctgatgatgacattgccatgtctcgggcgatggccaaggcggcggaactggcagaatccaatctgatgatcgacagcacccccggtgtaacactggcgcacatccgcaacgaatgccgaaaagtgaagcgtcagcgcggcgtgctgggattggtggccatcgattatctgaccctgatgaaagccgaggccgccgagcgccgcgacattgcctatggagatatcacaaccggcttgaagaacctggcgaaggaattggattgccccgtattgctgctgactcagctcaaccgaaaattggaggagcgcgccgacaaaaggccatggccagcggacagtaaagacaccgggcagatagaacaggactgtgatgtgtggatcggtttgtatcgtgatgccgtctacaacaaaaatgccgaccctaacctgatggagctgttgttgcgactgaaccgggaaggggtaagcggtaccgcgcatgcgttgatggttgacggctatatcaaagacatcagcgatgaagaggctgcacgcctggggcagaaaggccaggcatcagaaaagcgttacagtaaaaattccaagattgaagcgttttaa

SEQ ID NO: 431697 - DNA, 609 bp, Serratia marcescens
atgactggcaaacaagtgaaaaacacaactgaaactctgcttgagcactgtggggtgaataagcgctttcaggacgcatcgataggtagctttgtaccggtgaacccacaacaggcgcaggagtgcctgacgatttgccagcaattcaccactgagtggccgcagatgcagactgctgggtctaacctcttgatgtctggccgcccaggaacagggaaaacccatttggctgttgggatcatgcgtgagctggtcgagcattatgacgcggatgtgtatctgacttcggcgcagcgaatgatccgggcaatgcgcgatacttggcgacaggatgcaaccaggacggaatacgaagtgttgggtttttactgtgggctggatctgctcgttatcgacgaagtgggcatgcagaacggcactgactccgaacgcctgattgtgtcggaaattatcaacacccggtatgagcagatgaaaccgacggttttgatcagcaatttcacggtaaaacagctcgaggatttcattgggtatcgcgccatggatcgcattttggaaagcgcagcagtgttggcatttgactgggaaagtcagcgggggcgtctgtaa

SEQ ID NO: 431698 - DNA, 807 bp, Serratia marcescens
atggtgcgggccatgaaaatgaaagtcggcaatccgctgcgcaaattggtgttactgaaattggccgataacgccagcgatcagggtgagtgctggccatctgtgccgtacatcgccgagcagtgcgaaatctctgatcgctcagtgcaaaatcacattcaacaattagttaaagatggactggtacgcatcgaaaaacgcctggcggagaatggactaaatcgctccaatgtttaccacatcaccataaatgctaatggtgcaaatgctgcaccatatggtgaatctcctgcaccacgtggtgcaaatgctgcaccggtagatggtgcaggagctgcacccagaatcagtcactcttttgaaccagtcattgaatcagtcaatgaaccatctaacgtgccatctgacgacggcacccctgcacagcccaaaaaaggcgattacccaactgagttcgaaaagctgtgggcagagtatccgaaacgcgagggcagcaaccccaagaacaaggcctatcaagcgtggaatgctcgccgtaaggctggggtgacatcggaggctatgtcggcaggcttacagcgctacgttgcatattgtggcgccaagggacaggtgggcaccagctatgtgatgcaggcgtcgcggttctttggcccggggttggagtttaacaacgcgtggacggtgagcagccaacctgctcaatccggagtgaagcggcatagcgataccgctgcagaccttgaagggcgcagctatgaaactcgtatcggttggaaaaataacacgcaggagggcaggcaatga

SEQ ID NO: 431699 - DNA, 219 bp, Serratia marcescens
atgcaaactgaccacatcacataccggaacggctggcgcctgaatggcatgcctgctgatgccgcagatatcagaccgattttcgaagatcgccaggctgccgcacatgcagtctgggaacaatacgagcagagcaaggctgcgttgcgtgttctagacatgagccccgagcagtaccaggacgcctgccggcagatcgctgacactctggggatttaa

SEQ ID NO: 431700 - DNA, 318 bp, Serratia marcescens
atgaaagcactacagataccagtcacgctctatatttgcgcgaatgtaagcaaattcaccgaagaaaaactctccgttttcaccatggatatgtccgagtttccggagtatgtgctgctggaaacccgccaaattatcatcgatgtcgaccagcctgaaccgattgaccttatcggcaaacaggtcgaagcactgcgcgcgcagaaagaacgcatcgccgcaaactcgcaccagcagcaaaccctcattgatgatcagattcagcagttgctgtgcatcgagcattcagaaaacgacgttcacgaactgccgtactaa

SEQ ID NO: 431701 - DNA, 2148 bp, Serratia marcescens
atggctattcatatcgttttatttgatccaaagaaaaaggctcaggccaacggggctgtaccactcgttattgcccttgaagcaccaaacaagaaagcggccgagggtattgcgatcggcaagctttacgaaaaataccctgaaagcgttgataattttttcaacccaaaaactgtggaagatcagcccggtcaccctcgcccaccggtcggagaatttgacgagcaattcgcgcaggataacgtttttgacggtagtgtctggactcaaaaggaaccagaaacggaactgccaaccgggcctgttgacctgctggcgcaaccagccaacgtcaagatcgcagccgttgtcatgtatggcgacaccgagatcgataatagccagctatcgcttgtggttgacctgctgaatgacgacgagacaccagacgacaccgggatgcgcgcggtgatcgatgggttggttgcagtggaagcagtaggcgctatgcaccaagccggtatttataaccttatcaccgccatttttgatggtgctggcgatcgcatgccatccagggaggacgtaaacgcctttgctcaagcatgggttgataatcctcgggatcgcgagggcatcaagctgaacgccaacgtcaatgtgagtaacaccgaaggcatacctgattacaacaccctggatatgcacgtcgcactttcaatcatggccgttcaccctaccaatgcgaaagcagccgacgtaaaaaacgcgaaagaaattatcgcagcacgcgattccgtatggcgtgcatgggacaaaactctgcgggtgatcatcggtatccttaacgttgatacagacacccgtcatgcgatcatttccgaagggctgaaaaacctcaagttagtaaataacgatgaagaacgcctgcactttgtgaaaactcgccttgctggacatccggcatgcactgagctggcgaactatggccagcaggccgagaaaaatgtcgaggtggaaaatctcggcggcggacgcttctcgattgacggtctgaccggtagtgccgaacagcatgaaaaaccagtggtggtagcggataacacctcaaatcaagtcgaagaaacggaagtagcacagcagcaaccccaagtaaccgacgcgacagcgcagcaggccaagcagcagttggatcaaatgggttatggcgtttatgccaatgtaccagctgaaaaatccgcccaactacagcaggcagaagagaacgccgaccgcgccgagacgctggtaaaacaacttaaagccgatgatttccaacaacgcgccgcacaggttgagcaagcactctcagagcagccggtggaggatcgcgacaacctcgacatctggaatcgcgtttataaaaccgatgccaaattcacaaaagctttcagcaacaatggtggcggtacctcgatcaacggtacctacatggtgatgcaggccacaaaggtattcggtccgcatggcattaattggggcgtcgaaatcatcgaggagcgtttcgataacggcgcaccactcatgcagtccgttaaacaggaagatggcaatttttccaaggtaattatccctaatggcgcaggtggttatctgtgcgaagttaaccatgttgcaaaaatccgcctctggtacaaacacgagggtaagactggcgaggtgctcgcgtacggctgcacgccttacctattctccaccaccaagggcatgatgagcgatggcgaagcgccaaaaaaatccctcactgatgcaaccaaaaaagctctgtcacagcttggtttctccgctgacgtgttcctcggcctatacgacgatctggcctatcgccaagagaacgatgcggagttcgcgctcaagaatgccagcgataaagccgaaggtgttacccgtctgcgcgaagagcttgacgataagcttacgagagtcgcggaaaccctcaagggcgcggtaaccaccaacgaagcaaacaaggtccatggctcgatagcccgcgaaattgagtccagccgcaaggctgcggaatccgtcggtgacactgattacgctaaatacctggctggccgactgcgccgccttaccaccttgaaagatgaacgtatcgccaccctatccgaggagaaagcatcatga

SEQ ID NO: 431702 - DNA, 501 bp, Serratia marcescens
atgagcatcacagccatcgcattagcatctgattacgccaagctgcagcagctgattgaaacctctgacgacctgacgccagaaatgatcgccgatacactggaaggcatcgagggagcgttgggcgacaagttggacgctgcctttatccacgtccgtaatctggaagggttggccaagacggttgatgaagaagttaagcgcctggccgaccgtaaaaagtcgttcgagaatcgcgccaaatccatccgtcagtatgtgctggcatgtctgctggcatccggccaggacaaactaaaaaccacaaccaatacctttactgcggccaaaggccgggccagcgtagtgatcgagaacgcagacctactacctgatgaactggtgactgttcaaacattggttacgccggacaaaaaagccatcaaggaagcgatcgagaacggcgtcgaggtcaaaggcgcccatattgaaattggcgaacgctcgctgcaggtgaggtaa

SEQ ID NO: 431703 - DNA, 1482 bp, Serratia marcescens
atgaaactgattcatttctcctctgaacacacggcgccggaaagcttttccaggatacttaaccctacagcagcgcggtatgagctggaacggcattatctgttcggcggcgcagccggcatatcgataagcagccggtatccgattacccgcaatactcaatccgggattggcgtcaccggttatcgtgaggacgtggctgtgaagcgcagcgtgctcgatgagatcaaccggggcggcttgctggcgattgatcagggaatgggcacctggacgccgacgaaatatgctttttacgtcgacgcggaaggccgattacagcgctacccaggcagctctcttcccgccttttatcctatcgggcgcgtgatcgcccgctatgaagaaatggtcagccgctatggccaccgggcaaaaccgacggtgctgccagcgaggcagaatacgacccggaatccccctctgcagcaagccatcgcgaccgcagtagcaaccgttgccgccacggtgcaggccatccgtccgctgaccaaggcagaacgctggcaagaacgccagtacctgataggacgaggcaaccgcagcatttacccggatgcgcgcatggcggcacagcgattggcggagaacaacgtcgcggtcgaaaaggcgaagttggctgagaatgtttacaagaccactaatccgctcaaggacacgatagacatccctgaaggctggaaggacatcagtaacaatgatgtggcgctgggccggcttggtttgagcagtaacatgctttatgacaaaccaatgaatcctgactttttagcccgagtttatcagccagacgaaagtgtctttggcaaggcgatgaacccgacggtggtattccgcggatcgcgggcaccagaattcccggagggaataagccgcgcaacccaaaaagccttaataaggggtgacttatcaggcattaaaaatctcagtgactggaaaaacaacggtgctcagggaatagggcttaattctgaatactacaaaaaagcggttggtattggcgataaaatttcaaaggtatccaatatcgacgttgcaggtcactcattaggcggtggcatggcgtctgctgcctccatggccagcggcaagccagcttggacgtttaatgccgctggattgcatgcgggaaccgtagaaaaatacggcggctctataataggcagtgtcgataatattcaggcgtatcgcgtgaagggggagctattgaccaagctgcaggaggttgatttgtgggaggatgccaaagacctcaaattttatccgccggcggtgatggcgaaagaacggttgtccctgttggcgcctgacgccgtgggagtaaaacacacgctttccggtggaacaggctcactgctggataagcacggtatagaccaggcgatacaatgcattgaaaatgaaaaagacgatgacattgccacaatcaagggaagaatatga

SEQ ID NO: 431704 - DNA, 1218 bp, Serratia marcescens
atgtcctctaatgttgttgtctctgcgcaaaatttgcgtaaagtttatcagatttattccagcccgatgcagcgtctgggggctttgctgggttatcggggggctaagggcagggagtttgtcgctctggattccgttaactttgagattagaaaaggtgaaacagtcggtattattggtgtcaatggttccggtaaatcaactctgttgcaaatgatttgtgggactttggcgcctacaagcggcagtgtatttactaaagggcgtattgcacctttgttagagcttggtgctgggtttaatccagaatttacagggcgtgaaaacgtttacctgaacgcctctcttctgggcctaacgcgtaaagaaattacggagcgtttcgataaaatagctagctttgccgatattggtgaatttctcgaacgtccggttaagactttttcgagcggtatgtttgcacgtttagcctttgcaacagccattcatgtcgatcctgagatattaattgtagatgaaattcttgctgtcggagattcacgctttcagcgaaaatgtgtaaagaagtttaatgaaatcagaaacgatgggtgtacaatcctgttcgtttcacacgatgattatcaggttcgcaatatttgtaatagtgcactatatcttgaaaaaggtgtgcagcgttattttggaaatgcagatgttgctgttcagcattacctttctgatatgcagaagagtgtggtggaagctcaagatgcagaaaataaagctattgaaaatgaaataaatagcagattggtaaaaatagctaatgtctctcttctcgatcagtctggaaattcagtaacagagctggcaagcggcgacaatgttaaactgtctttcgattataaatatgaaggaagtgacggggaattcgatgggctgacctttgtctttaatctttatcgtaaagatggagtatatatctgtgggacgactacagcaatgcgtggcttagaaccatttccccttagtcgggaaggtcgagtgaccattgatttccccgcattgaagttgttatcaggtatttataactggcgagtagctgtcaatgatcaagatgggatacagataattaacgaagctgtaccggtctgtgagttttctgtagccgataacttcagtgccgttggaatttatgatattgaacatagctggtctgtggtggccaaggggtaa

SEQ ID NO: 431705 - DNA, 882 bp, Serratia marcescens
atgcgcatactggtaactggcggtaatggccagctaggccattgcttggcggatacattgcctgacaattggcagatcattagcctagaccacaaacaacttgacattgctgattggcctgcagttcagcaaactgtcgcggcgttgaatgtagatttcattgtaaatgcagcagcttatacgttagtggataaagctgaagaagaaatcatcgctgcggaggctgcaaatgttatcggtccagctaatctggctatgattgctgagagcctaagcattccactgattcatatttcgacagactatgtttttagtggcgcagaaaaaggtatttctttgtgtgaaaattcaccaacggggccgctaaacgtctatggacaaaccaaactgcttggcgaacaagccgtactaaccacgtgctcacgcgccgtggtgatccgcacatcctggttattcagtgagtatggcagctcttttgtgcataccatgcttaaattgggaaagacacgtaaatcgcttgctattattaacgatcaatttggccgtcctacctatgctggtgatttagctaaatgtattctcactattattagccaaggggttaatgaacccaagctatatcatttctgtggagataagattgtctcgtggtatgagtttgctgcggagattttttctttagctaagttgtttgatgatagttatagatttatggttttgtcttctattaacagtgagcaatataaatgcgcggccaaaagacctaagcatgcgatacttaactgcgaaaaaatatatcgtgaacgtgggatctgcaatagcaattggcgaatgagcctagacaaagtagttccgaaaattatttatcagatgaataattaa

SEQ ID NO: 431706 - DNA, 273 bp, Serratia marcescens
atgtgtcgggtactgaatgtcgcccgggccgggttctatgcgtggcttcacaacccattttcggtgcgtgataaagataaccagcgtctgctgatgcttatccgcgactcacattcactgaacggaggcgtatacggttatcggcgggttcatggtgatctgaacgaaatcggggaaaccttcggcaaaaaccgggtgggtcgtattatgcaactgaacctgataaagccgtactcgatcttttcgcccgtaacgtggtcggctggtcgatga

SEQ ID NO: 431707 - DNA, 375 bp, Serratia marcescens
atgaaacccactctctcacgtgaactgacgctcgacgcgctgatgatggccgtctggcgtcgaaaaccggacggtgaggtcatcgcacatagtgatcagggtagccagtatggcagtgacgactggcagcgcttctgccgggccaataacctggctcggagcatgagccggcgtggcaactgctggggtaatgcggtggccgaatcgctcttcagttcactgaaaaaagaacgtatcaggaagagaatatacaaaacccgggatctggcccgggcggatatcttcgattacattgaagtgttctacaaccgggcccggcgtcacagtcacctccgcggcgccagtctggaggcctttgaacaggcctcgtcgtga

SEQ ID NO: 431708 - DNA, 1059 bp, Serratia marcescens
atgttaaaaggtaggagaattgcagttatttttacggcatccattctcggtggtcatgaattaatgacggtcgctcatctaagtcgatacaagaaaaaagggatagagataacatgttacattccctttaataataaaaagttatctgagctattgcaggtttcagcaataaaccacgaattccatgatgttcgccatagaaatatagaaataattcatgcttttttgaacccaagacatatttttcacgctgttagtttccttgctaagataaaaaaacgatatgatttttcctttgtgattcaaggtgatatagagtttggcgccgtttttatcaatgcagggaaaattctgggaatgaaaaatattattagttaccttccctatacgcatagcttcaaaaagatggatagctgggctccttctcttaaagatttctttgccaagtttgtatataaaaactgcaactttttttttaccatctgcgatgcgacagccaaggatatcattatcaaaaatagtaatgctgctgtccggattttggagaattttgtagccaggccagaaatatctgaaataagaggtgtgggatatgaatttataccatcaagtgacactttgaaagttgtcatggcggggagggtgctttttcgtcaaaaagggcaggatatactaattaatgcattgaaaaatataaaattccctcttgaattgcgagttttaggcgatggtccggatctaaagcgattaagggagttggctgccaacctctctccgaatatcgaagtcattttcttaggctggaaaaataatgtttgggcagactccaaagatatagacttcattgtcgttccatcacgatatgaaggggttccattaatcatgcttgagtctttagcgagaaatatacctgttatctcaccagctagagacggaatgattaattatttgaaagatgattcactttataatactggcagtgcagatttcgaagcgtatgagttgagtaagaaaatatcagatttttacttcaagagggaacgtaaaaaaacgacataa

SEQ ID NO: 431709 - DNA, 1020 bp, Serratia marcescens
atgaaaaaaacagcgcatatttttatgatgatttcaatttatatcatctcaggctttggatactcatatgcattttatcccggtgttggtgtacaccctaatcaatttaaaggaagtgctgaagaacttatcggcttgatggagaagtaccacgttaaatcatttcggactgactatccgtggagcctggtcgagattcaaaaaggtgttctgaatagctctaaagatgcgaccgatcgtgttatcagcatcgctaaagaacgtgggatttctcctttaataatattggattatgggaataagaactacggtggcggtaaaccacttacaccagaggcgtcagccgctttcgtgaattatgcggcatggactgcaaggcattttaaaggtaaggctgatatcttcgaggtttggaatgaatggtcacatcgtagtgctaactcgaacgaggccgtgagtgaaacatctgccgaggcttattttcagctagttaaggcaacttcactggcagtcaaaaaagagaacccagaagctaaaattattgcaggtggtttcaatcctcttagtaatgatgataaagaatggggagtaatgttagttaaattgggcattctcaactatgttgatggtatttctcttcatccctattcttaccagaataggacggttgctgacccaaaacttaatcttaaacgaatcgaactctatcaggaagaattgagccaaattgttggtaaaatggtacctttttatattacagaaattgggtatccagcatatccaggcggcgctaacctgactgatagtgaagttgcacagtatgcttatgaatatatgatattagcaagcaaaatgaactatattaccggtgtttggtggtatgattttatcgatgacggtagtgataagaataaaagagaaaatagcttcggtatcctcaataatgacttatcagaaaaaatggtgacgaagaaatttatcggtgctttaaaagcaatagacagtaattctgggcgttaa

SEQ ID NO: 431710 - DNA, 1152 bp, Serratia marcescens
atgaataatccaagtgttggcgttgtggccgattggttagtaacctacgcaggagcagagcgtgtcataaaagagtttatagacatgtatccagaggctgatctttactctgtggtcgattttctttcagacgatgctcgcagtttttttcatggaaaaaaggcgacaacaacttttattcaaaaattacctaaatcaaaaaaagcttaccagaagtatcttccctttatgccactagcgatagagcagctagatgtttcaaagcatgatatggtgctatcaagtagtcacgcggtagcaaaagggattctgactggtccggaccagttacatatcagttacgttcattcccctatacgttatgcgtgggatttacagcatcaatacctgaaagagtcaggtctggacagcggggtgaaagggcatcttgcgcgatggattctgcataaagtgagaatgtgggattatcgcacggctaacggcgttgatcactttatcgctaactctgattttattgctcgacgaattaaaaaagtctacggtcgagatgcagacactatatatccaccggttgatgtcgagcgtttttcctatcaggaaaacaaagaagagttctattttactgcatcacgtatggtcccgtataaaaggatcgatttaatcgttgaagcttttggtcacatgcctgataaaagactcgttgtgattggcgatggctctgaaatggctaaaatcaaggcaaaagctaaaagcaatgtcgagattcttggctatcagtcaaatgacgttatgcttgagtgtatgcagaaagctaaggcatttgtatttgccgctgaagaggatttcggcattacacctgttgaagctcaggcctgtggcacgccagtgatcgcctttggtaaaggcggttccttagaaacggtgcgtccatttggtgtatcgaaagcgactggggtattttttgccaatcaagccgttgcttctgttgtcgaagctattgagcattttgaaagcattgagtcatctattctaccccaagattgtcgtgataatgctttacgcttttccgtttcacgtttccataaggaaatggagaaatatataagtgataaatggaaggtgttcaatagctcaaaaatgattgagtactga

SEQ ID NO: 431711 - DNA, 1062 bp, Serratia marcescens
atgatttatattaacggtaggtttttaacccaaaagacaaccggtgtacaacgttttgctgaagaggtcagcaaggcgctagcttgcatacggaatgatgtcgccttccttgtgcctgaaaaagctcaggtagtgaaaaaagagtttctctctaactttaatgtgcaagaagttaaaggcggtaacgggcatttttgggagcagtttactttacccaagtacctgaagcgattaaattctccgttactccttaacctatgtagtactgcgcctgcattctataagaacaaaatagttacacaccatgatatcacttatgtccgatttcccgaaagtttctcgaagtcgttccggttatggtatagagctttggttcctattatgataaaaaactcgaaatgtctgctgacagtcagtgagttttctaaaaaagaaatttcgacattttaccgttgtgaaaacaagcgaatagaagtaataaacaatgcagttggcaaggtatttcaaccaccacgaccgtctttaggcaacagtacaacacatagtagtaatcaatatgtgcttgccgtatcttcacctaattatcataaaaattttcatggattaatcgaagcattctctgcaagcaatctcgatattaaattgaaaatcataggtgatcgagccggtactttcagtaaagtaaaattctctgaagacgatccaaggattgagtttcttggccgggttaatgacgacgagttggttgccctttatcagaatgccaagttttttgtatttccatcattttatgaaggctttgggatacctcccttagaggcgcaggcttgcggttgtcccgttatatcatcagatcgagcttctttgaaagaagtacttgacgacagtactgtgtatttttcacctgattcaaaagaagaaattattgagactctggaatctgtagacaaggatgcgtctctgagagaaagtctgaaaagaaaaggtaataataatgttacccgtttttcctggacctcttctgctgaaaaactgaataaaattatttcagaggttctgtaa

SEQ ID NO: 431712 - DNA, 1170 bp, Serratia marcescens
atgccagtgctattcgcacttcttatgactcttcctatcgtagtctttcctttctctccattgttaggctactatatctctattattttattgctgaccgtttctgatttatgtaatgcgaaaccaataagggtctacttctctcttattgcattggtcagtggggttctggtttctgcctcgagagtatatctgacgtcagcaagtgatgacttcggccattattatgcgtcttatctttctattcttcatggtggaacaatatttcaatacgccggaggcgtggagttcttactctcgctttattttaaaattctggtaatgatttttggaaaccttcatcctagtagcattcttttctttgttgcgctgcttaacagcttccttttctatctatggctagaaaaatttggtttggatagggtggatgacaagttaaagtcactatgcatcgcggcgtcactgacattttacatgttcacaattagtacattgttaatgcgccaaatgttggcgacgccttttttgttgtttgctctttcttatacattacgtagtagaatgggaattctctctcttattttggcatcttttgcacatttatcatctgtaccgatttatttcatcattcgtgctttgatgtcagaagacagaaagaaaaagaatttaatggttttattttttctggccattttagttcttttctctctgctcgttaagttttcttcctccttaactggtctgccggttattgggatctttgtatttaagcttgaatattatgaccgagttacattatttagttttgacagaatagattcctatatcaaatatttggttgtcatgttgttagcttcaatatttttcttttctgaaaggcatagggattggaaaagtctactttattatggtggtgcaatttatattatctggttgccaataccgttgatgtctggtcggatgtttttgatgctagggacggttgcattaggttacattctttttctttcagcctacagaatgagtctaattctgagatatctcttggttatttactgtatttttagggtgctgacattaggtatttattatacaaataataacgacggatttgatttatggtatagctatccatggatatccgaaaatgcattttactttgtcagataa

SEQ ID NO: 431713 - DNA, 1089 bp, Serratia marcescens
atgaaaaacattctcatactgagtcacacaagaagcatatctaccttcaaaattggtagccatcactatgctaatgaactacaaaacgaagaacgtcaggtgagtttttctggggtaccgtttagctttattcattgggtgttaagaagaaaaaataatactggcagtaagaaaactaacgagggtgttaaggttgtaaatataagagcattgttaccagttacaataaaatacaattattttttatcaaaggtgaatcttctttcgatgcggttatttaccccaggagatttttttgataaacattacgatgtcataatctgtgatacgcctttttttgaaccgtacataaagagaatgacttatacaaagttaatttacagacctacagatgattatttgtcgatcgcaggggagaaaataagatcgtatgaggagcggattatacaaagagcaaattgtattgtcagtacctcaagcgtagttgaggacaatcttttcaagaattacccttcggttatagaagggaaaacctgtactgtcattgaaaatggctatgattcaagagagttctataataaaaatagcgggtatcggaataatgcggtttatgttggggcgcttgattttcgctttgactttggaatgttgacattccttgccagtaatcgacccgattgcatttttaatatatttggccccatcgatgagaaatatcgccagaatgtcgaagaaataaagaagaaaaatagtaatgtcatcttccatggcgaaattgactatggggatgtttgtgacattctcaatgaacataagatagggcttctattgttcaattcaaatcaggccaacgtagggcgtagtcctatgaaactctgggagtacttatcctcggggttgaatgtaatctattccaatattaacttgaatgattctattgggtgcttatataagtatcatgacaaaaacgatgtcttatatgcgttcgatatggctgccagtagtgagcagcttgcatcttctgccagcgaggatattggaaagtattcatggaaatataaagccagcgctcttgcaaaatatttctag

SEQ ID NO: 431714 - DNA, 2190 bp, Serratia marcescens
atgtcagaaaaaattaaagtaactcattcgggaactgagaaatcagaaagtatcgacatgggacgccttgtcggagaactaattgataatagatggttgattgttacagtcacgtcttttcttttatcgcttggtgttctgtatagccttttctctacgcccatttatcgtgctgatgcaatgcttcaagttgagcagaagcagggaaatgcgattttaaatagcctcagtcaaattttaccagatagccagcctcaatctgcgccagaaattgctttgctgcaatcacgaatgattttggggaaagcagttgatgaattgaacttgcaggcgagcgtagaacaagattattttcctgtctttggcaaaggctggtctcgcttaaatggagaaaaagccggtaaattagatattagccgactctatttgcctgccaacgaaaatgccaaagatgttcctgagatcattttgaccgttcttgacaacaaacgttacaaagttgaaaacgctgctattagtctggaaggccatgttggtgagctgttagataataacggtgtttccttgatggtgaatgcaattgatgctgcaccggggacgaaatttaccgtaaaatacaagagcaaacttgaagtaattaatgagctacttaaagtttactctgttgctgatcagggtaaggatacagggatgttatccctgacgttgacaggcgaagatccagttaaaattcgcgagattcttgatagcattgccaacatctacatggcgcagaacattgctcgtcaagctgcgcaggatgccaagagcctcgatttcttgcaggagcaaatgcctaaagtccgttcagacctggatattgccgaaagtaagcttaatcaatatcgtcaacagaaagattctgtggacttgaatcttgaggctcagtccgtcttaaaccagattgtcaatgttgataatcaattgaacgagctgacgattcgtgaggcggaagtttctcagctgtacacgcaaagtcatccaacctacaaagctttattagaaaaacgtagcacgctggagcaggaaaagaagaaattgaacaagcgtgtttccgctatgccagaaacacaacaagaagtattgcggttaagtcgtgatgtggaatcggggcgagctgtgtacatgcagttacttaatcggcaacaggagctaagcattgctaagtctagtgcaattggctatgtccgaatcattgattctgctataactgcacctaagccggttaagccgcagaaagcgctcattattttgattagtttagtcttgggtggtgttttctccgttggcctaatccttgcgaatatgtttttgcgtcgtggcattgagtcgccagaacagcttgaagagcttgggatcaacgtctatgcgagcgttccggtttctgaatggttgatcaaggaaagcttggatagtaagaaaaaaatcaagtccatttcgacggttaaaaataaccgtaaggatgcagtatttctcgcagttgaaaaccctgctgatttggctgtggaggctatacgtggtttacgcaccagcctgcactttgcaatgatggaagccaacaataaaatattgatgatttctggtgccagcccaaatgcgggtaagacatttgtgagtagtaacctggccgccgtgatcgctaatacaggtaagaaggttctcttcattgatgccgacatgcgtaaaggttatatacacaagaattttggtttcgaaaatactgatggcctttcaggtgtactgtcagggaaaataccggtagaacaggcgataaagaacgttgcttctgctaattttgattttatttctcgtgggcaggtgccgcctaatcctgcagagctgcttatgcatgaacgcttagcggcattgctgacttgggctgacaagaattatgacttgattgttattgataccccgccaattttagcagtgacggatgccgcaataatcggtggctatgccggaacaacattgttggttgccagattcgagcaaaatactgctaaggaaattgaggtttcgatcaagcgctttgagcagagtggtgttgtagttaaaggctgcatcttgaatggtatggtgaaaaaagcaagtagctactatggctatggctacaatcattacggctactcttattcagataaaaagtaa

SEQ ID NO: 431715 - DNA, 210 bp, Serratia marcescens
atgaaaagcgtaaagcagatagccaacgacatggcggatgccgtaaacattgacagcaatttagtgcgcgggtttgcacaaggttttatcagcgtaccggtcgatttctactacctgggctacgactatattgatactgaaaacagatggttaaactcgcaagataaagagcgatttatcagactcaatcaagtcaggcctggccaataa

SEQ ID NO: 431716 - DNA, 216 bp, Serratia marcescens
atgaagaactttatgctggcggctttatccagaattattcagggcattgggtgcggcgttgtggccctctcgctgttagccattgtctggttcatgttttattccgacgatagttttaagtatctgtgggttgcgacctccatagctggaattttcttagggtatttcattttcaggtttgcggttaaaaaaatacacgacggaagccctgattaa

SEQ ID NO: 431717 - DNA, 474 bp, Serratia marcescens
atgacgccccccgaatacccgtcagccgtgagcggccaacctgaaaattatcattttaccgagcaagtcgggcacctgctgcgcaaggtttatcagcgccacgtggcgattttccagcaaaacgtcggcgattcgcagctgacggcggtgcagttcatcaccctgtgcgcggtgcgcgatatggggccgagctcgctgaccgagctggtgcaggtgacggcggtggatcaggccaccatccgcggcatcgtcgaacggctgaaggcgcgcgatctgatcacggtaacgccggatccgatcgatcggcgcaaggtggtggtcggcctcaccgacgccggcggcgcgctgctggcggaaacggtgccgcaggcggcgaaaatcacagaactgacgttcggtacgctgaacccggccgaacggatagcgctgatattcctgctgaataaaatgctggaagatccgcccaccggctga

SEQ ID NO: 431718 - DNA, 717 bp, Serratia marcescens
atgtcgcaacagcatatccctacgccgccccggcgtgaatttttgaaaaaaacgctggcgctgatcccgttagccgctgccggtaacggtctcatgatggtaaacgcccaggcagcgccggctgcgggcatctcgccgaattacgttccggtttatttcaacaacgaagagtggcgattcttgctggcggcctgcgatcggctgatccccagcgacgagaacggccccggagccgtcgatcagggggtcccggtattcatcgatcgccaaatggaaacaccctacggccatggcggcctgtggtacatgcacccgccgttcgtgccatcggcgccggagttgggctatcagtccaaactgacgccgcgcgagacctatcgcaacggtatcctcgcgttcaatgagctctgtcaacgtcagttcggcaaagttttcgccgagctgtctcatggcgagcaagaacagctgttgaccgcgttggaaagcggccaactcgatgcggataccttgccgggtaaagctttcttcgaacagctgctgcaaaacaccaaagaaggttatctggccgatccgatccacggcggcaaccaaacgctggcatcatggaaattgataggcttccccggtgcgcgcgcggacttcgccgattgggtcaacaaacccaaccaaccctatcctcttcacccggtcagtatctccagcaaaaggaatgcataa

SEQ ID NO: 431719 - DNA, 1779 bp, Serratia marcescens
atgagcacaataaaaaaaccaccggtagatgtggtgatcgtcggctttggctggaccggcgccattatgggaatggaattgaccgacagcggcctgcaggtgctggcgctggaacgcggtgaacggcgcgatacctaccctgatttcgcttatccgcgtatcgccgatgaactgacttacggcattcgcctcaagctggcgcaggaaatggcgcatgaaaccgtcaccgtgcgccatacgccggcggatttcgcggtgccttatcgccagctcggctcttttttgccgggcaacggagtcggcggagccggcgtacactggaacggcatgcactggcgcgccctgccttccgatctcaaactgcacaccaccctcactgaaaaatacggcgccaactggatcccggaaggcatgacgttacaggactaccccctcagctaccaggagttggagccttacttcgacaagttcgagaaggtgtgcggcaccgccggtaaggccggtaatctgcagggtgagctcatcaagggcggcaatccgttcgaagggccgcgtagcaatgactacccgacgccgccgcttaaacagctctactcgggctcactgtttggcaaagccgccgaatcgctaggctaccatccgtttgctatccccgccgccaactgttccgaaccctataccaacccgtacggcgtgcagcttggcccctgtaacttctgcggttactgcgaacgtttcggctgcttcatgtactccaaggcctcgccgcagtcgaccatcctgccggtactgacacagcgtaaaaactttgagctgcgcacccaggcgcaggtgatcaaggtcaatctggacagcagcggcaaaaaggccaccggcgtcacctacatcgacgagcaagggcgtgaagtagagcaacccgccgatctggtgatcctcagcgctttccaactccataatgttcgcctgctgctgctttccggcatcggaaaaccctatgatccggtcactggtgagggcgtggtcggcaagaactacgcctatcaaatgaacagcggcatttctctcttttacgatcgcgatacccatttcaatccctttatcggcgccggtgccgccggaacggtgatcgacgatcttaacggggaaaacttcgaccacgccgatctcggttttatcggcggcgcctacatctccgccacccgcaccggcggtcggcctatccagcaaatgatgctgccgccgggcacgccgaactggggcagcggctggaaacaaggcatccgcgacaattacccgcactcaatgagcatcggctcggaaggatcggtgatgccataccgcgattgctatctggatttggatcccacctataaagacgcctacggtcagcctctgctgcgtatgaccttcgactggaaatcgaatgagatcaaaatgacccagcatatcaccgctaaaatggcggacatcgccaacgctatgaaaccaaagcagatggctatctcggtaagaaaaaccggcgatcattatgacgtgcgcccctaccaatccactcacactaccggcggtgccatcatcggcgacaatccggtcaccagcgtggtgaacaaatacctgcaatgctgggacgtgcccaatgtattcgtcactggcgcctgtgcattcccgcagaacctggcctacaacccaaccggcatcgtcggcgcgctggcttatcactctgccgaagcgatccgcgagcaatacctgaaaaaccctggcccgctggtgcaggcataa

SEQ ID NO: 431720 - DNA, 1275 bp, Serratia marcescens
atgaaaggatttacacccacattgccggtgctgctgttgctcgccgcaggtgcggttaaggcggccgacgccctcccttccacggcgcgaattgaacacggtgaatatctggcgcgcgcaggggattgcgcggcctgccacaccgcgcccggcggcgccctcttcgcaggtggcctgaagatgaccacgccgatcggcgctatttactccaccaacatcacgcccgatcgccaaaccggtatcggcgggtacagcctgcccgagttcgccgatgcgcttcgcaaaggcatcgcgcgcgacggcaggcggctgtacccggccatgccctacccgtcgtttgccaaaatcagcgatgacgatatccgcgatctttatctgtatttcacgcaaaaggtcagcgcagtggcgcagccgaatcgggaaagcgacattccctggccgctcagcatgcgttggccgctggcattgtgggatctgatctttcgcgaagacggtgtttatcagccggatgcgcagcgcggcgccgagtggaatcgcggtgcctatctggttcaggggctcggtcactgcggcacatgtcacacgccgcgcggtatcggcttccaggaaaaggcgctcagccaaagcgatacagcctatctgagcggcgggacgttggagggctggcatgccgctaacctgcgcgccgataccgccagcggcttaggggactggagtgcgcaggagatcacgcgctttctgaaaaccggccatacccaacgtttcgccgccttcggctcaatggtggaggtggtacaggacagcacgcaacatctgaacgatgacgatctgaaagcgatcgcggtctacctgaaatcgctgcctgccggtgatgagaagtcatcgccgccgcgcaacgacagcatcgcccaggcgttgttcaccggtaaggtcaacacgcccggcgcacaaacctacctggacaactgcgctgcctgccaccgtagcgacggccaggggtatcgcaacacgtttcctcagctggcacgcaatccggcgttgctgagcgaagatccgtcgtcgctgatcagcatcatcctccacggctcacggacgccggtaaccatcggtgcgcctaccggcctgaccatgccggacttcggttggcggttgagcgatgaacaggtcgctcagctcgcgaccttcgtgcgcaccagttggggtaacagcgccccggcggtcagcgccgatcaggtgaaaaacattcgctccggcgataacccgtctcagccatga

SEQ ID NO: 431721 - DNA, 783 bp, Serratia marcescens
atgccacccgtttcaaaactaaaaatgctgcgaacacgggcctatccaaggctccgccgactcatattcgtttctctgtttctcagcgtgtctttgatcctctgcgggtgcgcaaccgcacctgcatcagaccgtttgtcaggaacccagcatgttccaacaacatggcgggcctccctgcctggctcggcgcacgtgtctgtgtggaatgcatggccccccgcccgaaatgaatccggcgcccggcgcttacgcgctccggccggcaagcccagtcacgcggagaatgagcacgaagcacaaacgtcggttgcgcgcgccaatttggagtgcgttcaagcgttatggaatgacgctcgcaaactggttgcgacggaagctgcggccctctattacgcatcacgcacctgccggcgacaacacgcattctctccccaaagcgcgccattgcctggatccctcgcacaggcgaatcaaacgccccctcatcgggcgccccaccccgatcagggggacttcaacgggcgtggcgagagcggtgccgatggaaacgggatcaaccgccacatcaccaggaattccgattccttgatgttggatttaacgagcgcggataccgatcccggtgaaagtgtggcgggttggcaggctgaaccgcatgagcatcataaccgcgtgcgctcgactgtgcggaggtggatacggcgtttgttcacttcgtcagaacgagcgatggctcagcgccaggctgaaccgctgcagaacagcgtcgcagtcgtttga

SEQ ID NO: 431722 - DNA, 810 bp, Serratia marcescens
atgaacatagaaacagttaaaaccgcttcgagattttcaataccgataaaaataattctagccggaatagttagcgcgcttggtggttcggggcacattggttttctaagcgaatatacaacttacttttatgcgttatcgaatggatttagaatcccagccgaggggtcaccatacttaaaggtcacaatagcatcaataagtttctcggtaatgctattatgtgccatcatatatatgattttttattttatagtaaaaataaacctatcatcaaataagtgggcaaacaaggttcaaagaaaaattgttgattcatttcaattgaaaagccaaactccaaaggctatccattggttatataacacctcacaaaaaccaatgggcattacaggagctattgtagcctcgtttatttcatctattgccgttgcaatgatgtcttatttttgggtgagcaaggtaataccaatcccaatttatttatttttgttttttgtttcatttacttactttatatgtgcatccctacctctaattgacaggaaatatttcactacagcatgtacttttacaaccttgttttatttagtcagcactccattattcttatttaatggtaacgtatatggcgccatcttaaaggaaataaaatatggtggtggaaccagagtaacaatccactttgaagataaaaaggaaattaataccaaactattacttaggacaagtgatagcatcttcattacggatggagatgataaagtatctgaggttccactaggaaaaataaataaaataacatactaa

SEQ ID NO: 431723 - DNA, 717 bp, Serratia marcescens
atggtatctatagcgacctctataattgcccttttttctggtttgcttgttgtgtgggcgcaatttagaatctctaaatctaatagagatttcgaaagttttaaattattagagatgaaaagattagacagtgaatttaggagtggtatttataaagagcctttgttaaatgccgcctttgatcttcaaagtagagtttataatattttgaacatgaatttctttgaggtgtattacttactaggcagtgaaagacaaaaacattatgctataaataacactgtgttcttgttttctcagtactttgcttgggctgaggcagtgcgtattgatattcaatacatcgatctgggaagtagcgaaaagacaagagaattgtccttgatacagagatatatttcttcaacgcttcaaactgatagatttaatcctgttctaatggtttttgctggtgagcaaagagccattggcgagagaatgttgaaaagtattgacgggaaagtctcgtgtatggggtttggcgaatacttaagtagtgaatttgacttgcacgatcctctgatagaaatgttaaccgatgaaatgaaaaaagtttcgtcaaatgtgtttgaagctagtgagagattgagtgcattgcaacatgggctgatagatatgttggattttctagatccggattttattcgatatcccaaagaaagaagaaaaaaagtataa

SEQ ID NO: 431724 - DNA, 879 bp, Serratia marcescens
atgagccggaccggttccttcggatcagtgcgaaccagacgcaagccgggcgcgaaatttttgcactggcactctccgtcgggggctccggtgttgaggcgccgcttgtgcggggtgtgccagccgacattgaaacgtcagctacacacgccgcagttcgtcttccatgaagcgacggtcttgctgatcgtggcgggccaactcggtatcacatcggcttcacaacatttgtctctggagacccccggggaactgctcctggtcccccccaacacccgcgcagatttagtcaaaacgccgggcgatatcgatcggccttttcgctcgatactcctgacgctgtcggcagaactgctggatgtctttcaccgaacccggcaggcttcaccccctattccccctaaagatgacgcgtggaaaacgctgcctctggacgaagacctgtcggcgacgttttatcacgtgattgaaagcgtggaaaaacaggaaatcagtgatattcgcctgcaataccgccttctggactttttgaccgcgctggccgaacggggacatgtttttacgcatttaccattggatagcccatcacagcgcctgcgcactttgatttttgaggctccggaacaaaactggacggcagaaacggcgggaaaaacgttagcgatgagcccggcaacgttgcggcggcgccttgccgccgaacagactcgcttcgaagacttgctgatagacgtccgtatgcatcacgccatgatgttgcttcaaaccacccgatgggatatgacccgcattgcagaggcctgcggttacaaatccagagcgcgttttagcgaacgctttcaaaagcgttttggttacgcgccttccgccatccgataa

SEQ ID NO: 431725 - DNA, 1359 bp, Serratia marcescens
atgacacagttgcacatcgggatgcagcaacacttcttatcgatatccaagtttacccttccccaaaattcgttatctctagatgatactgacatctttgttcctgaatttgccacagatatcagtaaatcaacccttgaatacaagatcggcaaatactgggcagatgtgtacctagaaacaggcgttggtgatgtagcaatcgaaatctgggttacccatgaatgtgatgaagagaagagacaatattatatcgaccaccagattgattcgattgagtaccgttttccaccgaatgaaaacaggagcattgacgaatgggtcactctactaaaagttaacagcgtagactacaaatggatctaccactcagctctggagaaaaagaagctcaagcacttggaaaaggttgaacaagaaaagcagcgagccaaagctgaaagagaatataaagtacacgaactcgttaagcgctctatgaacgataaaacgctgtatctcccctgcatacataaagacatagaactcgaacacaatggtaagacgcataacataaatcgagaggtatttactgctcgcacagttacatgtcaaaaagtctcgctgatgtttgagtctgatgaatgtgtcattctcgatttagttactggaggcagaacgatcagagttgcttattcatactcaagctatattcctgaattgctgcctcttgctgataaatacgcgatatgtaactactttgacgatgagtctaacgtcattcattgctcatggttgaaacatccttctgtagaggtaagtattcagaaaagaaggagtcaatatatactagagttaattaacgtcgaaaaattgcgtcatataaaagaagaggttgaaacgttagcctccgaatactcaaacggatacaacacatttttcaagaaacactattcgctttggaaaaaatggatgattaagagacatcttttcacaccagtattagacaagaaaggcccctctttcccacggcacctgaaaataaatcgaaaacatgaacaactatggccttttcagacgtttcacattcttgttttaagtactcttgccgaaatcgtcgattcatacccgattaaaaaaccaatatattatcgggatttattcatggaaatagcgcaacattatggtttgtcagagcaatatcaaactatattaaaagaatttaaatccttgaagaggtcttcttcttttgatgagcttatcgatgaagagagcattatagaaaagtctcttgaaccctacgcattgcttgaacttgtgttattgagaaaagatcatgttataagaaaagactctctggtatcctcactaaaagtttaa

SEQ ID NO: 431726 - DNA, 174 bp, Serratia marcescens
atggagccacaacagaaagagatcacgcgggcgttaacgccgggcgaagtcaacctggcgcgttcagcgtttggtaacactattttctatctgagcgtggtggtgctacctgtttttgggctgcagaatcagtacacggcgatgagctcgcacggggagttgggccgtatataa

SEQ ID NO: 431727 - DNA, 297 bp, Serratia marcescens
atggcgactaaagaacaaaaagatgagcttgttaatgctctgcatattcttaaaaaagaatgcgacaacatgatcaccacgcccaatgggaacgtatttgtctatatcagtttgaaactgtctgctttcatcggaaaagtatacagtatcgatccttcaatattgagcccccttgttatcagcgatttactgtactggacagaaggtgcaatagaagcccttcaaagcagcaacacctctgatgatattcccgcattgaatattgtcgttggaaagttgtactaccaatttccctga

SEQ ID NO: 431728 - DNA, 675 bp, Serratia marcescens
atgttccagccggacctggacattctctctgctttctccagctatctctccgccctgacggtgtacacagcggatccgacatacccggtgggcgatcttgtggacaaggcattgaccaaagccgaatcggtaaaatcgctggctaacctcaccgataaccaaaaaaagtccgtcagtaacctggcggggttcttgcaaaggctcgctgaagaggaaaaaaacggacgcgacattgccaaattgattaaacaagaaggaaaaaaccagaatgataatatggagttggttaagcaagatatccatcagctaaagacgcaatatgatgacgtaatgaaacaggacattttcaacttcaccgtcgacaattttaacaaaagaacgcccaaatcccctcaaccctctgacatggaaaagtccgctgtctatatcgataacattatcacgctcaataacctgacgcaaaaaagtatcaaaaaccccaccgcggccgaacaggcgattgaggccttccagcggtaccatgaagggttaatctcgattatcgatgacaacattatcgataaaaaaataaaagaagaaaaactaaaaatccaacaggaaaatttaaaggaggccttaggatatataaaagactttgtcaaagacttcacaccgcttctggtagcggctctttaa

SEQ ID NO: 431729 - DNA, 150 bp, Serratia marcescens
atggagcataaatgggaagttatccaaactgaccccttaaaccctacaagcaaaatcatttgggggcataatagggggcatggttcaaaatcgaaattgataaaactgagtaaattcaaattaattggctatcaaatgcgactcctgtga

SEQ ID NO: 431730 - DNA, 2529 bp, Serratia marcescens
atgagtggtggtgatggtaaagacagccgcggtcctggcggtggggtgaatggtgggccgacggggctgggtgggggtgtggatgcatccgatcactctggctggagttcagaaaacaacccatggggaggcaaggataaggacactggcgggcatactggtggtggcaacaatggtggggacagggatcccgccaacagtggcggcaatgttaacctaagcctgtttccggaagcacaagcgtctgtcgctgtgggggcacagttcaatctttcactgttcgatggcgcatggggattcagcctactgaaatcccaaaaggtacaatcgtttatcacaaaatcgataaccaaagtgaaaacgctcggtattcccacggtaggcacattgtggcgaactagtctgtggggattggtcgtggaaggcattacgccaaccaagatcgctcctgatgatatgtctatggtgcgacatattgtgacgacactccctgcggatttggtcactcagacgccgccgggccaacttcccactcaaccggcaaccctggtcagcgctcgtattgctgacctcgttgatgaggggcagcaaaaagtagccgttgttcgttcaccgtcgttaccgatgagcgttccggttgtggaggccaagcccaccaagcgaccggacgtctatacggtaggaattgtaccgggcatgcctgatattcatattcgcgtcaatgcgccggcgccgccaaccacggcgaaacctgtggacggtgttaccgagataaataatgctgaagccaaaccgttgccagcgacgcaaccgggtggcaatacgcacgatggtatcgtggtgttccctccaggcagtaatctgccgccggcttatgtggccgtggtggagatcattccgcaaaatgaagtcaatgcacgcgaagccgaacgcaaggcatttctgacttatcaggatgcacgccaacgtcgtgagtcagttcaaacggatgagtaccgaaagtcacacagttatcaatggttgctgcctgaacggactatcaaccagcgacagattgaggaaaagcaggctcaaatcaccctcaatcagcgaattgctgaacgtcaatctatccaggaagccaatgcgcgcgctcgccgtcaggcgggacgagccgaacaatttcatcgtgacgtggaaagaaccaatggcaccattgctgcattaaacgaagatctttcccggctgcgtaaggaagaaaaggatctagcggctcaggttgctgaatttgatcgcattgccaaagacaatatgagcaaaattcgcgcacggcagccgaccgatccggatattgcttcgttgtcaccgcaagcgcaagcggcgttctggcgcaaccaggcgaagaaagaattcgttcttacggttggcgatggcgatttgcccaaatatccgccggtcatgggcagcaaacccagtccgctgtttctggagcagactgcctacttctggcgtgaaagcgggtttgctatcagcaactataattcggtggcgacgacggagacactggaagccggtatccgtggcgcgtttgcccgggcctcggcggcgttgacgaggacacctgcggaaaaactgtatgccaacgggcaggtcaccacggctgagtttgctcagctctcttttgttttttccgagagtttggacgtgccggcattgaccgtcatgtcatccctgggtgttggtcggttcggattgacgcgagacgatgtgaggaatgcgctcggcaactataattcggtgcggttaccttatcggctggtttctcgtgagacgggggatgtcggggaagagaaaatccacatcaacatcgttcgccctgatgagcggaacgtaaaaggtgcggtgccactaaggccactatcatgggatgcggtgaaaagggagttacgctttaccactgatgacggtgctatctctctgacctggacaccggcgaatgacaagagcgtatccggttatattattaccgtcacgccggttggtgcgcctgcaggcaagctttcgacggggggcagtgtcgatgtgtcagggaaaggaacgctgactgcattgcccaatggtgatgttcagcagatccatgactatattttggttccaccggttgaaagtggtcttgatccgatttatgtcatgttcaacaaaccacgaaaaaaaccggccaaggaggataagcctgagcttgtcaaaccccgcaaagggctaacagaatttgggcatgattatcatcggcctccaaaaacagaggatatacacgggctgggtgaactcaaaaaaggtgagtcgaagaatccagttcaggggggaggaggccttcgagcacgctggtatggcgacaagggccgtaaattctatgaatgggattcacggcacggcgagctggagggatatcgagccagcgacggtacgcacctaggtgcatttgatcccaccaccggcgtacgtactaaagagccgagacctgaacgcaacattaaaaagaaatatctgtaa

SEQ ID NO: 431731 - DNA, 258 bp, Serratia marcescens
atgggactaaaattaaatcttgtttggtttgaaattgattcacgtcaatttgtaggggaagaatactctaaggactttggggatgatggctcagttatcgaaggcttagggttgccattggaagataatattaataatggtgggttcaatgttgaacgtggttggattccattgcttcaaccgtatttcaagacaaaaatttcccctgaaaaatttgcctaccagatctcgttcgattatcaggatggcaattggtaa

SEQ ID NO: 431732 - DNA, 810 bp, Serratia marcescens
atgatgtcgctgcgcagccggttgatccatgacgtgaaattcgggccggcaaacactggcgaagtcaactacgcgaagcagttatcgccgcaggcgaagagcctgacattgtttgaccgctgctatttatcagcaaagttactgattaactggcaacgtagacagaatgatgcgcactggctggttcccctgaaagggaacacgaaataccgggtagtggaaacgttcggtaaaggagatcatcttgtggagatgcaggtctcaccacaggcccgaaaacaggacagctcgctccctgaatactggcaggtccgactaatagaatatgaagatgaatcaggtgattacaaaggttttatcagctctctgaccgctccggagctgtatccggcagacgcgttgcgttatgtgtaccaagcgcgttggagcatagaaaacggctacggcgagctgaaacagttccagttgagtacagccacgctgttgcgcagtcagaaaatgagcggaatatatcaggaaatatggggtctgttgacggcctataatctgatcagaatggagatgagccagatagcacgggaagccagggtgtctccgttacgaataagcttcgtgatggcgatgagactgatccaggatgaactcatctggtgctcactgggaaaatcggggacaatcccgacgaagctgaagaaaatgcgggagaatgtgaagcagttcatcctgccagaaaagagaaaacggcccaaaaagaggaccgttcgtatctcaaaaacccagtaccccgttcactcaaaacatcttaagtga

SEQ ID NO: 431733 - DNA, 1044 bp, Serratia marcescens
atgacagacaagcacttaacccaatcaccggcaggtgagtttgtcatgtttgccagcgatgacggcgaagtgcgcgttgaatgtcgttttgagcaagaaacgctgtggctgccccaggcgaccatcgcgaatctttatcaagtgactccccaggcgattacgcagcacatcaaagcgatctacgaagaagcggaacttgaacaaaacgcaacctgtaagtcttacttacaggttcagcaggaagggggccgtcaggtaagtcgcaatatcctgcactatagtctgcccgttattcttgccgtcggttatcgtgttcgttccgctcgcggcacccaatttcgccagtgggcgacccaaacgctccaggaatacctaatcaaaggcttcgtgatggatgacgagcggcttaaaaatccgcccgtaggttcatccgctgtgcctgattactttgatgagatgctagagcgcatccgtgatatccgtgccagtgagcgtcgggtttatttgcgggttagggagatcttcgcattagctgccgactatcagccgtcacttaaagagacaacgttgtttttccaaacaatccaaaacaagctgcattttgcctgcaccggccacaccgctgccgaacttatccatcagcgggctgacgccagccagccccatatgggcttgagcagctataagggtgaagaggtgcgcaaaagcgacgtgacggtggcgaaaaattacctcaatcaagacgaagtcagcgaactcaatcgcgtggtcaacatgtggttagatttcgctgaagatcaggcgcggcgtcgtcaacaggtgttcctgcgtgattggcaggataagctggatcagtttctgcaatttaacgaccgtgacgttctacaaggggctggcacagtcagtaagaaagcggcagatgaaaaagcgcaggctgaatacgtccggtatgccgagcagcagcgccgcttaaaagaagcggcgggggaacaggatattgccggtttactgcagtggaaaacagacaccaaaaagcgtccataa

SEQ ID NO: 431734 - DNA, 2070 bp, Serratia marcescens
atgcgtattcagcaggttcaaatcaagaattttcgccttttagcagatgtagagctaatgctggaagaacagacaactgttatcgttggacgaaataatagtggaaaaacatctctgtcggagataatccgcaggtttttggctgatgggagcgcaacctttcagctcgaagacttttcaagtgcctgttatgactgcttctgtgaggcgctgcatgcactgaaccaaggggctgaagaaaatattattcgtgagcttatcccagccattgagcttcgattgaaattccagtatgaccctgctcaacctcagttaggtcccttgagtcctttcgtgattgatttggatcccggatgcactgaggcactagctgtaattcgttatgagttgaaacatggtcaacttgcacagtttctagaaaatcagcctaaccagccgctaacctatgagacccgtatattattccttcgtacactacgggaacgaatacccaataatttcagcacaaaaatatgggccgaagacccaaacgatccagataatcgccgtgagttgcaacccagtgcattacgaggcttagtcaaaaccggatttatcaacgctcaacgaggacttgatgatgtaacatctcgagagtccgacgtgttggcaaaaactgtagaaggacttttcgcaacagcctcttctgcatcagctgatacagcagatcagcaaattgccgaggctttgaaaggcgcagttcaagacattcaagctcagattgatacgaactttggtggtcagctcaaaagcttgatccctgcgctaaaaacatttggataccccggtctgggagggcaagagctacatacagaaaccctgctggatgttggaaaattactttctaactttaccaaagttcgttacgcgggttatggcggcgtagcattacctgaatcatataacggcttgggtgcgcgaaatctgatatttatccttttgcaattagcaggcttttataaggcatttcgtgcagaagccaaagagccaggcgtgcacttgatcttcattgaggaaccggaagcgcatctgcatccccaaatgcaggaagtttttattcgtcagctagctaaaatagcacagcagttggttgatggcactgaggataagaagccctggcctgttcaattcgtcgtttctactcactcatcgcatattgccaatgcagctggcttcgagaatattcgctactttctcggggctcctgttacaggtgcacaagaaggtatacgtgaaaccaaaataaaagatctgcgcaaagggctgaagcacatttcacccgaagataagaagttccttcatcaatacatgacgttgacacgtagtgacttgtttttcgcagataaagcagttctcgtcgaaggactgagcgagcgtttgctgcttccagtcatcattgcaaaattagaagccgatgaaccggaatgtcctaagttgtccagccaatataccaccgtgctggaaataggaggtgcttatgcacacctgttcttcgacttattgcagttcctcgaacttcgcagcttaatcatcacagatctagatgccgtcgagaaacctggaggaaaagcttgcgcagtacacctcggaatatcttccagtaacgcctgtttgaaggcatggttctccgaggacgcttctttcactttagctggactacttgccaagaaagactcggacaaagtactcaaaggaaatcgtattgcttatcaatgtgtagagaaagaagatggtccctgcggacggacatttgaagatgcattcattcttgccaatccaaatttgtttggcttgaccaaagaggattcccaggagctagaaatcgaagcccgttgcaaggcggatgaatggaaaaagtctgaattcgcattgaagtatgcaattactgaaacggaatgggtggcgccgaaatacattatggacggcgttcgctggctggctcgtgagaaagtggcagtaccagatccagaattggcatcggctgtaaaaacgatagccgacgcgttgaatggaggtgaggctcatgtctga

SEQ ID NO: 431735 - DNA, 1734 bp, Serratia marcescens
atgtctgagacccattcacctgccgaggttgcaagccagcgtgctcttgaggccatgtacacctgtcttgctgagggacaaagctttcgtttagaagccggtgctggtgctggcaaaacatattcgctgataaaagcactcaagttcctgattgaacataataaatctaattttttgaaacatagccagcaaattgcatgtattacctttacaaacgttgcaaaggacgaaattgcatcgcgtacagatcggagtccgttagttttctgcgaaaccaatcacgcattctgttggtcgctcatctgtggcttccagaagtcgctccgaacactgatcgaaacgctgccagtttggaaagaaaagattaaggaggctggaggaactataggtaatcgtgttatcgaatacagcctcggacatcggtcaatacgcgatcatagcgtatccattcaccatgacgacgtactgcctctaacaatatcactcatgacccatgaaaaatttcgtcgcatgatcgcggatagatttccgatcattttggttgatgaataccaggacacgaactacgagtgggttgaagcgctcaaggaacatttactaggacaaccaagtgcacccttgtttggcttcttcggggatcattggcagaaaatttatggtggaggatgtgggaaactagagcatccaagcgtgatagagatcggcaaagaagctaacttccggtctgttaaaaaaatagttgatgcactcaatcgcatgaggccagagctgaagcaattcgttcaaaatcctgagtctaaaggtgaaatatgcgtttttcatactaataattggcaaggagtacgtcaaaaaggacctcactggggaggtgatctacctttgactgatggacatgccactctggtacgtgttgagaccgcactagaacttgatggatgggacttatcacccagtcacacgaagatcctcatgttgacgcacaaacttttggctaaccaacaaggctattctaatttggcggcagcttttcgatacaacgaatcattcacaaagaaggagcaggaacacattgctttctttattgataaattggaaccagcctgtgatgctttctctactcgtaagtatggaatgatgtttgaatccttgggaggtactacacctcacttacggagtcattccgacaaagccagttggcacgatgcaatgtcacagttgcttgctatccagagtacaggaagtgttggtgaggtgatcgatcacttacataaagtgcgaaaaccaagacttcctgatgtcatcgaaaagagcgaacgagagctccgtgagttcaacgaggcagctggcgttgagttgccacggaggttggaagaattaaaaaaattccgaaatattgcatattctgaagtgaaggcgcttcgcaattatcttgtaggttactcgccttttgaaacgcaacatggcgtcaaaggcgctgaatttgagaatgttttgatcgtagttggacgtggctggaatcagtataacttcggtgaaatgctggaacttgccagcgctaaagtagttccccctgcaaaagaagaagcatttgaacgtaaccgcaatttgttctatgtcgcctgctcaagaccacaaaagaggctttccatcttgttcacacagttcttgtcaccagaagcacttaatactcttgaaaattggttcggaatcgatgcgatcaaaccagcaccatag

SEQ ID NO: 431736 - DNA, 1209 bp, Serratia marcescens
ttggggaaaaatatcgttatttgttgtgatggcaccggtaatgaagtgaatgcagaactgtcaaatgttcttaaactttaccgtgttatgagtataaataatgctcaagttgtttactacaacccaggcattggtactattgggttacataattcctggcagcgattcagacagaaagttcgtggtttgtttgagttagccacaggttttggcctggataatgacattcttaatgcttatcgttatctttgtgagaaccatattaaaggggataaaatatggctatttggttttagcagaggagcttatacagtgcgtgttctggcggcatttgtgaatataatagggcttcttagcaaggaccagttaaatcttgctgaatatgccttagctgcatataaacgggcaagctcatatgtcgttacagaagcacaatatgctgaaaactcaagtgaaccaaaacaatcttcctctgcattggctgatgcctggcatctggcccgcgtcactagaacccgtaaagtccagatcgaattcattggagtctgggatacagtatcctctgtatttgcacctaaaaaatacggcttaattcctagtattgagagcctactttacacccagaaaaatcctatagttaagtgttttcgccaagcgatcgctattgatgaacgtcgcaggatgttccgtttacatcattggaatgatccacaaccctttagagagaaatcttttaatagtgagagtgacgtagcacagaatatcaaacaagtctggtttgctggtgtacatgcagatattggaggaggatatccagaagcagaaagtggcctgtcaaaatttcctctcgcctggatgatacaagaagcgcgtgattgtggcttacttgttcatcaagcaaatataaatcgacttgtatttggtaagccccggaaaggtagtaaatacttctatgtcgagcctaatgcaaccgcaaaaatgcatgattcattaacttcattctggaaaccattggaatggatacctaagaaactgacagcgaaggagtgggaaaatcgcaggtcatggttaggattttatttacctagaggtgagcctcgattaattccagagggtgccttgatacatagttcagttcgcttacgaatgggacagtctggctacaaacctattaacctcccccagaagtatgagtatattgatgattaa

SEQ ID NO: 431737 - DNA, 672 bp, Serratia marcescens
ttgacaattgttgaccctgattcactagatgattcaaacttaggtagacatatattaacaattgacgacttaggggaaaataaatctatagcacttaaaaaatatcttaagtcttgcataccaactgctctaataacagcaattcctcaaactttttatcaagcacttttttataaagacatcaatattaattcatatgattgtattgtttcaacttctgctgactggccaactgaatatttcatttgggaaatgaaatcaaagattaaagatatagcgtttgtgcaagcttgggttgaacccttcgctttcgttggccatgttttatgtagtggtaaaacgaaaactgccgatgcgagacatctatttgatcgaagcggaaatttcagaaggaaatttactcattgggagaataatggatatcacaaattacctgcttgtggggtaggtttcattccaggaagttcattgagcattcaacagattgcaggcatggtatcaaaatccgtgatagccgttttggataaaaatgaaggtttgggctgtaatacatggaactcctttgtgaccgatagcagaaaagttactatggctggcggtcagtatataggtcctgagatagatgaaaacattgaaagcatggtgattagaaatgaatggtgtgacaaataa

SEQ ID NO: 431738 - DNA, 804 bp, Serratia marcescens
atgcgatttgagttaagcctaccagttgattatttagggataaaaaggaagttgcaaataggtttcagtgaaaacttccccagtgtagcattagcattatcaatcataccaagtccatggttagaatggcctcatatcttagatgatttcgtttgtttatttggaggcggagataaggctgtatatggtgatcctgttgaggttatagataacacattctatagactgggtaaactcatctcactagtgtgcgaaagtaaaaacttcagtcaaattaaaaatgagtttgatagtgaagtaattagctattgggctatgcaaactgcattaagccagcaaaagttaatactgcttaataagcctaaagtctcagcgccattatatactttatctaagattggtacattaggtagggaagaaatttggatttcagacaatgaaaagaaagttttagaacattatcaatggcagatttctccatccaaaaagaaaattgatgctggtaagggggctttttatttgaaacttacatctacaccaaatgtaaagttaccaactgcctttggtttagttgattggctctcaagtcatgctgatggtaacgatattaaagctcttaaagattggttggaaaatgattctaattatccattaaggtgggtgatacttgaaatttttaattcagagcctgttagcataatttcactattaattaaaaggaaaggggttagagataatcagaaatttaactttggattgagaaaagcgaaaaaaaatcctcgggtaaaccttccttcactataa

SEQ ID NO: 431739 - DNA, 1278 bp, Serratia marcescens
atgagctctcaagtattagaatttacagcacaagattcttcacaagtatatagttgggagcagatgcttctcgaagcttctaaaaaaatatctttaagtcaatcacaatatgatttaattgaaagtcgatactcccaattacaaaaagttttagataaagcacaagagttttgtttgtccggtgctcatatatttatccaaggatcaattgggcttaagactactgttaaacctgcccctgaagcaaagggtgatatggcaactatagatgcagatgccatcatattattacctaatgcctcgaacacaagctcggaggatgtgttgcttgcaattgaggctttatttaaagccgaatcaactgttaaggctgatccagagcaattgagacgaggtatccgaatcgtttattctgatgaaaaccccggtttccatatcgatataacacctgcgattaaagcctatggcaataatgaagatgacggatatgggaaactacttgttccagataggcaagatggttggaaagcaagttcgccgcgttcttattccaaatggcttgagagtgttagcactgaaaaaattgtaatgatctctgaatcaataaggactatggatagtattgttagcaatgaagaatttgctaaatccacaatggaccctattccgcaatatcaagaatattcagattctcaccctcttggcgcaacgattaaactattgaaaagacatcgtgatcgctgggctattcgctcttcatctgagctttataggccaatttctgcggttattacaacactagcaacccaagcttattataatattgcgttacgatctacttccaaaccaatgagaccgatcgatgtgatgttctcaatagtatcggatatgactcaatatgttaattatgccaatgatgagcaccaagtattaaatccatgtgataaaggtgaaaactttgctgaaaaatggaatagaaataatggtgagggtgatatgtataggtcggctttttatgaatggcatgctgatgcaatcactgatatagcactgggtttgagcgattggggaactcagcatagatttgaacaggaagttagtgataaatttggtgttccacaatctatggtaaatgagatatcaaaagaatttggcaggtcttggacactaccggggaggaggactggcgaaacattgaataaaacggtactgagtgctttcggtatgttatcaggctctggtcaagctaatgcagggacggtagaacgccttggataa

SEQ ID NO: 431740 - DNA, 543 bp, Serratia marcescens
atgttgataccttcgccagaaatatatatatctgttgatatcgagactactgggcccatcccaggagtatatgatctcattagtatcggtgcctgtgtagttgggaaacctgaagataatttcagttgtttagttaaaccacagggaggcttggttgaggatgaggctcttgccgtaactgggttaaatattgactatttgaatgaaaatgggagaaatataattctcgcaatggagctctttagtaattggcttgaaagaaatgagttcaaacaaaaaaacttagttttcgttgggtttaatgctgcttttgattggtcatttattaattatgcattcataaaatacattggtagaaacccatttggttttacagctttagatattaagtcatattacatgggaaggttcagaacactttggcatgaaacaaaatctagtagaatagatgttaaactaaaaaccaaaaatatgaaaaaccatgatgctcttcaggatgcaatatatcaatcagaaatatttagtataatttcaaaaaaataa

SEQ ID NO: 431741 - DNA, 1581 bp, Serratia marcescens
atgaataaaaatgagttgcttaatcagactaactaccctcctcttgaagatgaatcatcaattacagatttctcgtcgtttatagaaactgaaataaaatgggattgtgttgatgtaatgagtgatgaaggatgttcaaatattattattactttaagtgacaaggaagttgtaaaatcttgttttagattaaatctaccacccgtagaatttatagaagttataagaaagtttgcttacgaaaaaaaattaacactttcatatcttcaaggtaatagtttattatctcaagatctcctaactctcgaatctatacatgctatatacctgcgtactagagggcagtcatctgaagtaaatttcatagagttaaaagagttccttgtagccgcagaaaaagggagtcgggaaaaaggtagaggaaaagatttcacagttgaaactagacgagctgtgaatatggctagtcatagccgctgcatgtttattggatgtggcgagcatttgaatatagatgagttgacaggacaggaaggaaattactcttacctagctcataatgttgcttcttctgagaatggtgaacgtggcattcctgttttatcaaacttgctttcaaatgaaccgagtaatatacttttgttgtgtgataaacaccaccgattaatagatcgtgttgctacctgtgattacactgccgaaatattatcgaatatgagaagtaggtttattagcgatgctgatgaacttcttaacggccttaagtatcaaccaataccggtttactcgattttatggcccataaacacgaatgttgcatcgccaccgaacaaaaaagaaatttcagcatgcctctctacacttaatctgaaaatgagtggtgtagtcaatagcatttacgatagtaatgattctactcgggaagccccagaatctcataaatatattatgccccttagcataaaaatggctgcagataaaatcattcagcagacaagagattctggacaccgagcagcattgtttgcttttggtccaacacctgcattagtcgcactgggagcatttcttggaaacaaaagtcaatatactcctatgctgagataccgagacggtgcctgctggaagtggccttctgccactgcatctggagtattttataatagagaaggatttgaaacgctggaaataaatgaagaagttataatatgtatagcttttactgcatttcctgatgctatgctgatgacagcaaaaagtttgagcgaaaagcttggtgcaaaaataattacgtataaaccaaaaaatgattcattcgataacggcgcaataccacaccctactgatggtgtacttttctcttcaaagcttaattacgacttccatacattaaaatcaaacttcggtgtaaaaaaaatgcatgttttaatttgtgcatctaatgctgcatctgtatttataggtcaagcattcgatttgcaccacccagaaatgatagtttacgattttaaagacgggagtatgcacccaatcttatcattgataaatgactcatctcgcacgactataaattaccactaa

SEQ ID NO: 431742 - DNA, 930 bp, Serratia marcescens
atgagaaaggtcatccgcacacaggagcagacgttacccccctcagctctgaacgcgaagaaaagagatgggacaacagaactggaacgctccagggcacattatgccgtagagcgggagaaaaaagagagttacgattttgtcgcatataaagccgatgaggtgaaatggcggcttaacgcgctgtttcattataaatgcgcctattgtgagagcttcttctctgcctccgcaccggtggacatagaacattatcgccccaaaggcgctgttagcgaggacgcagcacatccgggttactggtggctggcgatggactgggataatctcctgccaagttgcattgactgtaaccgcaagcgcaaacagcggctggttgatggggcaaccgaacttagtgtactgctggctcgccagacgcaatcacgtaattcgtcaggtaagcaggacagctttcctgtcgcgcggggtgggcagagacttatgccggaagataaaaactatgtggccgagtcgccactgctgctcaacccttactatgacaatcccgacgagcatatacagtttgtcagcattggcaacccgccggtgagtctggcgatcccgattggcgaagggccaagcgagcgcggagtcacctcaattcatatctacggtcttaaccgactaggtctcgtgcaggagcggacgcgctatctgcgtcggctggtgtttttaggtgaaatgctgatttctctcggtgaacttgtcgaggagattgaggctacgccgatatctgatgagattaaggtgagcattaatcgcaagctggaattgctaatgaagtggaccggggaagagttgaagcagatgacctcagtggatcaaccctattcggcaatggcaacagcttgggtgatcgggtttaaagcggctatggcggagcactaa

SEQ ID NO: 431743 - DNA, 2316 bp, Serratia marcescens
atgcagtacattgacagacggcgtgttccgccgccggaggaattacggggtaataagctttttagcaacggggagcggatggggcaatttttgcaactgaatcccagtaagcgtgcgcaaacccgtgtcccgcaaagcagtattcagtctgatagctattcccgcgtactgcccgcgcttcactcgctttttcgtggccgctgtgcgttttgcgaatcgcaaacgttagcactgaacataaattattttcgccccgtgaacggtgcagagccacattacgggctggcggatagccatatttactatgcctggctggcaaatgcttggcagaacttctacctagcctgtgaagagtgtaacgtgcgtagccgtaactattttccggtgaaaggggcccgagcgcctatccccacgcaacagatgtatatgcagtatctggaaagcggtacagggctgtggccagagtggccgcctaaagagagagctctgttgttagacccatgcaaacttcagaacttttacacccatttttcggtggaagttgaaggtcgatttgtcgcgcgatctgaagcgggaaatgaaaccatcaatacctttggcctcaatcgcaatgaactggtcacacagcggtcgattcgttttagtcagtaccttgaaggttttaccagtgccattaagcactcttcctccggcgaactcaaaacgctgttctgtttttcagaacttgaatttggggggagctggtatctgctattacggcgtctggcggaaaaaatcggcacgtacaaagggccaaaaccaaatctctctccggcaaggattaaccgcctgtttttaccgttgcttaaagagccacacgggatggaatggtttactgacgcaataagggagaaccagcgtgaagaaccgcttctaaacggcgaattcagcgacgaagaggttactggcgcaaaaccagcccgaataagcggggttgattttgaaaatttcaaatcgctgcaaaagatagagctgaagatcacctctgcgacggtagatgatgatggttcaccgatagcaccagcggtgcttatccttggagaaaatgccaccggaaagagttcaatccttgagggtattgcactggcgttgaccaccgaggcagcaagaaaaaaactcacacttaactggcgtagctatgtgctggatccgcagttcatggggggggaaccggggcacggctctgataccgcctatgtcaatattctcagctcaggacagcaacacctcaaaatgacgttcaaaaagggaggttatcggatcaatcgggaacaagactttaacgttgggccggtcttcgcgtatggtgcctttcgtcattaccagcataagcagcatcggtatgtcgctgattacccagtgcgaaatctttttgagggcaacctgctcggcaacccacaggcttggctgttgggacttgaaaaatatcacttcaatatggtgatccgggcgttacgtgatgtactggcgatagaaggggagtttgacgttgttgagcgtgatgaagcgctgggggtgtgctatatcgtcacgccgatgcttcaacaaaacggtgagtctgttcgtattcgcactccgcttaacattgtctcatcgggatttcgttccgtgcttgcgatggtatgcgacatcatggcagggctgatgaatccgcaatttaaccctacctttgagacgctagatagtgctctgggcgtggtgttgattgacgaggttgaagcgcaccttcatccccgctggaaaatgcagataatgaagggattgcgtcgggcgctgcctaatatgacctttattgtcactacccacgatccgctttgcctgcgggggatgtgcgatggcgaagtggtcgtactgcaaaaaacggtgaatgagaatttggtatggcgcgatgaattacccacagtagttcagatattgaccgctttgccgagtatcgataccctgcgcgtcgatcagcttctgactgccgacttcttccagctctattccactgttgagccgaaaataaaccagcagatggcccacgtggctgatctgctggcaaagaagcagcaagcgatcccgttaaatgacgtggaaaagcgagtccttgactcgtttgagaaagatatcgcctcagcaatgcccgtcgggacgtcggaagcgcatcgtctggtgcaggaagctgtcgcgaattatttgcaggaacggcatcgggaaacgccgaacttacgtgcggcattgcgggaaagcacaaaggataaaattgttgatattctgaagcaggtactgcaatga

SEQ ID NO: 431744 - DNA, 1209 bp, Serratia marcescens
atgaaaaagacatgggtgatggcggtgttttcggccctgatttcagggcaggctgcggcgcagagttgggtgctgaccagcgctgaagatggcgtggagaaaggaaactggaagatttcgagcgaggcgctgaaggtgaaggataaaacgttcagcattgagcagaaagtgttgcacggcggtaagcaagaaggcagcaaagtcgtgattatccgcagcgaggatggcctgaccatcacgctgagtcccactcgcggcatgaacctcctgcgggcagaaggctttggcgcgaaaatgggatgggattccccggtcaaagaggtgatcaaccccgcctttatcaacctggaaagccgcaatgggctcggctggctggaaggtttcaatgagatgatggtgcgttgtggctatgagtggaccggtcatccggtgaccgacgcagggcaaatttacacgttgcacggcaaagcgggcaatacgccggcctcgcgggttgaggttgaggtcgcggatacggcgccgtatgaaattcgtgttcgcggcctgatcaaagagagcacattcaaaaaagccgatctgcaaaccctgaccgaattgcgctatgtgcccggcagcaacagtttccgcctgcatgatgtgttaaccaaccgggcggattatccccatgactaccagattatttatcacagcaatttcggcgcaccgattctggaaaatggcgcccgcttcctggcgccgatggccagcatcagcccgtttaacgactatgccaaagccgggctgaagacctgggcaacctatgccggtccaaccaaagggttcgatgaaatggtctttaacattaagcccttatcggatccgaatcatcagacactggcggcgctggtcaataacgcgggcgacaaaggggtggcgattcagttcgatacccgccagttgcccgtcctgacgctgtggaagaataccgatacgttaaaacaggggtatgtcacggggattgagccgggcaccagttatgcctacccggtcactatcgagcgcgaacaaaaacgcgttaagcagctgcagccaggcgccagtgcgcagtttgatctgacctataccttgctgcacagcaaagcgcaggtggcggatctggagcagaagattgcggatattcagggcaaggtaaaaattgatgagaatgacgcgccgatagccaaagagtaa

SEQ ID NO: 431745 - DNA, 1272 bp, Serratia marcescens
atgacagataagcgcaaagacggttcaggaaagctgctgtactgctctttttgcggcaaaagccagcatgaagtgcgtaagctgattgccgggccgtcagtgtatatctgcgatgaatgtgtcgatctgtgtaacgacattattcgcgaagagattaaagaagttgccccgcatcgtgagcgcagtgcgctgccgacgccgcacgaaatccgccaccacctggatgactacgttatcggccaggagcaggcgaagaaagtgctggcggttgcggtgtacaaccactacaaacgcctgcgcaacggcgataccagcaacggtatcgagttgggcaagagcaacatcttgctgatcggcccgaccggcagcggtaaaaccctgctggcggaaacgctggcgcgtttcctggacgtgccgttcaccatggccgacgccaccacgctgaccgaagctggttacgtgggcgaggacgtggaaaatattatccagaagctgttgcaaaaatgtgactatgacgtgcaaaaagcgcagcgcggcatcgtttatatcgatgaaatcgataagatttcccgcaagtccgacaacccgtcgatcacgcgtgacgtctcgggtgaaggcgtgcagcaggcgctgctgaagctgattgaaggcaccatcgccgcggttccgccgcagggcgggcgcaagcatccgcagcaggagttcctgcaggtcgatacctccaagatcctgtttatctgcggcggcgcatttgccggcctggataaggtgatcggtcagcgcgtcaacaccggctccggcatcggcttcggcgcgaccgtcaagggcgagtccgagaaggcgaccgaaggcgaactgctgctgcaggccgaaccggaagacctgatcaaattcgggctgatccctgagttcatcggccgtttgccagtcgtggcgaccctgagcgaactgagcgaagacgcgctgattcagatcctgaaagagccgaagaacgccctgaccaagcagtaccaggcgctgttcaacctggaaggcgtggagctggagttccgtgacgaagcgctgaacgccatcgccaagaaagccatggcgcgcaaaaccggcgcccgcggcctgcgttccatcgtggaaggcgcgctgctcgacaccatgtacgatctgccgtcgatggatagcgtagacaaagtggtgatcgacgagtcggtgatcgccggccaatccaagccgctgctgatttacggcaagccggaagcccaggcatctggcgaataa

SEQ ID NO: 431746 - DNA, 1149 bp, Serratia marcescens
atgtatattgaaaaattattcctacatgattcaaggttaaatatcacggtaagtaacgtggaatttggtcgcaagaactttctcgtaggcatctcaggttccggaaaatccacaatcctaaatgctctctatactttggtgcaaatagctagtggaagctcctctccagctgacacttggaatgttgtattcagagataaagaaaatagaaaagtcgagtggagtggaaaattctcaaaaaaaagagagcttgatgaagtcggtgctgagaaagctgaattaatcgaggagaagattactattgacggaacttcattcttactaaaaaaaggtgaagtaataaccctagaagataaagaatttccaatcattgacgcaaaaaagagtaatttatatatattcagaaaccaagactctttaaaaacaatctacgaatcaatctcttccttaattatctctggcgccttagaagccaactccggttcgctgatgtccataccttatattccgagtatctatgaagatgcagttaaaaagattttacaaaatgaaaatcaatcaataaaagatattgttttaataaatgacaggcgattaggtgccaaagagaggatcatatttgcacacaaatatgatcaaaaagcctttgaggatttggtatttgtttacacttcaatattcccatcagtcgaaaacatccttactaaacagataagaaatttagcaagcgattcaaaacataccaaccatcgaggctttgtaattcagctcaaattaaaagacgggactttagtcgaacaaggccatatttcatcgggcatgttcaaaacactacttgtattagcagatataatattatcacctgatgagtgcgttatattaatggacgaaattgaaaacagtttaggtttgaactgcctacaggaggtgctcaacgaattaatcatatctaacaaacaggtaattttaacaacgcatcatccaaaaatcatcaacaatgctcctaaaaacagctggaaaatagtaaccagaaaagcaaatgaaattagtgttcatgacacatcagcactaaattcaaataataatagtcatgatcctttctttcaattgatcaatagcgaaatttacaaatgcggagtatctcagtga

SEQ ID NO: 431747 - DNA, 669 bp, Serratia marcescens
gtgaaagcctattttgttgttgagggggaagctacagaacttttcgtttatcctgagtggattaaaaatttaaaacctgaattaacaatatttagcgactatgacgattttgtatccgcagatagtggaatttactttgtttctggatatggatatccaaacatatttaaagaaatcgaaaatgcagttaaaaatataaacaaaatcaataacgtggattgttttttcgttattttagatgctgatgaggatgatgcagagacgagagaaaacgctgttaaagaagttgtttttaatgagggaatggtttctcaaacaaatctagaagtagttgttcaaaacagatgctttgaaacatttttgctcggaaatcaaaagtgtttttcaagacaaccaaccaatgcagaacttcgtaaactaattgaatactatgatgttttgaataatgaccctgagttgatgggtaattactcacaagatttcactcattcccagttccattttaagtatgcagtaacgatgcttagggaaaaaagagtgaggtatactaagagtagttgtggagcagtagcggaaggttctttttatgaagctctagtgcaacgaatcaaaagcacaacgcatttagatagtttcagaagaataaatgatattttaaacaaactttga

SEQ ID NO: 431748 - DNA, 798 bp, Serratia marcescens
atgtttagaatatttattttttgctgcacatttttattatctcaacaagctatagctggcgcatatatgcttcccgtatcttttgttaacctaacggttgttcaatcgttggttgcgtgggatgagaacccttctgatctcaatccttgttatggatggtcgtcttgttttattggccctgatgtcaaatacagtacccgaaatcctgggctacatggctcatgtatagactctaaaaattgtcttcgaattgaaaaatatagaaccgcaaaagaaatagagatcgcctggaaaaactcctttggcattccatggacctcgcgaccctacctggtgaacggtagggatgccagttgcgttgggcttttttatgtacatacgccatcactagccgggggggcgtttttatggcctaattctgtttgcggcaaattgcctccccaaaaccaatcttgtgatgtgaatctccctcctgtgatagattttggtacgctttcgcaggacgagatttccgggatggagagaacgatttatggaacaatcggatgcactcagtcaggcacggtaaaaatatatgcccaatctacattaggcgatggaaatatttatttcagaaacaccaaaaatttttattcgacgctttttttagatggaaattccgcatggacaggcgtggattattctttgactggcggccaacagaaaaatatcaatctaaaagcaaaactgacagccaataataccgtagacccaggacctttctcaggcaatgctattatatacattgcatttctataa

SEQ ID NO: 431749 - DNA, 1173 bp, Serratia marcescens
atgaccgcagaaaataacctccagctgaaccgacgtattttgtccgtggtgatgttcaccttcgtctgctacctgaccatcggcctgccgctggcggtgttgccgggatttgtgcatgaccacctgggctacaactcggtgttggcgggccttatcatcagcgcgcaatacttcgccacgctgttcagccgcccgcacgccgggcgttacgccgatcagctggggccgaagaaggtggtgctgttcggcctggcctgctgcggtgccagcggcctgttttacgcgctggcgttcggcgttgacggttacccgtggctcagcctgctgttgctgtgcgtggggcgggtgtttctcggcgtcggcgaaagcttcgccagcaccggttccacgctatggggcatcggccgggtcggggcgatgcacaccgcgcgggtgatttcctggaacggcgttgccacctacggggcgatggcggccggggcgccgcttggcgtgtacctgaaccagcagtggggattggccggggtggcggcgctgatcgtgctggctgttgcggtggcgctgctgttggcgagcggcaagccggacgtctcgatcgccgccgggcagcgcatcgcctttagcgcggtgttcggccgcatctgggcctatggtctcggtctggcgatgggcaccgtcggtttcggcgtgatcgccacgttcatcacactttactatgccgacaaaggctggagcggcgcggcgttttcgctgacgctgttcagctgcgccttcgtcggcattcgcctgatcttcagcaacgtcattaaccgccacggcgggttgaaggtgacgctggcgtcgtttctggtcgagatcgtcgggctgctgttgatctggcaggctggtgagccctggatggtgcaaaccggcgcgttgctggccggcgccggtttctcgctggtgttcccggcgctgggcgtcgaggcggtgaaacaggtgccgccgcagaaccagggcacggcgctcggcacctattcggcgttcctcgacctggcgctgggcatcaccggcccgctggccgggctactgatcgggcagacgggcgtgccgtcgatctatctggcggcggcgctgctggtggcgctcggggtgttgctcaccctgcgcctgctgcagcgcagccgggcctga

SEQ ID NO: 431750 - DNA, 888 bp, Serratia marcescens
atgtcaaaactcagtaagcagctggttactctcgcccgccagggacgggggagttttaaaaccgtcgctgaccgttcgagaatagcggaacgcttttctgaacgtcttgcgaaattaaatatccagatccgtgacgttaagcatgttaagacgtcccatattgaaaattatattaatagtcgtaaggctgaaaatatatcaatacgcacgctccaaaatgaaatggcatcggtccgttcgatcatgtcagcagcggggcgaaataaacttgcagacccttcgcatgataagttgagtaatcaggcgctgggtatatcaggagcaagccgcgatgggacaaaaacaccactccccgatgataagttatcggcaattgttaaccatgtttttaaaaaggacgaaggggtagcaatcggcgtgcaattatctcgttatttggggctgagaacggaggagacggttcagtcggccaaatcgctaaaaacctggaaacaagccattttaaatggtaacgatagggtgaaggtggttttcgggacaaaaggtggtcgccctcgagatacgacagtttttaaccgtgagaaagttttatctgttttggataaggcgataaaacattgcgatgagcataaagggaagttgattgataagccttctctacatacggcgatagaacgatacagaaatatcgtacgtgacgcaggtatgattggaaaggatgcgcctcatagtttgcgatatgcctatgcaaaggatgctgtaactcattatgtcaataatggtatgagccgagaagaggcgaatgcattggtctctatggatttaggtcatggtgatgggcgagggcgttatattaaacaagtttattttaaaaacgatattgagtga

SEQ ID NO: 431751 - DNA, 1056 bp, Serratia marcescens
atgcgaatagataaaattccagggtatggattgcagaaaatagctgtgtggcctgatattatatattcatcaggtgtatgttttatgagtgagtataaaataaaagaagatgggacgttaaaatggttcagagggattaaagagcagggtggacgtgttcgtttagatatatattctagtatgattgaggctatagaagtagctaatgaaaccaatcaatatcttatcaagcagataggtgaaatggatatcagttctgatgttaaagaatctttgacgaggaaagcttggaaggtcgtcaccgccaaaaaacgattgatggatgaggaattatttatgctttctgtagcaaagcaacgtcattcggatatttctcctcctgatattaactccctaatcgtaaaagatgatgatgatgagttaaagagagccctgcatgagcaattgaagttaatgccttatcttaaattagtctggttgcctaagttaaatattgttttggaaaataaaggaggggataattggagcaaatgctacagagctaatgaaagagcttctaaatatgcatttagggctcgtattgctcatgcttttggattgagtgctttagctcactggggcgaaactaaagctacggttagagatatattgcttccagattttgctaaacgtctagaattggagagcgtgaaaaagcttctggatgaagctttagaaaatgggcatagggttctggtcgctggtgagtatatattttggtacgaagagtctggtagcattggctggaagctgaaattaaggggcgattcgagtacaaaggacgatggcagcacgctttggcatgaaggtacgattatttcaaaaaatcatgggagaatagttgtccttccttatacaacatcaacaggtaaaacagtgaaaggtcatacaaaaaatgccccgaaagatgggccagcgaagcctcgccacacagacgaatatgttgaattaccttttgaagttttggagcatgacaagatgagagggttactaggagaaagctatcactctgcctag

SEQ ID NO: 431752 - DNA, 405 bp, Serratia marcescens
atggttaaaggtgtgggttcaacaaatactgctttgctccagatctaccctggcttcgatgtcattgccgtaagcatcgtcataaccactttgccaaccacactgccacagttccgggtcgagttggttgcccagcttaatcgcttgccgcaaacccattcgcaggagccgctgattcacacggtcataaaattgacagtgtcccaacgcatgtgctgcccagaacacagtttgatcgatagcctgtttatcctcggaactccgcatactctggatattccgagccgccagttcgaggtcgacaagaatgcgttgcaaaaacaatgcatcctcttccagtctggccaagcttactccgacactcgcatggggaagaagctgttcagtctggtgtttcacaaatga

SEQ ID NO: 431753 - DNA, 381 bp, Serratia marcescens
atgtctgtactttcacaatggccttatcagccagaactccaacttatagaccgtctgcgcgtgttttggcaccgaatacaacggagccagccgggtgcggaggacctcattgataccgagtggttcaccaacgaaacaggcaatgttagctgtaaagccgttatttatccaatgccttccggcggctggggagcgactgtcgtttcgcgtaacggttaccacaagggggatttttcctacgactctaaatgctttacgaccctcttcccctctcaggtcgcagcgctgagtgcagctgaacagcttgcaaagcagtttgtctgtctgcgtcatcgttactattacggtgtaaaacacctggtatgcgtgccagcggcgtaa

SEQ ID NO: 431754 - DNA, 360 bp, Serratia marcescens
atgaacgtagcctttttaacaacagcgcctcagtcacttactcaggatttgtgcgatctggcgaacctggaagggcatttgttggccgtacgcgcgctgatgcgtctcgatacgggtaatgaaaagggcgagggtgaagcctactcgcttaaccaatgtggggtggctaatgccgcctaccgttttggtttttcctggtatgggggacgtttcgaccgttcagcctgcgagccgctaatcaacgcactgcacacactcgggaccgatctcgatccggcagtatggaagagctgctttgatgaagggtgtaatgacgcagagattgaacaggagcaagtgaacctgatcacccccatgtag

SEQ ID NO: 431755 - DNA, 939 bp, Serratia marcescens
atgaaacatgaaaaactttcaacatatcgcactcatattatttttgacctcattacagggcgactaactcccggagacatctggaagaaaaaaaactaccgtttcaagtttatgataagaacggcgttatattacggtccgacacggcacatgctgaaaaacctttcaaaacgcactgattttgaatatctgttaaacgcgcagattactctgccaagtaaaccacaccgtcagtatttaattttagggttaaatgcgggccagcgcgccgcagcaatcgtcgattattatcactatatcgactcgctgtcggcccctcgactcatcagggcatttacctcccccgatgaagttatgctgctgcaattagcagggaaagatgaagcgtgtttcacgctttcagcatccagcgcgcataaagccgaacgcgaaggggaagcgacactatggctgcgtgataacaacgataggttgctggctagccttacgtttagtgttatgcaggtaaaggcaaagtgggtcctggtgatcggcggtctacagggaccaagacgggatgttgcgcacgatgtcatcaaagacgcaacacgtgcctgccacgggcttttcccaaagaggatcctgatggagtttatttggctactggttgcccgcacttctatcagcaccatttatggcgtcagcaacgatggacatgttttccgtgcgctgcgctaccgttggagtaaagggcatcatttccgcgcaagctatgacgaattctgggaatcgctagggggggtaaagatgaacaaacgggtttggaatttgcccatatggccagaacggaagatgctggaaaatatcccaagtaaaaaacgagcggaatatcggcgccgttttcagctactggatagtatgaatgaacaaattaataactgtatctcaataagtaaatag

SEQ ID NO: 431756 - DNA, 831 bp, Serratia marcescens
atgcgtacttggttcattactggagcatcccgtggatttggcacactcatcgcagaacatgccctgcgtgcgggagactcagtcatcgctaccgctcgcaagccaaaagacatcactgatcgcttgggcgaccacccaaacctgctagcagtaagactggatgtcaccagcgaagaagaatcacatcaggctgttgctgaaggtatcaagcgttttggccagattgacgtcgttatcaataacgctggttttggtgttctgggcgcggttgaggaaaccagtgctcgagaaacggagagtctgttcgccactaatgtctttggcgtgctgaatgtaacccgtgctgtactaccacacatgcgccgccaacgtagcggccacatcatcaacatttcctctgtcggcgggtatcaagcctatgttggctggggggtttacggctccaccaagtttgccgtggagggcatcaccgaagcacttcaccaagagttggcccccttgggtatccatgcgacggtagttgaaccaggtttctttcgcaccgatttccttgatgagcagtctttgatcaagactgcactggagctgtcagactacgacgataccgtcgggaaaatgcggcgctttgccgagggagctaatcacgctcagcctggtgatccagtgaggtttgccgaagccatattgactctggttaatgcgcctaaccctcctcagcgcctagctttgggcagtgatacggtagctcggatcggcgagaagcatcgctttgtggatgctgaattagccgaatggaaagcgctgtccctctcgacagactttaaagactaa

SEQ ID NO: 431757 - DNA, 891 bp, Serratia marcescens
atgaaagcaccatcgccagctgacctgtcgatatttttgagtatcgctcaacatctaaacctaagcagggcagcaatagatcttggcctcaccccttcagccttgagccattctttgcgtgtactggagaatcgccttggcgtgcggctgttcaatcgtacgacgcgtagcgtggcattgaccgaagccggagacaggctatacacccgcctgagacctgcattccgagatattgatgatgctctcgaagacctcaatagctttcgcgacaagccttcaggcagtttgcgcataaccgcaagtcgccaggcttgcgaattggtgcttctcccaataattagcccgtttctacagcagtatccggatatccggctggagatcgtcgaaagcgatgctttcgtcgatgtagtagctgagggatttgatgcaggagtacgcttcagtaatcgactggacgcagacatggtgtctttggaaattggcccgaacctgcgatctgttgtcgtggggtcacccaagtttttcgagcttcacggtgtcccacaaaaacctgaagatttgcagcgtattccctgcattcgccatcgatttcccagtgggacaatttatcgctgggaattcgagcgtggggggatcacccaagaaattgaagttaacggctcacttaccctaggtgacgtcagtctgatgctcaggccggctatacaggggctgggattggcttatgtcttcgaagacatggcgactcgatatctggctgaagggagtttgatccaggttttggccgattggtgtccatactatccaggactacatttgtattacccgggccggcgacatgtacctgctccgttaaaggctttcattgattttgcccgcacgacccgctag

SEQ ID NO: 431758 - DNA, 753 bp, Serratia marcescens
atgtctaagaaaaaaaccgtcataattactggtgcgcttagcggaattggcgaagaatgtgcccgcacgttcagtcaagtgggatataatgtagtaatttcaggacgtaatgagcaaagaggtagggaattagaaaccgaactacgtcaaatcaatactgagactcacttctttttagccgatatcgtatttgaaaatcaggtttccgaattaattaagtacacgcaacaagtctttgggacaatcgatgtattgcttaatgttgcaggtacagaggggcaacctatttcgcatgacaaaaccacagtcgaagacttccgccatgtatttgataccaatgtgctgggaactcagcttgtgatgaaacatgttctgccggttatgtgcaaacagggttcaggcagtttagttaatttctcatcccaagccgggcaagtcggtattcctggcggcagcgtctattcagcaagtaaacatgcagtaaacggattaacgcgctccgccgcacttgaagttgccgctgacggggtacgggttaacgccattgctcctgggccagtagcaacagcaatgtttgaccggtttgtggggaacgatccgatagcgaaggaaaaatttctcagcaaaatgcctaccgggcgtattgttacaaccgaggagattgctgcaacggcacttttcctggcttcggataatgcccgttctatcattggccaaattatcactattgacggtggttattcggtaggttaa

SEQ ID NO: 431759 - DNA, 684 bp, Serratia marcescens
atgaccaagatagacagtagacagttttcacctttggatgagaagaatgccccaaccattgagtattatctggacaatcccgtaatacctgcttgtgctggtattacccttgttaaagatctcaatcaccgctttgttgcatctaacttgttgtttagtcggttctctggcgtagatccatataggttgccgacgcttgatgactcagacatgccatgggctgaaagaggcgatatttatagggatcatgagaaagcgatccttgcaggtgaggtttacaatgttcttgaacccctcccaggaatcgttcatgcttttttacatacttctaaacaagttatatatgacaagaatggatttcctgcagggaccacggcaacagctattattatgaatggtcatgttgattttcataatgttaccggtgtgtcaaaagtgttgaaaatatcatcatacaaagatgtaaaactaagtgctaatgaggctaagttactgttcttccttttaaaaggattgaaaagaaagcaaatatcagagcttttgaatattaatcttgctaattatgactattgcatgagaagcctgaaagtcaagttcaatgtgacttcaagtgttcagcttatagatgagtgcattaagctagggtatcaggatacatttccttttcagatttttttcaaatag

SEQ ID NO: 431760 - DNA, 1701 bp, Serratia marcescens
atgctgaaggccatcaaagagctgcttgtcggaccctgggatatgccggcaaagcgaacggcaagcacttcaggctcacggggccctgctggctactatatgcccgcgtcagcagaacagcttttgagcacggcatctcgtaagcagtgcttacagcagttatgggaaaattgtgcgcttcccaaagacctctatgaacaattctatctgcagccattgaagcagctcatgacgttgatgcaggtgttgccggcgacgcctctgggcgagtatgccagggaaggggggttagttgatgtgaccctgcagacgacaacgtatgcggtgcgcctggccaaagggcacatgttacctcctggggccgcaccggaagaacaatctgcccagaatgtacaatggaatgtcgtggtgttttacgctgcgctttggcgctatctgccgctgttgagtcagctgcagggggagtaccaaagtggccgcgcctggttacctggtctgacagtgccgagtgaaccttaccgctttcgtttcagtgcgattccgccaacccccacattgacgacaagtcagagtacgatgatttcggcccggctgttgccagcagaggtcattgactggctatcaacactgccggcggctacacactcgttgatgacgatcgcttcccgacagtctggcgctttacctgtgatagacgaaatcgtccaggaagcggccaagctggcgcgcggcgacagcctgtccgtagcgtcctctcctgcatccatctccaacacattgacagtagccttaccgtcggtggcgccgactacagaaaatatcacctcatcagtgcccgtggttgatttgcaaagtgcagtcagcagcaccaaccctccgcttgttgaggatcaattgccggcagagacattaaatctgcctgaagagtcagcaacggcgggattactgagctcggccctagatatgccggtaaacgataaacctttggctgagagggcgttagcgcctgaaacggtggtcggcatcgaggaggacatgcagaccctgttgtcattaatggcggttaaggtgtctgctccggtgaaccaggcagaacaggagttcggggacgcccctcacgcagatgaaggccctatgcctgccgataaccctgtgctttctgctgaagtgattcagggagctgaggctgccgaaataaaccgggagtcagacgccttcgatgatatagctgccgacgtggcagattcaacacctgaattttgtgcccctcaaactactgacctcgctcccttgcaatcgcaaaaaccgggcattgaaggcgatgggagcataactcccggagaagtcttttggcgttggttggctgatggactcaattctaatgagatccccattaactccgtaggaacgcgggttcatcttgtttctggttttgtctttatcaccgtacctggagttttttatttgtacctgaaacaggctggtctggatggctctcaacgagaagtccttcaggaggattttgaacgcctggagaaacatcgtcgggtcaagggaaagcgattttattttgcacacctgtatgaaacatcagagcgcacaggtgcgtttaaacgaaccaaaggttacctcgttaaagcaagtttgctctatcgggggaaaaacctgccggacgatagtccggttctggtgatcccttga

SEQ ID NO: 431761 - DNA, 1014 bp, Serratia marcescens
atgcataaatcgcgtgttatggattgggacaccttgctcgaagagtattttttctcaaaggtgttacgcccggaaactgaaaggagctatcgcagagtggttgctgttttcaggagatttatagggtatggcacgttaccggatgcagtcacgaaccgagaactgattttgtggcgtagagacatgttgggaaggggtttaacaacaagcacgtggaataacaaagctcgccatttacgtgcgatttacaaccaggggatgaagaaaaaatggctcaacgtagaggaaaatccgctaaatgaaacgcaagtgccgccgggtaacaagcgtaaaaaaatactgaaccgtgaccagttggttaaagtgaatctggtattagaacaatttgaagaacgcgaaaaattaagggtaggtaaatgtcgtccttgtgcgctctttcctgtgtggtattggcggactgtcatagacgtcttgcgttcgactgggatgcggcaaaaccagttattacatatacgactaatggatgtagatctggaggcaaactcgatgttgctgtgtaaagaaggcagtaaaacgcatcgagagtggttagttcctatcgtgagctttgtccgggaacggatgcgaatacttgttggccgcgcgatagcacagggggcagaaccggcagattatctgttcgatgtggcgcgattcttgaatccattagatgaggttgacgcagagcctgcaatccaacctgttcgctcgttcttcaccaggctaacgaaagaatgtggttttaaggtgagtccacatcgctttagacatactctggcgactgaaatgatgaagtcacccgatcgtaatttggcaatggttaaaggtttgcttgggcatcggagcgtcagcacaacaatggaatatgtcgaactggatttaaagattaccgggcaagcgttagaggatgagttgtcgctgtatatggatgtgatacccgcgcgtgaagatgaggccagactcgtcttgacataa

SEQ ID NO: 431762 - DNA, 171 bp, Serratia marcescens
atgccagtgatattccgttataaggctataggttctttttttattcaaatgagggtgacccgcttgagccgccgcatgttcatatcagagacgctgaggctgaagcgaaattttggttggttcctggcgtgcagttggcgcgtaatgatggctttaacgccagaacgctaa

SEQ ID NO: 431763 - DNA, 357 bp, Serratia marcescens
atgaaccggccagaacagacgggcatcgtcatcgtcggcggcggccaggccggcggctgggcggccaagacgctgcgcgaccgcggttacagcggccggctgacggtggtcagcgacgagccctacgatttttacgagcggccgccgctgtcgaaagcggcgctgctggatgccgcggctcccctcagtcggctgttcagcgaacaggcggtggcggagctgaatatcgactggcgtcgcccgctgcgcgccgagtccatcgacgctgaacagcaaatcgtcacgctcagcgacgggcaacggctgcagttcgagcaacgcctgcgagacatcggcgccgacgctgcgcatgcatag

SEQ ID NO: 431764 - DNA, 927 bp, Serratia marcescens
atggaaaatatcgtcacaaaagccactactgcttctctcagtactaagccacaaatcgtgcctatggtttcaactaaaggcggagaaggtaaatccactcaaagtgctaaccttgctggcttcctcgccgatgcaggtaaaaagatcctcctcatcgacggcgaccactcccaacccaccgcaagcagcattttctccctggaatatgaagcacccaatggtttgtacgaactgttgatgaagacggtcgacctcaaccattctgagcaaattatctcccgttctgttatccgaaatctggacatcattgtttccaacgatccccacgaccgtttatcttctgccatgctgcatgcccctgatgggcgtatgcgcctgcggaatgtcctgcaacaccctttgttcaacgagtacgatgccatcatcattgactccaaaggcgcggcgtctgtgatgctcgaacttattctggtggccagcacggaattcgctgttggggttatcaagcctatactgccggacacccgtgagtttctgcgtggcacattggggttgatggaaggattattgccgttgacctgctacggcatcgcgttaccccgtatccgtatcctgaccaactgcatggagtacaccaatctggattggcagactctggaaagtttgcgcagcatcatcacaaatggccaatatctgcgtgcagatgccttcgatgtttcccttctcgatacgattatccccaagctggaaatttacaaaatggggcatgcctccggtcaacccgttcatcgtctcgaaaaaacaacggctcgaacgtctacaccggcagccgctgacaccatgcatatgctggcctatgagctgttccctcagtggcaatcaaactttgatgcgctactggcagggaaatcggaggtgcagccatga

SEQ ID NO: 431765 - DNA, 1746 bp, Serratia marcescens
atggcgcgtcctaaaaccaagatcctcgatctgaacagtgctttgctccagccgggcaagactgcaacaggcacacagcctttagcccccgtggtggcggagacccccgtcagtgaaatgccattggtgctgacactggatgaggtcaacccgaacccggataacccacgaacctcgcgtaacccgaaatatgaggaaataaagtcgtcaatccgagcccgcggtctggatacggtaccaaaggtgactcgtgatccggaacgtccagagctggggtactttttcagcgatggtggcaatacgcgttatgccattctttccgagctctggcaggagacgggggaagaacgattttaccgcttctcttgtgtgttcaagccctggccagggcgattatcttgcgtgataggtcaccttgccgagaatgaggttcgcggtgacctgagcttcattgaaaaagcctttggcattcgccaggcccgagaattatatgaagcacagttgggtaagcctgtctcattacgagagctatcaacgctccttaccgcagaaggttaccccgtccataattccagtatcagtcggatggaagatgcggtgcagtatctgtatccctatatgcctcatttgttggagactggcttggggcgtccgcaaattctgcaattactggcaatgcggtctcatgccgaaaccacatggcagaagcactgtattacccaagactcggagcagccatttgatactgttttcggtgatgtgtgccgtcattttgattcgccagaggtctattcgcttgatatgtttcgcgatgagttgattggggcacttatcaaagcattgccacaccctttgctcaattatgatcgctggctacttgagctcgatccgaaagagcaaaaccggcgcaagcacctcggtgaaccgacgtcaacgcctgagttgccagataaggcgagtaccgtcgtgctggcgcctgagctacagcaggaagaaaacggtggtttaccctcaacgaaatctgaagtgccgggtggtggctcttctttggtgctggacagcgctttgcttgagtcggcctgtgattctgataatgaatcacagggtgttcaggacgaggaaattccctcaacccaaactgaaccgcgtgttgagactcaacctgatttatacggtgctccttcggtgttattaggtgacgttgaaacgcttttagacggtgagaataccaccgtcaatgaacccctcctgcctggctctcatgagtcgatcgcccctcacaacaatatcgagacacagccaaagcaagctgtagcccctgtggtagaggtgccttttgcggaggtgggacttgagccggtctcctccatttgggctatttctgccctgcaggacgatattgagcacctgcaggtgatcaccttccggttggcatttgaactggccgaagtggcgggctgtgaagctgaaatcaaagccgataaagccgacttgcaggctgccggttacgcattgactgccgagcgaccatctcgcttcaccgccttactccttacccttgccggaaacaacccggacggtgcctcatccagctctctcaatgaagccctcatcgggtcggaaaatgctgctgactggccgctgcttgacgatattcatgccgtgaaattgatgcgtcttattcgtgttttgcgccgtctgcgtgaactgcagcgtgacttacccgcgtcagaggagacagcttga

SEQ ID NO: 431766 - DNA, 717 bp, Serratia marcescens
atgagccattcacaacgacaaacgcgcctggtgaaacttgtgcgcaaactcctcgagctggcccgtagcaacagtaatgcgcatgaggctgggctggcattagcccgggcgcaaaagctgatggcgaaatacggtatcagcgagctggaagcaaatctgtcctctatccagacagcgcggagccagggggcgccgtcggaggcgcagaaattaccggaatggatgatcagtttggtctgggccgtcagtcgagcctttggctgccgaccatatttttcctggcgagatatcccttccggtcagcgtcgtaacgtgacgttctacggcttcagtgagcggccggccgttgctgcctatgcgtttgatgtgctgagccggcaactgaaagagagtactgcagactacctgaaaacccagaatagccgcctgaaactgagcacgcgccgtgcacgcgccgagcagtttcgggccggttgggtgcgtggtgtacagcgggtcatttccagtttcccggtaccagacaacgagcagcaattgatgacgacctggattgctaatcaggacatggtggatgccaagacacgtgcgttgaaaggatgccgtggtggtgatcttgctcgcagtcaggggtttaaagcagggcagaacgccaggttgcaccagggagttcagggtgatgggccagtggcaatcgcacatagcattgggggggaatag

SEQ ID NO: 431767 - DNA, 1272 bp, Serratia marcescens
atgagcataaaaacacctgatgatagcctgatcacctttacgctcgaacaaatgaatgcccgcctggcggaacgaataggtgccgaaaagcacgcgggggctcccgatgtcacgaatctgcgcagcggtctcttgttcatggggaatgtgcatgattccatcccccgccggttgctcctggacacccgtttgtcaccgctggataaaaccgcgtggataatgatccgtctgtacgcgcaacagaaccagggcgccgtgttccctacctatgacgaactgcagctgcagctcgcctcgccgtttaacggtaaggcgtcccgcgagactgtcagccgcgtgctgctgatgttacgcctgaccggctggctcagtttgtgccgacgtgtgcgtgacgacaaggggcgggtgaagggcaatatctatgcccaacacgatgagccgctctcggcccgtgatgcggagacattggatccgacctggctggatacggtcgccatgggctgcgcgcataaaaaccgcaccgtcagccagacggcctggtcagtactgtccgatattcaaaatgacccgacaatgcgtcatcagcattcccagatggcggcaattgctgaacgactgggctcaccacaaaccccgcaacagatggccgccagagtgtctcaatggcaggacaattccccgagttcggacgtcgaactcaggaaaaaatccccgaattcggatgccgaactcagtagatatacccccggttcggataccgaactcagtgtgaaacaggggagcaaaacacagagttcgttttccgaactcattctggaatcagccacttacggtgcatcaacccaaccgaactgtaacgtacgttctttcacacagagtgtgaataaaacaacgtacgtacctgagttaccgtccgaactacagtccagcatggcagcggatgatctgcgtcagataggtgtccaacttaaggctttgcctgcagagactgctcgccaggtgctggagagtcttgagcagacgatggctagaggcaacctgaataatcctaccggctggcttttggcggtaattaagcgcgcccggaacggtgagctgtatgcgagtgccaaatccccagagcctgctagacctgttccggcacaccaaataccttgctctatggcaccggcaaaaccaacaggtccagtccgcgaacagctggcgtcgcgggaccatgtaagtggtgtcgtggccaaattgcgtcagaaaatgatgcgagcaacaaaatga

SEQ ID NO: 431768 - DNA, 744 bp, Serratia marcescens
atggttgattcatcaggcagtaaagaaaataagccctctccagcccgcgcaggtgctctcaaatcgacgttaaccgttcagttacatacccaatatgcaattttgttgtgggaagggcgccagcgagagaaagagtcaaataaaccacaaatagtcagcatgcctcaggtcatcgcccgtgcagggaaaattaatgcagattcaaatactgacaatccttatgccgatagcgcgatgttgtcattggagcaggctattgaacgtggcaccgcgcggttgcagggcgcagtagcaggacttgatgccgttttatccagcttgccaggccaggtttcgatgtcacaagtctcatcagtatctccactgaatatcggtgtatttagccgtaccccgctcgggtatcgctgtgtctggttactcgttggctttgatcaactggcgatgaaagcgttccaggcatggcactacgggctgatctcccgtcaaaagcgggatgacttactgagtcagggagggcattgggtgcgtcaggtttatggggtggtacaacagtatcgatctgtagccgttacgcgtgatgatattcgccttcaaactcaggttggtattgatgcggtaaaacgtctgggtgaacctgacgcagacattatgtcgggcaagtcacgttccgctttttcgccgccactgaataaaacctctgtgttaacgccctccatttcttcaaaaaaaggagccaaagcatga

SEQ ID NO: 431769 - DNA, 1035 bp, Serratia marcescens
ttgatcagtgtaatcttttcacaagcagtacgtactgctgtcgctaattggcgagcgggcgtaacctttgagcaaatgctcgattctctgacacgccctagggaactgggccatgagctggtaccgactatcgaacatgagttgaaaaaacgcgcttgcagctgcgccaaagtgcaagattttgcatggactcaaccttatctaaaactggaagctattttccagccatcaaacctccctgacactccaactgatttttgcccagttcctgatgttgaagggacagccatcgcacgagttacagcgattgcctgccttgcggcaattaattccgccacggtttcctacggctcagaaaacgagggggagctgttcgtcaacctagtggtgttcccgcctggacggggtaaattcaccgacaaatcggcagacaaaatgagtgggcatacagacggtgttgctttccccctgcggggccagcgagaccctacgaatagccgcattgccccttctcctgacttcgtttgcttgtccgcactgcgcaacccgaagcaagtacccacaacagtaatgcctcttgaccatctcatggatcaactgagccaagagcacattaatgagttgcaaaaaccccagtatatcattggttcacaactgaccttccgtgatggaatagttaagatactcggcgaagaactcgcggttgatgatgcccagcttctcttccccgttaatgaaaactggtggatcaggtttagccacagcgccacgcaaccagctgaaaccgatcaacaaccagcccaagaagctatggacgccctgaagcatgcgtgtgctaagtccgtaattgagttacctctgcaaccgggagatattgctctggtaaataaccgtattgcactacatggtcgcagtgaacctgggcgtgaatttggtgggcaaacacgctggctgttacgtacctacgggttggaagtttcggatatcgatcccgatcaatggcataaggacagcgctttcatgttgtatccttaa

SEQ ID NO: 431770 - DNA, 789 bp, Serratia marcescens
atgcaacctacagctaacaccctaagtacggatacgagcacccaaactgcacgtttgcaggttgggttgactaccaaggtatcgctgcacgagttagtaaagaaagtagcaaagaagcgagcagtctcggtgacgaccgctgctcgggatttgttgcgagaggggttggataggtttgacaaagagtcaaggacgataagcccttctaagctactgatcgattacgagcgagaggccaacgattacgaaggtgaggcatccgaaaactgggtaatccgggccgaccgacgcttggtgatgataactcggttacgtgcaggggaatacaagtgttcgctttcgtcattcgcaaattacctcctcgctgacgcgttgaaccattgtcctgatgctgcatctgtgcgtgcggaatctgttggaactatgattacagatgaggctgttgcagaggctatccgggtaattgagcaagtcagtggggttaaggcacgtgctctggcccctcagatcgacctagggaaacagcgtgggctgactaacatgattttaggcggtacggttctggcacctgcacgagtgctttcgaagctttccagtaccttgaatatgcctttggatgtgatgttggttgcattggagcgccggtttgccacacagacggtaccatcattcaaagctactgacgccaaacctattgtgcaaacagaacgaaaggtttggagcgtggcggtcaaggagcttcagttgccaacagatgagcaagagcggctcctgaagttggagggctga

SEQ ID NO: 431771 - DNA, 3306 bp, Serratia marcescens
gtgagtccatttgatcgggcgcgacaacaagcatttgaaaccagagaagctttggtcggattgggcgattctctcggaggtgtaagttctactgaattattggctccggttgaagatgtacttgaaatcgcgatcgaattgctgccttttggccaccctgaactgggaggtggtagtggagtgttgaagcgagaaattcaaacagtctacattcgcaatgatctgcctcccggtgaaacagcctatctcatcgctcatgagttagggcattggtatttggacggcgatcgcccggcccagaccatttcccatctgagcagtatgactggatcctttggaagccaggcaacggtcgctgtcgaggcttatggaactcgagagcgtctggagcttcaagctaatgtcttcgcccgtgaactgttattgccgcgtaatgtagcatgtcagttgtttcagaacggtatgggtgctacgaccattgcggtcaatttgcaattgccgctagaggttgtacgtcttcaattatttgacggtgttttgctacctatctcgcatcctgtactacctccatcattgccgcctatgacgcaagggcagcagaatgcagctactgcctcagagacgtttgtcaacgttgttgctgggcccggtacaggtaaaacaaccacgttgatacatcgtatcaagcacctggttgagcaaggagctccacctagtcagatcctcgttttaacttttaccaataaggctgctcatgagctggtagagcgcctcaaggtttctggcattgcaggggcctccgatatatgggccgggacgtttcatgcttttgggctcgaattcctccgtaaataccatcagatatttgatctgcaatccgatattcggctcgcagacccgctgatgcaagtgcgtcttatggttagcacgctacccaagttacggctcaagtactacctgagactgcaaaacccttacgattggatccccggtgtcctcgggcatatcaagcgacttaaagaggaatgccttaccgccgctgactaccgaaaacgtctggctgttttgtctccctgttcgccagatgtggctaatgagcgtgaagatattgctactttgttcgaagcttacgaaacagcgatgcgtgcagaacatttggtcgactatgttgatctgattgctttcccttctgcacaggctaagcgggatcgggcatcagttgctcagtatattgatcatttctcacatgtgctggtggatgagtatcaagatgtcacagaggtgatggtcgatcttcttcgtcaattggcgctgaacgcgcagtcattttgggtcgttggggatgtgcgtcaagctatccaccattggcgaggtgcttcgatcaaaagtttgatggatttcgacactactttccggggggctattccgggcgctactgcgcagcgttacgctttggatattaatcggcgaagcactccagaaattctggggctattttcatgtgcaggtatctatcacgccttaaatgagcgagtcccgctggaacacgtcagtgcgtatcgtcagtcgagcagagttgtgcctactatgtacgaatgcgactcaaaactgtcccaggcggccactattgctcagcgtattaatgggctggttcagcggggggttccttacagagatcaggttgttatcagtcgcaaatctgcaaatgttgagcagattgttgaagcacttgaagctttgaatgtgccggtattattcataggagatgtttgtcagcgccccgagataaagcgattgctatgtttgatggaactactgtgcacacgccagccgcgctctttgctggggttgagatcagagccagcattttgcatgccctcacaggatatcaaacacctaatgttcctgacgcgcaaaggtgccggcttaagtatgcaacggggacggtggctatggttgcccacaccgggactttcgcctgctggtcagaaaattaaggacaaccttgctttgctcctgaaggggctcaaaagaagctccatgccgtgggattttgtatctcgggtattgctcgatcagcgttacggactgccaaggcacagtgaccagacgattcaggctcatacccaacgtttggccatttggctatttgtttacgccgtacgtaatggtgatggagatatacgccaggcacggctttctcagttcctgcttcgtgaagaactgcgccgcagaataggtgagaagcttggagatcgtggtttacccccagaggcgcgagtattagatgctgttagcgtcatgactgtgcattcgagcaaggggcttgagtatccagttgtccacgtgaccgatgttgatgatgcatcatacggtgctgaacgaccttatgcgtacgatgtacgagggttggctcttattcctcctgaggtgctgaacagcacagaatcggagtttatgttcgaggagagggtggagcgtaataaccttctgtatgtcgctctctctcgtgcccgtgattatctctacctgtatgagatcagcgggtggccgcgacctataccgctgaatcgtgcctcggcagcggttttggttaagcgcgctggggtcaaggtaccacccgctccagtaaggtcgataccgttagccagtagcgctgtgatccccacggtgagttatgaggcatttcagatttacatgagctgccccctgcaatttcattatcggcatgagctcgcattcactgctgaacaagatattgatgtatcgatccgtgctcgctgggccatcatggacatgttattgaccgttgtgagggacatggctgtcccaaaaacggcatttcaatccgcttgggattcctatcgtttgcctagtaaagaggaagacccaggcttgatgagtgatgccatagttgcagctaaacgcgggctgtcggtggttaggcgtttcaacggcactgtcgaagaaggcatggtttcagaagtcaacggtgttcgcattgagctcccttggatgcttgttgataaggagcgattgctctgggtccgggcacagacgggtattcagtacacccttaaccatctgcgtcccatgatgcttaatatcaatggggtgcgaagaactgatgtagatatctactctatcattaccgatcagcacgtttcgggtggcccctccaagaaagcagagagtacatcagtttacaagatggcccagcgttttgcagcaggagacagatctgcttctaaagggcggcattgcagtcgttgcgcttacttgagcatttgtcccagtatctcctga

SEQ ID NO: 431772 - DNA, 525 bp, Serratia marcescens
atgaaaaaagtgaattttctgctgttcggcctgagtctggtgaccaccgcggcgctggccaatctgaatgtgatcgccgatgtcggtggtgaagatgcttcgccgtattttgaaggtatcaaccgccaggagggggcacaatcgtctccggtcgtgccgccggtgccggcatctcctgctgataccgaggcagcagtgttgcctgtggcaacgccagaactgacgccaggcgatgtggctgacagacctctgcagttacccgggattggcgcgctgtttattgtgggtgatgacgatgaaagccgtatctggctgaaggcgaacgctgaaaaccttcaatcccggcacgccgcaggtcttgtcgttaacgtcagcaacttgcctgcactgcaggcgctgcgtgagatggcaccgggtgtgccgatggcgcccgcatccggcagtgaactggcgcgtcgtctgcagttggcgcattacccggtgctgatcaccgataccgggctgtcacaacaggttacgccatga

SEQ ID NO: 431773 - DNA, 597 bp, Serratia marcescens
atgatgtcggtacagcacatcgtcatagtcgctgcgttgatggtgaatcctgtgctgacggcggtgctgattgggctgtttgttgctgtcatggcgggactcaactgccgtggacgggagacagccagccgtcgccgccaccgccgttatcaggcgacggccgcaagggtgcttcagcgtttaccacaattggccggtggcgcgcagcgcctgacttacctgcgcaaaatcaatccctacgtatttgaagagctgttgttgctggcctgtgaatgccagggacatccggtcaaacgcaatgcctcatacagcggcgatggcggcctggacggtcaggtcatcattgatggcaaaaaatacttcatccaggccaaacgctatggccgaaccatcaccccctcacacatccaagactttggtgcgctgctgctgaaatctcggtgcgagggtttttttattcataccggtcgtactggccaccttagccgggcattgctgcaaaaccatacccacgttcacctggtcagtggtcagcgcctgctggatttattggccggtaaaccccgttggtacgaaaaaggaatcaatcgaccatga

SEQ ID NO: 431774 - DNA, 2115 bp, Serratia marcescens
atgagtaatcgccacgttatggaagcgttgctgcgcccggcagtcgaattgaatacagcgattgtggctggcaccgcagctgtcatttgttttgttgctccctggtcggtagcgctggcaccagaggtgagctatgtcaccgccggcagctttgcggtgttatctgccatacgagcccgtcagggcatgcaggtgatccgctatcgccgcaatctgcgccggctgccgcgctatgtcatgaccagtgcccaaatcccggtcagccggcagcggttgttcctggggcggggttttcgctggcagcaaaagcacacccagcggctgatggatacccgtcgtccagaggttgagaagtatgttcagccgccgcagctgtaccagatggcgcggcgcctggagcttaaaactgaatacaccctgccgttgttgtcccaactgctgcgcaaggattccccactcaacccggtacggccgctgccgccagtgggtggcaatccggcgatccacggcatcgaacccgacgagctcgatgtttcgatggccttaggcgaacgtgttggccacagcctggtgttgggtactacgcgtgttggcaaaacgcgcctcgccgagttgctgatcactcaggatattcgccgcggagacatcactattgtatttgatccgaaaggcgatgcagacttgctgcggcgtgtctgggctgaagcccaccgtgccggccgtggggatgagctgttcatcttccatctgggttggccggatatctcggcacgctataacgccgtcggtcgctttgaacgggtatcggaagtcgccggccgtatctccggacagttgagtggggagggcaacagtgcggcattccgcgagtttgcctggcgattcgtcaacatcgtcgcgcgtgccctggtcgcattggggcagcgaccagactacaccctcatcacccgttatgtgaacaacatcagcgaactgtatgagacctacgcgaaaaaggtcattgaaacgcatatgccggcactgcagcagcagatagataacaacctaaaggtgctgacggaggaggacgtgccgcgcaacatgcagggacaaccgaacgcggtcaaaatattcgcagttgaaatggccctgagctcggaagccggcaagcagctgtatgatcctatcctggatggactgcgctcggccgtgcgctatgaccgcacctattttgataaaattgtggcgtcactgctgccgttgctggaaaaactcaccaccggcaagaccgcagagctgctggcgccgaactacatggacatgaatgacccccggccgatatttgactgggaacaggtcatccgcaagcgcggcattgtttacgtcgggctggatgcgttgtcggacggtgtggttgcctcagccgtcggcaacagtatgtttgctgacctggtgtctgtggccggccatatctataaacacggcatgcatggcgggttgccgacccgcgcagacggcaaactgcctatcaacctgcattgtgacgagttcaatgagttgatgggggacgaatttatccctctcatcaacaaaggcggtggcgccggcatgcaggtgacggcttacacgcaaaccgagtcggacattgaggcgcgcatcggcagtaccgccaaggcggcccaggtgacgggtaacttcaatactctgatcatgctgcgcgtgcgagagaaccgaactgcacagctactgacgacacagctcccggaggtcgatgtctacaccaaaaccctggtgtcggggcacgctgatacggccgacgttgagaaagggcaggacttcacgtccagcacccaagatcgcgttggtacggtgaaaacgccgctgttgatgccggcggatgtgatcaacctgccgaaggggcaggcgttcgcgctgctggaaggcgggcagttgtggaaaattcggatgcccttacccagtggggatggcgatgacgcgttgatgccacccaacttgcagaagattgccgaggagatgcagcgcaactaccggaccagtgagtcatggtggtcagccagcacggtaatgcctgatgcggtcatgaaaggggggctgaatgtcgcaagcggtgaataa

SEQ ID NO: 431775 - DNA, 756 bp, Serratia marcescens
atgtcgcaagcggtgaataatcagcctcagcctgttcaaccccgtaaacatgggctgttttacaacgtgctgtggggctggccatggatgctgatcgggatgttctttgcttcgttgttagtgagcctggtgattgaatatgtcgggatggcattcttctggccagagctaggcgcgtcgcacagtgaagcggtgatgcataccgaaatggggtatctgtcatcggagtttacccgcagtctgatgttgtctgagccgtcagtcaccgtcacgcggtggattggccaggcgtatcagtgggccttcgtggacagcggttttttggactggatccaacgtgcctatgattcgcaggtgtacagccagaatgcggtggcccgagagctgaacagttggagtggctggctggccgccacgttcaaagagtacctggtggcgacggtatatgtcaccgtcatcaccctggtgcgggtgaccattctggtgctgtccatcccgctgtttatcctggtggtcctggttgcgctgacagaaggcctggggcggcgtgatatccgtcgttatggtgccggctatgaaagcagctttgtctaccatcatgcgaaacgaatggtaaagccggctatctatattccctgcatgctgtatctgtcctggccgactgcggtgtatcccaatctgctgctgttgccggcagctatcctgctcggtattgcagtgaccgtgaccacagcctcattcaagaagtatttgtag

SEQ ID NO: 431776 - DNA, 555 bp, Serratia marcescens
atgagtgttgaaagcggaagtctggcgttagaaataggacgtactattttatatgtccttatgccttttgcaggcctatttaccttaattatgatggcacagacaatagaaattatttactacagagaacattataaaagaacaataataaactcaattaaaaaaaacacattaaagaaggaagatttatacatatttctaaaaaagagggatataacttataaaccattagaccgaatactaaggcaattatttgaaagttcgctaaaaaatgaacctacaagtgtacagacacatcaactcagagatcttatcttgtggtacgaagaacaagagggatttactgaaatccccagagatgttagggaaaatcttgaagtaattcaaaaacaaagcccagaggctaggtaccaagtcaatcgattagctacgagtttaaaagatctctatcgtacacaggcaattagagaaacgagattacgttggttcagttatttctcaggcacaatagggataattggggtcatttatggtgtcatacaatcatggcattga

SEQ ID NO: 431777 - DNA, 330 bp, Serratia marcescens
atgcctatccccgttgtccgtggtctcggtgccggctgtttgctggggctgtcattcctcaccgcattgcctgcctgtgccgccgaaaaagatgagctggcgtctgcccagcgcatgctggttcaggtgcaggtggcgcttgaacgcgcgcgcgttgccgccgttcaggccgacccgtccgagcgtggccgtttcttctttgactatgcccgcgccacgtccgatctgaaaaccatcaatgccggtattgaccgctacctcgagccctcgcgcgctcaaccgcgtgatggcagcgcggtggccggcaattaccgtcgggagcgtccctga

SEQ ID NO: 431778 - DNA, 243 bp, Serratia marcescens
atggccatgaccggtgcacagcaacaggccttcaatgcggccagcgacggggttgaagccagcatcctgtcgctgatctgcatcggcggattgctggcgacgctgtttgtctgggcggcctgggcgctgaccgatatctggaaagggtggagcaaccaaaagatccgcaacgcggcgatggtgcagtttgccgtcaggctcgtgctgctgctggttgtcgtcacctggatgtttgccaactga

SEQ ID NO: 431779 - DNA, 366 bp, Serratia marcescens
atgaatgctgtagttcgtcttttccgtcatttatctgcgcgtgtcgcggtggcgacttctctggcctatgccgccagtcaacctgcgcatgctgccctgccgagcgttgagcctccgtcttccggcggtggcggtggcctgatggatacgctgaaaggctatctgcaggacggcattgtgctggtcggcctggtgttggccgcggtggcatttatcgtggtggcccagtcagcggtctccacatttcatgaagtccgtgaagggaaaaccaactggggtaaattcggcgcgattatcgtggtcggtatcgtgctggtcgtggcggttatctggctggtcggcaagtccgctgaaatcctgttctaa

SEQ ID NO: 431780 - DNA, 1497 bp, Serratia marcescens
atggctgatgtgaaatctaacatgctgccgaaagtgattgtggtcggcgtgctggctgcggccgtggttgttgggctgaaagcctgcagcagcaataaaacgacggaaaaaactcagcagacgcataacgtgctggccaacatgtcaccggaggagctgcgcgccctgggcgttgaaggggacaccccggaagacacgctgcgtaccctggtcggtaccctgcgcactacccggacccaacaggccgagctgcaaagcaacatcgacaaagtgttgaaagaaaacgaagcgctgcgcaaacgcaataccaatgtctcaggtcaggtcaatgaggctgtggccggcttccagaaacaggcgcagcaacgccagcagcagctccagcaggagcagcagacgctgatggggaaaatccagacgctgaccgaccagttggccaggaacaaagacaaggcgaagagcgacagtgatatcccgctcggtctggggctggatggcatgggcgccggcgagggcagcgcagcgcctggtcaggacgggttgatgtgggtcggaccgaaggacatgaaagaacccgatccgcgcaatccgaacagtgccaaagagggaccgcagttcccgacctccttcctgtctgacaacgcgatcacgcgtcaaaaagccaaatatgaacagcaggtgaaagggcacaccaacgaaaaaggcgaggaagaaggcgctgagccggtgtttaccctgcctgagaactccacgctggtcggtagccgcgcgatgacggcgctgctgggccgggtgccgatcaacggcacggtaaccgacccctatccgttcaaactgatgattggcaaagacaacctgacggcgaacggcatcgagctgccggacgtggaaggggcaattgtctccgggacggccagcggtgactggacgttgtcgtgcgtgcgtggccaggtcaacagcatcacctttgtgtttgcagacggtacggtgcgcaccttgccgcatcctgacaccaacatgaaggccaacagtaacaacaatagcggtaacagtggcaaagacgtcagcaccacggccggtatcggctggatctccgatgacaacggcattccctgcatcggcggggaacgtaaatccaatgcctcgacctacctgccgaccattgccgcgttgtcggccgccagcgccgccggtgaggggatcagccaggggcaatacaccacgcaaaacaatgtcaatggcatcagcgccaccatgaccggtaatgccggccaggcggtgctgggcaaagccctgtccggcggaatgaaagagaccgccgattgggtacgcgagcgctacggcatgatgttcgacgccgtctacgtccctccgggccagaaactggccgtacacattacccgccaactggcgatcgattttgagaccaaagggcgcaaggtgcgttacgacttcagcctgccaggcgaagacggcagcaccggcggacttgattaa

SEQ ID NO: 431781 - DNA, 126 bp, Serratia marcescens
atgctgtggctgtggcggcaatgcgaaaggatgagtcgcccacagggctgggcgttcattttactgttctgcagcgcgttttggctgagtgtgctgcttctgctgtgtttgcttataagagaatga

SEQ ID NO: 431782 - DNA, 2868 bp, Serratia marcescens
atgcgattttccctgtttgataaaaagcgcctgacgcgcaagaagtcgtcggtaccggaggcggttgcccaggatacattgactgcgaccgaggatggcgtgccgctgtccgtagacggacgtgagccgttacggcgacccggcaatatgacggtaaaggatgagcagcaggtgtatcacgccaatccgtccatcgttgattacctgccctgggcggaatttctcgaccgcgaacagtgtattttgctcgatgatggggtgtccgtcggggctgtttttgacatcacgccggtagcgaccgaaggacgcactgacgatcgcctggagcaaatgcgcgacacggtggaagacgccctgcaggactcatttgacgagcatgacgaaaacccctggatcgcacagttcttctgccaggacgagaacaacgtcgaggcgtatatcgaccgcctgagaaattacgtcaaaccccatgcccagggcagcgcgttcacagaagactggctgaaagaaaccgaacgtcatatgcgcggtatcgctcgtccggaaggtctgttcaaggacacgctgatcaccgatcagccatggcgtgggcagcaacgtcgtacccgcatggtggtgtatcgctggattggcaagggcaatcatgatccgatgccaccgatcgccatgctgaatcagacatgtgagcgggtgaccggggcgctcgccagcgccggcgtgatatgcgtacgtcagaacggggcgcaggtccatgactggctgctgcgtcattttaatcctaacccggagtgggtggaaaaagagaccctgtatcgtgatgccgcctattttgacagtcgtgacacgccggaaggcgccatgccggtgcagaatgattttgccgagaccctgctgttcaccccgcccgtgtccgatccggatcagggggtgtggtggttcgataatcaggcgcattgtgccattccggtcgagaagctgcgccggccgccagagccgggcaccctcaccggtgagcagaagcgtggcgagaagaaaatcaacgcgctgatggatatgttcccggaagggacgatgctgtgtatgaccattgtggtccagccgcaggacacgctggaaaacgactttaacaagttgtccaagaacgccgtcggtgagaataccgaatccgggcgagtgcgtcaggacgtggcacaggtcagggaatacctgggtaatcgtcacaagctgtaccgtgccggcatcaccttcttgttgcgtgccggcgacctgaccacgctcaatcacaaacgtgtcgatctgaccaacgtgctgctgggtgccggcctgcagccggtacggccggagtttgatgtggcgccgctcaatacctacctgcgggcgttgccgatgtgttttaacccggaatcggacaagaaacactggtacacccgcctgacctgggtacagcatctggccggcctgttgccggtgaccgggcgtgaaacgggaacgggcaaccccggactgagttttttcaaccgcggtggcgatattctgacggttgacccgctcaacaagcatgaccgcagccagaatgcccatatgctgtattttggcccgaccggtgcgggaaagtctgcgacattgtgtgccactttgacgcaaaccatggcggtacatcgaccgcgtctgttcattgctgaggcaggtaactcgtttgggttgttggcggattactttgaaagccaggggctcagcgtcaacaaggtgagcatcaagccgggcagtggtgtctcgctgccaccgttctcctacgcgcacaagctggtcgaggacgcgttaacgacgctggccctggatgaaaatgacctgccggacatcgatgctgatgttgacgaggaggatgacgaaaagcgtgattacctcggtgagatggagatctcggcgcgcatgatgatcaccggcggtgatgcgaaggaagagcacgagctgaagcgtgccgaccgggcgatgatccgtgaagccctgttgatggcagcgcgtcagacctatgacgacgggcggcagatgttgccggcagacctgcagcaagcgctgtacatcatttccaaggatgaagggagtgatatccgtaatgagcagcgccgggccaaggcggctgaaatggccgagtcgctcgggatgtttacccaggccggcagtttcgaggcggagctgtttaaccgcgaaggtagcctgtggccagaggcggatgtcaccctgattgacctgggacatctggcgcgtgaggggtatgaggcgcagatggcgctgacgatggtgagcctgaccaacaccatcaacaacattgccgaacgagatcagtactcggagcgggacatcgtgttcgcggtggatgaagcgcatatcgtgacggtaaaccccctgctggcgccgtacatgaccaaaatcgtcaaaatgtggcgtaagctcggcgcctggctgtggctggccacacagaacctgaaggacttcccggacattgccgagaagatgctgaacatggcggagtggtgggtctgtctgaccatgccgccagaggaagtcaacgacattgcccgcttcaaggcgctgaccgaggagcaaaaagcggtgttgctgtctgccagtaagctgtccggttgctataccgaaggcgtggtgctgtcgaaaaaactcgaggcgctgttccgggcggtaccgccgagcctgtacctggcactggggatgaccgagaaagaagagaaggccgagcgccgcgcgctgatgcaggaatttggttgcagcgagctcgaggctgcccgcaaggtggcgcaaaagcttgaccgtctgcgtggcctggcggcgaacggggaggcagcggtagcatga

SEQ ID NO: 431783 - DNA, 405 bp, Serratia marcescens
atgatgaccctgaaatacccggaacctcttgttcggccgcatggccagatctgtcgtgaaccgtcgttgttcacccttcctccgcagggcgtggccaccttaagtgaaacggatgcgctggcgttggagactttctgcgtggctatccgcgatcggctgttggggccggtcacactgactgcccacccacatcgcatcgggagccgtaccagcgtggcgctgcatctcgaggggcgactggggcgttgcatcgatgtgctaatcacagtgaccggtagcacgttgtggcccctgccagaggagtatgatcatccgcgctggtatgtcaccgtaccggatgctgctgatgcggtgtatctgttgctccatctaagcgatttgtgcgagcgatttcgggttaattaa

SEQ ID NO: 431784 - DNA, 2571 bp, Serratia marcescens
atggacgttcaagacgaaattcgttcgtggttattaggacaacaggaatggtttcaagaagcagccgatagactcataaataatggtccattaactacaacggatttgtcagatctcgttgcactgttgaaaacacctgaaggtcaaaaggtgactaaacaccgcacctttgcaagtctgatgcaaccctcacttttagttgaagagcttcgtttaacacgtattgaaggtgtttatggtattgaaaacctagggccacggcagcctttggacttcgggacgggaaatctgaccgtaatttatggtcataatggctcaggcaaatccagctatacacgagtattgaaaaaagtttcaggtaagccacgagccattgacttgaaagcaaatgtgtttctgcaaccaccacaggaacgcaaatgccaaatcacgtatcaattgaatggtgtaactagcactaccgaatggcacgtaggaagcacgccaatcgaggagctaaagaccatagacatatttgatagtgacgaagcaaaccattatctaagcgctgaaagtacagcgacctacatcccttcgatcgtaggattgttcgaaagacttgccgcagaaattgagaagatcagagcgctgctggatgctgaacaagcaaaacttattagctcattaccagctctcccccccatataccaacagtgtgaaattgccagtacttataaagtgctagctaacgcgacccaagctacgattgctgcaattactaattggactgctgaacaagaacagcaactcaaagacttagatgaacgccttaaagctcaagatcctatagcgctggccaggcaaaagcgcgcgactaaagctgaagtacagcaacttattaccaagctcacacaaacctcaagggaatatgggattgataatttggaggcaatccgagccctcagaaagtcggcaatagaaaaacgaaacattgccattgagagtggtaaagtacaggcctcagtacttgatggaataggtacgccgtcatggcgtgcaatgtgggaagcagcaagagaattctcagctataccttacccaggttcacaatttccagttacagtcgatgcccgttgcattctttgccaacaagagctcacaacagaggcacaacaacggcttacggacttcgagacatttgttaataccaagctcgaaggggacgcaaaaactgctgaaactatctatcaatcagcattaaaacagcttccttctgctatcactgaacagcaagttcatactctatgtatcgcaacaggtctgtcagatgattggaaaaattatctctggaaaatttggcagcatacctcacaatcgcttcttgcgttacagtcccacgaaaatactcaacgtgctcaaccagttgaagacctgagggaaaatttagccaaccttgtaacttatcgtgacagcttagaagctcaggctattcagcatgaattagatgcacagaaattcgacagagttaaagcaagtaatgaaaagctcggattagaagcgaaaaaatgggtagcggagcaaaaaggtgctattgaaaccgaggttgaacggttcaaaaaacatgcggcttatgatacatggaaagcacttacaggttcccgacctgtgtcactgaaatctgcggaaataacgcaaaaagtcgtcactgaagcatacgttgcaagatttaatcgcgaactacaatccctcggcgctccccggatacaagtcgaactagtaaaaactagaacacaaaatgcccgggtgcttcaccagctacgcctgaaaggtgttcaaaacgacaaacctcagaatatactcagtgaaggtgaaagaagaattatttctcttgcagcttttctggccgatgtttcggacaaaccaggcgctgcgccatttgtatttgacgatccaatttcatctctcgataatgattttgagtggcatgtagcctgcaggctagttgaactagccaaaagtcggcaggttcttgtccttactcaccgactatcgctatatggtgcattggaagatgtggcaaaaaaagctggagaagcgtggaaggatgctcattatcaccctatgtgtatcgaggcttatgcaggcatcgcaggtcatccggcagcgcaagacgtctggaatgcgaatactaagaaagccaataatattcttctcacgcggctagatgccgcaagaaaagccggtgaagctgggggtggggtagcatatagggctttggcccaaggagtttgcagcgattttcgtaaactggtagagcgctctgtagaggaagacttactcaataaggtagttctacgacatcgaaggagtgtgacaactgatggccgtcttagcggagttcgtcaaatatctgtcgaggactgcaagttgatcgatgatctcatgaccaagtacagttgctatgagcacagccagtcaaccgaagtacctgttataattccagaagagccagaacttcgcgctgatatcgagtcgctcaagacgtggcgagataatttgaaagccaaacgagataaaatcatcacagattag

SEQ ID NO: 431785 - DNA, 405 bp, Serratia marcescens
atgaaaatcagcacgttgctgacgttgttccctctgctgatgccggcgtcggtgcttgccagcacggtactctataccgattcccaccatcccccgactaacgtcgatgcctcggtatccgttatttaccttgacggtcctgaacagctgcaggcgcagacatttggtgagctgtcgtcgaacccggatgaagccgaacgccaggctaaagccgtactgcagtcaccgcaatggctggctcatgaacaggagctggccacggtctaccgtgcggtggtgcgtgcctgggaactgggcgtgacaaaagtgccggccgtcgtgtttgacgatagggaagtggtgtatggcacggctgacgtagcccaggccgtggcactgcgcgcccagtcatcgggggggcagtga

SEQ ID NO: 431786 - DNA, 1008 bp, Serratia marcescens
atgcagcgaacccctttttatggtgtgcctgcggagcaacctcgccttacccttaaatccttcagtgtggccatgatgttgtccgcggccagcgtgccggcagcgaacgctgcactcaacagcgcgcagattgtcgcgagtgctgtatcgcaggcttgtatcagctggcgcgtcagcggcatttgttattggctgctgtgtacgccgtttggctgcaaggtgcggacctctgtcaaagtcacccactttatcccggaagccgtggtgtcggcgtacaacactcagggaggcaatccctggcgtgaaatgtcgatggtgagccaggctgccggcgggctggaaagcagtatcaccagcgcgctgagtggcgtgtctgccggcggtggtaacaacgagctgaaaacccccggggaacgtaaaaccaacctccacttcaaatatgccgatgccattggtcatccggcaacgtccctgattggcggcagcattgctggctattcgtgccgcagcgcggcgaccccttttgtaccgtatttcctcagcacgctggacagcctggcgtggcgtaccggtattcccgaatccctctatccggaggcattggtgccggggatgcgtgaggttggcagtcaggcggccgcgaatatgtggggcaacgtctatccccgctccgggtttgtgacccaggttgatgacgacaaggccggtgccctggtggcgcagcgggtggcggacatcatcacccgttctggtcagccccacgtctatcaacccctgatgggccagcgctctgaggggtactggcctccaggtgcggtgacggagaacaccggtaccaacaaccacaagtggcagcgcctttccccgcaactgagccaatcctgcgcagtattcccggacggtgaccatccgccggcagcggatgcgaacgctgcctttgccctgtggcaaccctacagctgctgccagcgccgcgggcagcgtttcctctccagcacggacttttga

SEQ ID NO: 431787 - DNA, 1485 bp, Serratia marcescens
atgaataacacgatgaataaacgcattttccgaggccggcgcagcctgctgtctctgttggttgtcagcagtctggcactagccggcatgaacgcgcacgctgacgacaatgatgataacggtaccttgtttggcatttcgttgccccaggtgaatgacagcaatatcggttacgggaagagcgccagcggcgcggtctcggacaagctgttttattccctgggcggtggctcggtgatctcacagccggcgacacgcggcaacatgcaacgcttgggcatgaacctgggctggagctcggatttgatgtgcggaaacttcgatctgaaaactacgattggtaaccaactcaacggcgtaacggatgggttcaagaacctgatggggactgttattcaaggggcaactggtgcggtggccagcttaccggcgatggctattcaacgcgccaacccggggttgtatgaaatgctgactaacggagtgctgcagggcggcgtcgcgttcgacaaggcgcagttgaactgtcagaacctctccaagcgcatgatggacatggcggataccggcggctggagccaggcggcagcgatggaggaagccaagagtctggtcaataacggggacgcggatgcggtgcgttcaatgaacgcgacggagaaggtgaccgggcaatcggggcagacctggatcggcggtcagaagcgaggtggcgccggtcagccggccatcaaaccgacgcacgacctggcagctgccggctacaacatgatgaatgcgatgcccgtcaccagcacctccagcgtgtctggcagcaactgcactggcggcgcctgtgccaaatatgccagtagcgaagaagcggcggcagcagtagtgaaggtgctgggcgatacctcactgcgtacctgtaaagatgcggcgcaatgcaccagtggtgaaggcagtgagcaaccaggtagtaccgtggccggcaccggttttgccccgatgctggaagaggcgactaaagcaaataacgagcagttggccaaactggtcaacggggcagagaaacccaccacggccaacctggccaagctcaaaacgggtagcctcgctgtgaccgccggggttatcaaggctctgcagcgtgacccggataatgctgccctggtaggccgtctggccagcgaactggcaatggcggataccattgaaaccgccttcattatgcgtcgcatgatcactaccgggatgtccgagcccaatgcctccgcacagaaagtggcgatggaagagggggatcgtcgtatcgaggcgctagaacgtgagatcactgcgctcaagaatgaaatggaaatgaagcgcgagatttcccgtaacgcggtgctgaccatcatcgatcgcgagaacaaccgagcggaaactaacccgcagcgccaatcggttgacagcccggacaccaagttcaatcaactcgccgtaccagaaagcgaccagtaa

SEQ ID NO: 431788 - DNA, 348 bp, Serratia marcescens
atgtcgccccgcaggggcggccggctcggtcaccgggcaaagcgtgtcctgcagatgctgggcatgcttgtgattgcgatgatagtggcgctgggcatggcccactggggtgtcaatcacccaggagagagtgccgcgctgcgtgactgggtgcacagcactcgttatggctggctgagctggcgtctggtgctttacgccgtgctgacctggggattctggaaaatctggcacgcgccgggctgcaaaccggaataccggcagcccctcaagcgcatggccatcgcgtgcgcggtatttgccctggcatgtgaatacagcctctttggcggagggctgaccttatga

SEQ ID NO: 431789 - DNA, 1524 bp, Serratia marcescens
atgatgaccaacagctatctggagtatttcctgacgctgctcggctggctgattaacaacggcctgtgggagctgctggtcagtacggggctgtttgtgctgcctctgctgttcaaggtagcggccatctggctgaaggtccgggaggaaggtgaggatgagggcaacaaagggatgctgtccctgccgcgcatcgagaacttgctctacggcgcgttcttcgtgatgcttgcctgctgcctgccgctgatgaatgtcagcctggataccatcaaatatgacagcagtcgggcggcaacctgcggtacctggacacccaaaaagccggatgaaaccgggtacgccaatatcatgtcgagtatgaacggccaaacggcgaaggtgccggtgtggtggttggtagtgcataagctgtcgaaggggatcacctcggcggccgtggccaccattccgtgccggccggatctgcggcaggtccgctttgaggtccagcacagtcgggtcaacaacccagcactggcaaaggagctgcaggacttcactaacgactgctacgcgctggcgctgtatacctggcagaaccgcgaccaggggcaaacgaccgacaaaaccacgttgcgtgatatcgagtggctggggtcgaaaaccttcctgaatggtggctactacaacaatctgcagtcgaaaacgccgcgcgccagtttcccgtggaatgaagggcgggacagcggtcggccaaacaccggacggggtgggtacccgacctgcagcgagtggtggtcagccggcgagacgggcctggaggccagggtagtgaagcaggtcgatccgggcgtaatgctgcggatgtcggccgcgctgaagatgatggggcagccggatgcggactataaagaggcggtggtgcgccgcctggtcagcccggataacctgacggtctcccagggcggacgggcgtatgccggctatggcggtaatgctgactttaccctggacaactcggttaaccgtattgcctcgatgggtgggaccgcactggggagcctggcggcgtatccggcttttgatgctatgcgtcaggcgctgccgatggtgcaggcggtactgttaatggcggtgtatatcatggtgccgctcatcctggcctttgcggcctacgagtataagacggtgatcacggtgacattcgttgtgtttgctctgaatttcctgacgttctggtgggagctggcgcgctggctggacagctggctgctggaagcattatatggctcggatacacacagtcgttggaatgtagccgggttccaaaacagcacggatgacctgattatgaacctagtaatggggtgcatgtttatcgtgttaccggcggtatggttaggggcactttcttgggcggggattagtatggggcatgcacttggccaggctatcagcacaggaactcaagattctaaagctgcaggtagtcagttgggaagtgcggcgggaagtgctattacacagcaagccagtaaatga

SEQ ID NO: 431790 - DNA, 3435 bp, Serratia marcescens
atgttaacaaaagtaaaaccaataagcttattcgtcagttcattattgttttcatattactcaccttctgctttaggggctccagccccagtaaccattcctctggggcatttagataatcgtctaaccattaatgtcggcgtcaacggaggccccgcgcaaaaatatatttttgatacgggttcagatcagttcaacgccgttctcgggcagcaagacacctctcgctggccgaatgtgaatcaggcatacgaatacctctatggcaacaagggctggggcggatattggttacagcgcaagcaaataacagacctgacctattacaccaatgatgccaccccgataccggtagcgacgcccgacagcaataataaaggctacgtcattggtcaggttgaacatctgttgctcgaccatccccagcaagcagatcaaaagccgtttaaagtcatagaggggaaaccttactatattgatttagctgcggaaaaaaacattaccacaggaaaaccgaccgaagaaaaacacttctacggcacttttggcgtaggggattttctttttacggatgcaaaaggcaatcccaacggcggcagcccctttagcaccatcacgaaaaccggttttatcgtcgccggtaatgacaatgccaatgataatggaacaacgctttcaccgggttgcgcaccttgtgccatcctcaatttgacgcccagcctgcgggcgcagtttgataccctggtcccttgggcaccgacgcgcagtgaaggcgacataacccatttccccaactctggcgcaccggcgtcatcgcaacatgaaggccgcttcaaatacgccttcacactcaatatcaatggtcagtcgagcaccgttgaacttcccgcagaggcgctgagcggtgcaattttattcgatacgggtaatcctactcacgcaacgatagacagcaaaaaattcggcgacatcctcgaacagaatggcgtgaaatttgacaaggatggagaaaacaacacgtcggtgaccgccctgacgcttcagcctgtcgatgccaatggacagaaagtcggcaacgggatcactctgcagggagccggtgatgatcgcctggttatcgatcgtgacagcactgacaccgaaacctggaacatcacgatgggtataggttttttcactcaatattcagtgatgtatgatttgcaacaccagctcacggcgtttacccctttcgtcgtcaatgccgataatttttctacggatgccaacggcagcggattgcaccttaaccgcgtgaccaggcaaatgggaaatctgatgagtgcccctgccggcgatccgtcgggtgaccctaatggaggaaaaggttatcttgggttggcgggcgccatctccggtgccggcgacttaacgctcatgccggatgtggtggtcaacatgaccggcatgaacacctataccggcgtgacccgggtgaataaaggtgctgtgttatatcttaccggccccggcagcctcgcccactctgcatctctggaaaataacggttggtttgacatcactgaacacggtaatttcaatccgctgtggggcgttccagacagcatgaacaacgtcactctccgcagcttaagcggcaatggcgtggtcacgctgggggacagaacgctggtgttaagccaggcgaaggataatttctcgggccgtatcacagacactgacctcagtaatcctgacggaacgcactataaaggcggcctgacaattgcgggcggtagccaaacgctcagcgggaataatgattacaccggccagacgcggattgccaaaggcgctgtgttgcaactgaccaacaccggcacattagccagcgatgtcgcggctgacgggctctttatcgccaacggtaaagccgccggcgctactgtggtgcgcgacggcgggctggtaggcggcagtgggcatatcggcacgctgacggccaatcaaggaggctcggtggcacccggtaattctatcggtaccttgacgattgataacgatctgacgctgggaaatggctcccgttatctggctgaaattgaggctggtcgcagcgatttgctgcaggtcaatggccaggcaatactgaacggcggcgagattgccgtggtgccgcaagcggggcaaaacctgctggcttcaacatcctccgccggcaatatcctggcacagcgttataccctgcttactgccgcgcaaggtattacggggcaatttggctctgctgacgcagggctgtttttaacgcccgatctggtctatcaggccactagcctctcattgggtttacaacgtaacgccacccgttttgcggatgtcgccgtcacggccaatcaacgtaacctcgcgacggcaattgaacgcttaccggctgataaccccgtgtatcaaagcttgttggtagccccttctgcggaactggcgcggcaagcctatcgtcaattgtccgggcagatacacgcggatatcgcctccgcgctggtgaataacagccgttatgttcgggatacgcttaacggccgtttgcgccagactcaaggcgcagcggacagcggcgacatcaaacaagacgaggacggcgcatgggtcagtttgctgggcaactgggagcacgccagcggcaatgataatgccacgggcttccacgactccacctttggggtattgctcggtgcggataatgaactggccgatcgttggcgtctgggcttggccaccggttacacccgcacctcattgcacggagacggcgcatctgccgacagtgataactatcatctggccgtctatgccggcaaaacctatgacaacctgaatctgcgcgcaggtaccgcctatacctggcaccggattgaaacctcccggggtatcgggtattacggccagtccgataacgccaaggcacgctataacgcgggaacaggccagatcttcgcagaagcgggttaccgtctggacaatacctggttcaatctggagccgttcgccaatctggcgtgggtgaattaccgtagcgatgatatgacggaaaatggcggtgccaccgcattgaaagcagacagccagagcaccagcgcaacattatccaccctgggtatgcgtgcggacaaacgctggagtaccggtaaagacagcgccgttaccctgcgtggtgaactgggttggcagcatcagtacaacgctaccgaacgcgaagtcggcttgcgctttgccggcactgacgccaccttcaataccgccacggtcgcagcctcacgcgacggcatggtgatgaaggcgggggcagaaatcaacgtcacaaaatcggttgccgtctccctcaactacaccggtttgttatctcagaattatcaggataacggtatgaatgccggcgtggtatggcatttctga

SEQ ID NO: 431791 - DNA, 339 bp, Serratia marcescens
atgaaaaacagtaaacttaaattaataggccctttgctccttgcgctttctttttcaataattcagggctgtaccaataccaacgaacctcaggttatttccgcacttgacgataaaccgtttaatgactggttcaacaagttgttaagccaaataaaatccgatcataattacaaacgcattccgattgataccactgaaaaatcagacgagtttcttattttattgcatgatacttatcgccataaaatcacaaagaaagaattttcacagcgaatgattagccaataccctggacatgattatgaaatttcatttattacatcaagactaccttaa

SEQ ID NO: 431792 - DNA, 744 bp, Serratia marcescens
atgcatcattttaaaattttctgtttgttattagcaataactatacccacaagtgctttctcaagcagtttttccctgggggtgcagacagagttggcaactcaggcatacaaagccaaacgtacacatttttatgccattccctatgtgggctatgacaatgatgtttggtatgtcgacggtattgaaacagggttttacctactgaaagatgccgaaaatgaactgaaattgaaggcctactattactatgaagacgcttaccgtcctgaagatggccacggtgaagcgatgaaaaggcttaacaaacggcgtgcaactgtcatgtcgggcatcagttaccaaaggatcactccgtggggcgcgatatttacccaggtcgcggcggatacgctaaataatagcaagggtgtggttgcaacggcagcctacattggcgagctcaatgtcaattctgtgatgctttatggagaaatcggtactgattggtcgaatgcacaacaaacacgttattactatgggatctcccaagaagaggccgagcgcagtgggcttaatgaatatcgtccacatcaaagcctaacgccgtttatcatgttggcagcagaatacaaattcacccagtattgggaaggttatattgaatcccgttataacttcttatcgaaaaccgtgcgtcatagcccaatggttgatcgcgatggaacgtataactttgtcattggccttaactataatttttaa

SEQ ID NO: 431793 - DNA, 1131 bp, Serratia marcescens
gtgtcaatcttctctaacaagattggtatcctgctcgctgtgatgatttttggcttaacctatggtcttagtgcaccgctgatcgccattaggttggtcaatgaagggtatagtgaaatctttgtgggcatcaatgcggcgatgcatgccgtcggcgtgttcattgttgctccattcttaccggtactgtgccggcgatttcatgctaagacattgataatattttcattatttatctcatgtctcgtgttgtgcctctttcccctcacatcttttgcaacctggtttgtgttgcgccttatgctgggcgccatgagcgaaattatgttggttgtgactgaaacctggttgaactttatggctgaagaggcaagccgtgcacgaatcattgccgcttatactgccagcttgtccacaggttttgctcttggcccactcattttagtgtccgttggcagtagcggaaatacggcattttatctgggggccgccatcgcattgttggcggcagtcgtagtcactcgctctgcagtaaggccattcccagcaggcgaacaacatcaatccaaaccggtgctgatgtatcttagtctggcacccattgctatagcggcaacggttctgaatgcaggtctggagtctgcaggtctcaacttactttcggtgtatgcaatgaatttgggttgggacgaacaatcagcaacttcattgatttctgttttattgattggggcaatattgttacaactgcctatcggttgggtagcggataaatacaatcgtcagtggttaattgtcatcatggcgggtttatcggcctgtggggcattgttatggccaatatcgcttaattatccctggatggcatacacattactttttgtgtgggggggagtatttgtaggtatttatactgtggtggtcactcttgtgggcgaacgctttagtaacggtgaattggtcggagtttatgctgtattgtcgattgcctggggcgttggcgcattggttggcccaatgatgggtggggtagccatggagttgaacacccacggcctaccgttgatggctgcgttgctttgcggtttgtttatgttgtttacccttaagaatgccaggcggggttgctaa

SEQ ID NO: 431794 - DNA, 1401 bp, Serratia marcescens
atggttcagttggtaatgattttactgggggttgattatttacgtaaccgctggcgtgggttgatgattgccggctggttaggtgtgttggctggtttaatcatcttcatcgatgcgttggacaacgcgatttatttccccttgcatccctttgctttcctgttgttggtcgaaggcctggcaacgttgatggttgcacataccggcatcggcgggcaacgtaccttgcgttacgtaaaaggaggggcattctcactggccgcgatattgatcttgagcgggcatcaccatggtcattttattttatcgatgatttttggcattttatttttgaccgacgggttattgcaaatcgtcaccgctggggttgtacgctataaaaactggaaatttgtcgtcgccggaggtgtcatcgaaatcatgttagccattttcttctttcaaccctatccgacccattacgtcggcaccgtcccttattgtttaggtctggggttgatattcggcgggtggaatatggttatgttggcgatgcgcgtcaaaaagctcgaggtcaatcccgcggttttgggcaatatggccgcagaggaagccagcagtgcagaaacggcgccgttggtcactgaatgggacggccctccggctgccgatgaaccggcactgaccatacatgtctggacacctgtaggatcttcgaagagtgcagtagtgcctcatcctgtcattgatcgttatattgctgcggtggataaaaatggggtgatttccaccggccatgctgcgctggaatccccggagggcgtctatatcagcctgtatccggcagtcgatattgaccggtcgcccgatcaatttacccgcttgctgcgggcaacggcagataataatgtcgaaggggagtttcaaccggattatgtgactgaatccgaaaaatggtgcccttccaccatgcaggtgcggatcaggaactatgatgctgaacgtttgaaacgtttctgggaaatttatcgggcagacaacacctataaccttacgcatcgtaactgctcaagcagtgtggcgcgagggctggaagcggcgctggaaggtgtggtgggcaagatatgggggcagcgtgggcactggtgggtgttgagtaaaattctcacgacgccggagttatgggtggcgatacaaatacgtaaacgcgcaaaaacgatggcctggacgccagggctgacgctcgactacgcacgtgcattaagcatgttggcagatccccgaccggccggctggataaccaccatacgccgtgccctaaagaaaatgttttctttgcgcaagcaatggcgcgatgagaaagcgcagagcactatagtgtcagatgctcaccgtgaaccctcaaatggcaaaggcaagtag

SEQ ID NO: 431795 - DNA, 786 bp, Serratia marcescens
atgggaatgtttccgcggttgacttcaccaatagcaagcaacgagcaagactgggtattggaatatgcccggttaccgaaggtggagtggggagagcagggtaaaattgtactgcgcaatattcgcaatttcagatatcaacccacccgcgacgattatgtgcctgattggtacgatgcagatatcgatattagccagttaaaaacggtagatgtggtctcctcttactggtcaggtaaggctattgcacatctgtttttgagcttcggtttcgaagacggtcgccatttggctgtctcgatagaaacgcggcgtagccgcgaccagcgatattcgacctggcgcggcttttttaaacattacatgttgacctatgtgcttgccgatgagcgggacttgattggcgtcagaactgatgttcgcaaagagcgggtttatctttacccccttcagatttcgccagacacggctcaggctatttttctgagctatctgcaacgcatcgatcaactgagccaccagcccgagttttatcacacgatatttaataattgcacgagtaatattttgcatcatgctactgcggtttctgccgacattcgctatagctggaaagttttggtcagtggctatgccgataaatatatttatgagcttggtttattggataatagcctggcttttgaacggttgaaaaaacgatgcctcatcaagagaccggataatgccgtgatcaatgaggatttttcgcgtttgattcgagagggccttaagagggaaagttga

SEQ ID NO: 431796 - DNA, 222 bp, Serratia marcescens
atgcgaacagtattacttgcggtttcaatgatacttttatcagggtgtgggatcagtgatgagcttgacgcgatgactctggaaaaccataaaaaagtttgtgatggttatggttttaccaaagggaccgatgcctatgccaattgcctgatgcggcaagacgaacttgaagatgcggatgagcaaaagatgatggacagagaggccaaaaagaaaaaataa

SEQ ID NO: 431797 - DNA, 393 bp, Serratia marcescens
atgctgatcaaaccgctgacacagcagggtttgtgtaccttactatcggagcaacaggccattcgtgtggatatgcaggaaatccaattgatggccgtcgggcagtcgcaggtcctgaccaccttgattgacgaattgcaacgcagcaacggcgctgaccgccaacagctgctcgcaaccaccgcacagccggacgtatttgccgcggtgctgcatcggctgaaaggcagttttgcgctggcgggctaccaaagcggggtcaatctttgccaacagttgcccccccttgcatcgacagagccaacggtgactctgttgcgtatgaatgtactaactctgctttttatcgctttactggaacaacagcgcacggcggtaaacattgacgattga

SEQ ID NO: 431798 - DNA, 2721 bp, Serratia marcescens
atgagacggccttggctggtgctgctcaccctgctgcctgcgtgggcctgggcaaccggggacattcacgtcggtctgctcgacgatcgcccgccctacagcgattttgacgcgaaccatcaactgcagggcgcggcgacagatttgctgagcgcccttgcggctcaaaatgggttgcacttcaccacacaggccgcatccagccacagtcaattggcgcagatgttgaatgagcaaagtatccagttagccttgccgccgccgcaaagttcaccgccaccgccggggatactggtttcacagccgctgttgcaacagcgctgggcactggtggttcgtcaggatcgattgccgttgcagcacgaatcgtcgctggatctgcgtcatcaacgggtgctgatattacgtcatagcccggctcaggcgggattactggcggcttaccccggcgtggcgctcagcgaggtggcatcattacatgaagcgatccgactgctgaatgccggcgccgcgcagggcatcgtctgcgatgccacacaggcggcgttgttagccagcaatctttaccccggcaggctgaacgtacgtccactgccggcgctcgtcagcaaccagccactgtggctggcaccgggtcaagacgcgctattgcagcgtattaatcatgccatcgacgccctgccgacaggcgttgcgcaatcgatcaatgaacgctggctgttgaactcaacgctaagtggaatgcaaccgaacggcgccaccagcgatcgctggtttaatccgctgacggcggtcagcgccgcgctgtcgctgttcctgatcggtttcctgtcgactgaaattttccgccgtcgccgtgccgaacgcggtttgcgcgatgcgttgaaatactggcaaacgctgctcaacagtatcccaacgccactgctggtgtgtgatccgctcggtaacatcacccattgcaatcaggccttgctaaagtcactgacgctaacgcagcagcaagtgattgggcattccctggagcaatttaccgcgcgaaatccgattattcccgccatcagccaacaagaacgcatagcggccatcggcaatatgcaaccccagttttccgaccgtgcaatagtgatacagggggcgcaacgggaaatcgcccaatggctggcggcttacagtgacagccgtatgacgccacaagggatgctgctcggttggtatgacatcagcgagcgcaaacgcctggagcgcgatctcgccgatgccttgcaacaggccaccaacgccagccgcgaaaaaagtcatttcctggcgcgtatgagtcatgaaattcgctcaccgatgaacgccatcctcggtattcttgagttggaaacccagcgccctgaagccgccgcaacgtcactgccgatagcctatacggcctcgcgccagttgctgcaaattgtcggggatgtgttggatatttccaaaattgaagccggtgaaatgcacttgcaggttcaccccacagaactgtatcccttgctgacgcaagcgctggatacctataccgcgctggctgcacaaaaagcgctgcggctggacagcaatatcgaagccgtctggcagcatcagtatctgttggatggcgtcaagctgacgcaaattctcaataatttgctcagcaacgccatcaaatatactgaacggggctttgtggcattgcaggtcagtgtacaggcacaggatcctcgtaacgacaatcttacgttcagtatcagcgacagcggcatcggcatagcaccgcccctgcaacaaaagattttgcagccgtatgcgcaggttgatgccaacgcgccggccagtacggggctcgggctgacgatttgtacccaactggtgcaactgatgggcagcgagttgcggattgactctacgccgcagcagggttcacggttctctttcacgctaacgctacctcgcaccaccgcaaacgatgaggcgcaagagacgctcaccgctcccctcgttgaacacgcgctgcaggtgctggttgtggatgatttgcccgccaacctgacggtgatgaaacttcaactggaaaagctcggccatcaggtcaccacctgtgacaatgggcgccaggcgctgcaatggctggagcaatcccccttcgatttggtgctgaccgattgtcagatgccgattttcaccggttatcaactggcgcaatggcaaagagagcgagaacaaggctaccgtcgatatctgccgatcgtcggctgtaccgccaatgcgtttaacgatgagcaataccgctgtctggcagcgggcatggacgcagtactgatcaaaccgctgacacagcaagatttgcgcaccttagtgtcggagcaacaggccattcatgtggacatgcgggaaatccaattgatggccgccgggcagccgcaggtcctgaccaccttgattgacgaattgcaacgcagcagcgacgctgaccgccaacggctgctcgcagccaccgcacagcctgacgtattcgccgcggtgctgcatcggctgaaaggcagctttgcgctggcgggctaccaaagcggggtcaatctttgccaacagttggaacaacactcccctgcatcggcagaaccaacggtggctctgctgcgtatgaatacgctaattctgcgttttatcgctttactggaacaacagcgtgccgcggtaaacgttgacgattaa

SEQ ID NO: 431799 - DNA, 609 bp, Serratia marcescens
gtgcaaaaaaccgtggtaatagccgatgatcaccccgtatttcttattggtctgcgaaccgtggtaaccatggcctttggcgataattttacgatcgtcggtgaagcgcaaacggtggatcaactgctggccttactggcggaaaaattgccggatgtgctgctcactgatttcaatatgccaggtgaacagcagtccgacggactgcgtctgattagcacgctacgccgtaaatacccgcagttgccgattgtagtcattaccgtgatgaccaatcctgggctaatcaactctattctggctaccggcgtgttagcggtgatcaataagcagagcctgaccactgagctgaccgcttgtttgaaagcgttacaacagggacgccgaccgccgggcaacgccgtttcctcgccttccactgtggcgatgagcccacgcgagttggaggtcgtgcgcctgttgtcccagggtcacagcgttaaccatatcgccgccatgctcagtcgaaccaaacaaaccatcagcgcacaaaagaaaagcgccatgttaaagattggcgtcagctccgatgtcgatttgttcgcctatttgcgcgaagccgggctgtga

SEQ ID NO: 431800 - DNA, 1266 bp, Serratia marcescens
atgggtgccgggcgtattccacgtcgttacggcttgttacgttggctgatatttgttgcggtttacttcttgctcgccaccatcagtctcgaaacacgcgatccctggagcctgtccagcaccatttggttgccggccggtctgttgctgggcgtattatgcacccgctccccggcacagtggccgatgtgggcgatcagcgccggcgtactgcatttttcggtcagcctgctgcacgatcgcccctgggatattgcgctggcgttcgccttgctcgatttagcgatcatttgcccgctggcgttaatctggaatgggctgcaacgctattcaaacggcttgtcgcatcctggagaaacgttgcttttgctggccggcgtctaccttgccagcgccgtaggtggcctgttcagtgatttaattcttaaagcactcggctatccgacgcgggtttcacacttcatcagctggggaatttccaatgctaccggctgcctagcgatcgcgccgctatttattatccatcgtttgaatcatggtcagtggcagtggcccacccgtcagcaagcctttattgcagcgtggacttttccgttagctatagccatttttttcctgccttccagtctgttaagcaacgacctgctgaataacgctttattgtattccgtgctggcgctatcgctgttgctgtccgctttgttgcccctgctgccgctggcgctgtactttattctgctcacgctgctggttagtctggcgacgctctatggttatggcccatttcgcccggcgttggccggcatgcaggcaatcgaagcttcacagctgtacttgctgatgatcatctcactgggtttgttagtggcaacgcgggaacagcgacatcgttctcagcgccaacagacgcagcaacagcagctattgctgaacgcgttgctgcaaacacgccacccagccttttttcgcctgtcggcggaagctgaacaattggattggcagccacacgacgccgttttcggcatgccgccacgtcagttagccaatctgacgctgctgctggcgcatgttcaccctggcgatcgcgaggtgctgaaaacattgctgcgcaccgcaagcgaatcacggaatacaccgcaacattgctcattacgcctgctgctgcctgatgcacattatcatcatgtcgaatgccgtttgttgcaccatcagcaacaaggggtggccggcgtattggcactggcgaaagcggattcactatactga

SEQ ID NO: 431801 - DNA, 276 bp, Serratia marcescens
atgaaaaacattcaattgttcggtggcatcgtattggtatttgcagcagcgctggtgctgttttgttctttaacttctgttgggcatagcgcacgtaatactgagccggtatttgtgatgaaagaggggacggtgttgttttccctaaatgccagtatgcagcaaaaccgtcaacttgacgttcaataccagcatgccagagggttattgcagcaggtcggtggtaagttgcggaatagcatgaaaaacactagcgttggaagttatttttcatga

SEQ ID NO: 431802 - DNA, 1248 bp, Serratia marcescens
atgagttcacctgcatctgttaccgaagttctccaccatcacatacgacggatgtccgggcgagacccgcacgagaaacatcgggtcgcctcctctttagaattattgttcgacctaaccttcgcgacctgttttgcatttgccgcaacccaattaacacatgcattggcagcgggcgagtacactacggctctgctcgggttcggattcgcgagtttctgcatctgttgggcttggttcaacttctcgtggttcgcatcagcctacgacactgacgattggattttccgcatagccacattggtgcaaatgggcggagtgctaatattggcgattggtttgccacgtttattctcttcaatcgagcacggctctctcgacaactcgataatggtagtgggttatgtaatcatgcgcgtagccatgatatttcaatggttgcgcgcagcgaagcaagatccttcacgccgccgcacttgcctcacttatgctgccgccatcactgttgctcaaataggttggattgcgattatcctgtttcatttccctttggatattaccctcatactatgtggcatatggtttcttgtcgaactagcgggacccgcactagcggaacgaaaggatggtggcaccccttggcatgcggagcacatgaccgaacgccatagtctgttcgcgataattgcacttggtgaaggattggtgggcacggtcgcgacgttatcagctgaaatggagcatcagggctggacgatggacgcagcactcgcctgtattgcaggtgtcgggctcaccttcgggatgtggtgggtatattccattctaccctcagcgaaagtattacacaggcatcgttcgcgcgctttcatatggagctatggccagatactgcttatcgcgtccatagttgctaccggagcaggcctggatgttgcggcgacctttatcgaaaataaagctcacatcgggtcattatcagtcctgctcgccaccgcaattccagtgaccctattcctcggattgatctacgcgctccactattttcttgtgcgccgtttcgatcagttgcatgtatggctcctgcttgcgaccggtatcgtaatcgcggcctctgtcaccgcagcgatttacggtgtaggtatagtcatatgcttggtcattcttatgtttgcgccaatcatcacggtggtcggttacgaggtgtcaggacatcgtcatcaaggtgaggtgctaatggagcagtaa

SEQ ID NO: 431803 - DNA, 873 bp, Serratia marcescens
atgaaaagtgctcttttatttttaatcgtgtttttttgcagcgtcagcacggcgaatgccgcataccacaacgccaccaccatcatacgaaaaggggagatcccgggatctttccttgtcaccaccacgctaaatgacattgggccgatacccgatagtaatatatgcaatggcacgataactagtactgcgtacccatgtggttacactttcgctatctacccaattgcctcgaacggatctgtggctactgccaggttgatcactgacttggttgaccgacgcccccctaaccagtgttcgaccagtacttgcaagacaaatatagcaacagccaaaactattggggaactggtgccattgatgaagtaccgtggcggctttggtatagccaagacggaactgatccgtccctattttgaacttgagggtttcagatcatgtttgtatttttctaattcttcagcggttgggaatgggtcttcggggcgattcgattgcagcccacttatccctctgacgacaagctgcgatattctggatactgatgccctggtcaattttggaacgttcggcaacgacgtggtaagccggcaggccagtggttcatttaaaattgactgctccggtgacagcagcgtgcgggtcaagtttgcctccaatgtgacgaatatgtcactcagccaggatggaaagctgacggccagcctgaaagtgaggaattcaaccccgggtgcgaacagtttggaaagttttgttaacgtgcgggccggtacgcaagagatatttatcgatggcgatcttaaaaataataatacctcacatacgggcccgttttctgcctcggtggtgctcatcgtagaggtggcataa

SEQ ID NO: 431804 - DNA, 816 bp, Serratia marcescens
atgaaaaagatttttttattattgctaatcgtatttttcggcggcatgaatgcggcccgcgccgctaattttgaggccattcctcgtatagagcctacaagtggatcctatgcttttctctcttttacgtttctccgtattttaccggagtcgcaggaacccaacccatgttatggacaaagagactgcatgttatctgtggtgatgaccttatcgagctccccacgtgcctctgtggcgttggctgaggccaacagcagctgtaacacggcggattgcaagaccagcacgagcacggccaaaaccatgggggagctcgcgccgttagtcaggtatttagggcgcaatgggacgaactcgacgagagatataaaccaggttggcagctggcctcttcgactctgcttcggtgtggcaattaacggtagatggagtggcgctttcggctgtggccccgaaatacccaagacgaacagttgcgatattcttgacactaacgccatcgttgactttggcacattcagcagcgatgtcacggcccggcaggccacgggaaccatcaagataaattgtgccagcgaggcttacttgcgcgttaagtttaattccaatgtcaccaatatgccgttaagccaggacgggcgaatgaccgccagcctgaagtttagagatctgatcgctggcgtgggcgagaattatgtcaaagtgccaggcggcaatagagaaatctttatcgatggtgatctcaggaataacaatacctcgcataccggcccgttttctgtgcctgtggtggctattgttgagataatatga

SEQ ID NO: 431805 - DNA, 2556 bp, Serratia marcescens
atggatgcgagaaaatttaaatcgggggcgctcccgttaagtttattagggatatgtatttctctggctctctgcggcctggcgttgccgggacgggcggatgatgcaattcagttcaacactgacatcctggatatcaacgatcgtaaaaatatcgatctcggccgctttgccaaaggcgcctttattatgccgggcaagtacagcatgacggtagtggtgaacaagcagccattggatgagcagccggtggttttctatccgccggaaaacgatcccgatggcagtgcggcctgcgtctcgccggagctggttgaaaaactgggccttaaaaccgagtttctcaagcagctgcgctggtggcataacgagcagtgcctagatctgagcagcctcaagggcatcgaggccaggggcgatctggcggtgtcggcgctgtatctgaacattccccaggcctatttagagtactcctcgccggattgggatccgccggcgcgctgggataacggcattcccggcctgctgctggactacaacctgaacggccaggtgcagcagaatagcaacggcggcggccagacgcagcgcctgggcggtaatggtgcggtgggcgccaacctgggcgcctggcggctgcgggccgattggcagaccagtctcaatcaccagaccggctcgggggaatcgagccagagaacgtttgactggagccgctattacgctttccgcgcgttgccgcagtggggcgcgcgcctggcgttgggagaggattcgctgcagagcaacctcttcgacagcttccgctttaccggcttcagcctgatgtcggacgacaacatgctgccgcccaacctgcgcggctatgcgccggaggtgaccggcatcgccaaaaccaacgccaaagtcaccatcagccagcaggggcgcgtgctgtatgaggcgcaggtcgccgccgggccgttccgcatccaggatctgagcgattcggtgatgggcaagctggacgtcaaggttgaggaacaagacggcagcgtgcagcagtttcaggtggacacagccagcattccttatctgacgcgccctggcatggtgcgcttcaagttcgccggtggtcggccgtcgaactgggagcaccaggtgcaggggccaacctttgccaccggtgaattctcctggggggtcagcaacggttggtcgctgtacggcggggctatcgccggtggcgattataacgcgctgtcgctggggctggggcgcgatctgctggtgctcggcgcgctgtcgtttgataccacatattcgcgggccagattgccgattgacgacggcaccaaaaaaggcggctcgtaccgtttgagctattcgaaaagctttgatgaatacgacagtcagatcaccttcgccggttatcgcttctcggaagaaaattttatgaccatgagcgaatacctggacgcgcgttatcacggcttgcggaacggcaaaagccgagaaatgtacaccatcacctttaacaagcagttccgcgatctgggggtcagtacctatctcaactacgaccaccagacttactgggataagccgaccgacgaacgctacagcctggcgctgtcgcgctatttcaacctgggatcgtggaaaaacctgagcgcctcactctcggcttatcgcaacaagtccagagggaccaacgacgacggcatgtatctgagcctgacggtgccgtggggagaagataccaacctcagctacagcagttcgtggaaccgtaacaataacaaccagcgggtgggctactaccaacggttggatgaacacaacaactatcagctgaccgccggcagctcgcgcaacggcggctccgccagcgcgttttacagccacgacggcgacgcggcgcgtatcgacgccaacgcgagttatcaggggggccagtactccgcgttcggcatgagcctgctgggcggggccacgcttaccgcccagggggcggcgctgcaccgtagcggaagcttcggtggtacccgcctgatgctggacaccgatggcgtggccggggtgccggtacgtggctatggcgccacgagccgcaccaacatgtttggcaaagcggtggtgacggacgtcggcaacttttaccgcagccgggcgagcatcgatctgaccaacttatcggacgaggctgaagcgacgcagtcggtggtgcaggcgacgctcaccgaaggggccattggctaccggcgcttcaacgtgatttccggccagaaagcgatggcggtgatccgcctggcggacggcagcacgccgccgtttggcgccgaggtgttcaaccgccgcaggcagcagaccgggattgtgaatgacggcggcagcgtttacctcagcggtatccgcgccggtgaacaaatgacggtgcattgggaagggaaggcgcaatgcgaaatcgatctgccggcgttgcgcacggatgttgctctgagcgatctgctgctgccgtgccggcgcgtggccgcaggcagtgaaggccaggcagatgccccggaaaacccgtaa

SEQ ID NO: 431806 - DNA, 2433 bp, Serratia marcescens
atgatctggcgctggttctggcgcgaatggcgctcgccatcgctgctgatcgtttggttggcgttgacgctctccgtggcctgcgtgctggcgctgggcagcatcagcgatcgcatggacaaagggctcagccagcagagtcgtgactttatcgccggcgatcgggtgttgcgcagcgcgcatccggtgccggaaggctggctgctggacgcgcagcaacaggggctgaaggtgagtcgtcagctgtcgttcaccaccatgacctatgccggcgatcggccgcagctggcggacgtgaaagccaccgatctggcctatccgctgtacggcaagctggaaacgcgcccggccaacatccagcccgaaccgggcagcgtgctggtggcgccgcgtttgctggcgctgctgaacgtgaaagtgggggattcgctcgaggtgggcgacaccacgctgcgcatcgccggtgaaatcattcaggagccggacgccggcttcaacccgttccagaccgcgccgcgcatcatgatcaacctggcggacgtcgataagaccggcgcagtgcagccgggtagccggctgacctaccgctacatgttcgccggcgccgagccggatattcagcgttacgaagcgcggttgacgccgcagttgacgccggatcagcgttggttcgggctacaggagtccggcagcgcgctcggcaagtcgctgcagcgctcccaacagttcctgctgctgtcggctctgctgacgctgctgttgtcgatcgctgccgtggcggtggcgatgagccactattgccgcagccgctacgatctgattgcggtgctgaaaactcttggtgccgggcgcggcgcgctgcgtaaattgatcgtcggccagtggctggcggtgatggcgctggcggcggtgtgcggcggggcgatcgggctggcgttcgaagcgctgctgattcgcctgctgaaaccggtgttgccggctgcattgcccgccgccggcgcctggccgtggctgtgggcgctcggcgcgctggtgctgatttcgctgctggtcgggttgcggccgtatcgccaactgctggctacccagccgctgcgggtgctgcgccgcgatgtggtggccaacgtctggccgctgcgctacttcctgccggtgacggtggcgatcgtggtggcgcttttggtgacgctgatgggggccagcacgctgctgtgggcgatcctggcgggtatggcggtactggcgctgctgctgggcggcatcggctggggcagcctgctgctgctgcgccgcatcacgctcaagagcctggcgctgcggctggcggtcaaccgcctgctgcatcagccgtgggtgaccatcagccagctggcggcgttctcgctgtcgttcatgctgctggcgctgctgttggtgctgcgcggcgatctgctcgaacgctggcagcaacagctgccgccggacagcccgaactatttcctgctcaacatgaccgaggcgcaggtgccgcaggtgaaaaccttcctgcagcagcaccagatcaaaccggaaacctattacccgatcgtccgggtgcgcctgaccgagataaaccagcaggtggcgaccgaacgggtgcatgaagacgatccgggcggcgaggcggtgaaccgtgagctgaacctgacctggctggccgaactgccggatcacaatccgttggtggcgggcaattggccgccgaaaagcggcgaagtctcgatggatgaaggtatcgccgggcggctgaagatcacgctgggcgacacgctgaccttcagcggcgatacccaggcgttcagcgccaaagtcaccagcctgcgccaggtggattgggaaagcctgaagccgaacttttactttatcttcccgccgggcgcgctggacggccagccgcagacctggctcaccagcttccgctacgacggcgacggccagatgctgacccagctcaaccgccagttcccaacgctcagcctgctggacatcggcgcgatcctgaaacaggtcggcggcgtgctgcaacaggtcagccgcgcgctggaggtgatggtggttctggtggtgctgtgcggcggcctactgctgctggcacaggtgcaggtcggcatgcgtcagcgccgccaggagctggtggtgtaccgcacgctgggggccggcaaacggctgctgcgccgcacgctgtggtgcgagttcgccctgctggggctggtggcgggcatcgcggcggcggtaggcgccgaggcggcgctgtggctgctgcagagccgggtgtttgacttcccgtggacgccgacgccggtgctgtggtgggcgctgccgctggccagcgcgctgctgctgtcgctgtgcggcggctggctgggcgtgcgcctgctgcgcggccgggcgttgttccgcagttatgagggctga

SEQ ID NO: 431807 - DNA, 1041 bp, Serratia marcescens
gtgaccggagatatcgttgctccagacgtccagcccgcacagcacatcgctgcagacgcgctcggtcggtttgcccttgtccagcaccgcgccgacgcccggcagatcgaccacgaactgggtcgggccataagccacgcccgtcggatccgggatgcggaactcttcgggaatatcctcagcggtcaccaacatgcccgggccgttgatggccttgcccaggttgatcatcccccagccgtagagcgcgtcgatgcccggcgcgcccatgtcggtggcggtggttttcagcacttccgccacctgcgcgccattcaaatacgggaaacgctccatcagcaccgcaacgctgccggccacgtgcggcgccgccatcgaggtaccgcttttattggcatagccggtcgtcaggtcgtccacaccggtgcccgcgatcaccgagctgtacacccgggtacccggtgccgagacgcacaaactggcggtatagccgcaacgggaagagaaggtgctgatgctgtaatcgccggtattgttgggatcctgcaggctggcgaccgacagccagttcggcgcgatgtccggcacgaagtaggccaggccggccatggcatccgggttgttgaggttaccgtcgttgccggcggcgaagatggtgaccacgccgctgcgcgccgcgtcgatcgcgccctgataggcgccaccgggcttggtgcccaggatcgttttgatctgatcgaactgcttttgcgcatcgttcaccgtgaagtgcggataagccgggtcatacccgccttcatcgaatttctcggtgatgccgatgccccaactgttattgatgatgcgcgcgccgctggccaccagcgcctcccagccggcctggtaaaccgcgccgtcgttaccgagcacaatgccgtcctccgggccggggtcgccgttttctgcgctgatgatctgcgcgttgaatgccaccccatgcatggcgccaccgtcgcggctgccggcggcgatgccgcccacgtgggtgccgtgcgagcctaa

SEQ ID NO: 431808 - DNA, 504 bp, Serratia marcescens
atgagcctgttgcgcggcctgactgatttcaagcgcgcctacgatctcaacctgcgggtgaagaacatgctgccggatctgtacgccgaggatccggatttttatcgccatatgcgtatccaggatctggccgccggcattcatcggctgatccgccaacacgatctgccgcgcctgatgcagcgggcgttcgacgtgctgcctgaaatgaagctgacgccgcaccagatgttccaggagcaggtgcgcggcaatgtggaaacctgcgagctggatcagttggtgggcaaggtggcggccaatatgatcctgccttatccgccgggcgtgccgctggtgatgccgggagaaatgatcaccgaagagagccgggcggtgctcgatttcctgctgatgctgtgctctatcggtgagcgctatcccggttttgaaaccgacatccacggcgccaaactgacggaggacgggcgctatctggtgaaggtgttgaaagcgccagcataa

SEQ ID NO: 431809 - DNA, 546 bp, Serratia marcescens
atgctaaaactgtttgatctgcttgaacgcctgaatagcctgcaacgcagctggctgcgcagccacgaagaattggaaagcctgccgccggtgcagctgagcgcgctctactatctggcacgctgtaatcattactccaacacgccgatggccgtggcggaataccttggcctgaccaagggaacggtgtcccaatcgctgaaaaagctggagctgaacggcatgatcgcccgcacggcggacgcaaaggatcgccgcagcgtgcggctgcggctgacagaaaaatcgcgaagtttaatggagactctgtttcctcctgcctatctgcagcaggcgcaagacgccatgcagcaggacggcgaacagttgcaggcgctgttaacccaactgctgcgccaactgcagcggcaggaaaatgtggcgctgttcggcgaatgccaccgctgccgctatcaccagcagcgcaatggccaaccgttttgcggcctgacacaggaaccgctgccgctcgacagcgtgaacctgatctgccgagaattcgcctaa

SEQ ID NO: 431810 - DNA, 234 bp, Serratia marcescens; identical to SEQ ID NO: 429817

SEQ ID NO: 431811 - DNA, 1344 bp, Serratia marcescens
atggcttcacccaagaaaatagggcttattgcctgcaccggcgtcgtcgccggcaatatgatggggagcgggattgccttattgcccgccaacctggcgagtctcggatccatcgccatttgggggtgggtgatctcgattatcggggcgatgtcgctggcctatgtgtatgcccgtctcgccaccaaaaacccgcagcagggcggccctatcgcctacgccggtgaaatttccccggccttcggtttccagaccggcgtgctttattaccatgccaactggatcggtaacctggccatcggcattaccgccgtttcttatctctccaccttcttcccggcgctgaacaacccgatacctgccggtatcgcctgtatcgccatcgtgtgggtcttcaccttcgtcaacatgctgggcggaacctgggtcagccgtttgactaccctgggcctggtattggtgctgatcccggtgatcgtgaccgccaccctcggctggcactggtttgacgccgccacctaccaggctaactggaatacctccggcaccaccgacagccatgcggtcatcaaaagtattctgctgtgtctgtgggcgttcatcggcgtggaatccgcagcggtcagcaccggcatggtgaaaaacccgaaacgtaccgtgccgctggcgaccatgctcggcaccggcctggcgggcatcatctacatcgccgccacccaggtgatcagcggcatgttcccggcgtctgaaatggccgccagcggcgcgccgttcgccatcagcgcctcggcgattatgggcaactgggccgcaccgatggtttccgccttcaccgccttcgcctgcctgacctcactcggttcgtggatgatgctggtcggccaggccggggtgcgcgccgccaacgacggcaacttcccgaaagtgtacggcgagctggataaaaacggcattccgaaaaaaggcctgctgctggccggctgcaaaatgaccgcgctgatggtgctgatcaccctgatgagctccgccggcggcaaggcttccgacctgttcggcgagctgaccggcatcgcggtgctgctgaccatgctgccttacttctattcctgcgtagatctgatccgcttcgaaggggtcaacgtgcgcaacctgctgagcctgatcgcttcggtgtgcggctgcggcttctgcttcatcgcgctgatgggcgccaactcattcgaactgtccggcacctttatcatcagcctgattatcctgatgttctacgcccggaaaatgaatacccgccaggctgccaacgcagcggcggtcgatgaaaacaccacggccaaagcgcactga

SEQ ID NO: 431812 - DNA, 804 bp, Serratia marcescens
atgggcatcagccgacaagcgtggtatcagtccctgcagcgtgaagcaggcaaagaggagcaggcccggcatctcgtcgaacaggtgacggccatccgcttgcaccaaccccgactggggacacgtaagctgcatcacctgttgcggcaacaccccgaaccggcgttgcatgtgggccgtgaccggctgttcagtatcctgcgctgcgcgcggttactggtgatgcctaaacgggcatatcacaagacgacgcacagccatcatcgtttttatcgccatcccaacctgctaaaagcgggagacaatcaagtaatagccagccgtccggaacaggtatgggtggcggatatcacctacctgccgctgagaacggggacggcgtatgtcagcctggtaacggatgcctggtcgagaaaaatcgtgggatatcacgtgcatgacagtctgcatacccggcatgtcgcctgcgcgttcaaaatggcactggccggcagacgcacggcgttgccgttggtgcatcactcggacaggggtatccagtactgctcgcaggaatatcaggcgttacatcagcagtatgacgtcatctgctcgatgacggacgggtatgactgttatcagaacgcgctggcggaacggataaacgggatactcaaaacggaatacctgctcggcaggccagaagatatcgcgcaggcaagaaagatggtcagggaatcggtgaacctctacaacacgcggcggccgcacttgtcgctgaaatacaaaacgcccgatgaggttcatcgggcgttatccggttga

SEQ ID NO: 431813 - DNA, 399 bp, Serratia marcescens
atgaaccagtatattaaacgcacacaacgcgattactctctatcctttaaactggctgtcgtcgaacaggtcgaaaaaggcgagatgacataccgccaggcgcaagatcgctacggtatccagggcagccagactgttatgaactggctgcgcaaatacggtcaacttgactggcgaacttctccttccaccagaacgtgcggagacaacatgcccaaactccccctgacgcccgaacagcgtattaaagaacttgagcagcaactggctgaatctgaagtcaaagcccagttcttcgaagctgtcgtcaaagtgatgaacaccgactttggcgccacgctgacaaaaaagcagctaaccgccttatcgcgcaaacacaagtaccgggactcacagtaa

SEQ ID NO: 431814 - DNA, 612 bp, Serratia marcescens
atggtggacgggtgggaagcgccggcgctgaatcaattggccaacgcggacaaaccctggaccgaggaacagctgtttcagtacttccgcagcgggcattccgccgagcacggcgtggcggccgggccgatggggccggtggtcagcgaactggcgacgttgccgcagagcgatctgcgggcgatggccaactatgtgatgtcgctgagcgccaaggcgacgctgaatgtggaaccgcaggcgcagttggcggcccgcgcgttgcctgcgggtcaactggcgggcgagcggttgtttcagggcgcttgccaggcctgtcacagcgccgccgccggcgggccgcagctgttcggcgtcagcccggatctggccaataacaccaatatcttcagcgatcgtcccgataacctgatcaaggtgatcctgcaagggatccccaaaccggccaccgccgaattgggctttatgccgggctttaaggacagcttttccgatcggcaggtgacggcgctggtgaattatctgcgccatcgctatgccggcgacaaaccggcctggcgcgacgtggaggctcaggtggcgcggctgcgcgcagagccgggcacgcactga

SEQ ID NO: 431815 - DNA, 1086 bp, Serratia marcescens
atggaaaagatcaacaaatgggaagatatagagcaacattttttatcgggcagtctgattttaggtaatggcgcaagcattgccgtatcagactcatttaattacgattcgttatatctagaagcacaacaccgtgattatctcaatgccttttcagtcagtgtattcaaaagtttcaaagcaaatgattttgaatttgtcttgcgaaacctattgcaagctaagcaagttaatcaggttttgaatattgactgcacattaatagattcagcatatataaacattagagatgcattgataagaacactccgtgatattcacatctcttacagcgaggcgcttccgcatctaccaagtatttataatttcatgaggttatttaaaactgtagcatcacttaattatgaccttatcgtatattgggcggcaatgcttggcaatcatgaactaggacgatggttcaaggattgctttactccttattatctggatgaggattgggagaaatacctcgagccaattggtgaggcgtcgggggctacactgtttttttatcctcatggtaatctagtccttcatagagaggactttttgaccagaaaaataataaccaggcctgatctttacacccatgatcttttgaacgaaattttatcctgctgggaaaaaaatgcctttattccagtattcgtctgtgaggggcgacaagatgataaagttaggtcaatatcaaatagcagttatttagatagggtgttttatgaggttctacccaatctggaatctaaattggttatatatggttggagtattggacagcaagatcagcatatcattgagcaaataaaaaaagctgaattatctagggtggcggtttctgtttttcgcgaagataaagagtatatggaaagagttaaaagaatattttctcgcattggtgttcaagatgttattttttttgatgccgaaagccctggagcctggaataatccctctagaaagtcacctgattgtggtgaatttgacttcaaaatcgatctaaaagagggcgagaaactaaccagcttaagaaggttttatgactaa

SEQ ID NO: 431816 - DNA, 363 bp, Serratia marcescens
gtgatcgatgacgtcacgctttccacctactcttactcatttgtgtttttatactttttcctgtcagtcttagtatttgtcgggctttatcacctaaaacaaaaaaccaacaatagaaaatcctattccctttttgtgatagctaccacagtaaatttatttgcaagcatcatccaaggtttagtatttaactatggttctgagatactggatccaattctcaatataaaatttcaagactatgatgaggtgtggtacgccagtattatattcgcccttacttacctgtctcaattaccaactaacctctattacaaaagaaagactaagaataatgcgaataatagcaaagacatctcctga

SEQ ID NO: 431817 - DNA, 1008 bp, Serratia marcescens
atgaaaactgtatcacctgatactgaaaagcttttagcgataaaatatttaaagggtattggtgaaaaaacaatatcatctcttcatgcaattaaggatttctccgatctttctattgaagatatattaaggttttctctaaataagaaagattcttatagtcgtttggatattgttcaggctatgaattcagccaggctgcagagtgatattgcgcatgataaaggtcattttataatatcattttttgatgattgttatcctttaaatttaaaaaatgccagtcatgctgctcctatattattttgcagtggtgatataagttgtcttaaaaacaataatttgactgtgattggaaccagggagcctacagagcatggcgtggtaattgccaagagagttacggaatggtttgttagcaaaggctggtcgatagttagtggattagcactagggattgatagcatcgcacacaccacttgtatcgatagtggtggaaaaacgattgcagtattagctcatgggcttgagaaagtttaccctgcaaaaaataaagaacttgctaaaagaattgtgggtagtggtgggttgttaatatctgaatatccttacaactcatttgtcggaaaatctaattttgtagatcgagatgctatacaagcagcagtttcgtcaggggtggtattgattcaaacaggggttttaggtggtagtttacatgcatcaagagcttcacttttattgaatcgtccgttgattgttgcgggccagtcaaaaacagatatcaaaaattgcgaaccaaaagctagcggtaatatggctttgttaacctcaagtcacgatgccataaaaaaaatactacgacttaacaaatatgatcaaagtatgttattgccactgcacgacagtaaccagtatgaaattatcaacgccaagttgctcgagttgttgaaagatttgaaaagtagcaataacacgattaatagaaatatagatttggatttttaa

SEQ ID NO: 431818 - DNA, 1335 bp, Serratia marcescens
atgaacaattcaattgaggcagtactgtttgatctggataacacactggtaaataccaattctttgaaagaatatagagagggggctaaggataaaagacttacacaggatgaattgagtacaacaaaattataccctaaaacaaaagtagttttggagtctttcaaagattcaaatatcttgatggccgttgtaacaaactctcctcggcagtatgcattagatgtgcttaatcatcatgggattgaacattattttagtacaattattacttataacgaagtcggccctggaggagttaaaccatcgccacaaggtataaatttagcgctgaataatttgaatctaacaaataaaaataacattctatttattggtgacgatgccaaagacattaatgcatcctatgcggctggagtaaagcctattacccctgcgtgggcatctaaagattttatagggcaaatgcctgctgcaatgattagtactagatgcctcagtgaggaagttgataattttaaccatattgatttgattgcagatagatgtgctaattttaattcatttgatattgataagaaatggctgtttttcattcccatggataaggatgggaatataggagcggtcaagaaaagtgaaattaatttcctttgtttagggcgttactttagtcaaaaaaatacacttactgcaaaaattcatgagaatcataccctttcgaaagagatctataaaaaggagcttgagccaaaatatgtcgttcctgagtattgggttgatcttctttcttatttcgtagacaaaactcctgcatatttttttgaagatgactctgtttttgatattgttactgtcataccagccaagaaaggtaaaaacagacgattagagaaccttctaaatcgaatgagccgaaattctaaaagtcaccatactcaatatatttctgacttattctatttttcggaagatgctaagagtctaaaaacaatggggcgtgatgaaagggctaatgaaataaaagataatcttcactttaattctaaatatgaaagtatgattcaagcatcaaagatattaataatcgatgatgtaataactacaggttcaactttaaaaggtgctcaatcattactagaagcgatgaatcctgaaagggtgttatcaatatcgttggccaaaacggttagcattagtgaagatatgcatgtttgtgataattgtgggaaattaatgcgtgttatgcgtaataaaaaatctggacagcattttttgggttgtacaggattttttgacaccccgaaatgtaaaaatactaagagcatagattaa

SEQ ID NO: 431819 - DNA, 1011 bp, Serratia marcescens
atgaaaaaattagaatcattacagtacgctagagcgatagcagctatgcttgtcgtcatagaccatactgtaacgcaattctcgctctatcagtctacaggcattgactttattgatacaatgcttaagaaaacagttaatatgggtaacattggcgtatatgttttctttgctatcagtggctatataatgtcctatacgacaaaaaacaaaacctttgatgtttcatatgctaaagttttcatacaaaaaagagtaaagaggatatatcctttatattgggtatatctttcagtatttcttgcattatggggtttaggcctggcaatgcgctcccatcactatagtgtctcacaaatattattttcatatcttctcataccatatggaataacggaagataaaataacaccaccagttttgacacaagcatggacattaagatatgaaatgctattttatataacatttgcatttttcataatgttaggaacaagcaagaaattaatgccgattttattacttgtatttttttcagcattagtaatgctttcacaccttaatatattccctgcggcagaattgaatttatttttctcaaattggttacttttacttttcgtactggggatattactagagaaaaaccaacatgttataacaaaagttctggcaggagtgaataatcataccctgtggataattacaaccatattgatactaatagcgacctacattgacaaacctgtaatcctagactacctattaagcgtattgatactgatttttatcttaccgattaatcaagatagtaaaaccctcttaaagattggtgatgcatcatatactatatacttgagtcactcattcatagtgttagcttacggaatggtatctaaaagcacttccaatatatggacatgcctaatttccggctttatcacaatacttgcatctgccattttaggtatattgctgtatgaaaaaatagaaaaaagaatacatcgttaa

SEQ ID NO: 431820 - DNA, 153 bp, Serratia marcescens
atgacggaaagagagaagctgttaagcggcctggagtacaacagccgcgatgaagaactgatcgggatgtatcgtaaggtctataaaggggggattatggggggaagggggcacatggcaaaaataatattgtctgtaacaatattattttaa

SEQ ID NO: 431821 - DNA, 1041 bp, Serratia marcescens
atgtcagatttagaaaaattcctgccaactttgaaacgcttatcaaaattagacaagctctctgagaatgaaattctaaatcaattcaggagaaatcatagcgtagaaccagtaatctcaaaaagtgaactttgttatgcttctttcacagttaaaattgatgatttaaacttcttgcttaccgaaaggccaatatcgtacttaaatagacattggggacgatgttcgaatattcagtcgcatgcaaattcacttggtatagcattacccctatatattggagaaggcactctttcttctgcaatccatgaaattaaaagaagtgaaaatccgcttgataattcaaataaatggttattcgaaaatttctcattagaaattgcaattgcttatttcaacaaatattttataaagagcgaatcactaaaaaactacaagacaattatttttgaagctatagaagctttttatttggggtatgatcatatatctataatgtcgctcttccctgtctttgaaggtggattgaggaacttacttgtaaaattttgtgatggtgacaacacaaatacaagtgcagacagatttgaaaaggaaattagaaaactcattattacatggggaagacggcagctcccaaattttgactggtatcccggcaaaggttatgacattgaaactgaggtggattttttcacacatttaaacccccagtgtgatgtgattaattcaaccagatctttttttaaaaatgtcatatataaaccaactggaggtgttaatgaaggtagcttcaatagacatttgacactacatttgctgaatcaggatttcaatgagccatctaattttgttaggattttcttggtgttaacacatttaacctttgcagaaagtctgatgaacaataatgtccctttcttctgggaaggtgtagatgacaatgaccgacgcattgcttcattcatttctagaagtggtgatgttatttttgaaatgcgtagaaaagaaattagtaagcttgggttaaatttatactaa

SEQ ID NO: 431822 - DNA, 720 bp, Serratia marcescens
atgtttaaattcgaggctttactggaccttccaatgcaattttcacactatgacgtaagcctaacgtttgagatcatttcctctctaaatgcgcaaactgatgcctctatcgcagctaatgtaagccagtaccataccgaagggccagaaactgaagagtatgaaatctctgctgaagataacgcttattatttagttgagtactatatgggactggatagcggatctgttgatttagatgatatgtttacatcctactatcccagcgttacacgccgctctgtctttttgacgttatacggcatgcttgagcacgatttcgagaagctatgtaatggctttgcaagggttcacaacgcgcctgttaagttgtcagaccttaaaggtaatggttttgaacgttgtgacttgtatgccaggaagatcattggcatgaaggcttcgagatattactctttggtgaagaaagtaactaagttacgtaacgcttgtgcgcacaacgatgcgcgtttcgtctcaaatgatggtaggcccatccctgagttggaggacctgatgcatacatattctaaggaattagtacaagatggtgagcaggttaactttaaatctggctctctccaggcgatgacgaacatattaaaaaactacttcaacgatgtagaagaagccctgaaggcacataaaacacctgatctattcattgggtcgcgcaaatag

SEQ ID NO: 431823 - DNA, 2397 bp, Serratia marcescens
atgttcagtcaggttgacatcaatagtttcggtagttttgcggacctcagttggagaaagagccttaaggatgcaggtaacaacgtccagaatttcaagaggctcaacatcctctacggacggaactactccggtaagacaacactctcgcggattttccgcgctttggaaacggggcgcattccacacaactacgtggacccaaatttcactattcgtggtgacaaaggtgatgtgacacaagtagaccttgccggtcatggctacgatgttcgagtctacaaccgagattttgtgagcgataacctaagcttcttggtcaatcaaaccgacggcgagatcaagacgtttgctattgttggtgaaaagaataaagaaatcgaagataccattaccgcaatccaaactaagctaggcagtgttgaatcgaaggtgggcctccggcatgaacttgaagctaaaaagaaagagcgagatcgaacgaaagacaatcataaaactgcgtctgatgctctagagggcaaacttcgttttcatgccaacaataagattaaacagaatcgcatctacggcccagctgtctacaacatagaaagcatcaaaaaagacattggctcagtcaaaaaaactagcttcatagctctgacaaccgaagaacaagcagccaaggtcaatctcttgaagcaagaggctctacctgatattaccgataccgtatcgataaacctcaacatcgaatcaataagcaaggtagctgaagaactcctttcaagattgattaagccaaccctgccaattcaggagttgttgaatgagacggctcttcagatgtgggtgaaggaaggcataccgctacacaaaggtaagcgggacacttgcgcattctgccgtcagaatctccctcatgacctctggcaggtattagactctcacttcagtaaggaatcctcggatctggagtcgtgtatcgattcatgcctgacttccatcaccaccgaaatccaagccattcctaacttcttgactttgactggtgataagttctatgcagaagaaaaagttttatttgaagcgagcaagatagcacttactgatcacctgaaaggctacatgcaggatctcagagctctgaaggctgcattggataagagaaagaactctatttttcagcaggttgccatacctgtctacattcatgattcgacagcaattcagcaatacgtgggcgacatcaatgatctgatcgccaaaaacaatggccgcacaatttcgttagagaacgataaaaacactgcacgagaatctctacggcttaccgatgtggcatcttttatcggagacatcacctacgacactgaattagcccgtattgccagtctcaaaaaagatgctgatactgccaaaattgtatttaccgaggctgaagccgaaattctcgaacaagaaaccgaagtggcccgtctacagggccagcagaaggatgaacgcaagggcgcggagcgagtgaatgacttgctcaatcacttctttggccatgacggcatcacgcttgaagccaaagacaatattgagaatacttcggttaagtttgaagttaccagagatggcaaatctgcctacaacttgagcgaaggcgaatgcagtctgattgctttctgctacttcatagccaagctggaagagccagatagcaagggtaaagatctgatcatttatatagatgacccaatttccagcctagacgggaatcacatcttcttcatgttcagcttgattgaaagcctgattgcgaaacccatcaagaatgcagatggaacaaacagctatcgctacaagcagctttttatatccacccacaacctagatttcttgaagtatctaaagaaaatatcacttcctaatgagaagaatcacggtggatgccaacatttcatcgtggagagaaacggaggggcaagtcagatttccctgatgccttcgtatctgcgagactacatcacagaattcaactacctgtttcatcagatctacaaatgccgcaatcaaggtggagcgaatgaatctcatgagccattttatggatttggtaacaacctccgtaagttccttgaggcatttttattctttaagttcccgcatcaagatgacaagaatgatgcctttgagcggatcaagaaattctttggcgaagaggatccgactgcaatagctcttgtgaatagacttaataacgagttttcacatctcgaatcgattcctgatcgtggatttaaacctgttgagattccagaaatttccaaggtggcaaactacgtgttagacaagatttatacggcagatccgcatcaatacaatgcactattgaagagcatcggtgaaccacccaggacaccttag

SEQ ID NO: 431824 - DNA, 195 bp, Serratia marcescens
atggaacctaggataaaaaattggcctaatgaagactacgaagactacgaagactacgaagactacgaagactacgaagactacgaagactacgaagactacgaagactacgaagactacgaagactacgcagactacgaagggagagtgaaacacaagaacctacttatagaagaatttaacaatagcagatga

SEQ ID NO: 431825 - DNA, 585 bp, Serratia marcescens
atggataaaacatctaaaaatcagatagtagacagcgatattgcgcgtttattgcttaaacatagaaaggcacgcaactggacggtagcagagcttgcccaacggtcgggcgtcagtcaggccatgatcagcaaggttgaacggggggcttccagtcccagcgccacgatcctcggccgtttagccaatgccatgaatattacgctatcaaaacttttcgcagagcttgagcaacaccagaactcactggtgctctttgctcatcagcagcagcattggacagatgaaaagtcgggcattacccgctggtctctgtccccagcgggcgcatgtcccgaacttatcaaagttgaaattcctgctctgggtcaacttacgatacccgcttccgccagtgagcatctttccggccaaacgctgtgggtgttgagtggcagccttgattttcgggtcaataatcaaacccatcatttacgcgccggtgactgttttgccctgacctttgccagcgagtaccaaatgagcaaccccgacagtgagcagggttgtgcgtacgtcgttgcttttagccaaaaaaatccatga

SEQ ID NO: 431826 - DNA, 639 bp, Serratia marcescens
atggcgacgcagctcgcatttggaagccgccaactgccccagcgtaaagctgcggcgttgcgtgttgcccaccagttgcatggcgggcagcgtcacgatatcggcctgcggcagcggcgcttcggtcagccgcagcggcggctgcagaccgtagctcgaccaatcctggctgcgacgatagctggccggcggcagaccaaactgcttgcggaagcagcgggtgaaggtctgctgcgaatcgaactggtacgtatcggcgatacaggccacgctggtgccggtcaggcgcagttcgcgcgcggcggcggtcaaccttctgcggcgggcgtacgtgccgaggatatggccggtgtgctgcttgaacatccgctgcaaatgccacttggaatagccggacctggcggcgatgtcgtccagcgtcagcggctgatccaggctctgctcgatccaggccagcagctgctcaatcacctgttgctggtgcatggtgttccccttatttgctcagtaatgtcagcgccaacatccggcctgcggcttcatcggcggccaccagtatcggatagccccagaatttggcgccgtattcggcgaatgcttccgccgccacgcgtttggcgtcgtccggttccagcatga

SEQ ID NO: 431827 - DNA, 522 bp, Serratia marcescens
atgaaccgaattgcaagatttcttctaactgtcagctcaatcgcccccgtgggcatcactctgatatttataggaataataaaagaaaaatggtggctagtctggtgctcattagcgatatgctgttttagtttgctatctgtgatatattttcttgactatgcaaaaaaacactcaacgtcgctatataaaaaggttgatactatttccccagcaaataaagaggtaactaactatttcttaagttatttattcccattattgggaacagatgccattgctgacaaatggcaatatgcagcatttttttacttctctcttgtcttttatatatgtttttctgaaaactacaatttcaaccctttaatatcggccttaggttataaattttatgaggctgaagataacacaggtgttggattcgtattaatatcgagggaagttattacaaatttaaaagatagagattttgaagttattcaacttaccgactacacatttatgcatgtaataaggaaatga

SEQ ID NO: 431828 - DNA, 870 bp, Serratia marcescens
atggctctttttgcaatgatgaacaaaaactctgctgttaaagtgtacaggattgacactgataacaagacagatataaaaataaataaattattttctgatcagatggcacattttgaatctcatcatgctacagaactaccatttgaggcaggatatactcctagttataatgaatgcagctacatcaaaaaatttatagacagtagcatattactagatgcagttaatcgtagcactgcaatgcctctgtggacaaaaaacattgggcttgatggtataacagctctttttatggctcctgattaccctaaaatcaaagataaaattgcaattcaaaccttctctaaaaagcaaatacttaatgaatcaaaatacttgtggcttagcaagaatgcatttaccatgtcagatcttttgggatttaatcttgatgataaattagttgctattattgaaagtgataagataaagtttagaaacttcaataacctcagaagtatttttgacatgaacgactattttgctgaggcgactaaacaagatctaagtgattttgtaaatcaacctattttcgatatcccttctgggttcgatctagtcgcacttgctgataatgtcatcaggaataaagtcactcttataaacaactcaaaaatattggtaaatcatactattttagatataaaaacagcggcttcaaccttgaaattccctattaaaaccacaggaagtggcgtcaatgaaaaaatcgagatgccatcaacaaagaaagaaataaaggagcttttgaattttttagatgaagactacttcaattcagaaatcacaaaacaaagatttcgttctaattcgaaacgcaaggcataa

SEQ ID NO: 431829 - DNA, 1059 bp, Serratia marcescens
atgcagctgatacggccacaggtagctgcgggtgaaacgcctgtcggccgccgccagcgccgcgtccacatcgccggtatcgtgcaccacccgggtcgagtgcggattgtcgcgcagcgcctgcgccacgtcggtcatctgcggcaaattgcggcgccagtctttccaactgacctgcagcgcctgcgccgccttgatcgcctgctcttcgcgctcggcgacaatgccgatgaaatcgccgatcaccaccagtttgacgatgccgggaatatgcgcgatcgaggtttcgtccaccgccagcaggctggtgccgacaaattcgccgctgtcgtacccggcatagggcggccgcaccacccggccatgcagcatgttcggcaggcgcatatcgtgtacgtaggtggtttcgccggtcgccttggccggaatatcgacgcgcgcggcgctggtgcccaccaggcgatattccgcctgcggtttcagcggcgcgtcgccggaaatcgacagctcgacatgaccgccggccaccagctcggcgtagctgagcgcctgcccctgcgggctgcggatcacgccctcctccagcgtcagctgttccaccggcgcatcgaagcgctgcgccgcctggcgcaacagccaacggcgcgcttcggcggcggcgttgcgcagcggcacggcggcgatctgcagcgtggcgctggcgatggtggcgccctgattcggcgcgcgttcggtatcgcccaacaccatttgcacctgatccatgcgcaggtacagctcttcggcgacgatctgcccgagcgcggtgcgcacgccggtgccaagatcgacatggccgttaaaggcatagatttcgccgctaccgcacagggcgataaacagcccctgctctttgggcttcagtaccggcgtttgccctttgggcaccggccccgaaggcggttgcacgctgtcgacgatcagcagcacgccgtcgcgctgcagcaagtcggcctggctcggcgatgggacacgggaatcagtcatgggcgtgggcgtcctcatcgcggcagagaatga

SEQ ID NO: 431830 - DNA, 2517 bp, Serratia marcescens
atggcacagcaagaaagaaaagtactatgtactatagaaaaaggttacagctctgaaagagaagagcaaattggaaagttaagagtatatttcgaagtttttgaaaatggggatatcctaccaataaatcaaatggagtttttttgcgaaactgaacaggttttcgtcactagtggatattctgacattaaggagagatttaaaaataatttatttgaagccatttgcatccctactaactttgaccaaaaagatggcaactgcaaatatgtaacacgtgcaaattcgtgtgatgaaattaaggggttgcaagtttctcaagtttatgatgttagcctgcccacaccaaatgacccattgatagctgttgatgatctccccttaaccaaaacattacttattaaagaaaatggttttatttatggaccattcgactacacaaataaatttgatgaaaaaacagagagttatattctttcattgaagtcaatcaatacaccgctaagcaaaataccacaataccacataggtaaagtcggtattcagaaatgtatcgcaaatttgtcaaatgaaaaaagagcaccattgtttttatctaatataaagagaatattggagactatagatgaagaaattgattttataactgacgatcaaatcctatcaatatatggaaataaaattgcgttaaatgcagatttcagatcattcacaaaaggcactattgctcaaatcagaaaacatttttcctcagtaacggaatacagaacattcccacaacgatttaatagattatttcaatgtctcgaagattctttagcatgggattcgactaaaacagaactaattcagactttcttagataccaaagaaggaaagaagatattagtagattatatatcccaaaataaagatgattacttcaaagaagaaaaagccaattttgctaaaaaaatggaagaagagacgaaaaaacaaaaaagtgcattcgatgaattaaaggaaaagaaagaggcattagagtctgaaattagaaaaaaaaccagagaaagaaatgattttgaagttaacaatgctgggaatttgtcatcattaacggatgaaaaacgaaaaattattgaaagccaaattgcaagtgaaaggaataagcttgatagtttgacaggagaagtcagagcgctagaagagaaatatagtagactcaaagagtatgacaagcttcataaagagattcagacattagaagatgatagagatcgtgctcgagataaaaagaagcaaatggaagagcaggttgatgaagttagagccaaacttaaggaaaacaatgagacattaacaagtcgtttagttaaactcaaacctgacgttgatgctctatgtggtttgagacctcgcgttgctgttcaacagcttgattataatgttccgataagattaaattatagttcgagtgatatagaagatattcgcgaggatttgattgatgcagttttagactctttaaacaaacagggtaggaaaactgattatgcaacagcagctaatatattaacaactatatcacaatgtcagttcactttatttagtgggttacctggcacagggaaaacctcacttgctaaaatgttaggaaattgcctaggtttaggtaatcgattccttaatatcccagtcgctcgagggtggacctcatcaagggatattcttggtttttataatgcactatcccaatccttttctcctgcttcaactggtctgtatgagttgatacaacatttaagttctgaaattgatgataataaggaccccgctgcttcaataatattgttagatgaattcaacttatctcaaccagaacattattttagcccgtttttagaaatggcagatcctgaatctaagcgagtcttaactacaggcaatccagataaagcatactttaatattcccgattatttacgattcttaggtactataaatcaagacgaatcagttcagtctttaacgcctagattacttgatagagctgcaatagtaaactttgatgattttgagccgaattatgaagtaagcatggttggttatgaaaatatagtcaattctacttcggaagctataagtggaaagaaattcattgatatttttaaggctaatacattagagctaccagcagatatagaaaaagtattacagtcagttgttataactttgagagatgaacgtcctgaatatggcaatccaataatagtctcatatagaaaaattaaagctattagatcgtattacaatgttgcaggtcctttaatgtcaatggaaagtaaatacctaggtttagattatgcgataagccagcatgttatccccttacttaatggttatgggcaaggctttggcaaaagattagaggccttgatacttaatctccctgatgaaatggaaaaatccattaaaatgctgaaaaagattttaagtcatggaaatcagaatatgtttagctacggacataatttatga

SEQ ID NO: 431831 - DNA, 1836 bp, Serratia marcescens
atgattaagtggagggtgtacatcaatacttatgatgactcggcatgtctatatctaaaacatggtgaaaaaatccaaataaaagagactgataagcttgtattttcagttgagatggatgctgaagacttttctagccacggagctcctactatgatggttggagatattccattattaatggttttacaggataatacgaatcaagattattataactttatatcgaaagagttaataaactcgcatgcagctagatatttctataactttttcggagaaagtgaggtcgttttatattttgacaatagattttcagacccgatatctcttacatttgatatattagcacgaaaagaaaatgctttaattgctaatgaaatgttgtgcttcttaacagagaatcttgaagacgcaattgcaatatgtttttcacgtagtaagcgtggcgcagattttttaggtgatgacgagcataatttcaataaaattgatgcaatcaatcaggcttttgattatttaagtagtacagtgcatttattcttaaaggatagaaaatcacaaatacagtccgatttgattctatcagaaaacggtgctccaacaggtcctgattcagtctattgggcattgaccaatctcgataaattatcaccagcaaaccaagatagcgtaaatattcattttaataatagaggatatcattacgaacaattgccaaaagaaatatcatttgaaaactttgacgtttacgagaatagggttataaatacttttataatcaatgcagtgaattttttatattctcttaaacgtgaatatagctcacattctgattttactgagaacctatcatatactgattatgtacgatttgatcatacaatggaaaagttttcaaagatggtattagatgtcaaaataaaggagattgatactctaatagctaaattcagtaaattgagaagcatatattcgaagattattccctccaaaaccaagatgacagcgatacctaaaatgtcatcatatgttattaaacactctcattacaaagaagcatttcatctaattgagaagtgctacaaaacacgatctcctgatttttctagtaataagttacttctaggattaaaaaatctttctatcatatatgaattaacagttctgttattactttacaaagaaatagaaaatgtctttcagactacatcatcgactcagaatttcagatatcatgcagagtctaatccgtttggcggagttgatgctgaacggccagatggttctataaataatcactttgcattttcaagtcctgaatttttaatcgatttgctttatgaggctaaaatatatccttacagtgctgatagcaagcctggtgatttgattgatactagtaacacttatagctctacgttgtatgggaagcatcatttctgccctgatttcgttctgaaaataacttcaaaagagaaaggcctggcttttactgttatacttgatgccaagtttaaagatttaaataccattaaagagtatgacatggatgcccttaccaataagtatttaatgaatattcactcagttgatgataacggtaaagttaaaatatcatcagttgatatgtttatcatactatttgcgcatgcgaaatcaggctctttacttagaagagtagccccgcgacattgtattacaggccaatatcctgtttttccgcaatcaacagctatagctcttcatactactgatgtttcattattaaatacacatttatcaagtataaagaaagtggtttcaggcatgattggcattgattcatttgagtag

SEQ ID NO: 431832 - DNA, 279 bp, Serratia marcescens
atgccgccgtactttgctttccagttgttgttcgagttctcagatattcttgcttcccggcagatatctttgacggacttcaatacggtgatgatctggtgctcagtaaatcgggctttacgcatgatgatttcctcaaaggacatattcagtgtcgaaagatctctagaagtgaatggcgtgggttgcagggatacttataactataacccgagggtgattataatgaacgcattagtaaaactaaatcttatattcttatggataaaaactagttaa

SEQ ID NO: 431833 - DNA, 234 bp, Serratia marcescens
atggcgaccaagggtaatcaatatctataccaaaacagggacggcatttggatctttcaggtgtttgtcccaaagtacatgcgggcaatctgcgatgggaaacgcgccttcaggaaaagcactggaacacgggatttggtgcaagcgcgtaattttcgtgaccacatgatcattgagttcaacaagatcaaaaatcagcttaaatctgatacgcctgaaatccgtgttcaatga

SEQ ID NO: 431834 - DNA, 390 bp, Serratia marcescens
atgcatgcgacaggaacattcgacatcaaattgacgccgcaaaccgcaacggccgaaattgagacggccaagctcagtcggatgacgattgataagcaatttcatggtgacctgactgcggccagcctcggagaaatgctggctgtacgcatggatgcgcatggctctgccggttatgtggcaatggagcgcgtaacggggaccttgcatggccacaagggcagcttcgtgttacagcacagcggcaccatgaaccgtggggtttcgtcgctgcagttgacggtcgtccccgattccgggacgggtgagctgacgcaattgagtggatcgatgacgatcgagatcgaccaaggcgcgcaccgctacacgatggattatgtccttccctag

SEQ ID NO: 431835 - DNA, 1197 bp, Serratia marcescens
atggctggtaaacttacgcgaaaaataaattactctgttggatataaaaaaccgtctccaactaagtttgattcattgtcattttttaactcttgtatcaagccggtgactgttttttccatgtttcttggtgtttttaattactggtcatatttagatgttattggccgtcttgattttatgcttggtagcattggtaatgtgaattcccttcttctattctctttcgtttttattttatttcttgtttccctttgtgcattattgtttgttccgtctatttttatttcactagtaaatcaagaagatattgaaagggataatcccaaggcaactctttgcgttgggctttcatttttcttctcattgttgtttctacttattggatgcatttcaacaggtgtgattaagagtctttccgtttttatgctctatttgttcagtctggttattttgtggatggtggttataaatagaataatcaaacgggtaggagaggattggtttaaaaatttgtttactggctttttctgtgggcttatctctattttttgcctgatgattgtgttttcccttagtagtctttctggattaagcgaggatgtgcaatttcttattgttttcgtagttatgctatcacagttagttcctggcaaaatattttttaatcccaagagaacaggtacagctaaaaaagtacaaagcaaacgtaatggatttattcttgcttttggttttggtgtgtacatggctttcttacttattcctggaactgcattttattctcaactatctacgtttaagactcttggtgtaatcagtcttgataatcatgtctttagggtttctgaaagtgtttttgatgatgtggtttttgataaggccaaatggaagattgaatccacttcaggtaaagataatgtaccgattgtacttaataattttaaaaaaatggatggtagtatacttattgtaggtactattggatttagaacaactgaacgtgtattagtttgtccaccttcgtatgctaagacagttgatgattatgcgcatgaggggatgttaagatttaaaactttatttgataataagaaaattgatctggctagcgagacgatgaattgcgtcttactagtaaatagcgctgatctccagcaggatttgttatatagcgaatttatgaagcaaacctga

SEQ ID NO: 431836 - DNA, 123 bp, Serratia marcescens
atgctcgcgatgcaataccgtttcaccctgcccgtcggtttcgatcctctgtccgcccctttgaccacactgcgctgcgggttgacagccaaacttgatattgataatcattatcaatattga

SEQ ID NO: 431837 - DNA, 324 bp, Serratia marcescens
atgaaggatcggcgcggcggcgatctttccggcgggcagcaacagcagctggcgatcggccgggcgctggcctgccggccgcagctgttgatcctcgacgaaccgacggaagggatccaaccttcggtgatcaaggagatcggcgcggtgatcaaacagctggcggcgcggggcgatatggcgatcctgctggtggagcagttctatgacttcgccgccgacctggcggacagctatctggtgatgtcgcgcggcagcatcgtgcagcgcggcgccggcagcgctatggaacaggacggcgtacgcgggctggtggcgatttaa

SEQ ID NO: 431838 - DNA, 1026 bp, Serratia marcescens
atgatcgttctttcgaacgtttgcaaaacttttgacagcgcacagggccgcgtcgtggcggttgacgacgtcagcctggcgatagaagccgggcaaatttacggcatcatcggctacagcggcgccggcaaaagcacgctcatccgcctgcttaacggcctggaaacgcccaccagcggccgcattgacgtaggcggcttcgatatcgcccgcgccaaaggcagccatctgcgccaggcgcgcctgaaaatcagcatggtgtttcagcacttcaacctgctgtggtcgcgcaccgtcagccaaaacatcgctttttccatgcagattgccggcgtgcccaaggcacagattgcgccgcgcgtggcggaactgatcgcgctggtcggcctgcaggggcgcgaaaacgcctatccgtcgcaactcagcggcggccagaaacagcgcgtcggcatcgcccgcgcgctggccaataacccgagcgtgctgctgtgcgacgaggccacctcggcgctcgatccgcaaaccaccgacgccattctcgacctgctgctggacatcaaccgccagctgaaattgaccatcgtgctgatcacccacgagatgcacgtggtgcgcaaaatctgccaccgcgtggcggtgatggaaaacggccgcatcgtcgaagaaggcccggtgctcgacgtgttcactcgaccacagcagccgatcacccggcagttcgtcaaacaggtgtcgcagtatgcggataccgaagagagcttcaacccgctgctcaccgcccatctgccgggggcgattttcaagctgaccttcgtgggcgtgcaaacccatcaggcggtgatcgccgaagtgatccggcgctacgccctgaccatcaacattctgcacggcaagatcagccacaccctcaacggttcgttcggcgaactgtacatccacgccgaaggcaacgaacaacaagtcgccgacatgctcagcctgctgcacgaaagagacatcgccgtcgaggttatccaacatgattga

SEQ ID NO: 431839 - DNA, 822 bp, Serratia marcescens
atgatgaaaaagcacctactgatgttggctttcgcctccgtcgccaccctcgcctcttttggcgccacggcagcgaccaagctggtggtcggcgcctccaacgtgccgcacgccgagatcctcgaacaggccaaaccgatactggcgaaggaaggcatcgatctgcagatcaagcgcttccaggactacatcctgccgaacaccgcgctggccagccacgacatcgacgccaactacttccagcacgtgccttacctgaactcggtgctgaaagaccacgccgacgacaagagctacgacttcgtcagcgccggcgcgatccatattgagcctatcggcatctactcgaagaagtacaagagcctgaaagatctgccggaaaacggcaaaatcatcatgcgcgacgcggtggcggaagaaggccgcatcctgtcaatctttgaacgggaaggcgtgatcaagctgaagccgggggtgagcaaggtggacgcgcgcatcagcgacgtggtggaaaacccgaaacacctgaagttccaggccaacgttgagggcgcgctgctgccgcaaatgtacaacaacaacgaaggtgacgccgtggtgatcaacgccaactacgccatcgacgccgggctgaatccgaccaaagatccgatcgcggtcgaaagcggcgaaaacaacccgtacgccaacatcatcaccgtgcacaaggccgacgtgaacaaaccggagatcgtggcgctggtgaaagtgctgcactccaagccgattcaagactttatccgcgagaagtaccagggcgcggtgatcccggtcaaccagtga

SEQ ID NO: 431840 - DNA, 1491 bp, Serratia marcescens
atgctgtatggtcgcatgttgttaatcatgtttgcgacgctatatacatcacgaatggttctggaagccttgggtgtttatgatttcggtttgtatagtttggtcggtagtataatcatactgttctcgttcattcagaatgtttcggcgttggctacacagcgttttctatctgttggcttgggaaagatggatttttcctggacgagtaaagtatttaacgtcagtataattgttcatttgattatatgtgccctgataattatcattgcagagacagtcggactttggtttttgctgcataagttaaaagtgccagaggcaaggctcgatgatatattttgggtctatcaaatatcaattctttctttgctcttccaaataatgcaaacgccatttatagcatcaatgattgcatgtgaaaaaatggatttattcgccaagatcggtatatttgatgccttccagcgatggtttatggtgtttattttctcggtctcggtgactgaaaataaaattatctggtatgcgatattcttgctaataggctattttcttgtcttttcagtttatcttaagttttgtacttctcggttaagtatttgtaaaataaatcttcgccagaaggatagcgcgggtttgctgaaggaaattttcttcttctcaagctggtcgatgctgggatcactaagcgtggttgggttgtctcaggggatagcgttgctaacctattattttgtaggcgtcgtagcgaacggtgctgtctggttagcagaacaagtattaattgcctttaatagaattatcggtaccttgcagacagcatttaaccctcaaataataaagcagtatacgattggtaaccatcgtgaagtagagtctctattatcgctatcttgcaaactaactgcgtttgttgtcatggtttctgcaataccggtttttattgatgcgaaaattattgccggaatttggctaaatacgcctcccgagtatttggtcggtcttataaagatagtagctatatatgtcctgatagattcgatgtcgggtccttatgtgactgcaatctatgcagtgggaaagctaaggaactatcaaattatagtttcttcaatcatgctactttctttagtactgacactaattctttactctgccggctactctatttatatcgcagtatcagcacgaatattttgcactttaggtttattgattttcagagtcatttatgtaagcaaggtcataggggtgagcgtcaatcgtttcttattatatgacttccctcgattggtatttgtagctctggtttgtatcttttttagtcattattgtagttattatatagtaggtggtttcttcggtgtcgtaagtctggtgttaattaacctctttgccgtcttgttcatgttctctataattattgtgagcaaaaaagagagggtaaatattatcatgatgattaaaaatcggtttaaacgggtttaa

SEQ ID NO: 431841 - DNA, 690 bp, Serratia marcescens
atgctgaagaatagccgtgcattaataacggttagtgagttttctaaggatgaaattgatagtgtttaccattatggcaaagatagaataaatgtcatctataatgcatcaagtgatgttttcaaaaaaaaagcaataacctctaactctcaggaggcaaataaatattttttggctgtttcttctcctagtttccataagaattttcatggtttaataaaagctttttcaaaagcagaaaaatttgatggctactctttaaaaataatcggtgagaagagtcagaatcttggcggcatagatttggatgagttgatcaaaaattgcaaaaataaaattgaatttctcggtccagtttcagatgatgaactcgttgaactttattcaaacgcatactcattcatatttccatccctatatgagggattcggtattcctcctttggaggcgcaagcatgtgattgccctgttctgtcatctaacgcagcttcaatgccagaagtcttgtcggatagtgcaatcttcttcaatccagaagatgaatctgaaattgtcaatgcaatgtatatgataagagataacccaacgcttcgtgttcagttaatcgaaaaaggtcgcgaaaatgttaaaagattttcttgggtgaactcagcacaacaattgaatactcttgttgattgcttaaattag

SEQ ID NO: 431842 - DNA, 147 bp, Serratia marcescens
gtggtgaccggggtgatcatctttaccgtcatcaactacggcctgacctatatcggcatcaacccgtactggcagtacatcatcaagggcagcatcatcatcttcgctgtggcgctggactcgttgaaatacgccaagaagaagtag

SEQ ID NO: 431843 - DNA, 147 bp, Serratia marcescens; identical to SEQ ID NO: 431842

SEQ ID NO: 431844 - DNA, 1608 bp, Serratia marcescens
atgagtgaattttatctacgcacagaaagcataaagcaatcagatattttatctttatctgttgtaaattcaactgacagaggaattcttgacgctctgaaatctaatgaaccttgtcttcttgaaggatcaaggggtactggtaagtcatttcttatgagagttgcggaattagagttagaagaaggagataaggcatgcgtaacagtatttgttcctttcaacaagagctctttgataacgactgatgataaccttcagttttatcattggatgatggctaagacattaaaatacctacttaataagcttagaaaaatggggatggttgtttcaggcttgacctctaatttgctcagtaatgagcatagtgactcagaagaaagcattgaaaccaatttgaaagaaatcgtaagacttttcgaagattcttataaaggaaagacttctgttgatatatcaacgctacctgatatagaagatgtcaaagaagcaatacaaatgatttgtgaagaaaacaatctagatagagttattttcttttttgacgaagcggcacatatatttagacctgagcagcagcgtcaattcttcagtttattcaaagatcttcgctcaccatatattacatgtaatgcagctatttatcctggagttactcattttggtgactcttttgaaccaattcatgattgtgtattcaaaaagcttgaaagaaatattttagaatcagattatcttcaatatttcaaggatattgtatttaagcaatcagacgattcgttaaagaaagaaatagataatcaaagagatcttttcaatacgttagctttggcttcaggtggtaatcctcgaatgttgttgagaactttgcaagatctatcaaaattaaatactagtggagttaactccacaataaagtccttttatcgtaatcaaatttggacagagcatactgatttgggggaaaagtacaaagggcatcgtgaagttatagattgggggcgagatttcttggaaaactctgttatacctcgagtagaagattataataagagtcgaagatataagggaacagatgaatcaacaatttatttttggattcataaagatgcaccagaaccagttaaggaatctttaagacttttaacttacacagggataattagaaagatcgatagcgcggtcagagcaactagatctgaacttggaacaagatatgaaataaaatatgggtgcatgttatctttagaaagtaacccacatttagactcaaaagaattttataaaaatttgtctgttagaaaattccctgagtttggcaagaatcatgccagctatgctggaagtggagatcttcttaataaacatgaacttcaatatgaagagtctttaagatctctcttaaaaaaatcaattaacgtattagtagcgctcacaaaatggcaaaaagaaagattacagtctgttggcattaacacaattgaagatcttcatagtaatactgaggaaagtctaattgaaaaaatatatggagtaggcccctcgagagcacggactatgaaaaatgctgcgaatgcagagcttcttgaatatatttcaggatga

SEQ ID NO: 431845 - DNA, 699 bp, Serratia marcescens
atggatattcaaggatattttactaaattaaatgcagaatcccaaacagtcttcgaacagtctatatcgcaaaaagaaactctaggtaaactacatcatttgtcttcgtgtatatacgaaatgtcaaatgttttgagagatcctcaagaaaaaagaattttagaaacagttagtgcccaattagaatcatcaaactatagtttgattgtaggtttatatagacaagcattttcatcacttagacttgcacttgaaatggggctaggggctatatatttttcagctagtaaattagaaatgcatgaatggcttgatggtagaagggatattaaatggtcaagaataatagatgaagataatggtgtgtattccaaaagatttattatggctttttttcctgatttagtgggtgatgccgaaacatataggaggaatgcaacgaatgtatatagaaagctttctgagtatgttcatggcaacaacgaaacatggataaatggaagtatcaaaattatatataaaaatgagctattcgaacaatattgtcagtattaccagtgtgtaactgaatctatattgttcgcagccacatgtagatatgcgaaaagtcttgatgagactgagcgcgaatctttgcaatttttgccagaagattttaatcatatagaaaaaattagagaattattcggtagatcatag

SEQ ID NO: 431846 - DNA, 786 bp, Serratia marcescens
atgtctttgcattcaccaaaagaaatcgccgccctcgccgttcaggccggggtaaacaaaagccgcgccccgctcgctaatctgctgattctgggctttctcgccggcgcctttattgccaccggctttctgctggatattcacgtcatcggcaccctgccggccgaatggggctctttcggtgccctgttgggtgccgcggtctttcctatcggtttgatcctgactattctggccggcggcgaactgctgaccggcaacatgatgaccttgccgatggcctggtttgcccgcgaaatccccgccatcgccgtgctgcgcaactggttttgggtcaccctggccaacctggccggcagcctggccgtcgcctacttcttcggccatttgctgggcctgaccgaaggcgcattcttgcataagacgctggcgatcgcgcaggccaaagtggatgcggacttcctgcacgccttcatttccggcgtcggctgcaactggctggtgtgcctggcggtgtggttagccttcgccagcaaggatgtgccgggcaaagtgatcggcatgtggttcccggtcatggcttttgtcgccatcggcttccagcacgtggtggcgaatatgttcatcatcccggcggccatctttgccggcggcatgggctgggagcagtatctgcccaatttcgtcgcggtatttctcggcaacgcgctggggggcgccggttttgtcgggctgatgtatttcctcgcctaccgcccgggtttgccggccggcgagcaagcctga

SEQ ID NO: 431847 - DNA, 606 bp, Serratia marcescens
atgagaacggaaacaaaatataaaatctatgccgacttctttcgcgcgagcagaaagtccggcatcgcaaggctaatcaagtcccttttccaacagaactacatcggctttaactacattttcaccttgcggctgcacagtgattttcatgccaaaaaacgcaatatctttgagagaatttgttttcgtctactggtgaaaaatctcaagcgcctgcaaataaaatatggcatcgaaattccccatcaggccagtatcggtgaaggtctgcttattccgcacttcggtggcatcgttatccatcccaacgtgaagattggtaaaaattgcaccatcctgcaaggtgtaaccatcggcaacaacctcttcaaaagccgtgaagacgtcgccactatcggcgataacgtcaccattgcagccggagccaagatcgttggtccggtcactatcggtgacaatgtgacgattggtgccaactccgttgtcaccagtgacattgagccaaactgcatcgtggcaggcatgccggccacgattatttcgcgcaaagagtcaattgtgctgaatacggattacttgtcatttgacgaatatcaaaagcgctaa

SEQ ID NO: 431848 - DNA, 1722 bp, Serratia marcescens
atggcctctgtgcttttggcgtcgcaaatggggatccgtgtggcgcgagagatgccagccggcgtcgattcaatttctcacgcttggttgcttcgaggcggttatcttttccagcatgcggcaggcattttttacttttctcccctgttgtatcgcgtcgagcaaaaagtctccgcgttgattgccgaagagatcaccaaggaggggggcagccaagtgcggctgccaattcttcagaatgccgagctttggaaacagtcgggtcgttgggacgtgtatcgccacgaaaagttgatgttccaactgaccgatcgcaaagaaagagagttcggtttgtcgcctacggcggaggaagcggtgtgcgatatggcgaagaaaatgatcgtctcttcagcccagctgccgcttatttttttccagcaaaatatgaagtttcgcgatgaactgcgtccgcgctccggcctactgcgaacccgtgaattcatcatgatggattcctatagtttcgacatcgacgaagcggggttggacgtttcatatcagaagatgcgtcaagcgtaccaggctatttttgaacggttaggactcaattacattaccgttcaggcggacagtggcgcgataggcggggccagctcggaagagttcatgtcgatcagtgaagcgggcgaagatacgctgctgttcaatgatacctatgcagccaacttggaaaaggcggcctccctgccggcggaaccgatccgcgtaccggaggcggaaaaacgcattgttgaagcgaatcaacgcacgctggaagctgtctcggtggagtatggattttctccgtcatcaacgctgaaaacggcgttgtatgacattcaccatgcgggcagcaaagagcgcgtcgtcgtattaatgcgtggtgattgcgatgtgaatattgtcaaactggcgaacgcgtttggcggtctggaagcggtgttggtcgatgatgctgaaatcaatcgcctcattgcggctaaacctgcttttcttggaccgttcggtgcggtcgcggatctgaaaatggtggccgataaaagtcttgaggggctgacgtcgttactgaccggagccggggagccaaacaaattcgcattgtctgttaagccgggccgagattttcctttacctgagtacattgatatccgcgaagcgaaagtgggagaactggggccgaatggctgcccgcttaaacagtgccgtggcgttgaaatcggacatattttcaaactgggcgacaagtactctagggcgcttaacgctggcgtcaatgatagcacgcagaccttccgtcctttccagatggggtgctatggcatcggcactacgcgggtcatcgccgcattggtcgatcagaacagcgatccgcaaacggggctgatttggccattgcaggttgcgccgttccatgttcatttggtcgctctgaaagccgcgttgcagccagaagccttgaaacttgcggcgtcactcgccgaaaaaggcgttgaagtgctggttgacgaccgcaaaggctcggctggggaactgttgaaagattctgatatccttggtttgcctttgcggatcgtgatcggccgtgatttctccgaaggtaaagtggagtttctcaatcgcctgaatgatgagcgcacgctggtgcaggttgatgagctacttgagaaggtttcaacgatagtatccgtagcactggcgtaa

SEQ ID NO: 431849 - DNA, 7611 bp, Serratia marcescens
atgagccatacagtatttcgacctggcatggataatcgcggcatcggccattgcgcatataccgacccgcgcccggtgttccggttatttgaagattgcgctgcgcgcaacccggaggctgatgcgctgatccacaatggccgtcatgtcagctatgcggctctggatgacaaagcgaatggctatgcttgggcgatacagcaagccggcctgggccgcggcgatatcgttcttctcgcgcttccccggggcgaggcattgatcgctgcgcttatcggcgcacagaaagcgggggtggtttatctcccgatcgatcaggaatttcccgctgcgcgagtcgactatatggcgcaagacgccaacgctcgagcggtcattacccaccgtgaaaatgctgcctcatggcaggacaaagtgtcacaaatcatctttcaagaagatatcgaggcgaccccggcgcgagtggaggccgatgttgactggctcgaaccgatgtatgtcatttatacctcgggcacgaccggtaaaccgaaagggatcatgcagtgccatcaaaccgtcagcaacttggtgcaatggcataaccaggcttcgggcatcgactgcacagggcgcgtgctgcagttcgcttcttttggatttgatgtctatcttcaggaactgttcccggcgctgacgaccggaggcaccgtcgttttgattgatgaacaggatcgcatcgatcctgcagcggtggccaaatgcattaccgatagcgaaatttcaaccctgtttctacccgtctcagtgctttccgcgctgtttgaagatccttcgacgctacccgacactctggttcatatcgtaacggcgggtgagccgctggtgatcacaaggaaactgcgtgaagagctgaacaaacggcccaatctgatcatctggaatcactacggcgtgtctgaatcgcatgtcgtgacgcaagctggatactccgccgcaacgcatttgccggaaaacccgaatcttggccgcccgatcgataatgtcgtcatctcgattctcaacgatgatggcgtgccggcaaaagacaatgagccgggagagatttggattagcggtgcctgtctggcgcagggatatatcaatatgccggaaaagacggcggtgctgttccgagaatgtgacggtgtaatgtggtatcggacgggggattacggctactttttgccgggcggcgagatcgttttcacagggcgcaaagatgatcaggtgaaaatttcagggcatcttgtcgtgctgagcgaagtcgagtcggcgctcttgcaacatcccgccgtttcgtcctgcgcttgtaccgttcagggtgctgctgccgatggcgtcatcctcgcgcactgcacgctgcgtgaaaacgttgatgccggcgcgttgagggagtttgtctccgcgcttttaccctcctggtcagtgccgggcagaatcgttttccatgaaaagttgcctatcggcgcaacgggcaaggttgaccggcaagccctggccgtaccggaatacctggacagaaatcagatgggcgtgccgttcgagcctgccagcgatgctttgggcggcatcatactcgatacattggagagcgtgctgaatctgcgtgggattggcatgcaggataccttcgcgctcctggggctaagttcgctcaatatgattagggctgccacgctattgagtcaaaaagtcgagcggacgatcagtccgatggcgttcttcgaatgtgcggatcccgccggattgagagacgtgttggccggtaagcctgaaaaagacgcttcgacggcggcggaacgtagggcgacgaataagatcgccattatcggcatgtcggggctgttcccgggtgctgacgatattgcaacgctctgggaggccatgctggcgggcaacaacatgctgagccggctggaggaagagggagatgcgttgccggaggctgcactcctgccgaagaagcgaggcaaaaaccgttttatcgggcgtatagaaggcatgggcagtttcgacccgtcgctgtttggcctctctgcccgtgatgctttatggatggatccgcaacagcgcaagtttcttgaacaatcatggcgctgttttgaagatgcgggtattgatcctcggagcatccacgggcgagtcggggtctttgccggtagtgctgagagcacttatctattttatctccagccccgcatacgcagcagcctggactatctgaacacggtaatcagcgcagataaagattttctcgccactcgcgtagcgtggcatctgaacctgcatgggccagcgatgaacgtacagagcgcatgttccaccgggcttcttgcggttcacgaggcctgtcaggcaattaggagcggtgaatgtgatatggcgctggcgggagcttcttctttgatgatcccgcaggaaaggcatattccttatgagcctaatacgatcttttccgaagatgggttgacgaggccgttcgatgaacgtcgcgatggtaccactatgaccaatgccgttgccgcactgttgcttaaaccgctggacgcggcgcagcgtgatggcgatccgatctatgcggtcatcagcggtaccggcgttagcaatgatgggcatcgaaaggccagtttttctgcccccagcgtgaccgggcaggctgaggcgatcaggggagcgttagcgaacgctggcgtgacgcccgcggatatttctttcattgagacgcacggtacggcgacaaagctgggcgatcagattgagcttgcggcattgagtcaggtatttgacgtccccgaacgtcagggccaatgcatcctgtcatccgtcaaagcgaatcttgggcatgcgaaccgcgcagccggaaccgttgggctgattgccgcggttctttcattgtctcatcgaacggtgccgggtttggcgcattttttccgggccgacgaggcgttggcattggatcgttcgccttttcgcattgcgcagcggccggaacgcctgccagaaaagggaacgttatacgccggggtcagttctttcgggattggcggcaccaatgtccatctcgttattgaatctgcgccgacgtaccccgagatgagagaaacggcacagacggaattgctgttgctttccgcgtcgaccaccgagaaattggacgcgcttaaacgttcgcttgttcacgcattaagaaaacggccttatttcctttctcaggttgtcaacacgttgaacatcggccggccggcttttaagcaccgagctgcgtttgtcgccgatagtacggccgatttatgcgcgcgtcttgacggcgatctttacgccgcgcatggcgatgcgagcaaacgcacgaaatcaatctggctctttaccgacgcgccattaccttacttaggggccggcaaagcgttttatgaccgaaatcccaccttccgccaggtaatcgacagcaccattgccgctatgggtgagaacgagagtggcaaggcgttcagcgagtggttcggcgacgcgccttcagcagttgagtataagcagtgcgcggtttggcggccgttgagttttatggttcagatggcggcggcgcgcgcactgatggcactgggcgtacagccggacgtgattgccggtgggcgcgagagtgcattggcctatctggttttgtcacaggcctgtacgctcgaagcggcgctgacattgatggcccggctgagtgaggcgggcgaggcgcaagagatcggcgcgctcatcaataatttcagcgctgtgcttgatcccaccgatgccaaattggatttccacttcgtgtcatcgtctacgggccagtacctgtccgtgaacgcgctctgcgagaaagaaacgctacgcgcaacgttgaaccgggagagtgcaggctccggcgggctgcgtcggcccccggcggatgaaatggaggagatcgtcatcttgggcgccgcctctttgagtgccgctgttccgccgattgagccggaaaaacgtgaggtatttctcttctctgcaacggcgggtgatgaaatggcctcttttgcccgcgtcatcggcaagcattggtgttccggcggacatgttgatcgtgccaaactggtggcgaaatgggtgctccgtatcaacggtttgcccggtactgtctttgagaaacgcgagtacatgttgccccttgaatacccgacgagtgtaccggctcagcctacgcctaccgctttgccactggctcagcagctctggcacagagagttgaggagcgaaccgcccgaacgtttattcgactgggcggcgctggttcagcgctcgccagcttggagcgttgtcggcaatgatcgccagagcaaagagctggccgagcgaatgcggcgggcggggctcgtcattcattacgtcgaaccacaaaacctggctaacggactgcctgctgattcggtcatcgtcagcgcgacagatgcggcggcggagcagcgattattgctcgttgcccggtgtttgaaggccatgaaatcagcgagagaagcggagttactcatcgtccgccatgaagatacgacatctcccaattttattcccgacgcggcgttggccacggccgccgccgtcgcggcgattgaatatcccggtatcaaatgccgtttcgtgacttttgatgccgtggcctcgcttgatgtgatggatgttcaactggcgacagaaatgggggcgcttaccgagaggccgcaagcatcgacgattgtatggcgcgagggcgggcgttttgaagaaacctattccgctcgcgcggcctttgctacaaatatgcccaatctcgataaaaacagtgtggttttcattacaggcggcacggggaatgttgggcaggttctctctgacatgctggcggtgaaactgcggtgtcgtttggtgttaaccggtcgcaggccgatggaggaaccgggcgtcaaggcgcagatgagatcgcttcaggagcgggggagtgaggcgatctatataccgtgcgatgtgaatgacgagcaacaggtctatcaggcgctcgatctgaccgtcaaaaaattcggcaggcttgatttggtgttccatcttgccgcgtcaatcaatgaagagcgtttcctttgtttcctcgccgatctttccgaagacaaactgaaagagcaaagcgatccgaaaatcagagggatgcacgcgctggacaacgggctgaaagcattagcgttggcgccggaacggatcgcgttctcttccatttccgtcacgttgggcggcgcaggctatgcgccatacaccctcgcgaatagactgatgctgcacgaagggctcgcggcagggtggcgtcttattcattgggatgtgtttgagaaaacggcgcagtcagcgggcgaaggccgcattgccctcggctccagcctgaaaggcgcaggtcttacgggggaggatgcctggcatgccctggcgcacgttttggcgacctcggcaagagaaaccgccgtattcaagttttcgccgtttaaccggccaacgagcgccagaaagaaaaccgcgacgcttgagccgcattcggcgcaagagagcgacggattgagagagcgtctgagccggctatgggcggataatctcgaactggatgcgctgcctgaacatgcggatttcctcgcgctgggcggtgattcgatggcggctatcggcatcacgatggacattcgcagcagttttgctatcgaggtcccgcctgaacaactgctcaacaacactgaatttgatgcgtttgcccgcagcatcgctgaacttgtccggcaggctaacggtggcgcatcgtatgaggatacgctggataaatcgatacgccttatttgggaggagcagttggagcaagagcatcttgccgcagacacggattttctctcggcgggcggtgactcggtatcggcgatcggcgtgacgatcgatattcggcatcagttgggcatcgacatcgatcccgatctgctattgcgacatcctcgcttggacacgttttgccgggcagtcagggatattgctgaacagcgcgttgcagacgcggacagcggcttggccgaagcgattcggaaaatatgggaggataatctggaggtgcggatcacggaccggaaagcggattttcttgcggcggggggcgactccgtgtcagcgattggcgtgacgatggatatacgcgagaagcttggtatagatgtcacgcctgatgtcttgctacagcatacaggtttggatgtctttatcgataaagtggccgcactgacctcgcctgaaccacaacacccaatggcccaaaagccgttgtcgtatcgcgcgtctcccttgcagactcgatggttctatatgcacagggaaggttatgggaatctgatcatgcccgtcagccttaagggcgatatcaatgtggctgccttgcgagaggccattgatggcgctattggcgactttgacgctttacgtacagtgtatcatgaagaaagtacgggcattattcgggcggatgttctttccagagaaaaactgacacccacgcagatcttgccggaagaggcccaggcgtcggggcaactcggcgacctgattaatgcattgcaggcttcgccgttgcctcttacggcgccgccgataagaagctggatcctgcgaacatcggcaaccagcgtattgatcatcattcatactcatcatatttgctttgatggatggaccactgcgctactttcggatgccattcgctcttattatgaagacgacatagggccttcggacattaagccctatagtctggcggcggcggaggcatactcctggcttgagggcacccagggcagggaacaattggcgcgtttacgctcgctgttcaaaggggcaccgttgcccgtcagacctaggccggaccgtaacggcaacgacgctgaacgcgccgcgcacaaggtgaacagcacgctgtcaccgcaggcggtcgagaggatgcgtggcaaggccgcggccaacggcgtgacgctgtttactgccatgatggccgctttcgctcggttgttatccgagttttcaggcgaatatgatctgatcttcggtacaaccagcagtggcagaatggcttcaggggcagatcgtaccgtgggcgtgtttgttaatcctctgccggtaagaattaaattggatgcggagaatatgcagcgcagcgctttaacggcggcgcgcgaggcgactttcatgatacaggcggggatgcgttttccgattaccgagttggtggagcatgttgatcccttcactcagcgagagcttaatgacgcgtttacgtcttatttcctctatcagaactttaaaaagccatcgaaatggaaaggtattgaatatgaaataggtgagccggaagataacacggaaaattcagacttgatgcctttcgtgagcaaagaggaaatattaatgcgtcatcttgagctgatcgtctttgagcgcgacgacggcagcctttccctcaatctttggggacgaaagggcctgtattcatcagcttggctgcaggccatattggagcggtacaagtggcttgctgacgagtaa

SEQ ID NO: 431850 - DNA, 1269 bp, Serratia marcescens
atgcatctctgtgagaatgaagcggcacagatagcacacaggacattcgaacgttggtttgaagaggaaaaagggcggatttcagacgcacttaccgactatatcagtatcgataccacgtcgcctaatgagtggcgagccagaccttttctaaaagaattgcttgaaccgctcggctttacgctgacggagttgacgctgccggatagcttttggtcgcatcccgaacgtgcgcccgagccggtttccaagctctccgcacactcttcgctgttacgtgcccaccggccgggaaaacctggaggaaggcacattattgtcaatgcgcatgtggatgtcgtgccgctgcaaccggagtttaaagatggcatgacggcccggattttcgaggacagaatcgttggccgcggcgcggtcgataccaaaggcaacctcatcatgttcgttgaggcgctgcgttggcttgtcgcatcgggcaacgataccgatcatgcattgaccctcgatttggtctcagaagaggaaattggcggtaacggcgcattggcttccacgctcagcggctgcccggcggattgctgtctggtgctggaaccgaccggcggcgaaatcttcagagggcaccgaggttgcgtgacgtttgaggtcgagttcaccgggcatgcccgtcatatgggggatgcgaaagaaacggagtttacggcaattgacgccgcgacggaggcggttcgtcagttaaaaaatctggagaaacgcctcgacggcgaaaaggttctcgttcctgcattcatcgattgggagagagccttacagattaatgtgggggaagttaaagggggagattggtatggctcgacgcctcgttcctgcaaaatatccggtaactgcggtttcctgccccatcaggggttggggggaacgcaagagaggcttaaacacttcttttcagcgcttgtcgaaaatatgcccggcatagggttttcattaacctggccagcattgcgcaacgaatcctgcctgatccctatggacaacccattcatcactgcacttgccgcgctcaccgggcataaagcgccgtttcgcgcctggaatgtgagctgcgatgggcggcattacgcccgattaatgggggtcccgacggtgatttatggctgtggaagcctgaaggaggcgcatgcggtaaacgaaacgctttattttcatgagcttaaagaaggcattgcgctgactgcaaaaattttgattgatcccctaggaggaaagtga

SEQ ID NO: 431851 - DNA, 1062 bp, Serratia marcescens
atgacatccaagatccttattgtcggatacggatttgcaggaaaaagaatgcataccgtgctcaattactcaaatcaaaatcataaaaatgcattcaggcagatagtgattgcagatcccaaaatgactgggcaagtcgatggggtgctggcgacttatcacgatgtcgaacaggcgcttaaacatcatcgattcgaggcggcaattgtcactgtcaatgaagagcatcatcacggcattttgaagcggctcaccgaggccgacattcctcggatcctttgtgaaaaaccactgaccgcaaccttggatgaggcaaaggagcttgaaccggcgttgagcgccaagattttctccatgaatcttgtggagcgtttcagccccgtgtttaaggattttttcgcgtggcgaaatactgtggaaacactgaagcctgctcgcgtgcaactctattggggaaaaaacagaataagggattgcagaccgactatgggggtgctcagtgaagcgattcatcctctcgacctagcctcttttgctttcggcattcgcgagatcgacgtcatcggcgggtttatgcatcacagcaatttctctaaccgcccggaagatgcgatagccgactcattgcattgcaaacttatcagcgaagaccgctgcattatttcggcgcatgcttccttcacctggatgtctcgccggcgtgaaatgttcgcgcatttggtgggagcgaaagacagctatatcgttcattttactttcgatatgccgcgttgggattgcgacagcgtcaccgtcagccgcatcgaccccaaagacggtcaccgaactacggttttgcagaaatcatatacaaatcaggacttccccgaaccgctggatcaactgagtaaagtctatcgattcgtgacccgctcgattgatgataaacctgctcgtatgaatgaacccgacagtatcgttggattggaacaggcgatgcgcctgcagacctggctggaacaaatatatctggcgttggaaccgcaaagcaagggccaagccgaaaagctattcgcatcctga

SEQ ID NO: 431852 - DNA, 720 bp, Serratia marcescens
atgaggctaagaggaaaaatgaaaaagacgattgtgatttttggcggtagctcgggtacggggctggcgataatcaaggcgttgagcggagaatatcataccgtttgcgcatcgcgtaccgaacctccagccgaggcaaaggccggccagtggctatcttgtgatgtgcggcggtcggaagccgtcaatagcgtttttaacgcgccgcacggcgaaatttacgccgtcattaattgcgcagccaccggagcctatgcgccattttcccctgagtatcacgcctactggcaagagattgtcgataccagtgtcatgggcgcggtgaatgtcatgagtgctacttgtaaatacgctcctcagtgtgagcatctgctcaccattggctccgtcgccagccgccgccctagccctacgccgggaaatgatatctacgcagcggcgaaaacggccgttagccgtcttcaagaagattttcgcttgcgcctgcgtcaagaaggagcggcgatgcgagtgaccctgttgacgcccggctatattgagggaacccgttttggcgagactttctatcgcagcaatcccgagatgcaggaaccgctgttcgctgcttttcagtccttagtccctgacgacattgcccaggctgtgctgtggtgcctttcgcggccttcccatgttgaagtgtctgagttggtgatacgtcccagagagcaggcttgctga

SEQ ID NO: 431853 - DNA, 1278 bp, Serratia marcescens
atgactgaagccaataatcaagcatcgtcgcttgccatcagagaaggacggatgctgtcacgtaattgctgtgcgttgtatatgattaacagcttcgcctattttatggcgtggccgctcttgaccattttgatggtgaaacaatatggtatgacgcatcttgccgtagggacaatattcacggcagtcttattgcttaatgccaccgtggctcttttcagcagcgtaattatccggggggtaggtgccaggaatagcatcttcagcgggcttgttctgcaatgcatcggcttcatcatcatcgggctcgctaacgttccgatgtgggcgattatcggattgctggttatttctacggggcgaggtgcatttgaaagcccaatgaaaacgtatctttccgataatattttagacaaagggatgctgttcaagacctttcagttgacctatctttttgttaatgcaggggcggcatgcggcccgctgttctcaatgacgataggactcaaaaatgtcaacgcaaactttttggtggctggtgtggtttttctggctatggccattttcgttatcctgttttttaacaataacaaagttattcatcctgaggataaggttgtcagagagtataagcaggcgattaagaataaaatcttcctctgtttattggcgtctgaaattgttctggcatatgtctttattcattacgatacaacgttctatcagtatatcaccgtgttgagtttgaaaaaccctgccgaaataatttcattcaccgttatgataaacagcgtcgtggtaattgtcactcaggccatttttgtttctctattgtcttcgatatcgaaaatcaagcgtgtttatatcggcagtgcctgctttgtcatttccggtgcgctgatcggctttgctgcgccgattgcgggtgaacactttgatcttctgttttattgcgcagtggtctttgtcggtatcggtgaagctgtattgtttccgttatccgctattctcgttgatcgtatcgctccggagggggctaaaggcacttattatgcgttaaccaatctttatcttctgggatttgcggctggccctattgtcggcggttgggcgctgacgcaagggtggatgacgatattttggctttcagacgccgtatttgtcctgttggcagctggcttgctgctggtggcgatgcgccacacgtcagcaaccaggttttcagacagcaacgatgttcaatgttattccgcgggcgcgcaaaaggaagcggactga

SEQ ID NO: 431854 - DNA, 4689 bp, Serratia marcescens
atgtctcatatatccgaaaatatcttttcggcgctttctttgcatgccaaccagacgtttatggagtataacggagcgcattacagttatcgcatgcttgctgttaaaatggcgggtatcgcagcggctgtcaatgcactgccatatcgacctgaagcactggtaatctgtgttcagaaccctttttttcattgtgccgtgatgttttacagtgcggtttccggtataccctatgttcctgtcgacaagggattacctgagcagcggatttcattgatgctgaatacgctcagcgggaagaaagtcatctgcgttgatgggaaaacaaaaagtataattcaggattctatcggggatattttggatattgctggtttagacagtgcgaacccgatatcgaatattcattctcccgcccctgattccttacaatatatcatctttacttcgggatctaccggtgtgccaaaaggcgcggctgtttataatgaaagttttgacaatacgttgaaatggtatcgccggctcattgacccacagccgggtgagcgttgcttaattgtcagctcattgtcgttcgatttgacgcagaaaaacatttttatcggcatgatgagtggcagtgtgctgcattttattgatggtttggtttttgatccgcagaatattcgtgagcaagtcaatcgccattcatttaagtggataaattgtgcgcccagtgctttctccttgattgtggagaatttatcaaaaaatagccttgcttcaatacagacagttgtcctggggggcgaagcgattaactcgcagacgctgcttcagttgcgccgtgatggcgttaacacgcgtttcattaactcttacggcccgacagagtgcgcggatgttgcattttggcatgaaataagcgacgaggatcttacaaaggggcgaataccgatcggaaaaccgatcccgggagtttacttcgaagtttcttatgaggatgctcaacgcagagctggggaactgattcttaaaggtatctgtgtaggggcggggtatatcaataatgaaggggccacgaagaattcctttcttcgtttaactgcagatgccgggtgtcaacgcgcttatcgcacaggagacattgtgacggaagaggccgatgggacgttggcgtttgtttccagaacagatgatcagatcaagtatcgcggcaaccgtatcgagctcggagagatagagcgcacgtttcgagatatgtcggaaataaaagaggttgtggcaaagttagttaaccaagatctcgttgtttttgtcgttctcagcgatcatcggcgccaagccgatcctcacttcaccgcctttttgaggaaacaggccgcttgtaagctccccgcttattcgataccaacccagtttgtttatttatcggcatttccattgaataacagcggcaagattgatcgcacttcattaacgacgcagcttcccgcagttagccataccgtacaggcgaaaacatttttcgacatgaccgtcgatgcgcttagagggattgcgggtgtcatcagcgcaggcttgatgactgcggacgagggcgaaaccgtaccttccctggactcgcttgagatcgtcgctttctccggcgtgctcagacaggtggcggagccgccgataaaagttcgcgatatcatgacaacgccatctctgaaggcactggccagaacgttaacatttaagcatggcgttcattcaatacgctgctatcccatcggaatggatatcaacaaaagcgagaatggcagccgtgtactcagcggtaaaaatggcaagattgaaattatcgccgagtatgaaacgcctgaagatgttatcgagaacggcagggaggcatcggcgtgtattgaattgccaggtggaagagtgcgtaaacgtattgaggtcgttaaccctacttgcaaaggaatttatttcgaatctgtttctgaaacgcgatctggcgcgtataacattccgctgattatacaatgtgagacttcgttagccatcaatgagatgcttgaaaaatttgtcggtttgctggatgagcacgaaattctcagatcaaacctgtattttaacgatggcgtattatcctatagcttatgtcagacgttaacggcagagaggataatgacaacgccggcccttttcaagacggtaaccgaggaacaggcgattaaggcgatcgataagccatttgatcttgaagatggatatcttttccgcgtgttgtttataaagcggaagaacgggggggaactgctatttatttttcatcacataataatagatggcttatctttagggctcatacgggagcagttgctttcccgtgacgacaaacccgttattctttcgccttgtacgttagaagagtattaccaatacacgaagctcgcattcgaatatgacaaaagcgtgctgaaggaaaaggcaagtcagttggcgttgacctttacggaggaagcgccattttctgcttcttatccagagtttcagcgtattttacgcgttaaagaagaaaatgttcttcggctcagaaaatggtgccgccagcataacttgtccgttacatcgtggtttttatcaatggcgatttttcactatcagagcgaagccggacgtgctgagttcaatgtgcttttcccaaatgcgaaccgtaatgtcccgcaggtcagtcgaatgatcggctgtttggttaatagctcgctgattgctgtcagactgaacggtatctctgcgttttccgcgctttgccgttatgtgagcgaagagcttattgccgacatcctcgatcacccgaatatgccgctttccgctttgttggccaaagaaaacgtcaatattgcgttccttttcacggcggtaaattatcaacgcccgtcgctaacgcgttctcccggtgaggtttacaacccccggccgcgcgcggagtgtggcattgaagtacaagagtacgatgattgtatcgaggttatttttaatggctatggccatccgcagacgctgcgtttcatcgactcgttgatgaattcgttaagtgacattaaaccttcggatttcccagtttcgtttgtttgtcagccgccggtaaatgtggacggcctgatgccggaaagttcaccgaaagcactgtccggcacggtttgtccgcctgaaaatagtaaggatgatgcattcaaccggcgttttgacgccttgtgcaaaagcattctcggcgtggatcagggctgggatatgccggatagggatatgccgctgttcgagtgcggcttggattctctcagagccattaaccttgtaaggctaattaacagtgagtttgatgtgcgttactctttaaggcaattgtttaaagacagaacctttgccaatgtcgcaggcagtctggcgaccatgaaatatacccataagcgcgacaatcgcatggcgccgtcggttgatcgcatttatccttcgcagtcggtgctgttgcaacgggataacgctattcctggggatagggaaaatatcatctcggttgcgttgatattcaaggagaatgttgatgtatcaggttttacctcgcattttaaaaagttcttgaatattcatccggaactgtttattggcgaagaaaacgcgcgctcgcaggtttgcgaaagtttcaccgttcagcatcatggcaaagtttacgttgatgaagacgatttggcccttatccatgtgattgacgccttaacgtgggatggcttcgaacctcataaagaggtgcttttgcggccgcatactttccggctgctgggagggaaacatcttctttattgtctgttccatcacgcggtctgggatggcggttcggcaaaattgtttttctccttcatcgaccgctccttgaacgaagggaatgcgtattcatccgtttgtcgaagtgaaacgctgggccgggatggcatctcggctcaggaatccgttgactattacaggcgctattttagaaccgtagcaaatagcgggatccatgtcagcaattcatcgtttgcgcgtcgccatgggaaatccgtctctaaagtgatctcagacactttcgatttcacgcaaatcgatacggcatgtcgcaagcgtgggtatgcattctcactgcgttgcgcctgggagatgcggagtctgacgcgtggactgggtttttgcggtttcagcaatatggtcgataaacgacatgattacggcgctgagggaaaaatggcatatcttgttgaaccgttgccttttttcgagcaggacaatgtttcattcgaggaattcgtcacgctgcattattcgcaccttagtcatctctcttgctcatcggacgacctgatgtcaatcgcagaggaatgtgacatacaggctgaactcaaagaggtgattgaagtgcggttttatttccaaactcattggaaagatatttgtcagtcaggggataaatggagagaaagtcggattgacaatcatatcccgtgggatgtcgtgaatagcggtctttcggtgtactttaatataaataaggggcggttgagcttggaatgccgttttagtgatgattttgtcaatgagataatacttgtcaaagagattgacgctttgacggggcgtctctgtacttttcttggcgagtcatcggacgtgaatgctatctgctga

SEQ ID NO: 431855 - DNA, 1086 bp, Serratia marcescens
atgtacgttatatctgaaagtgaagttgctcgtactattaatgcaattaccgccgataaattcatggatgcgctgatcgataatatcgagaagggattccggatgtttgacgcggcgggagcgcaactcagtgcgcgcgcaggttttacctctggcagaaatcttatcgaatggatgcccgttcatgatggggagagtaatgttacgctcaaactggtgagttatttccctgataatcccgttaatcatcagacgccgaccatcgatgccgtgattgtcacctttgattttcaaaccggtaagcctaaagcggttgccggcggcgcgcttttgacggcaatgcgcactggcgcggccagcgccgtcgcgagtcgtattttggcaaagccggattccagggtgcttggcctcatcggttgcggagcgcaggcggtgactcaggcgcatgcactgtcgcgaattttcaaatttgaagaaattcttattcatgatactgacccttatgccgaagaaactatcaatgaaaggctggcgttccttggcataaaaatttctccggccaatgttcaggagattgaaaagcgcagcgatatcatctgtaccgcaaccaccaatcccgtcgggtccgccccggtgctctcaggggaaaatttaaaacgggatgtgcatattaacgctgtcggtgctgattttcctgggaaaacggagcttcccggtacactggtgaaaactgcctttgtcgtcactgacttttatgagcaggcgaaagtggaaggggagtgtcaggtcttttctggtgaaacgcctggcgcggatgtttgtattgaacttaaggatctcacggtagctagggagaattattacggccatcagaaccgtcaaacgatttttgattcgaccggcgtggcgctggaagatgcgatcgccgttgatctgctttgtgacatagcgaagaaatatgccataggcaaagtgttaggtgatgcgacgacaacatgcgcgcttgatccctactcggaactcctgattacgtctgactgcgtgatgcgttctgcaaccaggcaaagaatggaaacgctgtcttaa

SEQ ID NO: 431856 - DNA, 726 bp, Serratia marcescens
atggattattcccattcagtaccggaaaaaacgacagactggacctcgcatgaggtcagttctaaagcctggatgagcatacgagacgccgatttacttgagtcgcttcttatcggcctcagcaaacaaaaaaagaatgcgccattgcgagttatcgaatggggatgcgggcgttccacgctttggtatggcagatttcttgagcacagcggtattccccatcagtggctggggcttgaacataatcaatcctatttcgagtccgccattgctgaagaatttatctcagatcccggcacgcgtatcatccattgcaataacctgaccggcgcgcctgcacacccatggaacgggggaacagaacgggtggtggcgttattcgatcacggtgcggtagccccgtttgaaagccagctaatttccgatcgggaggtcaacatggacgcttatgtatccctgcccgcaaaatggaactttcactgcgatctcgccatcattgacggacgtaaacgccgcagatgcacccttgaagcccaaaaattgatcggcgataccggcattgttttcctgcatgacgcttggcgtgaacattaccaaagcgcttggccagcctttaaatatagccgccggataggtgatgagtggtggattggcattaatcatgatgcggacctcaccaaactgttcccatggcatgcattcgataaccacgcctcacgggggtaa

SEQ ID NO: 431857 - DNA, 957 bp, Serratia marcescens
atgaaacatcagtgcctggtcatatatgaaagtacagtgtatcctggattaacagaagaaatttgtgttcccgaactggaaaaatactccaacggcaaactcaatcaagacttttttgtcggctatagcccggaacgcatcaatcctggagataagacgcgtcaactcaaagatatcgttaagataacctcaggttcaactccggagatcgcgataaaagtggatgcgctatacgcctctattgttgaggcaggcacccatatgacctcatcgataaaagtcgcggaggcggcaaaagtcattgaaaatacgcagcgagatttgaatattgccctgatcaacgaattatccatgattttctcaaggcttgagatcgacacgcatgaagtcttgaatgcggcggcgaccaagtggaacttcattccgttcaagcctggactggtcggcggtcactgcattggagtagatccttactatttaaccttcaaagcggaacaagtcggttattatcctgaagttattctgtccggccgacgtatcaatgatacgatggccgtttaccttgtgagcgagctaataaaaaaaatggtcaatcgagacatttctatctcggcagccagaacgcttattattggcttcacctttaaggaaaactgctctgatattagaaatacgaaagtgatcaatatctatagagaattaaaaaaatacagtattgacgcggacattctggaccccgaagtcagcagcgatagcgcatgggctgaatatggcgtcaaggttcataaccagattgaacccgggaacggctacgatgcagtgatattagcggtccctcacaacaatctcatgtcaatgggagttgaggggattagacgttatcttcgcaatgaaaactccgtactgttcgacgtcaagggagttttggatcctactctcagcgatttaagactttaa

SEQ ID NO: 431858 - DNA, 819 bp, Serratia marcescens
atggaaacaaactatatcatcaataatgcgcaggccggctacccgacacgtaaagtggtatccaaacttgcgcaatgccatcaaaaaaacctggttgaagatggatacaccatcatccacaatttatttaccgagcaacagttaaccgatttttcgtctgctcttggcgtactcgaagaaaacgagcgccatctcgacgatccgatgtacaaaaacaatacagattcgatttaccttcgctggcttctaacgaaagatcggcgtttctggccttttaattcccatcccgagcttatcgctctcgcacgcatggcattggggccgcagatccaattagatgacgccgatgcgcgcatcactttcgccgatgtcatcgatgggaccggttggcatattcatttgcgcacggtaccggatcccttaccgccatttttctgttacccgcacgccctgcaccacctattatacctcgataacatcacagagcgggaaggcggactgtgcgttttgcccagctcgcacaaagacaactcgattaagattgaggcgaatagccaccacagtattgacggcgagcgcatcctctaccctgaacgaggagatgtcgtgctcatgcatgccaatttatggcaccgcgcggttaaatctcagcgcggcggaaaaaaacgccgcctcatgctcggtgccttttctcccagctggcttaatacacattatgaggtcggtaagcgcggagaacatgactggcgtaaagcgtatgcgatgcaaagcgacactgacgaacaccaagagttcgcaggctatttttcctgggcctga

SEQ ID NO: 431859 - DNA, 798 bp, Serratia marcescens
atgactactgctattcgagctatcggctataaaacgccaaatacatcgctgcgccctatgtttattccggtgaacacaattcctggtacaatggcacatctctgccgtgattttgataaagattactccggcaacaatcactcagtgcagcttatcggtacaccgcaaaaaaccaagttcggctatctctgtgataaatttaacgggttgctcaccacagtgcctgacggaattgatcgcacgctgattgttgtatatcgtcagccggtcaatgttacgccgcagtcatatatctacccattcggcaacttaagccaacagggaactgtagacggtgttggcattggcatcaggtctgcgcaggtgcctacagaaaagaatactgtttccgcgattgttggagccaacgtaaaaacagatccttatctcggttatgcgcaggctaatgcacaggagccgacatcagcgctgaactggcaattccaggcgatgatcgtcaacggtacgggtaattcggctgcgctttacatcccttggcaactgaatgcgctggttcctgcatcattggcgtctggtgcgaatctggcaaatcggagcatcaaagaaaacggtaacccgtcattctaccgcgtcggaacctggcgcgataattcaacgccaggcgttacggctgcgcaatccaaagttgaagtggccgaagttctcgtcttccctggcgcgctcacaatggctcagatagacgtgcagtatggctattcgaagcagctcatggcggcgcagggccagacactgctgtaa

SEQ ID NO: 431860 - DNA, 2112 bp, Serratia marcescens
atgtcatctgaagggttgccagttgacggcatcgtcggcacagacattgttttgggtgctcgcagcactcagcaggccaccgacgacgcgaaaagcagcttgtcagcagatagcgccgctcagtctgccgatgcagcgtttaagtttagtcgccaagcgaaagacgcagtatcaggagctgatgctgcagctgaccgcgcggaaaccgcagctgaaaacgcccaaaacatcgcagatgccaacacctactacatcacggaaacagatccggatgggacgattgcaggtctagccgggacgcctgtaggcaagtttttccgtgtcgctcagggggctgggaacggatttaaatactatctaaatgataacggtgtagctaaagaggtgtccgaaaccgtcggcgctgcagctgtaaacgaggcattagagacggcaaatgaagccgggatccaggcaaaatccacagatacgagaacgacatcggttcaagtgggttttgccaacgatttagacggtcgagctatcatgaacgccttcgcagatggagaggggcgcatcaatatttacgacaatgaagacggcgatgttgggattggtgattttaaattccaaaaactcccatctaacgaagattatgatattgcatatttagatgaaaattatataccgctgtttggtgtgtcaacgctgggcggatttcggtatggtaatttcgaagtgttagaaattccggggccacctgggcttgtgtttttggatgaggactttaaaccagtagcgtgtttgcctgggtttgagaacgatcaaaacattcccgtaataggtcaggcggtcaaggaggcgttgcccgagttcctgtggcctgactacgtcggtataaaggccggtggacagtcgctggcatccggagtaacagctgctgtcgatgcggcggtctattcgataacccaaccatttgcaaatagaacattcagtgatgggttatattctgacacaactggaactgacactatttccccgttggttgagaagatcatcggcgttgcaggtgaaaaactctggcagtcagagggatgtctcagcacgctgtcgaatgacatgattacgcgtttgtgtaatgagcggggaaccacatacgataaactaggcattacgtttcttaccagttcatcatctgctcctggtttcaacattgctaagcttcaaaagggtggtgacgcatatcagaagagccttaaccatattaccaatgcgatgcgtttggcgctgagcgagaataaaacatatgcattcttatttcgcccctggttgcagggcgagacagacatattgcttgagacaccgaaagaggagtttaaaaaattaactcgtcaatgcatcactgacgaaaacacagatacgcagctaatcacagggcagaagattccgcctataacactgtgtcatcagttggcatctcataatgcctatgcgcggaaatatccgttcatagctcttgctctcagagatctggcagatgaagggttaatgcatattgcattccctggatacgtttcgcgatatcgtgatggtgttcattgctatccaaccagctatatgatgggcggtaaatatatggaacgtctggcaagccgcattgttaaagatttgcaggctggtcgggaggtgaaaaaaaactggttacgccctgtgtctgaattgcgtcaaaaaaacgtatcaataactcggtatgagtgcccgacatatccgatccgtttcaaaacggattttgtcatgccgacagataatttcggtttcgacgtgcgaaataaattcacatacgaactctacgacattatcacgtctgttgagattgtcggcattgaccgcgtcagaatagtttgctcacgcgacctgacagactcggacattatcacttatggctggggacgtttcgaccctgcagaccctgaaaatccgcagcatcctcagcgcagcgggcgcatcaatggcccgcgcggaaacctgtgtgatagcgatggtgaactaaataattccggctacaccgatcaagacggattttttatcccgatggataactattgtgaaattttctcaacggagtctctgtaa

SEQ ID NO: 431861 - DNA, 1101 bp, Serratia marcescens
atgacacctcgacttccgaataaaatttattcactcgatatacttagaggagttgcagctctggccgtggtattttggcattggcagcattttttttacatcggtgactcggcgaaagatgtggtctttgaaaatcaaccattctataactcacttacgattttatataagcatggagatgccgccgttgagcttttcttcagcatatctgggtttattttctactggctatattcagaattgatatccaaaaaagaaattaaagcaaaggaatttatcacaaatagattaagcaggctgtaccctctatatattataacattcattgctgtgctcgcacttcaatttttatacagggaacatcatgactcatattttgtctatcagcaaaatgatctctaccacgcaattcttaacatattaatgattccggcatggggatttgaacacggatggtcatttaatgcacccgtctggtctgtttcaattgaaatgatgctgtattgcatcttctttatagcatgctcatttaaaaagagaggattatatttaatacccatctttatttttatcgggcaaatcatctttttaataaattataaaattggaataggtgtattctcctttttttgtggtggtgcaacctatatattagcatataccttgataaagaaactcggcgacaagtcaattcttattgcgcttggttatttatccgcctcatggttttttattattaaatttgacatttcaaacacattcatagttactgggttcggtttctcctcgttgattttgtttttaaccacatcaagcataataccatctcttaacgattttctttctagatttagctggataggtgacatgagttactcatcatatcttattcacttcccattacaaatcacatttgtgctatgtgccaatttgttagggtatgggagtgatatattctacactccaatgtcgctaataatatttatggcaacgttaattccactaagcctgcttacacataaacacttcgaaatgaaggctcaagggtacatccgagaaaagcttaacgcccctacctccaaatccatcaagcaggggtaa

SEQ ID NO: 431862 - DNA, 597 bp, Serratia marcescens
atggctaagaacgagtttttacctttcggcacagcggcgaacgccaacgttttacctaacgctgattatcaggcgttgccagctcgctcggctggttttaatgctggggtggccaagtcagaagaattgaacactgtctggcgccaggcgtcggttatcgccagcgtagttgcgcaatttatcgtgaataaatctggtatggatgcgctggataatggcgatacaggagggttactggataacctggagttggcattttcacagcaagctaaggatgcattgcctttcacgcaatccttatcagacaatggttatcaggagcttccatccggtctcatcattcaatggggaagtggcatcgctgactcggatggtaggaaaagagtggtttatgttaaaccattcctcactaaggtttatcaggtaattgtatccccaaccaataaatatgataacaatgcatttgttatagcgaatgttgataatactaattaccagctatcttattttgatatggttagttatatatatgacatgactacaaacacaggcaggaaggatcataatggcttcacatggattgcacttggtaaatag

SEQ ID NO: 431863 - DNA, 756 bp, Serratia marcescens
atgatcaccaacaatgaacgccaggactctcccgagctggtgctgaaagccgtggcagattcgctcagcaccagcctacgagtggcaatgccgggcatcatccagtctttcgacgctggcgcggtaactgctacgatccaaccggccgtaaaagcctctgtgcggcaatctgacggcgccttatcatcggtggcgctgccgctgctggtggatgttcctgtcgtgttcccgcgcggtggaggcgtcacgctaacgtttccagtgactgctggtgatgagtgccttgtcgtgttcgccgaccgctgcattgattactggtggcagaacggcggagtgcaggaacccgttgaccagcgccagcaccatcttgcggacgctttcgcaatggtcggcccgcagtcgcaagcgaagaaaatcagcggcatcagcaccagcgccgcgcagctgcgcaccgacgacggcgccgcatttgtcgaactcgacccaggcaaccacgccgttaacgtcaccacgtccggaaaactgaccgccagcgcccaggggggcacagagatcaactccccggaaatcgtgctcaacggcaacgtgaccatcaacggcaacctgtcgcaaggcatgggtgacggaggtggcacggctacgatgcatgggccggtgaccgtgactaacgatgtcaccgccggcggcatcagcctgcagacacacaaacatggcggcgtagaaactggcggcggccagacaggaggcccggagtga

SEQ ID NO: 431864 - DNA, 339 bp, Serratia marcescens
atgtgtaaacttcgttggattattttcctgctttcgttcatcggcgttagtttttccgctatggcgcaatatcagtgcgggccagtgaatttgcgttcagacccacaaggtcgattttttgccaacggtgagcgagtaggaaatatcatcgagaaaaccacggacgaaaaccattggacgatacagtttagtttaatgcctgccagtgacggccggtcatatggcttcaggcttgtgaatacaggctcgcgtatttttcttaatgtccagcttctaattacctatctcgacgccccgaagttcataaatacttatgattgcaaagagtttcataagtaa

SEQ ID NO: 431865 - DNA, 2010 bp, Serratia marcescens
atgaacgctgaaaccatcaaggactttttgatctcccttgggttcgatatcgatgaagccggcagccgtaagttcgaaacggtggtttccggcgtcacgatgaacgtggtgaaaatgggcgcagctgttgaggctgccgccttaactgttgtcggtttcacaactaaaatcgcgagtggactcgaccgcctttattggcagtcacagcgcactggcgccacggcaaacaatatcagggctatcggctacgctttcagccaggctggcggcagcgtcgaggggttcaacggcacgctggacaatctggcgcgcttcctgcgttcaacgccaggcgcagagggattcttgcgcaatctgggtgttcagacgcgagacgcggccggtaatctgcgagacactgcccaactggtgacgctggtcggcgataagctggcgaaaatgccatactaccgtgctaaccagtatgcgcagatcctgggcattgacgaaagcacgttgctggcgatgcggcgaggtgtccaggggtttaccgctgattatcagggcatgctgcaggccacggggttcgattcgcaaaaagcggcggaacagtccaacaaattcatgacccagatgcgcggactgacgaacctgttcggcattatgcgtgacaaaatcggcggtaaccttgccggcgggctggccgggaatctcgaaagcttccgcaaaaatatcctgctcaacttccccaaaatagaggggacgatcaccgccttgctgaaaaaggtgctttcactggccgatagcatcatgacgttggtttatcgtggtgtgcagggcgccggcgatctcatgaggtggtgggatcggctggatgataaaaccaaggggctggttaaggtactgggtggcctgctggtggcatggaaagtgctgaacagtgcttttctgacatctcctattgggatgatcactgcccttattgctgcgctggttttgttgtatgacgattaccagacgtggaaagagggcggcgacagtctcattgattgggcgaaatggcaacctgacatagaaaaagccaagcaggctatgctgtggatccgcgacaagttgctggaactgaaagatgccgtcggtgggtggaagacgacactggaaattttcgccggttttatcgctgtgacttgggcagcgaaaatggtcggtgcgatcggctcggttacaaaaagtgttggtgggttgtctaaagcgctgggtggccttggcaaagtaggtactatcggcgccctattagcgctagaagagcaggtcgccaaacctcttgaggaaaagttttcttggttgaaagacaaccctattaccaacttactgaacaatcttcctggctctgatacggtcaacgaatggggtaagagcattcttccgtggcgccgtgacgaggttgatcagcatgggcaatcagtcaaacggccacagccgacaaaagacggtgctgcgctgttggggtggttacaaccaactcttggtaaattggaggcgctctacaacctgccggcggggctgctgcgtagcgtagctattaccgagtcttcagggaaccagtttgctgtatcaggtgctggcgccaaggggttgttccagtttatgccgggtacagctcgggatatggggttgcgcggcaacgatgtattcgaccctgagaaatctgcggcagctgcagcaaaatatcttagtcagctcttgaagatgaacggtggcgatctggagaaggctctggcgtcctacaactgggggatcggtaacgtgcagaagcatggcatggggctgatgccgcaggaaaccaggaactacattccgcgtgttttgagcaacatgccaggaagtgctggtggcggtcagggagcgacaacgttcaacatcaacgtgcagggcggcggagatccacgcgaaacagcacgcctgaccggtgacgcggttgagggcgtttaccgccggcagacacgcaacatgcaaacacaggtgggttga

SEQ ID NO: 431866 - DNA, 447 bp, Serratia marcescens
atggaattcgaaattaagggccagcagtaccgcgcggccaagttaaatgtttttgagcagttgaaaatatctcgcaagctgctcccccttttgtccggcttgctgagtgaaatctcggttattcgacagctaaagtcaggtcagatttctattgacgaagcgattaaaaccgctctgccagctatcgctcaggcactgtccgatattagtgaagatgatagcaatgcaatcattcatccttgcctggctgtggtagtcattaagcaggggaaaagctatgcgccaattttcagtaatggtcagttgatgtttgatgacatcgatctgatgagtatgcttgaaatcgtggcacgtgtagtgggggattcgctgggaaattttttgggcgaactccaagagaaaattccagaaacgtctccatctcctccggcgccgccagcggaataa

SEQ ID NO: 431867 - DNA, 543 bp, Serratia marcescens
gtgagcaacgacagcacaacatcaggctatcttacacctaccgggagcgggtctgcctacgacgaggagctggagcgactgctgagccgctggatccgtggagtgactgggctggataaaaatgtcgtctatccccgctggactgacccacaaatccagataccgaaaaacggcaccacctggtgcgccttcggcattaccagccttcctgatgatatgtatcccgcacatgttcagggagaggaaagtgccgagcagtggtcgcatgaaaccatcgaaattctatgttgcttctatggcccgcaggggatgtctgtcgtgactcaattccgcagtgggatttttgtttcgcagaacaacgacgaactgaaaaaaatcggtctgaccctcctcgactgtgggcggatattcaaccttccagaactcatcaataaccagtgggtgcgccggtatgacatcgccgtgcgcctgcgtcgcaaagtgatccgcgagtacggcatcaagtcgctggtggaagcaccggttcaattcttcggagaataa

SEQ ID NO: 431868 - DNA, 393 bp, Serratia marcescens
atgccgcttctcgacgtgacagaggtactgctggatccggatttcgctgacccatcgctgatttgccgccggcagatacagaagacggacgatgacaactttccgatcaacaccccacaggaaatcccttttagcggcgtagtgactgttgaccgctcgcttgaagcaaggcgtatggctgccggccagaacattaacggcgccattctcatcgtgacgcaattcaggctcactcagggccgaaagagcgccgctgatggccctaaccttgatgccgaccttgtcgtgtataacggcggcttgtatcgggtgacatttgtcgatccgtacacccgctatggcgccggttttgttcaggctcactgtgagctaatggggcaggaagggggttaa

SEQ ID NO: 431869 - DNA, 942 bp, Serratia marcescens
atgattacttttgatcaggcaaccgttgatagctccggtgcgtttctcatcggcgagctggagcgcctcgaccaaacgctgaacttgccgctggtgggctatacctggagccgtgatattcagctgcgtgaagacgtgtcaattgctgatgacatctcaagctggacaaacaccagtttcggcgcagccggtactggcgcaaacccgaacggcaagaactggatcggtaaagactctaccgccattgctggtgtgaacgtcaatatcggtaaagacggcaacccactgaacctgtggggcatggaattgggctggactattgttgagctgaaagcagcggagcaagttggccgtccgatcgatacccagaaatacgagggtatgcagctcaagtggcagatggacaacgatgagcaggtttacatcggcgatgattcactgggtctgaaagggttgaccaacctggtcggcgttacgctgaacaacgcgccgaagacctgggcggcatccaccaatgacgaaattctggatagcgtgaacagcattttgtcgaatgcctgggcagcgtctggctattccgttgtgccttctgatctgcgcattccgcctgagcagtattctttgctggcgagccgcaaggtttccgaggcgggcaacatgtctctgctgagctatctctcggttaacaccattgcataccatcagaacggcgtgccgttggagatcaaggccgttaaatggctaaaaaaacgcggtgttggcggcaaggatcgcatggtggcttacaccaacgacaagaaatacgtccgctatccgctggttcctctgcagagcgtgcctatccagtatcgcggcctgtaccagatcgccacctactacgccaagctgggtgcggttgagccggtgtacaaagaaaccctgtcctacgtggacggtatctga

SEQ ID NO: 431870 - DNA, 1023 bp, Serratia marcescens
atgtcacaatcggaagaaagcggccttgagcgcgattactgtgccggtcaactttctctccgcgacctggcacagatttatggcctcagtgagggggcaatcagaaagcgcgctaaaaagcatggctgggtacgcaagggaaagagcggtacgcaaaaaagtacgcaggtacgcaaaagcggtacgcaaaaaggaaagctgcgtaccagccccaaagccaacaaagaagcagccgccccggataatgacatcaatccttatgccggttatggggatgacgatacgcctggcttagacccgcgcaaatacgggttaaacgatatgcagtggcgtttcgtgaatgagtacctcatcgatctgaacaggacggcggcatacaaacgagcgggtgggaagggcgaaggcaacacggcatatgtcagcgctagccgcatgtatagaaacgctaaggtgaacagggcaatcagcgacgcgctggctgctcgcgaacgtcgcacccagataacgcaggatgctgtcctgagaatgtggtgggacatcgccacggccgacgtcaaccagatcactgagtaccgccggttatgctgccgttattgctggggcttcggccaccagtatcagtggatggatgcggtggagcacgaggaggcggcggtgaaagctaaagccgcgaataagcctgagccatccgacagaggtggttacggctttgatgcgatgctggatcccaatcctgaatgccctcgctgcaatggtgctggcgttggccgcgcgcacttccacgactcccgagatttgaccggcgccgcccggcggcttttcgctggcattaaggagggcaagttcggaattgaagtgatcacccgcaatcaagatgacgcgctgaagatggtggcgcagcacttgggcatggtgagaaacaagacggaactgagtggtccggatggaggccctgtcaaaaccgaaagcgtcaatctgacgccggaagaagctgcagaggcgtatcgcaagctgatggggtaa

SEQ ID NO: 431871 - DNA, 828 bp, Serratia marcescens
atgaaacaaaatccattttcattttacgacttccttgggtacctgatacctggcgccttatttttatacatactctatttcggaggggagcattatcactggggtatagctaccgaggctaggggatatctttcccaaaacaataattcacttggtgaattattaaacttcttgccattagttatattatcatatgtggttggtcatttcttagccctggtgtcatctttcatggttgagaaatactctaactgcaataatgggtttccatctcaatatctgatttcaggaaaggggaatgggtacttccataaggctgatttttggtcagtgataggtagagctatactttgggttacaatattacctatatccatcccagacattgttacacattggaaattcagacagaataaaaaaatggatcaaaggcttgggcctgtcgtttttgatttatgtcgtgagatattgaaagagaaattcaagatggacacctctagtatggatgataaaacaggggttgacggagatagcttcaggttaatataccattacgcattcgagaactctgaagcgcatgcgtccaagttgcaaaattacgttgcgctgtatggttttacacgaaatattgctatgatatttgttattgttttttggacgttgatcttgcttaaattcgggatgggtgttggtataggatttattccaatctttacctctgttatcatggcatttgtattctataagggatttgtcaaattttacaagaggtatactctagaagccatgatggcagtatgtgccattgcaactagagaccccaaataa

SEQ ID NO: 431872 - DNA, 141 bp, Serratia marcescens
atgattttttttgataatcaattaataaataaggagaaagcaagtgatttaaaatccctcggcttatggctgtgcgggttcaagtcccgccccgggtaccagggaacgaaaatacagaataatcaaagcaataagcagtaa

SEQ ID NO: 431873 - DNA, 1089 bp, Serratia marcescens
atggctgataaatttaatggtaatgtcgaaattgcacctaaaaatgaaagtgaggaaaaagaaaaaagctgttataaagaaaaaaaagactgtgaagatggtgatgaaattaaaggtggggatggtggggggattgaaggtagaaaaggtgagggggttaaggaaaaaagaagtcgtgtaggttttatagcttactctattttggcgtactttggcgcgttactgatagtcacatcaatagtaggtataaatcttccatcctttattgcaaattattacccattaatcgttggtgtcatttctcttgccattggtgtatacaacgcgcaaatacttttagcacagaaaaaaagaaaatcagaattaaaattcactgatgtagatagaaagtacaataaaatcgttgcctcaaatggacaaactatagttaaaatgagcgccgatgcgaaaaataatatgttgtcaaatgtgagggtaattggacataatatagaaaacataagtcagagagaatacaaaactgccgctaaaaacaaaagagagcaagatacattcataacatacttcaagtcaatgaaagtattaattgaaagaaaagcttctgctgcagatgagaaagcgtctattttacttgagaaaggaacttcctatactaagtttgggataattttttatcttatatcaatttttatttggcaatttattttttggaaacaaggctttaaggttgatttcgcgtgggggatcgcctcctgttcttttttatttctttttatagagtttttgagtgcatggtttctaaaacaatataaaaacttcactgatacttctacgtaccttataaaagtgaagtcaactttagataggtatatgttgatgtacatgattgggtttgaaaataaggataaggagattatattgatagctagaaaggcattgcttgagatgttgtcagaggaaattcaatggccagatactaaaacgataaacaacaatgataatggatatgctaaggatgccctagcatccctttctgatgctattaagtctatgtcagaaggaatgcatgcgaataaaaacaagaattaa

SEQ ID NO: 431874 - DNA, 708 bp, Serratia marcescens
atgtgtggacgatttgtccaactacagacccgcgccgactatctcgacgtgctcgcctccgaccttgaatttgccagtgcgctggacaatgttccgatcggtcgctacaacgtggctccaggcacccgcgtgctgatacttaatcaacgcggcgataaattgcacctcgcccctatcgagtggggttacggcccggattggtggcgggaaatgaaacgccagccggttatcaatgctcgcgttgaaacagccgccaccagcagaatgttcaagccgctatggaatcacggtcgcgcgctggtgatggcagatggctggtacgagtggaagaaaggcaagcatgacgacaaagtaaagcaaccctatttcatctatcacgaatcaaaagcacctatatttttcgccgcgataagccgccatcatcccgatgctaaagagcctcctgatgatgacggttttgtcatcgtgaccagcgccagcgattcgggtctgctcgatattcatgaccgtcggcctgtcgttttgccaccagcagctgcacgcgagtggatgaggccagacatcacatcagcgagagcagaagaactcgcgaacgaagcgtccacatctcccgacgatttcgcctggcatcctgtaggaaagtcagtcggcaatatccgcaatgacagcgctgagctgattaagcctatcgccaatccactagtttaa

SEQ ID NO: 431875 - DNA, 792 bp, Serratia marcescens
atgcctattttattagcagatgattctgttatcgaaaatccagcgtttggcattaaatacgtgccattctcagtagtagatggatgtatggctgcatggcgcggtgatttcagttcagacctaacaggaaacggcaatacactgacgaaaattggcaatccaaatcaggctgcctttggtgtttcgtgtagtaaagttaatggctaccttaccagcgttcctgatggagttaatagaactctaatctgtattcatcggcaaccagctgtagttgactcgggttcatcctacaactacccattcggaaaccttagccagaacaataccgtaactggtgtaggtataggtatcattcagagtgcgagtaaaacgggtgatattaattcaatgagtggtgttgtaggtgccggccagaaaacagacccatatttttcgttggcaaaacccgcgactacaccggcagtcaaggcgctatcgtggcaatggacggcactagttgttgatggcagtggcaacttctgtgctctgtatgtcccatcacaatcaggtgccctcgtcatgggtaataacacgccaggtgtcaaccttgctaatcgagtgatccttgaaggtggcgtgccatctcgttacagaattggcgcctggcgagatccatcaacaccagtcgtcaattcatctaacatcgaagttgcctcatgctccgttttcgacaaggcacttttactgtcagatctgaacatgatgtatctgtatgacaaattcttcatggcacagcatggagaggtcatctaa

SEQ ID NO: 431876 - DNA, 1884 bp, Serratia marcescens
atggctaccacaccaacaaacaatcccattccaagcgaagcggtacaggatttaaagtttaacgctgggaaaatagatcaaatcgtaaactcaaattctaaaacttatatcgatagatttggagctgaacgatatacgtgggctggtgcgctggcaaatatagcgccacttggtcatccatggacggaagaggaggcgaacgctgcaattgcttctggtgagattccaaacggcgcatattactttgtgtggtcttctgataaaaataacattgctgatgtctggcataacgttaatggggttgcgactaaaacagacaaaagctacccatcaagtgaatttgtaagtgagcttggtgacaaggttaattatctttcaaaccagctaagaaacgtacagaacatcaaaggcgtgaaggatgagatgggcagggaaatcattgccggtatcgcatccgaaaacggtaaaattccactttatgttaatagcaatggggattccttcttgtctggattgcgtgtggttaatcttggtggcgagccgggaattcttttaactgatagcctattcaggccatatgcatgttcccctgggtactctaatcctgagggaatgccagtaataggcgttgttcaagaaaggaaggttaatgtaataaagttctctggtattatgagtgttcaggctcaggggcaatctttgtcgtgtggcgttaccgatcaggagcacatgagggttctatctactacccaaccttatatgaatattacattcagcggcactatattcagcgatacaacagatactgacacgacaatgccattggtggagtcaactaaaaacgaaggtgctgaatttccgcaatcagaaagttatgtaagcggatttacaaacggattaaccaaaaggattattgatgataggtcttcttcagcctctgggttaggtaccgtcttctttggttcttctgccggaacaccaggactgaaactatcagaaatcagcaagggcacggctgcatatgcaaaaaccatagatcacacaacaaatgcaaagaggttagcaaacgctgagggtaagacgttctcgacattagctgtgatgttcgaccaggggcaatcagattacagggataacacttcgtttaatcagtggtatacaggtatgaaggtatacatgaatgatcaatggaacgatgacaaaaacataactggtcaggaacataataaaatttatattgcagatcaaatatcaactcataaagcatatgcgagaagagaaccgacaattgccctggctatcaggaagttatcacatgaaggattgatgcagataggattcccaggctatgtcgctttgtatgttgatggtgtccatatgtcaccacaagagtatttatactgcagcaagctggctgaacggtcattgtttagagcgctgaagaataacgaggaaggacgcgaaaacggtattacttggctagctatcacttcagagtttgttcagggtaatgtgcatgagttgacttgtagtgctcctacgttaccgattcggattaaaactgattgggtcgctgaagcggaaaactatggatttgatgtaatcaacaaaaatacacgaaatgctgttgatattatcgattctgtcgctgtttcagcatctgacaggatttcagtgattttatctaggccattaaactccgacgaaaccctaacatatggatgggggcgaccagagggggcgcaaacaaatggaagactgagcgggccaagaggaaacatttgtgacagctccggcgacctgcctggagagtcatatacggattctgacggtgtttttcgcccgatggatgactatttggaaatctggatgtcggagttataa

SEQ ID NO: 431877 - DNA, 2493 bp, Serratia marcescens
atgccgttgatcgaagttcagcgcgtgccggggctgcctaaagaacgtcataaccttcccgctggcagcatgttctatccctggcttaaatcggccaaccttcactgtgatgttgaaattttgcgtaacggcgtaaagctgcagcccgatgatgagttgaatttcccgctcaacgacggcgacgtgatcagcgtgttcgaccagccgaaaagcggcaccattgggaaggttctcagcccaatttttgccccgataaagttcgtccaaaaaatcctgacgtcattgctcggccagccaagcgcaggtgtggcgacaagcagcaacgcaaagacctccccgaacaacagcctgaaggggcaaaccaacattgcgcgaaacggcgaggcaaagcctgataattacggtcaggtgcgcgcataccctgacctgattcaggagtcgctgttcgagtacgacaatgacatcaagaaagtcacagagtggatgaacttcgggctgggccggtatgacgtcacgtcagtaagatactcagaatcgaacctcggcgcgctggctggcgcctcataccgcatctaccagccaggcgagaacatccccctaatcaatgaggggttcgctttcgacgacatcgacggccaggaactgccggggccgaacgagagcggagatttcccagcagagacggcgacgacgaccaccgacatggtttcgggcgagttcattgccggtcaggcaaaggtgaaaatcaagcagaacagcgactttgattacttctatgacctgccaaaaccccattcagtttcattcgttgttagcgtcacctacaacacggtgtcagggccaataacgcgggatatcacagtatttgccgatctcttcagtgcgacgaccaccgacgatggcgccacggtagacccgcaatatttctacgagttcacgtttgtaaatctgagcggcaacgatatcagtcagatccccgatgatgcggtgatcaacacgtcgatattcacgcttaacgacaatgagccgttggtgattggcccgtcgttttcacccgttgacgggacgcaactttgggttcacctgcaggctcagttaggtcacggtgactatgcccgaaccaacgtcaccttctacaaggtcgatgatgataacaaccaaatcccaggcacgttagagagctacaacgtcgggctcaacaatgacgatgagaacgcagatacaaaatatcggacgtttaaattcacccctgcagccggcaatggccgttatgcgatttctttcatccggtcgaataacagcaatgaccattcaatcctcaaggttgaagcggttcacatcgtcaggacgcgcaccaacgttgtttacccgaatgacaccctcgtaaccgtcactgtcactgcgacagaacgcgctaccagtgcgagggagcgaaaatataacgctctaatcacccgccacgtcatcagttacaacctggctacacagacggtcgattacacagaaaggccttcacgttcgtttgcggacgctgtattgcacacctggctaaagatgggcggtcagccggagtcgagtatcgacatctacgaactttactctatcgcggcatcgttgctggatcagcgcctgggttatttcgattacaccttcgatgacgaagatatctcgcttggctctcggattcagacgatctgcgatgcggcgacggtaaccgcgttttgggatggaggggtgttgtctttcacgcgcgatgaacggaagtcaagcgcaacgacggtgttcaaccgcgccaacatgaaagcggaggattacagcctttcctacgacatgactctaccaggtggttttgatggggttgaggtcaagtatcgaaacccggtcacgaataaacaggcattcatccgctaccggatcgtcggcaactcgattgaagagggggaaccggtaaaggcgaagaaattcgacatgctgtttatccgtaattcgtaccaggcgcgagatcgggcattgaaagaagttcgccggctgctgtattcgcggcaaaccatggctatccgcgcgctggccgatggtgagtgggtgaacgtcgggcagatggtgcaggtagctgatatctacgacgcgaaccagcaggatggctatatcgttgcgcgtaacggcaacaacttcgacacaagcgagcggatcgagtggctcggggatatgtttgtcgtcatcactgatgcgaatggctccccatcggcgcgagttcaggcatatccccgcagcgatacgatgtttggttttaccgctgcggtgccagcaataaacctcaacatatttgacggctacaacgtccagtctccgtctcgttacgtcattgccacacaaatggagatggacgctacgaaatggacgatcactgaaaagaaaccgaatggcgacgggacaacatctttaaccatgtctgaatacaacgatgaaatgtataattacgaggtaactgaataa

SEQ ID NO: 431878 - DNA, 420 bp, Serratia marcescens
atgcataaacctgacttcattcacgccatggatggtaagccgtggcgcgatcgggcgtgctcgttcgatgcggttgattgctggggattggtcactttgtattaccggcatgtgctcggcatagagatacaccaaacgccggactacgaagccggaagcgacttcctaacgtgtttttccggtgatgtcgtgttctggcatcaggccgagaaagcggccgacggtagcatttttatcgcgtattacggcggtcagccagctcacgtcggtttggtcattgatgggcaagcattccatagccgtggcgaagcggggcatgtgcgctttgacaagctgcgaacgctggagcgagttttcaccaaattggagttttacgactatgccgttgatcgaagttcagcgcgtgccggggctgcctaa

SEQ ID NO: 431879 - DNA, 2721 bp, Serratia marcescens
atggcggagcaggacggtgggagcttggtttaccaagttgatattgaaactgcaaagatggttacaggtagccgtcaagcagctgtcgtgttaggggagatggaaaaacaagccaatcgttcatctaaagctgttgatggactgacatcctcttccgatagtgctggtcggtctatgtctgggtttaaatcagtattaagcggtgtggcaagcgcaatatcagttgctttgattatcgattacggcaaggcttttttgacagtcgccgataacattacgcagcttcagtcacggatcctcaggctatcaactgatgccgcaacagcaatgtctacgtttgaaacgttgacggccatagcatcgattactggcgctagcctcagggatacggccaagctgtgggaggcgatgacctccgcgctaaaagggactggagcaaccaacacccaaatacttgcattaaccgatacgcttcagaaaatagggcgagttggcggctcttctacagaagagatggcaaatgcattaagacaattcggccagtctatttcctccggcacagtaagagctgaagaatttaactccatccttgaacaaatgcctgaacttgctaggcagattggcgcagggatgggactatcaatgggacagttgcgacaagcaatgctcgaggggaagttgagtgctcaggatgcacttaatgcaatcatgaagcagtcatcggcagttaacgatgaattctcgaagctcccaaggacgatggatcaggcgagcaactcccttacgatttcccttcaaaatctaattgggaaaatgaacgaagctatgggcgctagcgcaaccatggtgaaggttattgactctatcagcgcagcaatagataggctaagtggcaaaacagagacagcgtcacagaagattgcagatcttacgtcaactggcgaaatgtatgcacgtagagcaagaacgtggtcatggcttggccttgatggctggtcagaacaaaatcaggcgttagctgcactcagcaacaaagcggccacactgatcggcgacatgaattcggtggcaaaagcttctgaaagcgctgccaatggcacgatcaactttaacaactcgggcaccgtaaaccctaagcaagatgcgttggtaaaacgttctcagcgacgcatagagctatcgaaacttgagggggaagcaagggccaggctacaggcagtatatgacgctgaagatgctggcatatctaagaatgatccgcgagtgaagaaactccaagatcagtatgccgagatagagcggaataccaaagcccagaaagaaagcaatacggagggcaagaagtcagccagccaagcagaaagcgttgcccagaagctggctaacctgaagcaacagtctgagcttactgcaggctcaacaaatgagcttagccgagagcaggcgatcctgaccgcacagcaatcactcggtaaaggcgcgacgcaagcacaagttactctggccggggagtatgcagccaaagcatgggatgctgccgctgcagctaaaggcgtcactgaggcgataaaggctatgcctgagaaggcagagaataaatcctatgccgaatccatgcagaacctgaaagctgcgctggatgccgggaagattgaccttcaggagtacaacactgccaccgaaaaaatggcactggagcatcagaacaacttagcgaagattaacgctcaggctgtagttaatcctgttgcatctgcacgtgctgaagtagatccggttcagcagttggcgaatgagaatgctcagaagctggccctgatgcagcagtatcaacagcaggagcaggcgatactgctgcagagttaccagcaggggaaaatcagctatgaccaattcatcttagcaaaacaggccacggatgatcagtacctggctttgcgcactgcgcaggagaagcaataccaggagcagcagacggcggcgcaatggcagttgttgagccagcagagccttggctacgacatgctgacgagcgctgttgatgccttctcgggtaatgcatcaaacgcgattactggcctgcttaccggcaccatgtcggcacaagaggcgatgcggtcacttggtaacaccattctgaacagcgtgataaacagcatcgtacaggttggggtggaggcgttgaaaaactacatcctcggccagacgcttggcgccgcctccgtggcgtcatctgtgggcatggctgcaacaacagcttcagcctgggcgccggcggccgcaatggcatcactggcaactcttggcgctaacgctgctccagcggctgcagggataacatcaaccgtgggattggctggtggtctggctttagccggtgcgcgttataacggcggccctgtgagtgctggcgcgatgtaccaggtaggtgagcgaggcaagccagagatttaccaggcgagcactggtaagcagtacatgatccccggtgacaacggcaaggtgattagcaacaagcagatgaccggcggcggcagtgcggcgccaaccatcattatcgaaaactactcatccggcgctggtgtaatggatacccagtccagcaaaggtgctgatggtggcgatgtggtgcgcattgtgctggctgatctgcagcagggcgggcaaatcagccaaggtatatcccagtatcaccaggcgcctcgcaaagccactgaatag

SEQ ID NO: 431880 - DNA, 1167 bp, Serratia marcescens
atggggttcaggtttagaaaaaggataaaaattgctcctgggctttatcttaatgtgtcaacgggaggtgcgagcttatctgttgggatgcctggagcgatgattaattttggtggaaaaaatggagctaaggccactatcggtattccaggaactggtttatctttccagcaaaatcttttaggaagagaacaagggagtattgagcgctgcccgaagagcttacctatttacgattttcgtgatatagacattccagtttcagatgaaacaatgatccccatcaccagtgcggatgttgaagctataggtgacatgggtattactgaacttgaattgatgattaatcaatcaagtatagatagggaaagacttaaatctaaccttgaaaatataaaaatagataagtcaaaactagaaagaaagattatgttttttggtttctttggtcttcgcagtatatttaaaaacaaattatcaagtttagaagcgaagaatgtaactcttaacagtaaaatttctgaaattaatggtgaaatttcagatgcaggaatctcttttgattggggaggcgatgaaaatcttctggctcgctacagagctgtttgccaatcatttggtgctatgtcaaacagtcatatgatatgggatatagttgcttttaaggaaacagacaaatttaaggagcgctcggaggctgacactacagtatcaagatctactgtaagatttggcatgggtaggccagactgcctccctgcatcagaaaaagatgagtttaaaaatgtacctcatctagaaaacaagaatggtggcgacttatacattttccctggattcatgcttatagaaagtggtgggaagtttgccgctattcctatgtcagagctaaaaatacggtattctgtaacaaagtttgcagagacagaatctgttccgaatgatagttcggttgatggtaatacatggctgtatgcaaacaagaacggcggaccagacagacgctttaaagataactccccaataccatgggctatatatggtcgcatagagtttcgctatctatcagttgttcatgaagagtacatggtttccaacgaagtagctgcaaggaaatttgctgcaaatctacacgggcttatacaggaagtatcaaaaaatgaatga

SEQ ID NO: 431881 - DNA, 417 bp, Serratia marcescens
atgggtaagtcgatgtttgagaaagctgttgatgcagctgtgaatcagaaaaaatctcatgaaaatgagatgcatatagaaatcaaaaaggtcttaaactcttttgtttctgaaaccgaaattgaccctgcagacgtatttttctatcaaaatgggagtgaggtagaaattgaggatttagtagcaaaaaaaggaatgatcaccttcgagtgggggattttggtccaacacgaggatgttgatgttcaggtgagcagcactgttaatgttgaaaagaaatcatttattaactcgccagatgaagtgatttttagcattggtgagtataatcccttcgacgatgctatggaaaagaacactttcatgaagatattaatatcagatttattgaccaaagcatcaaaagcagcatcttaa

SEQ ID NO: 431882 - DNA, 303 bp, Serratia marcescens
atgatagaagccagagttgccaagcttgaggctgacgttgagcatattaaatcggacgtgtccgaactcaagctgaccatgctgaaggtggaagggacagtgggatccattgataaaagtctagccgttttggttgagaagttctcagggctcaaggagtcggttgataaaaaaccgtcttccgattcgatggataagaagatttcagatgcaaaactatccattcttttgggggttccggccattattgccattggcacggcagcatataaggttgctgcacactatttattcgctagctaa

SEQ ID NO: 431883 - DNA, 267 bp, Serratia marcescens
atgcacttaaaggcagtaaatgtgggaatagtcctatgcctgccgctgttattgagctcctgcagcaaaacgccgccggcgccgcagcaaatcgtcctgttgccccctgaatccgtgtttactccctgcgagcagccaagcctgcagggtgacacctggggcgacgcgctgagcttcacattggcactgcaaacggcgttaaatatttgcgcagatcaagtgagcacgttgaaaaaatggagagatcaggtgccacgcccgagctag

SEQ ID NO: 431884 - DNA, 531 bp, Serratia marcescens
atgtcgattagcaaatcaaaactcagcgccgtgatgctggccctgatcgccgccggcgcatcggctcctgtgatgatgtcgcagtttcaggacgagaaagaaggccagcgcctgactgcataccaggacggtgtcggcatctggacaatttgcggcggtgtaacgatggtcaacggccagaaggttgtgaaggggcagagcctgacagccaagcagtgcaagcagattgacgcggccgagcagaaaaaggcgctcgattgggtggatcgcaacgtcaaggtaacgctgaccgaaccgcaaaaagttggtatcgcctcgttctgcccgtggaacatcggccccggcaagtgcttcacctccaccttttacaagaagctgaacgccggcgaccgcattggcgcctgccgcgaaatccgccgttggatatacgacgctggacgagattgtcgtattcgctcgaacaactgctatgggcagatattgcggcgcgatcaagaggccgagttggcgtgctggggattggacaaatga

SEQ ID NO: 431885 - DNA, 297 bp, Serratia marcescens
atgaaaatgcacccagacaatccaaacctaccgtactggtggtcggcactgctcggcttcttttcgctgctgtcgctgcaggattatgtattcatcgtaggcgcgctgatatcggccttcttcacgatcaagacgtactacgccaagcggaaggaagagcgggaacgtttagcagaggaacgccggcgcacgaaaatcatggaggactatctgcacggcgcatcaacaaagccagaaagcgagcgtccggcggcaatcgaggttgttgcagaagctatgcgcagagcagaggggtga

SEQ ID NO: 431886 - DNA, 261 bp, Serratia marcescens
atggcacagttaaaacgccgtcgtccagatgagtttcagctcgtggtgcttcactatgtctgtaacatgcagaagcgcgctatagccagagcattcaaaaaggacgagaagctgatcaggatagggttgcagatgggggaaaacttcatagaagggtgcttgtcgatgttggatatccgcctggagatggacctggaaactgagcgggaaaatatttatgagaaaaagctaacgcggtccgcaaattgtgttttagtctga

SEQ ID NO: 431887 - DNA, 357 bp, Serratia marcescens
atgaaaacgtacccgatcacgccaatcccgaaaccacgcatgacacaaaaagaccggtgggccaagcgcccgccagttctccgctaccgggcattctgcgacgaggtgaaattgaatcgaatctcgctgcctgaaagcggttatcacgtgacgtttgttttacccatgccagagagctggagcaggaagaaacgcgctgagatggccggaaaaccacatcagcagaagccggataaggacaacctggagaaggcgttgctggatgccatttttgaggacgactgccgcatctgggacggtcgagtaacaaagatttggggcgaagtaggtcagataatcatcgggagaatcgaatga

SEQ ID NO: 431888 - DNA, 975 bp, Serratia marcescens
atgagagcgatagtcaaagcagcggtacagcgtgatctgggcattgtgctgatcccagttacggaggaaatggcgtttcacatgaacgggcgtctgatgatttcaacaatccctcgtaaatttgtagatacgcctgaaggtgttctgccgccggtggaacatgagatcgccagcgacccgcggctgcaagttttcttccagaacgagcgcgtcataaacgcctgcggcggggttaacgcgatcgaagcctgggcgacgcagttcaccaaatgccagtataacaaacacgatcggccttcgacgattctggacactgagcgagtgggacattccgccgttcgcatttgcccccagtgttacaagcaaagctgtggctcatcaccgaagctggaaaaaattgcagctcgtaatactgcgcgctggatagctgagacggcaaagcaccgcttgaagtcggaaggcccgttaaccattcctgagttgctgctgtggtcgatgctggctggggtattcgatctgatccccgaagaggtagcgcgcacggtgacagataggccagaaccaaaggttattactggcacccgaagggagtccgacatggattgcctgccgtcggttaaagaactcatcgcaaaggacgcggctaaatgcttcaaggttgaccctgaagtgtcaggtgcttttgctctactcccgaagaaaacccgcgccgaagacagcaagtacacccgttgggttaagacacgtccctgtgtggtatgtggcgcgcgggctgatgacccgcaccacatcatcggtcatgggcaaggcggaatggcaaccaaggcgcacgacttcttcaccatcccgctgtgccgtaaacaccacgacgcgctgcacgagaatatgacggcatgggaagcggaacatggtagccaggttgaattgctgtttgagttcctggattactcctttggcatcggggcgattgcatga

SEQ ID NO: 431889 - DNA, 1023 bp, Serratia marcescens
atgagcatgaacctgatggcgcaggctatgagcatcaaagtgggcaacccactgcgcaagttggtgctgatcaagatagctgataacgcgaacgacaagggcgagtgctggccttcatatcagcatgtcgctgaccactgtgagtgcagcaaaagcgctgtgcgggcgcacattgaggcattgataaagatgggtttactcaccaaagagaaccgccttggcgtgaacaatgggaaggggaatacctcgaatctctactatctgaccctggacaaccctgtgccgtcagaaagcatagccccctgtgccgtcaaaaagcatagccctatgccgtcaaaaagcacaggggtgtgccagcaggtgacacagggtgtgccgtcagaaagcacaccccctatgccagcagatggcaccagaaccagtcactcttttgaaccagtcattgaaccaaaagaacccccccccagagccccccagagcgatgcgggagcagagaacacttcggttgaggctggggaagttctcgattttctgaatggaaaaatcaacggcaggacgccaaagcgcgccgacacgttgcgtgagattatcgagcgcctggctgacggtaacagcgccgccgaactgaagctggtggctgagcaccgcgcaagcctgctgctaagtgatccgaagatgggacacatgctcagcgccaagatgattttcgatgccgtccggttcggtgggtatctggcagccgccaaagcctgggatcgtcagcgcagctacaaagccgctatggctgaagcagtcgaacagcagcgccaagagccggtggccggtgacgcgccggagattgatttcgatgaggctttcgatcgcctgatccgtgatgctgcgatgccagaaaatgacgctgagaaacgcgcgcagcagcaggtacgcaagaacggattcggaaatgtggacgaaagcaaagctcgccagcagtggcgcccaattttaaccagagcttatgcaatgtcaggagttcaggcatga

SEQ ID NO: 431890 - DNA, 183 bp, Serratia marcescens
atgtccggctcgcaaagcactgagctcgatcggtattacacggactggcggggcgttcaggttcacgtcatccgctgggatcgcgttgagcgccaggtcattttcacgcgagagggttatccgcatgagtgcatgcagccccttgagagattcaaagagaaatttaagcgagtcgaagtatga

SEQ ID NO: 431891 - DNA, 294 bp, Serratia marcescens
atggaatcagtcgcaacaacacgcaacgaagctcaggcgattcagagcgacatcatgagccgcattgcagcaatcggagtgacaagcctggccggcgcgatcggcgttgataaatcgcaggtgagccgctggcagagcaaaggtgggttggtggagaaagcgagcctgctgctggccgctacgggctttaagcgttcggaaaccatgctgacgttcaggggcgaagaaactgcagagctggcgcgcgggttaatggcaatgctggagcacatccgagaaccaaagacggaatag

SEQ ID NO: 431892 - DNA, 219 bp, Serratia marcescens
atgaatgaagtgataaaaaccgctatcgctttggttgggtcgcaaaaaaaacttggttctgcctgcggggtatctcaacaggctgtttataaatggctccacaacaaggcgaaagtttcacctgaacacgtaggccacatcgagcgagtaaccaatggggtggtccctggacacatgattcgccccgatctgccgcacatgttcaaaaaaccaaactaa

SEQ ID NO: 431893 - DNA, 717 bp, Serratia marcescens
atgaaaacaacacttgctgaaaggctaaagctagccagaaaagaacaggggctttctcagaaagctcttggggagttgatcggcgttagccaggctgccatccaaaaaatcgaggtaggcaaagccaaggaaacgacaaagattcttgatctagcaaatgctcttggagtacggccagaatggctctcttctggatatggggagatgcgagagaccccatcgaagacagatcgagaatccagcatccctcctgagcgcaattggggaactgtagatgcatgggatggcagcacccccttacctgaagatgaggtagaagtgccattcttaaaggatatagagttggcctgcggagacggcagctacggagaagacgactacaacggctttatgttgcgtttttcgaaggcaacactaaagcgtgttggagctcaaaaaggaagcgtcttatgtttccctgcgcatggtaacagcatggaaccactaatccctgagggttccaccgttgctattaacctgctcgataagaaaatcgtcgatggcaaagtttatgccatcaatcaggatggttggaaacgtctcaaagcccttcatcgctcagggccgaataaggtgataattcgtagctttaatagtgcggagtacgacgatgaagaggctgacattgatcagatagagatccttggacgcatgttctggacttccactctgtggtaa

SEQ ID NO: 431894 - DNA, 516 bp, Serratia marcescens
atggaagataatggagaaccaattgttgtaggaaaaaccaccaggacaagattatctattgttggtggaactgaaagcgcattcagcataggatatgacacatcttctactactaggaaagaggaggttgaagtgtctgatatttcgaaagtagaactacaagccctcttgaaggcaaacaaagctgaagttgatgcggttgcatcctccatgcgcgccgatatggcaaaatggcgagaggtgatgtcttcagacatgaaggagatcaagagtataattacctcacagaacgccagtattagcagtaggctagatctccagtcagaaaagataagttcggtattggacggccactctaaaaagatagatgcagccttgtcagtccaggaagcaaaacttgaagtcaagctgacagatatgaagcttgatataatcaaatgggctcttggccttcctgccttagcatttgccgtctataaaatttacggcgcaattgcggggcatcctaccccataa

SEQ ID NO: 431895 - DNA, 159 bp, Serratia marcescens
atgaacactactcacgatatgggcaacaacgaaacagtgaagaccggcgttttcccaaacggcgacggcacgtttaccgtgatgacgttcacaaagagccgggattttaaaaccgcagcaggcgcgcaacgctggtttgctcgtcagatggccgactaa

SEQ ID NO: 431896 - DNA, 213 bp, Serratia marcescens
atgcaaaccaccacccaacgctgcgaacattgcggccagatgcgcgatgtagagaaaaaagccgtgagcattcagcgctacgaagacggcagatataaggccgtgagaatcctcgtctgttccgatacctgcgcgccggtgtacgtcgtccgccagaacatcagaacactgcagcgccgcctgcacactcagcagcggaggccaacatggtaa

SEQ ID NO: 431897 - DNA, 144 bp, Serratia marcescens
atggtaagcctcaacgcccgcatacagcacaagtacgacctgaccgggggcgatttcgcccctaagcgccaccacggcaaacaccttttctacctactcatttttaccctgtgcctgctgactgccggcgcggtctggagttga

SEQ ID NO: 431898 - DNA, 927 bp, Serratia marcescens
atgaaaggtatcgacttatttgctggcctcggtggctcatctactggtgcgacaaaagcaggtgttgaaattgtctgggcggccaatcactggcaggaagctgttgatgctcacacgctaaatcacccaaatactgttcatgcgtgccaagacttacatcaggctaactttgcgtctgttttggcattggttccgaaattagatctgctactggcctcaccatgttgccagggccatagcaaggcgcgtggtaaagcaaatggcaacccgcaacatgatgcaagccgatcaacagcctggtccgttcctgcagcagctgaggttctgaagccagatcacatcatcgttgagaatgtgccggagttcctgcagtgggcgcttttccctgcgtgggaacatgccatgcagagcctaggttattctcttgcgtcacacatcgttgactgtgccgatcttggtgtgcctcagaaccgtgttcgtatgttcatcgtctgcaccaagagcaagaacccactgacgttgaaattgccgaaactgcctcacgcatctgcggaatcgttcattgatttcgaagacggtcgttggtcgccggttaacaagccaggacgtgcagtggcaacactcgacagggttaaaaacgggcgcgctcaattcggtgaccggttcctgatttcgtactacggaaataccaaaacaggccgctctctgcagcgtccgatcggcactatcactactcgtgaccgatgggcgatcgttgacggtgaccacatgcgcattctaacgaaagaagagaatatgctggccatgtcattccctgccgactacatcaagccatcatcgcacaagcttaccgttcacatggccggtaacgcggtgccacctgaggcgatgtatcagatggtgaaagcactgaaggagcaagcgtga

SEQ ID NO: 431899 - DNA, 732 bp, Serratia marcescens
atgcacctgttcttgcgtaaaatagattgcatcgtagcaacatcaccgaactatgtggccaccagtgacgtattggaaacgttcaaaaataaggtctctgtgattccgataggtctggataaagagacatatccggtgccagaaccgagccgcttggaaaaatggcagcgtcagctcggccaaccatttttcttatttattggcacgttacgctattataaagggttacatatactgctagaggcggctatcggtgcaaactatcctatcgtgattgtaggggccgggccgatcgaaagtgaattgcgtgagcaggctcagaacttgggactgaaaaacgttcattttcttggcgcattgccggatgaggataaatcggcactactgacgctgagctatggtattgtatttccgtcacatttacgctcggaagcgtttggaatttcgctactggaaggtgccatgtaccgaaaacccatgatttcaagtgaaatagggacagggactacctttatcaacgtcaatgatcagacgggactggtgatccctccatcggatccttcggcattgagaaaggcaatggataagctttgggagaaccccaagttggcggagacattcggtaataaggcgtatgaacgctacgaagagatgttcacctccaaacaaatggtcgaggcatacgcgaaaatctacgaatccctgctgggaaggcataataagcccaattga

SEQ ID NO: 431900 - DNA, 1146 bp, Serratia marcescens
atgaaaataattctttccgttgagcctatcaagttcccgttgactggcatagggcgttatacctatgagttggcaaaaggcttgcaaagccacaacgaaattgaagaactaaattttttctccggtacccgttttttatctaacatacctacggcaaaaaatacatctgatagtagtcactggttgaaaaaaattgtgcagagcaattcattggctattgagacctacagattgcttatgccacaactaaaaaagaaggcgctgcgtggctacgaacgttgcctttttcatggacctaattatttcctccctccttttgacggccccgcagtggcaacgtttcatgatctttctccttttaaatgggagcactgtttcgatcctaaaaggaatcgttataccaagaaagaaatgatgaaagcattgtcgagggcgaatggtctcatcacggtctcgaactatattcgtaaagagattcatgaatatttcgattatccaattgagaaaatccacacggttcatctggcaagttcgcctgatttttaccctcgtcaggtagaacacgtatctggagttttaaaaaaatttggtttaagctataaagctttcaccttattcgttggtaccattgagccgaggaagaatattctttcccttattcatgcttatagaaaactgcctgacggattgcgtgcccgttatccattagtcctctccggctataagggatggcgcaatgatgacattatgcaggaaatagagcgaggccagcgtgagggatggcttaagtatctgggatttgcggctgcagaagaattgccattattgtactctgcagcccggctgtttgttttcccatcacactatgaaggctttgggcttccggtattggaagctatgagctcgggaactccggtgatttgttccaacagttcatctttgccggaaatcgcaggtgatgcggcattaactcactctcctgaggatgtcagcttattaacgcagcttattatcagggggctgacagatgaagcgtggagaaaggatgcaattgcattaggtttgtcacatgcagcaacgttttcctggaaaaattgcactagccaaactttaaacgtttatcaaaaattgactaataatgattaa

SEQ ID NO: 431901 - DNA, 3642 bp, Serratia marcescens
atgcgtattgttattgacctgcaaggagcacaaacggaaagccgttttcggggtattggccgttatactctttcgattgcaaaggcaatcatccgtaataacagtcaacacgaaatttttattgctttgtctgcgctgtttcccgaaaccatcgctgaacttaaagcgcaatttgctcgcttagtgccggccgaaaatatcgttatctggtatgcgcctggccctgtcagagcgatggatagaaacaatgcttggcgcagtgagtgtgcagaatatgttcgtgaagccttcttacataatcttaaacctgatgtcgtttttataacgagtttgttcgaagggcatgtagataatgcggtgacgtcgatcgctaaattaacgccaaaaactaaagtggcggtgttgcatcacgatctaatccctttggtacaagcggatgtttacctgcaagatgacgtttataaagattattatttaaagaaaatcaattggttgaagagtgcggatctgctgctgaccaactcggactatacctcttcggaggtgattgagtggttggatattcccgaaagcaaagtgtgcacgatttcggcggcgaccgaagaacattttgatatcagcgagatttccgctaataatttttctgaattaaaagagaaatatggcattacacgtgatgtcgtactttatgctcctggcggttttgactctcgtaaaaacttcaagaggttgattgaggcttacagcaaattaacgcctgaattgcgtgaaaaaaatcaactggttatcgttagtaagctatcggatagcgatcgcagttatctgcattccatcgcgcgtaatcaacagctgcgtgatgacgagatggttctgactggatatgtatcggaacaggatctggtcgtgttttatcagttggccaagttgtttgtctttgcttcgttgcacgaaggctttggattaccgattctggaggccatgacgtgcggtgcggcgacaatcggttctaacgtcaccagtatcccggaagtgatcggttatgccgatgcgctgtttgatccctattctgttgagtcaataagcgacaagcttcaacaggctttaagcgatgacgttttcctcgctaaattaaagaaacacgctttggagcaatccgccaagttttcgtgggataaggcgggaactatcgccttgtctcgctttgagcggttagttgctgaggccggagatgtggagtttgaatcggtaacgtcatcgcaattgatctccgccgtttcctcgatcaaatgtcgtgaagagccttcggataacgatctgcggtcaaccgctgaggcgatggatagaaatgccaaaagactcgagttgcaaggcattgcgctagagtctctctcttggcgcgttgaaggaccttttgacagctcctatagcctggctttggtaaatcgagaattcgcgcgagcactcagtcgcgacaatgttgacgttctgctgcattcaacggaagggcctggcgactttgctccaaatgaaaccttcctgagtgatgaaagtaatgcggatttgaaggcattccattcgcgtttgcagcagcggagtgagcagcaggttaatgtattgagccgcaatatctatccgccacgtgtcagcaacatggctgcagatgtgaagcttttgcattgctatgcatgggaagaaagtggctttccacaaagttggatcaataatttcaaccgtgaattggatgcgatcctttgcacttcagaacatgtgcgcaaagtattgattgataatggtactaaagttcccgtttttaatgtcgggaatggttgcgagcactgggagcggattcagtcagccaatcctccgcaactgaacgccaaggcattcaaattcctgcatgtttcttcgtgcttcccgcggaagggggttcaggcgatgctggcggcctatggcgccgcttttaccggagaggacgatgtttccctggtcatcaaaactttccctaacccgcacaatgaaattcaggcatggctaacgcaagctcagaagcggcacgttaattatccccatgtcattattatcgagcaggatatgccggaacaggagctgaaagcgctctatgaacagtgtgatgtcttggtggcggcaagctgtgctgaaggatttggtttgccgattgcggaggcgatgttgagcggtttacccgccatcaccactggttggagcgggcagcttgatttttgcacgcaggaaaattcatggctggttgattatcgttttgaacgcgcgaagacccattttggcctgttttcttcatcatgggtgcatgccgatattgataaactggccgaggcgatggcgcaggcggcggcgactgacaaaaagcaactatcggcaatggcagcaaaagggcgtgaactgatacttagtcagtttacctggagctcggttgtacagcgatcaaaggctgcggtaggcgaattgcgtaagcattttaacgtcgctcaagtggaaccccggattggctggctctcgacgtggaataccaaatgtggcatcgccacctattcccaacatttggtagctgacatgcccagcgaccaaattgtgatttttgcaccgacagcaaatgatctggtacatgcggacgaaggtaacgttctgaggagttgggttgttggaaaagaagacaattaccttgatgctctagatactcaaattgaaaccctgaatctgaacaccttggtcatccagtttaactatggattctttaaccaccgtgagttatcggcctttatcaaaaggcatcaccaggcgggacgggttatcgttatggccatgcattcgacggttgatccgctcgaaaaagagccgtattggaatttccgtttatcagaaatgactgacgcgttgaaaatgtgtgaccgtttgctggttcattctattgctgatatcaaccgcctgaagttgcttggactagtcaataatgtaactctgttcccacatggcgtgattaactatcccgctctggcatcgactgctcatcgcaatctgccgcctttagttgccagctatggtttttgcctgccgcataaagggttgaaggaacttatcgaagccgtggcctatttgaaaaaagcggggaaccctattcgattaaggctggtcaatgcggaataccccgtcagtgaatccaccgctttggttcgtgagcttaaagagactgcggctaatttgaaggttgaagatctggtagagatgcataacgattttcttgatgataaagaaagcttgcgtctgctctctgacgccgatctgctggttttcgcgtatcaaaataccggcgagtcggccagtggtgccgttcgctacggcatggcgacgcataaacctgtggcagtgacgccgctcgctatttttgatgatcttggtgacgctgtcttcaaattgaagggaacctccgtagtggatgttgctgaaggtattgcagatattatttctgagattgttaaaaactcttcgagtgcagttgaaacgcaacgacgtgctgatgcgtggtgcgagcagcatgattatcatgccgttgccagacggctagaaaacatgtgtgcgggcttgttaagagcaaaacatttcaaataa

SEQ ID NO: 431902 - DNA, 573 bp, Serratia marcescens
atgaacacggcgttgcgtgcgcagacagtgaagttccacgaagtgagtaaccaactggagcgttttcagcaccaattggacaagtcacatcaagagctgatggctgtacatgctaataatcaaagcctgcagcagcagctcattgacgtgcatgctaacaatcagagtctgcaacaacagctttttgatgcgcataccagcaattcctggcgtgtgacctccccattgcgttgggtttcatatcaatttaaagcggtgcgtgagcaaggtgttaaaactcgagctcgcaaagcagccaaaaaggctttgagaaagggaataaatacggctctggttttattccatgaacatcctaaattcaaagcattcattctttccagcgctagaaagctgggggcttaccgatttctgcaatctgtttttagacgggttttaatttccgcgcctgactatcacgccgatcttatggcgaatgaacgtcatgttgtatataaggaaaatatgacgagcagagctatcgatatatatgagaagctaaagagaataaataataagaaacacggggattcataa

SEQ ID NO: 431903 - DNA, 1218 bp, Serratia marcescens
atgagttacataaaagtacataatgttggcaaggcatacaaacagtatgcctctaagacagggcgtctgcttgagtggatttcgccatttaataccgtcaaacataaactaaaatggatcctgcagaacatcagttttcatgttgagcctggtgaggcattaggcattattggcattaacggcgccggtaaaagtacattactgaaattgattactggcacagcgaaaccaacctgcggcgaaattgctcttgacggtcgagttgcggcattattggagctcggtatgggctttcactcggattttaccgggcgccaaaacgtttatatgtcagggcaactgctcggtatgtccgtcgaaaaaattacggaacttatgccggaaatcgaggcgttcgctgagatcggtgattatatcgatcaaccggttcgcgtttactcaagcggtatgcaagttcgattggcatttagcgttgcaacagcgattcgcccggatattttgattgttgatgaggccttatctgttggtgacgcttattttcagcataagagtttcgagcggatacgtgagtttcgcaagctaggaaccaccctcttgctggtgtcacatgacaaacaagcgatccaaagcatatgtgatagagctattttgcttaacaaaggcagagtagaaatggagggtgagcctgaagcagtaatggattactataatgccctactcgctgataagcaaaatgtgtcgattcgtcaggttgaaaataatggaaaattgcagacgctctctggctcaggtgaggcaactattaccgatattagtcttcttagtaccgaaggtgaaagtattgaggtggtagcggtagggcagcctgtcaaccttcaggtgaaggtgcatgtcaatgaagctgttcctgaacttgtcgtgggatatttgattaaagaccgattgggacagccggtttttggtaccaatactcatcacctgaaacagccattatttgatttgaaagagaatgaatcgagaaccttttcatttgcgttctctgccaatttggggattgggtcttactcggttgccgtagcgttacatacggcaggaactcatgttggaaagaattacgaatggcgcgatctggcggttgttttcaacgttgttaattcaaacgagaaagattttattggagtagcttggttgccccctaagttggagatttttgaatga

SEQ ID NO: 431904 - DNA, 795 bp, Serratia marcescens
atgaaagaaatgttattagccatctatggttaccggggttttatttggagcagtattaagcgggactttcagtcccgttaccaaaccagcatgttgggagctttatggctggtattgcagccgttagcgatgattttggtatatacactggtattctcagaagtgatgaaggcacggatgcctgataattcaggtccttttgcctatagtatttatctttgctctggggtactgacgtggggattatttactgaaattcttgataaaagccaaagtgtcttcattactaatgctaacttaataaaaaagctcagcttcccaaaaatttgcttgccggtcattgtgaccgcgtctgcgattttaaacttcgccattatatttagcctgtttttaatttttcttgtttttaccggaaactttcccggggttttattcttctccgttttacccgttttggctctgcaagttctgttcaccgtcggtctgggtatgacattgggcgtgatgaacgttttcttccgggacgttgggcagtttgttggcgtattattgcaattctggttctggttcacccccatcgtttatgtattaaattcgctgcctgaatgggccagaacatcgttgatgtacaatccaatggcccgagttatgcaagcataccagtcaatatttgcataccaacagcaacctaactggtactcattatggccagtattggttctggccataattttctgtgcgtttggtatgagattgttcaggaaacacgctgcagatatggtggacgagttataa

SEQ ID NO: 431905 - DNA, 1374 bp, Serratia marcescens
atgagtgccttaacttgttttaaagcgtatgatatccgtggtcaactaggtgaagagctgaatgaggatattgcctatcgtatcggccgagcttatggcaaatacctgaaacctcagcgcgttatcgtaggtggcgatgtacggctgaccagcgagtctcttaaagtggctctcgccaacggattgcaggatgctggtgttgacgtatatgacattggtatgagtggcactgaagaagtctattttgccactttccatttgagtatggatggcggcattgaagttactgccagccacaatccaatgaattataatggtatgaaactggttaaggaaaatgctcagccgattagtggtgataccggtttatttgcgattaaaaaattagcggaagaaaatacgtttcctgcggtagtgaaggataaacgtggtagttatcaacaaatatccattctcaccgattatgtagatcatttgctgaagtatattgatgcaacagcattgaagccaatgaaattggtcattaactctggaaatggtgctgcaggccatgttatcgacgaaatagagcgacgtttccagcaagaaaatattcccgttacctttgtaaaggttcatcatcaacctgatgggaatttccctaacggtatccctaacccgttattacctgaatgtcgggatgacacagcaaaagccgtgcttgagcatcaggcggatatgggaattgcttttgacggtgatttcgatcgttgtttcctgtttgatgagaagggcgctttcatcgagggctactatatcgttggcctattggcagaagctttcctgcaagccaaccctggctccaagattattcatgatcctcgtctgtcatggaataccatcgatatcgttacccaagctggtggcattcctgttatgtcgaaaacggggcatgcctttatcaaggagcgcatgcgcaaagaagatgctatctatggtggcgagatgagtgcgcaccattacttccgtgatttcgcttattgtgacagcggtatgattccatggctattggtagcgggtttactttcagttaaaggcagtgtgttgagtcagctagtgaaggatcgtatggaagcgtatccagcatctggtgagattaatcgcaaattgcctgatgctaaagctgccattgagcgtgttttaggcgtttacaaagatgatgccgtggcttttgacatgacagatggtatcagccttgaattcaatgaatggcgttttaatctgcggacatcgaatactgaacctgttgtacgtttgaatgttgagtcaaaaggggatgttgaattgatgcagaaaaaaactaaagagattctggcgctcttaggcggagaataa

SEQ ID NO: 431906 - DNA, 1413 bp, Serratia marcescens
atgttattacctgtaattatggcaggcggtactggtagccgtttatggccgatgtcacgagaactccaccctaagcagtttttgcgcttgcacagcgtaaattcaatgcttcaggaaacgttgaaacgactcgatggcgtggagatcggtgagcctgttgtaatctgcaacgaagaccaccgttttatggtggctgaacagctgcgtcaaattgatatgttgtcacacaacattatcctggagcccattggcagaaatactgcgccagcgattgctctggctgcattgaatgctaccgcagcaggtaacgatcctatcatgctggtattggcagcagaccatatcatcaaggatgtgaatgttttccaccaggcgatcgaagcagcattgccttacgcagcgaaaaaaagcctagttacgtttggtattgtgccgacagggccagaaactggttatggttacatccagcgcggagagtgctgcgatgataaagcggtggccgctaacgtaaaacgttttgttgagaaacctgacctcgcaaccgctcaggcctatgtcgactccggtgaatatttttggaacagtggtatgttcatgttccgtgccaagcgttacctggaggaactggaggcattccgtcccgatatcctggctgcctgtcgccgctcgctggatgataccgaatgtgacaaaaactttatcaatgtcaatcgcgacgcctttgcgagttgcccagacgagtcggtcgattatgcggtaatggaaaaaacacaagatgcggtcatgatcccgctggatgccggttggagtgatgtcggctcatggtctgcattatgggaagtcagccagaaagatgtggctggtaatgcattgaccggcgacactttcctgcataatacccgtgattgctatatcaatactgatgaaaaattagttgcggctgttggcgtagataatctggttattgttaacactaaagatgccgttctcgtggttgataagtcgaaagttcaggacgttaaaaaagttgttgagtatctgaaaaaacataagcggagtgaatatcgaagacaccgcgaggtttatcgaccatggggtatttgcgatattttggttgctgaaaagcgttttaatgtcaatcgtatcaccgttaatcccggggaagcattttctctgcaaatgcaccatcaccgcacggaacactgggtggttctttctggtacggctaaagtaacaacgggggataaaacgttcttacttacagaaaatcagtcgacattcattccaattggggctgtccaccgtttagaaaatcccggaaatattcctttggagctgattgagattcagtcaggctcttatttaggtgatgatgacattatccgtattaaagatcattacggtcgttgctaa

SEQ ID NO: 431907 - DNA, 1302 bp, Serratia marcescens
atgacgttcataaaactcccccccttctctctcaaatttatactcggcacacttcttgcctccctgcctcttaaaatcggttatgccttcgagattggcattaacacacacctgcgctggtatccagaagagcaagatcattatttgaacttgataagtaactatggttttaattcctttcgtgatgattacctttgggggttagttgaacaacagaaaggcacctatcaaccagtagataaacttatacgtgtagataagtctctcttagttgcaaataaaaactatggtatgaaccccattgccgttctagcctatggcaatgatctctatgataaaagtggatatgctagcaacgatgaatctattgcagcctatgcaaactatgcatactggacagcaaaaagatttaaaggaaaggttaagtattatgagatctggaatgagtggagtgttggcaccggcacgcataataaatcaccagcccctcctcctgctcaggtctattacaaactcatcaagcaggcctctatagcgataaagagggcagaccctgaagctatcgtgcttgcgggctccttcgatcctttaggaaacgatggattaaaatggtccgatgacttgataaagctgggcatgctcaattacatagatgggatatcaatacatccgtatagctttaaatccagtgataaatcgctgactaccccggaaggaaacattgaaaaaattgatgggtatcaagcagaattgaagaggctcgtaggcaaagaggtccctatttacatcactgaaattggcgtgccaaccaatgtggggaaatttgggtacagcgaggactatgtagcccaatatgttgtcaaatatactcttcttgcaaaagccaggggatatataaaaggagtttggtggtatgatttaagcgatgatggtgataacaaccaaaatatagagcatagatttggattgctcaggaaaaatgggagtaaaaagccaggcatggagtcatacgaaaaaattgccgatttaataaaaaattactcggtaaaaaattacaatgtgacaactgatggtaaggtgaatttaaccttcagcaatggaaaaagagaagccagggttagttggaaaaagaaggatatgcaggaaggaaggaattccacaacgggaagaataatgtcgctcatgacgagtagtaaaccatcatcgcagaaaattacagctctcgtgattgaagatccaacgaaaaaaaatcaaccagtggttagtgcagacacgccagtgataacattcggcaacgagtaa

SEQ ID NO: 431908 - DNA, 603 bp, Serratia marcescens
ttgaaatccgtatatgatcttgatggtacacttgtgccattcaatacttttaaggtatgggttgttctgtcttttgttatctctatttttttccttagatggtattttttattttctattattaaattcgctatatgcaggaaaattgggagaatggatcgcattggatttaaggtggctttattagagattcagcaacgcaccaagttttggccctatgttggtaagaagtacggaaaatggttggcccgccattctctccgaaaggatttgctcgttctaggtgataattccactaagtgcttggcgactgcagcaccggatatttatgtatcctctttctcccaagaagttaatgattttgatgtcactatatgtgcacatttttcccgttcaggtgaatttgtcgaaacattaaatgtagtgaagcttaaattcgttcaggagcaattttctggggaaccagatcttttctttactgatcattatgatgatatcccgttagctatggctgctaagtttacctatattgtttcaccatcaataaagtccgagagattattttccgacatgcttaatgcaggacgttatacgatattataa

SEQ ID NO: 431909 - DNA, 585 bp, Serratia marcescens
atgaaagttattacagctatcggcaacgattttaattctttatgtgatcggttgtctaaagaaataattaaagaattttcccctgatgttattattggtgttgccactggtggacgctatgtcgctgaagaaattggaaaaaaaattgatgctccacttgttataataaaaaggcagcgaaattctacaaagaagaagtctaagttcaaaatagcttcttttttgcctttcctcccaaggccgataaatgacttgttgagaatagcggaaataaaatttaacgaacgtaagttcagaagatccggaagaatattgtcagtagggtctgtggcacatatctccggcgacttggaacatctacaaaaaagtaagagaattctaattgttgatgatgccgttgatagtggtggtacgtttattgattgtatcaattttcttcaaccgtttctttcatcggattcggtcattaaaactgcagcgctaaatgtcacatttgacgaacctgcttttattccagatttttatctttacaagggctatcttatccgttatccctgggctagcgatgttaggagaaaaggttga

SEQ ID NO: 431910 - DNA, 1131 bp, Serratia marcescens
atgagaatcgcactcgatagccgatttatgcaaaaggttagtcaagggactggaacgtacacaatagaattggcaaataacttgatttcgtgcataaatcgcgatgataagttattgcttctggcggacgatccttccattgttttaactaagcaggctgggcaacctttcttaaatgataatcgtgtagaaataaagaagttgatatcaggttggacgcctatgaaccttctaggcggatttgcacttgctgaatggcgtaataaatgcgatctcttgcatacgaattatttatcgcccttggttacaactagaagtacgaaacatgttgtgactgttcatgatgtcatgttccgtacgcacaaacagtatttcaatcctaagttgactaagggattggaaattttcaccccgcctagtttacaaaaagcagatcatataattgcagtttctcattatacgaaagatgagataatcaagaacttcggtgttaatgaaaataaaattacggttgtgcatgaagctgcgagcaagcagttccacgtgaaagagaaagtaaattctaatgatataatcgttagtctgggtgtgactaagccatattttctttttgtcgggcggtttgccgcgattaagaatattgatagtgttattactgctttcgagagacttgctgatgctgatgtgcagttagttttggttggagggttcgaccctgcatttcctaatcctgccttggaaaataaaatattcaataacccggataaaataaaagttcttcgaggtgtctcgaatgaggaccttgttcatttgtataacaacacgctttgcctggtatttccaagctttgctgagggatttggtctgcctattctagaagcgatgtcttgcggtgctcctgtcatcacctctaccgcaggttcctgcccggaaatagctggtgatgcagcactattggttaatccaaatgacctatctcagttagttagtgccatggagaatgtttttaatgatgctcagttacgtgcttctttgtcagaaaaaggtttaaaaagagctgatactttcagttggcagcgatgcgcaacggagacttactctgtttatgaaaatatcataggaaaattttga

SEQ ID NO: 431911 - DNA, 987 bp, Serratia marcescens
atgtgtaaaacttattccccttatgtgttattgagtgcgctgctctttttattggtaagtgaggcgcaagccttcacctgtaaaagcagtgatggtggagtgattccggagggtggttccaatacgccagttccgctcagagttaaaattggtcctaacttggttaatgggaaaaatgagctatccagtctcagtcaaatttcctgtaaaaatgagagctggagtacgggttggtgggatgaaatgaggctgaaaacagtgcttgttgtaaagcctgagttatacccttttactgttggtgtgaaattagagtttagttcttatgatataccaggaaatcggcttgatttagataaactggtgcttgctatggggggcggacacggagggtctccgttttaccgggttcctattagcttatatattaaggtgggtaagaacccttcgcaggatgtttttatacagaaaggtgatgtattagtgcggttttatatggaacaaagtaacaatcagccgggctgccccctgtgtggcccctatatatgggatgtggttgctgataatgacgcctactttgctacgactagctgcaccatcaataaagccaaacagatgaatgtcgattttgggccgattagtcaagacaacttcaccactagcgtggacagtgcagtggttaagcagaaccagaatctcgattattattgcgaaggctctaatgccagtcaggatatcgcggttcgtttagtcggcaatacaagtggattttcctctgaggcaattcaaacttcaaatgcgaacattggcattgccatgctgtataaaggtaaggtcataaagcccaatgaaatttttaattcaaaaattgtgaacggtatgggaagtgacacgttgaccttcgtaccgataaaaaagaacgttccttttaatgagataaatacggggccattttccggttctgcaacgttagtgttcagcgtaccttga

SEQ ID NO: 431912 - DNA, 954 bp, Serratia marcescens
atgagtggactcgtggatgggcttgatgacttatattattttactctggtggcacaacatggcggctactcggcggcgagccgggttacgggtattaccaagaataagttgagcatacgtgtcgctgctttggagaaacggctgggcattcgtctattgcagcgtaccacgcgtaatgtggccccgaccgaaatgggacaacgtctgatggaacatggattggcgatgctgcttgaagtcaacgccgcgcaggagatgatcgccaatagcctgtcggatccttctgggcaagtcagaattacctgtccttcgttagcggcacgtttagtcctgccggcgtgcattgccgaatttatggcgctttatccgaaaatcaacatccagttgatggcgacggataatcggttcgacccggtttcagatcgaatagacatagctattcggttgcgggaaagaaaggatatcgaactgggattcgtggccaaagagttgggcaaaagcgtgaggatttttgttgccacgccggagtatcttgaaacaaaaggatttcctattctgttgagcgacttatcccagcatgcgttactcagtcttatagacattgaacatgaacagtcgtgggaattcaccgatgctcagggaaacgcttcagtattagaggcaagcattcgtctggcctgccgggagtgggatattgtgcggcacgcgctattttctcatcagggtattgccatattgccagacattatctgccatgccgatcttcaatcgggtcggctgattcaggttctcccccaatggcacagcccgccgttgatcgcccatatggtctttcctacacggcgcggcatgttgccggcagtgcgggtactggtcgattttttggcggagcgcttgccgggattgttggccacaatcgtcagggatgagagtggcaagtcgaaaaaggtttga

SEQ ID NO: 431913 - DNA, 849 bp, Serratia marcescens
atgtatgcagccagtattaatccgttggattggcgtattgccgggggcatgctgaaagatcggctcccgcatattttccccctagtcttaggcattgacggcatgggcgttattgacgccatcggcgaaagcgtcacccgctttcaaataggcgaccatgtcgtcggccggtttctgttcaatcaggtcggaaaagggtgtttttcggaataccagacgctttctcagaatgccatgctggtgactgtaccgaaggctatttttacactcgagttggcttcactgcccacagccgccgtcaccgcctttcaactatgccagttggttaacgttcccgtcgggagcaaggtcatgattgttggtgcagcgggtggcgtggggagttttgccactcaaatgttagcgcggcgcggttatcaggttatcgccgtcgccggtggaaagcacgcagactatctgaaaagtattggcgccaaagacattatcgattatcacaacggcccagtaatacggcaattgctgcggcgtcatccggataaaggcgcggggattattgatctgattaataactcggatgattttatcaaaaacctctcctggataaacgaaggcggcatagctatcagctcaattcacgcagcacgcgctggcgatgcggataatatttccacgatcaacttcgaattatctccagatatatcttccctgaaagcggtgctgcatatgcaggagaacggggaattcaataatatcaaagctcgtaccattttattagaagacgtgccggcctgcttgcagcaaagcaaactcggccaaggtaccgggaagactatcgttactttttcataa

SEQ ID NO: 431914 - DNA, 1098 bp, Serratia marcescens
atggagattatcggcgcaatcagttacccgaccaccgctttattaaaagtggagccattaaaacttgatgatccccgggacgatgaagttctggtaaagatcgtcgccacaggcctctgccatacggatatcgctgtgcataatgggttgatacctgtgcctgcgccagtggttcttggccacgagggagcgggagtggtcgtgcgcaccggcaaaaatgtcaggcgtgtccaaaccggcgatcgcgtcgttctgagcctggccagttgtggccattgccgcaactgcacctccggacgaccgacctattgcctggagcaccaaagcttgaattggcgggttcaacgggcagacggctcagtctctttgcacgccgcgggtaaggctgtccatagccatttcttcggccaatcttcatttgcacaatacgcgacggtgaatgccagcagcgtggtaaaagtcccggcagaagcgccgcttgaatatcttggccccgtcgcctgcgggatcatgaccggtgcgggagctgtcatgaatagcctgtcaccgcctgtcggcagctcaattgccatcttcggcgtaggcgcagtgggtctggctgccgttatggccgcgcagctttcaggatgctcgcctatcatcgccatcgatattaatgatgacagactgcaggtggctaaagagcttggggccactcattttattaatccggcacgggaagagttgttagctgaaattaacgcgatcactaacaacaacggcgtgcaatactccgttgaggcagcaggcagcgtcaaggttatggcaagtgccgttagcattctggccgaacagggctgttgcgttctgaccggcgtcgtcggcacaggggatactttacccgtggatgtgatgcatttgattcgcggcaggaccatcaaaggttctataatgggcgatgctattccttcgatattcatccccaccttggtcgatctttttgcccagggcaaattccctatcgataaactgatcacgttctacacgctgaatgaaataaaccaggctattgaagactcccaaaggggaaaatgcatcaaggccgtcattaaaatgtaa

SEQ ID NO: 431915 - DNA, 570 bp, Serratia marcescens
atgaaactaacatactgtgccgcttggctcattggactctctacgctctctgcttccgcagcccaaaacaattccaccaacaacataaaggaaaaagacggttattattacctgcaaaaggggtatacggaccgtgatgtcgctgaattttattggcgaagtttggaaggttggtcagaaaagccgggcaatgtggcgaaatatttcactccagatggcagatttgaattaccttacgcaccggtgaacgacttccctgatttattctcatcagcatcacagggcagagaggcgatcacccgctacttcagcagaatgagtcaatatcttggcaatttgaaatattcggcccctgaaacctggaaaataattcccgctagagaacctggcgtttatacgttcgaatacaccagtagcggcaagctcaagcaaaccgatggtgattataaccaactatttattgcaacggtaaaaataaaagatggtcaaatcgccctggcccatgagttctgggatccttatgtcgcgctgcgggatttcggtctaattaaaaaaactgacgcaaactaa

SEQ ID NO: 431916 - DNA, 537 bp, Serratia marcescens
atgaaatctaaagtcaacgtttacatcctttcctttatcatcagcatactcagttctggtttgcctcgcatggcgttggccgaaaacatttccccagccgacgtcgcaaaaatagtccaaaaagcccacgataactttaccagtaacccacagcagatcatcgatgccttcgctgataacgccataatagagtatcctttcgcaccacaggacattccgggattcccgaaaaagatcaaaggaaaaaaagcgataagcgaatacttttacggattaacaaattacatcaaaaactatcgctatgatgattgggaaaaatggaaatcctggagactggaaggaactgacaactaccttcttgagtattcggccaccggggaaacggttcagggaagtaaaccttaccatcagaacctgcatgctatcgtaaaaataaaaaatgggaagataacctattttcgtgagtattgggatccctactctgcattgctcatcttcgggctaatcaagaaggtctccccagacagtaataaataa

SEQ ID NO: 431917 - DNA, 792 bp, Serratia marcescens
atgaaagtactcattgcaggcgcgacaggaagtgttggtcttcatgtcgtgaataccgccattgaaatgggccatcagcccgtagcgctggtcagaaacaagagaaaagtaaaattgcttcctcgtgaaactgatgttttttacggtgatgtttcaatgcctgagacattggtagatttaccgaaagatgttgaggcagtcatttttactctcggttccgatggccaggggcgcattggggctagagcgatagattatggcggcgtgcgtaatatcctgaaagtgttgaaggatgtacctgttcgcattgctttaatgacaacaattggtgtcaccgagcggctcagtacatggaatcaacgtactgaggttcatgactggaaaagacgtgctgaacgtctggtcagggctagcggtcacccctataccatcgtcaggcccggctggtttgattacaacaatgatgatgaacacaaactcgtcatgcttcagggagaccgacgccatgctggaacgcctgaagatggtgtgatatctcgtaaacaaatagcccgtgtattgataagtgctctgagttgtgacgcggcaataaataaaacgttggaattggtggcggtgaagggtcaagagcaagttaatattgaagctttattttataagctaaaacgagatatttcttcaaagaacgacggagttgatgaccttgacaatatgccagtggacgatgaagcggcttgtataaaatcagattttgctgatatcaaaatgaataatggaaatgaagcgggctga

SEQ ID NO: 431918 - DNA, 894 bp, Serratia marcescens
atgctcaaagaaaatttcaacgaactgcaaatctttcttgtggtagcgagggagcgaagttttaccaaagcagcgggtaaactgggcgtttctcagtctgcactcagccacgcgatgaaggccctggaggaaaggctgaatatccgccttctgacccgcacgacccgaagcgtagcccctacagaagccggcgagaggattattgcctgccttgaaccgcgtattgccgatcttgaacaggagctggaatcgcttgttcaactgaacggctctgcctccggcaatatccgtttatctgccggagagcatgccgcgcggagtctggtatggccgaagttaaaacccttcctcagggaatatccggaaattaatctcgaactggtggttgataacggctttgtcgatattgttgagaggcgtttcgatgcagggatccgtctgggtgaaagcgtggataaagatatgattgcggtgagaattgggccggacatgagaatggccgtagtgggagcaccatcttatttcgctgcaaatcctgcacctgaaacgccgcacgagctacaaaatcatcggtgcatcaatatgcgcctgccaacagccggtggactttaccattgggagtttgagaaggatgggaaaccgttacgagtcagagtggaaggccaggtcacgtttaatctgcaggcggaaaggattgatgcggcgttatccggttttggcattgcctgcatacctgaggacagggtgcaggattatataaagtcaggagagcttattcaggttctgcaggactggtgtccatctttccccggatactatctttactacccgagccgtaaacagcatccacccgcgtttgcactgatgatcgatgcacttcgctactcggaataa

SEQ ID NO: 431919 - DNA, 852 bp, Serratia marcescens
atgcaaactgtaaaactgaacaacggtattgaaatgcccctgctgggctttggtgtgtttcagatgtctgatgccgctgaatgcgaaagagccgttattgatgccatcgatacgggataccgtctgatcgataccgccgcgtcttaccagaatgaaacccaggtcgggaatgcgctgaaacagatcggtatcgcccgtaacgaactctttgttacaaccaaactgtggctgcaggatactaactacgaaggcgctaaagcacagttcgaacgctctctgaatcgacttcaactcgattacgttgacctgtacctgattcaccagccttacggtgatgtccatggggcgtggcgggccatggaagaattgcaacaggcaggcaaaattcgcgccattggtgtcagcaacttccatcctgacagactggccgatcttatcgccttcaacaacgttgcccctgcggtaaaccaaattgaagttaacccctttaaccagcaactgcatgccgttccatggatgcaaagccgtggcattcagccggaggcctgggcaccgtttgcagaaggtaaaaatggcctgttccagcatcccgtgttaacagcgattggtcagaagtacggcaaaagtgtaggccaggtggtgctgcggtggatcttccagcgaggcatcatttcgctggcgaagtcggtgcggaaagaacgtatggaagagaacatcaacattctcgattttgaactcagttctgaagatatgctgcagatcgccgcactcgataccgcaaccagcgccttcttttctcaccgcgaccccgcgatggtggaatggctgactggccgcaaacttgatgtttaa

SEQ ID NO: 431920 - DNA, 1065 bp, Serratia marcescens
ttgaagacaatcttaaaaacgctggccatctgcgtgatggcgggtggcctggtggcgcagtcggtatacgctgagccgttggtcattcaggaacagggaagcttttctgctggtggcactatcatcaccgcaccaggaacatttgacgcaaaaaagccgctggattctgctggccaaacctaccatggcgatcatgcttctgtgttttaccaaatcccggaaaatccgcataaataccctatcctgatgctgcacggcgcaggtcagttctcccgtacctgggagagcactccggatggtcgtgaaggtttccagaacatattcctgcggcgtggattctcaacttatcttgtcgatcagccacgtcggggcagcgccgggcgcacgactgtagaaggtaccgttacgcctaaaccggatgaacagatgtggttcaaccagttccgcgttggcgtgtggccggagtattttaaaggcgttcagttctctcacgacaaagaagcgttgaaccagtatttccgtcagatgaccccgaataccgggccgtttgatatcaatgttatctctgatgcgatgtccgccgttgtagataaatccggcccggctatcctcttcacccactctcagggtggtggaccaggctggtacacggcgatgaaaaacgacaaggtcaaagccattgtcgccttcgagccaggcagcagctttgtcttcccggagaaggaactcccagcccctatgccaagcgcgttcgacacactgaagggtgagcctgtgccaatggagcaatttatggcactgaccaaaatcccgattctgattatttacggcgataacataccggataaaccggtagccatgcccgcgcaggacagctggcgcgtacgtctggcgatggctcgtgaatggcgtgacgcggtgaacaaacatggcggggatgtcactgtgacgcatctacctgaagtagggataaaaggtaatacccacttcccattctccgatttaaataatgtgcagattgctgatttggtgagtcagtttctgaaagagaaaaaactgcagtag

SEQ ID NO: 431921 - DNA, 585 bp, Serratia marcescens
atggagcatgatcccaaccgcagaatgttgatcaccgcacttgccgggctcacgctggcgaacgtctccctggcgacagctgccaccggaaacgcaaacgtgcagggtaaaagtcgaattctggtggcgtacttttctcgcagcggaaatacacgggtgattgcgggcgtcattcaccgtagcctgaacaccgacctatttgaaattgaaccggcaacaccttatccggaagactattttcagaccgttgaacaggcgaaaaatgagcgtgagcgcggagtcaaacccgcattgaaaaatagcgtcgcagatatctcacgctacgagaccgtgtatttaggctttccgatctgggggaccagcgtgccgcctgtcgtgcaagcatttctcagcagccacaaccttgcgggcaaactactcatccccttcattactcatggtggctatggtaaaggagacagcgacgacatccttgccagtctcgccccaacagctcgccgggaaaaaccgctggtcattgaatgtgaccaggagcgaagaacgactgaaacggtcacccgttggttagataccatacgcaattaa

SEQ ID NO: 431922 - DNA, 657 bp, Serratia marcescens
atgaaccacgaacaaacggtttcagctacgctgtcagcccgccaacaggccatcccgttgattgcggcatcgatggccagcagccagatggataagctgaataccgcactgaaccaaggacttgacgccgggctcacgataaacgaaaccaaagagattctcgtccagctttatgcctacacgggattcccccgtagcctgaatgcgcttagtgaattgatgaaggtcgtcgaagcacgtaaacaacgtggcatccaagaccttgaggggaaagaacccgctgccccgattcctgtcggggatgaacttcgccgtgtcggtaccgcaaaccagacgaaaatctcaggcgctcccgtccagggcccactgtttgattttgcaccggtgattaaccagttcctgcaaacgcatctgttcggggacattttcgcccgcgataacctcgactggcaaagccgcgagctggcaacggttggcgcattggcggccacaccaggcgttgaagcccagctgttatcgcatacgcgagcaagcatacgggttggcctgacggcagcgcagctgcgccagttggcacaggttctgcgtgaacatggcgaaaatgatgcggctacgcgagctgaaaaggcgctgcagcaggcgctcgctaacaattag

SEQ ID NO: 431923 - DNA, 480 bp, Serratia marcescens
atgatcggacatttacgttacctcggggtgttactgcccctcttcacattttcatcctgggcagcggaacaaaatcccgctgttcatatcgcccccgcaggaagtcagaacgcggtgtacgggccagccgagaactttaccggtcgcgtcagggttgatcctcttttcaaaccggataacgacatccctgtttccggggcttatgtcacctttgaacccggcgctcgttccgcctggcatacgcatccggcaggtcagcggctgattgtgacctcgggtgttgggctaacgcaacaagcaggccagccggtgcaggttatccgcgctggcgacgttgtttattgcccggcgggcgtcaaacactggcacggggcggcacccggcagcgcgatgacgcatctggcgataaccgggattgtggatggcaaaagcgttaactggatggagaaagtgacagatgaacaataccacgctcattaa

SEQ ID NO: 431924 - DNA, 1458 bp, Serratia marcescens
atgcttaagcgttccatctccgttcacctggcgctgatgtttgccttatccgcgctgctgattgtgtccgttatcggtatcctgctcagaagctccttgcataactctttgcaaaagcagatgcacaacgagctgttgttccgggaatcattaatgagtccgtggatcaccgcacgagtctcggctgacggttggtcactgcttgccaataaattcactgtattaaccaattctgaaggtgagcgcgttcgctactggatagtgagcgataacccgcgctttagcatggggggaacaccaccggtgggggttcagtggtcgtctttgcaggaaggctttaataaagtgcccggcgcatcggacggtgcatgctcgctgttcctgttagtgaacaccatccccgcgaacggtgaaaggcctgaactgcgttttgtggttgccatcgactccacgccgtacatgggcacactcgatgcgttcacgcgtacattgctgatcattaccgcactgggcgtagtgattgtcgccttactgggatacatcgtctcaaggatcggtcttcgtcccgttggtactctcagtaaacaggcccggcatctcgcacccggggaccatggccagcgcctgaatacccgcgctttacccaaagaactgcagcaactggcatcatcatttaatggcgtgttagcgcgtcaggaaatcgcctggcgacagctcgacagctttaacgccgatgttgcgcatgaactccgtacaccgctgaccaaccttatcggccagacgcaactgggcctctcgcgccgacgttcgcaagatgaactggaagagttattaggttccaatttggaagagcttgaacgcatgacgtcgatagttaacgacatgctgttcttgtcccatgcccacgcgggtgaacatgcttctcagcttatgcaggtctccctgcgagaagaaaccctgaaaacagcggagtatgttgaaccctcttttgctgaaaaacagctttctctggatgtagaaggcgatgtcaccgcgcacatcgaccggcgactgttccaccgttcactggctaatttactggaaaatagcgcaagacactcacccttcaatagcacggttacggtgcgggtaagcgaaaaaaaccatcaagcctgtgttgaggtttctaaccctggcgatccgataaccccagaacacttacatcggcttttcgagcggttctatcgtgttgacacctcccgagccaggagtgatacccatcatgggctgggcctgtcgatcgtgcgtgccgtcgccattatgcaccgaggggatgtctttgctcgtagtgaaggtggcatcaatacatttggcctcacctttgcgatgcaagcgggtaaagcggcgggcaatgcttaccccgacactgagccggggcctgggttaactgacagaattgtcaggggggcgtcagcctga

SEQ ID NO: 431925 - DNA, 681 bp, Serratia marcescens
atgcgcctgttgttagtcgaagatgaagaaaaaacgtcaacctatctcaaccgtgcgttgagtgagtccggatttatggttgatgtctctgcagatggtgccgaaggtcttcattacgcgctggagttcgactacgacgcgataatactggatgtgatgctgccggggatggatggctatcgggttcttgagggggtgcgagcagccaaacagacgccggtgctgatgctttctgcacggggatcggtcgacgagcgcgtcaaaggacttcgtcttggcgcggatgattatctccctaaacccttttctctcattgaactggtggcgcgcatccaggcgctggtgcgtcgccgcgcgacggacggtgcagacatcacccagttgcaaattcacgatctgcatctcgacttactggctcgccgggtttttcgtgcaggaacgagactggagctgaccgcaaaagagttttccctgctgagccttttggcccgacatcagggggagattctgtcaaagatgatgattgcggagcagatatgggacatgaattttgatagcgatgccaacgtggttgaagttgccattaaacgtcttcgagccaaagttgatactcctttcgatatcaaactgttacataccgttcgtggcatgggatatgtcctcgaagtccggtctgaataa

SEQ ID NO: 431926 - DNA, 1050 bp, Serratia marcescens
atgaaactcactcttataagtgcaatactgctaacggcaatggctggagttaccacagtcaatgcggctgattacaaaaaaaacccattcacactggcctatgacggagccatcactgagaacgtcaaaggcaaggtcaacattcatccagtgaaatacgatctgcatggcatccagattgctgcgaatgtctatacccctgctaactacgatcccgccaaaaaatatcctgcggtggtggttgcacatcctaatgggggcgtaaaagaacaggtcgcgggtttgtatgcccagcgtctcgccgaacagggctacgtcacgattaccgccgatgcggcttatcagggcgctagcggtggtgtgcctcgcagcgtggataaacctgctaatcgcatcgaagatatccacggcatggctgactacatcagccagtatcctggtgtggataccgcccgccttggtctgttgggtatttgcggaggcggcgggtattcacttgttgcggccgaaactgacaaacggttcaaatcgattgcaaccatcagcatgtttaattcaggacttgtgcgccgcaacggtatgcaggattcgcagcgggacactatccagcagcgtcttcagcaggcttctgacgcacgtgctcaggaagcagccggaggcgaagtgctttactccggcgatgccaacctgactgatgaacagattgctaaattaccttttgccttatatcgccagggctacgagtactactggaaaactcacgcccacccgaactccacgtttaaatacaccaccagcagcctgttggatttaatgagctttgacgtaacggaccatatcaatctcatcaataaaccgctgctgatgattgccggtacaaaagcggatacgctctatatgactgaagatgcgttcgcgaaagccaccggtacgaaggacaaagaactcttcctgatcgatggcgctactcatatcgagacgtattgggtgcctaaatacgttgatcaggcaatgcaaaagttagacgtcttcttcgataaaaatatttaa

SEQ ID NO: 431927 - DNA, 1191 bp, Serratia marcescens
atgagcaacgcattgcaatactcaaagaaaacgtcagggatgatttttgttatcacactcagtgcattaatggctgtaacgtccttgtcaacagatatctatttaccggctatgccccttatggctaaagacttgcggggtaatgcagagttgacaattaccggtttcttgattggtttttgcctggctcaactgatttgggggccagttagcgatcgcttcggacgacgtctgccactgttcataggaatggggttattcgttataggctccatgggctgcgcgttatcaaccgatatcgggcaaattattttctggcgtgtttttcaggcattaggtgcctgtaccggtccgatgctggctcgtgcaatgatacgtgacttgtttagccgcactcgcgctgcgcaaatgttatcgaccctgatgattattatggctatcgcgccgattgctggtcccctaattggcggacaaatgattaaagtcacctcatggcacaccattttctggttactggcgattatcggagcattgatgctgatgtctttattctggttgccggagacattacctgctgagaaacgctcgcaaacctccgtaaccaaagcctttaaaaactactttaccttgctaaccaacaccagatacatgcggtttactctgtgcctgaccttctattacgtcgcggcctatgcctttatcacgggctccccgtttgtgtacatcacgtactttggtgttgatccgcaacattacggttggctatttgccatcaacattgtcggattaatggcggtgagtatggtcaacagacgcctggttcaccgctatcccctggaaatgctactcaagaatgccgtattcatcgctactattgcggcattagtgctggcagtcacaaccggtctgggcgtaggtggattattcttgattgtcggggctgtgttcgtgttcttctccatgaatggcatcatcgcggcaacatccaccgcttgcgcacttgacgcagtgcctaatgttgcaggttccgcgtcggcattaatgggggcattgcaatatggcagtggcatcatctcttcactgctgctggctctgttcagcgatgatacaccatggacaatgggctggatcattgcggtctttacggctgccagcgccttgatggcactgactattcaggtaaaaaaataa

SEQ ID NO: 431928 - DNA, 567 bp, Serratia marcescens
atggtggaagggctgcaacaccaacgttacgacggcctgatgttcatcggctaccacagcgccgccggcgagcatggcgtgctggcgcataccatcaacggccgggccttttaccgcgtcagcctgaacggcgaagcggtgggcgaaagcgatctgtacgcggcggcggcggccgagttgaacgtgccgctgtggctggtgagcggcgacgacgagctgcaacgctgggtagcggaacgttacccgcacgtcggctatgcctgcgtcaagcgtgcgatctcgcaaaccgccgccgaatcgctcagcccgcagcgggcgcgcgccgagatccgcgaacgggcaatgcagcaggtgcgccagggcgggaagctgccggtggagcgccgcttcatgccgccttaccggctgacgctgatggcggccaaaccggtattggcggatctgttcagcctggtgcccggcgtggagcgccaggacgcgctcaccgtggccttcgacagcgacaacatggcggcgccaatccgcctgctcagcgtcttttcgtatctggcgacgacgcagaattga

SEQ ID NO: 431929 - DNA, 753 bp, Serratia marcescens
atgcttaataattttaggaaacatgaaacactatctgtagcatttgtcacggtgatggcctatgcgggttcatatttttatgaacgaggaggtgctatatatttcggagtgccaacggatcttatttcaataaccccggcaagcatgattgccatggcgatatctacttttgtattagcaatggtgcttttcttttttagtgattttattgtttcggtaatgataaaaaaaacgaaatcggtgctattaataaaatgtgcagtgcttttttctggcgtgatattttggtttcttatcggttatcttaataatgacctaactatagtgaacgttgttaccacacttgtggtatatgtctttatatgtatttgtatgcgatttatgcaagccactccatctaagcaagatccaactgctaaagatggtgatctctcaccaaagccgaaaagtagcaaaagtcttactaatcagctgcatgattactcaagtgttttgttctgggttggtgttgtgtttcttctttccactcacagtttaggtagaagttccgcagcaaatcaaaatcggttcgatgggttttctataaataaagataaatatgtaatagcaaaagtttacggtgaaaactatatcgtaaaaaaagtggttaatgggcacttggatgacggggtttatatttttaaaagtgaagattttaaaagaataaacatacataaaatactgttgattgaggttgcatccaagccgaaatga

SEQ ID NO: 431930 - DNA, 696 bp, Serratia marcescens
atggaaaagttaaggcttgtccgtactgcccaacaattaaaatcaggtggccaaaacattcaagataatgaattatcattgtcaatatccaagctgccacctactgataaattaaacctcactgctttagttcccgttgttaatgaaggggtgactgaggcggcgacaatacaagatatcgttgatttactcgatgggggggcgcctggtgatatcaagttagatcccagcgcaaataacttgctaagtaatagtaacgcgggacttatgttagaccgttacaaggccccttgtgtgggtattaccggcacgtatgtgagtactagcgcggggcctgacttcactaaggataacgcgtttagtgaaacgggcggcatttggagagtgaaaaatacccttatgcttagccgagtaccaagtacggctaatggtgcggtcattgttgatatcacgctggggaaaataccctgtgatagctcggggatccctttgcagtatacgttaagtgtcgggacgacaagtaaaaaggtcagtggagtctggcgtcagcattctgtcatgatattggccatttttggcgcccccattaaattaatggatgttgtctccggagttttagaagattacaaagagggagtagcgtggggggtaagcgttaaatatacgtttggggatatggctccatcggtaccataa

SEQ ID NO: 431931 - DNA, 1128 bp, Serratia marcescens
atgcaacaaaaacagccggccgaatttcggccagaatttcgcataactgcagaggggcgggatattaccgcgattttgcgggaaaacctggttgatctcagcttgaccgataacggtggcgccacgggcaaggctgacgaactgcagatcaccctcctgtctgaaaccctcaaactaccgccaaagggcgcccgcctccgggtttccctgggattcaatggccagctggtcgataagggctggtttgtcgtatccggccgcgccagcagcggaccgccgcgaaaaatcgtgctgtatgccactgccgcccctatgaatgcgcaaaagcaacccggagacgtacagagccagaaaagccgcagttgggacgctgtgaccctcggggacatagtgacgacggtcgcaaaggataacggactgatcccgaaggttgccgagcagctggccagcattgcgatcgaacatatcgatcaggtgcgagagtctgacgcagcgctgatgactcgcctggcgcgaacgcataacgcggttagcaagcctgccggcggctattggctattcctggaacaaggagaggcgacgaccgcgagcgggcgccggcttatcaatgtgacgatcacccgggaggcgctgacatcgtggagttattcagatggccagcgcggcgctaccaccgaaaagccagcgaagacggcggaaggcaaaggcaaaaagggcaaggtgagcgttgcatactacgacgccgccgacggccggactaaaacgcaatcgctcgagcataacgggcctgaccaagctactcccttcacgcagccgagcaaggcccaagctgatagcagcgccaaagccaaaatgacgaaggccaaccgcaacgagcggcgaatgacgctgagcggcccggggcggccgcagtacgtcccgttaacggcagagtctcggataacaacggccggttttggtgaggaagaggatcgcacctggttaattgagtccctagcgttctctttgagcagctcaggcctggcgatggcgtttaacctggtcactgatattaaaccgcctgcagagagcaaagcgaaagctgcgaagaaagaaaagaaatccgatggcattggctatttcgattaa

SEQ ID NO: 431932 - DNA, 459 bp, Serratia marcescens
atggtggacattatcggcacgatcaccggcgcctactcagccaggcagccggcagacagcgccagcataatgatgatgctgggaaattttgaattttccatcgataccgcgacctataaccagctgacgcgtgaggcccgttggcgctggagtgagcaggagcggatcggccggcaggacttactgcagtacacagggaaatcggcgcggtccgtcaaaatggacggagaggcacattcacaattcaggaacggcgtggccagtatcgatgcgctgtatgacctggctgacaaggccgagcctcagcagttggtgagcagcgccggcgatgtacttggctggtgggtcattactgactttaccgacacgacgccggcgtttctgcctggcggcgctccccgtaagaaaacctactcgatcacgataaaacactatgccgacgaattatctaacccgtga

SEQ ID NO: 431933 - DNA, 1620 bp, Serratia marcescens
gtggccggacttagccagaaattaaaggccgttatcagttttggcggcaatatcgactcttcctggggccgttctacggacggcctgaaaaagggactgagctttgtcgaaaaacagtctgaaaagctgggcaagcagcagaaggcgcttgcgctggaaatgaagaaggcgaagctagccggcaaagatatttccgggttgaaacgcgactatgccggcgtgacgcgcgagataaaaaaagctgatgcagctcaggacgcctttaaccgcgatctgcagcgggctgaacgcctgcgccgcttcggtgccggcgcaaaaacggcagtaggtcgcacgctgaaagcggggatcgggatgacgctcggcggcggcgcattggctgcagctgccggcgcgatcctttcccctgtgaacatgaacgcccggaccgccgaggccgtcggcaaagcgaaaacctacggcgtcggcatcgagacgtataacgcgtgggacagcttcgggaagcaaatggggctgaacggtgaaaacttcggggaccttctcgaggaactgaagaacaaagccggcgaatataaggcgacgggggaacaatcctcgcttaacgatgctttcaaaatgctgaaatttggcgccggcgactttgccggcctgaccaatgagcagcagtttgagaagatcatggagcgcgcgctgacgcacaaggacgagcaggaagcggcgtccgcggtcgatatgttgatgggcggtgaggcgaataaaatcctgacgtacatgcgtctgaccggcaagagttacaaagagctgatggatcagcagaagcgttacaacctggtgacgaaggaaggcgcggacggcgccattcgcggcaatatcgcgtttagcaatctgcgcagcgtgtggggatcggccgttgaggaaatcgccggcaagctgggcggatcattggcgccgaaagtgacgcaactggcggacgagctttccgcctggttcaaaaatggcggcatagacattatcgccaccacgatcaggaacaaatggatcccgaacctggtggagtttgccaacggcatcatgaccgtaacgaagctgtttctggccattgccagaaaattagcctggctgttgcccgatgagcagagcgacaaaaaagctatcgtgcgttctcttggtaaaggggacatcgagggcgcgcgcgattttgcgcaaacgcggggccaatcggcctggctggaatccattttgaaggacccggagaagcagaaggccctgcaggggatttaccgcgatacgcaatattcattgtccagcgagcggttcatgagtcctggcgcgtattgggacaaggccgacgatcggatgttagccgcaatcggtgagacggataagggcgatgatccgttagatggcgcgtttgcgttcctttcctcgctgaccaatcagagcgccgccggcgacaagcccgcgatgacggacaatcgccggcaagaggtgaatatgacggtgatcgctcaacctggccaggatgcgcaggccgtggcggatagcgcggtttcatcactgaaaaacatggacgtgttcaacggcaataatgcaatgcatgaccctgcggaggtctggtaa

SEQ ID NO: 431934 - DNA, 300 bp, Serratia marcescens
atgagctatccagcaaatacgaaagagatcaagttttactccccgctgaccctagaaaacggcagccagttaaccagtgtgctcatgcgggagcctctggtgcgtgaccgtattgagttctcccggatgaaagggaatgacctggagaatgaagtggccatgatcgccaacctctgcaatatgaacgttgctgacgttgaacgactgacttcggcggacttctcccagctggaggacatgtttaacgattttttgctaccgcccgacaagcgcgagaaatcgacatccagcgagggctga

SEQ ID NO: 431935 - DNA, 507 bp, Serratia marcescens
atgagcgataaagcaacggtaagagcctggacattttttgccggcggttttcgtatccagggcgcgcatgaatacacgccgccggaactgtcgatcgtcaaaacagacctgcgcaccggcgcgcaggatgcccccacgccgatggatgacgggatggaggcgctaacctgccagatcaagttttacggcatcgatacggacatgctgacccgctttggttttgtgacgggcaatcgtaaccgctttgcggcttacgagggctatctcagtaacggcggcgcgctgggatcgattgacgagattgagggctttgtctcgaagatcacccctgacgcccgcgacaatcaaacgctgtctgagaaggcgacaacggtcgaaatcgcgatcaactactacaagcaaacccttgaaggccgcgagctgttcgaaatcgacacagagcgctttattcgccgtgtgaacggcgtggatcagctgcgcggtatcgccggcaaaatccgcctttaa

SEQ ID NO: 431936 - DNA, 1542 bp, Serratia marcescens
atggcagaattacatggtgttgaaacgatagagctgaatagcggatctgttgctgtgacgacgattcagaccgcgattatcggcctggtgggaacggcgcctaacgcgtcgaaaggctcgccggccagtgtgacgaccgggacgccgttactggataacgagctggtattcaaagcggtagaccctggccgccagggtaatcagtacagtgttgaggctgttgccggcgccgccggcgtgaaaacctcggcaagctatgcggccggtgtgctgtcgatcatcttggctgcagatgataaaggcgcggtgactgcgacgacggccgacgtggtgacagcggtgaatgccgtggcagatagaaaaatcaaggccgaagaaacgacggcggcggggattgtggcgccattcacggccctgttaaccggcgggaccgatgagccgtttcctgtcaatacgcctgttgccgtcattgggggcactcaactaagcgccctcggtgctggtggtacgctgggcgaggcgatcacggatatcaccgatcaaacgaacgcgctgatcattgtcgtgcgagcggcggatgacgcggagggtaaagccgctgcggtgctgagcacggaaaaaggcgcgaagttaacgaccgaagacggagcgaaattgctcactgaacagaaattttcggtggatccagacgtgcgggccaacctgatcgccgcaatggccgcttggtcgcaaagtgaatcaatcaccggctaccgtccgcgcattttgattgccccggggttcagtgaagatgacgtgatcgggaaggcgctggagacggccgcaaacaaattgcgcgcggtggcttatgttgattgtgagtcgatggccacgccgcaagaggttgtgacccgccgccagatgtacggcgcccgggttgagctgttacgcccccgcgtctcaaaagtgaaggccaacggtgagatcgcgtttcgcccttactccgcctgtgcggctggcctgcgcgccaaaatcgacctggaaaagggctggtggtggagtaagtcgaatcagccgatcgccaatattctcggcgttgaacaggttgacgagtttattctcggcgatcgcaactgccaggctaacctcctgaatatggaaaacgtcacaaccattatccgccgtgacggttttcgccattgggggaaccgcctttgcatcaaggatccgcaatggcaatttgagtctgtgcgccgaacggctgacgtcatcgaggacagcattcaggagacggtattgctgtacgtcgatcgcccgctggatctcgaaaacatcgatgacatcctgggcacgattaactcctacatgcgcacattgaccaaactcaaggccatttttggcgggcgcgcctggctggatgaggagttgaacaccgccgaaaccctggcggccggcgaagtctatatcgattacgattttgggccgaagtcgccgacggaacggatcacgatgcgggtacgcattaacaaccaatatgcagtagaggagctggggacagtatga

SEQ ID NO: 431937 - DNA, 732 bp, Serratia marcescens
atgactgagagctttgaattttctgatagcccgcgctgggtatgggtttaccgttttgatgatgccggcgttttcaccgggtcgctcaacttttacgttgcgccgcataccggcttaccggctaattgcacgcccgtgaagtgcaatccgaaagctggccaggcgggaatatggaacggggaaggctggaaatatgtggccgacgtgcgcggcgctacatattgggatgaacagggccggccgtttgtcatgatggagctggccgcatttcctgagtgggcagtaaacgaagcgccgccggcgcccgaacctggccacgttgtgttgtataccgccggcgcctggcagcaagttgaagaccgttcagggcagacgtattacaccgccgacgggagtccccaggtggttcccaatgcctattttgtcctccctcccgattgcaccttcacagcgccgacgtcgcaatgggaccgctgggacggtgagcaatgggtaacagatacggatgctatgaagcgggcggcgatggaacaagcgacggtaacgaggctgcagctgcggcagcaggcagatcggcaaatcgaattgctaaacgatgcagcagaaacgggaattgctgccgccggcgatgagcagcgcctggccgcgtggaagaaataccgcgtgatgttgagccgtatcagcctcgacaaggccccagatgttccctggccaccattgccagctgaataa

SEQ ID NO: 431938 - DNA, 1347 bp, Serratia marcescens
atggcttcaggattaattttaaccgccgtcggggccgaggcgatagaggcggcatatcaggccggcgaggtggtcactatcccgatcgtcgcgttcggtgatggtggcggggcctctgtgacccctgaccctgccgtaaccaaactggtcaataaatttggggatgtgccctttacgcagggcgagtcgggtagcagcatgattgccggccaggcggtgattaacgcccgtgagcacccgggtaaagtagtccgggagtttgggctgatgagtagcgccggcgttctgattgcctatggcgcctatccagacacctacttaccggaacaaaatgactcgatcgtaaaagagctggtggtgaactttgctatgccgctggtacatgccgaaagcgtggtgctcgagattgaccccaatatttcggtgctgacgattgaagaggctgacgcccgctatctattcaggaagggagacacagcgacgggtgatctaggcgccccaatgttccaggcaaacggcacgaacggcacaccggccggcgcaggcatgtacaaggagcaattggacaaccacgccccattttattcgcctgattatcactggtccgtgacacctggaagcacttatatccccctggttaaagggcgagggactcgaaaaggcaaaggatggccgacggccgttagctttggctaccttatgccgggtacagatatgcacgctcatcctgttatccacgcaatcggtgatagcgggatggagtgtatttgggagtttgatacacagagcggggggctgagaagtaaagcgggtacgttcgcgatagaggagctgcagccgatcgttccgctgcctttttctggtgataccccaccgatagatcatgctttcatggttgggcaggctttcgataaaaacgcctatccgcgcacggcgcaggcgttcccgtcgggtatttttcccgacatgcgaggccggactattttggggaaacccgatgatcgcggcccgctatcgttggctgatggtgaggttaagagccacggccacagcggggaggtctatgcggctgatttagggtcgcgagaaacgaatgaaaccggtggttatagtcctcgcctgcggtcttatccgtccaatactgcgttggatggcggtacgagcaacaggcattccgttgatcagtcaaaagagtttacggactacgggttaattgaagggattccgcctcataaacactctctttggcttggcccgcatagccacggcctgcgcatcgatgcgttcggtgccgccaaaaacaccgtcgataacatcgcttttaactacatcgtgaggcttgcatga

SEQ ID NO: 431939 - DNA, 1149 bp, Serratia marcescens
atgccgaataaatttaaaaccctcctcccgcccaatgccattccggcagagcgcgcgcttgagcaggcgacaattgaagaggtgctctctatcccggacctgatccggatagtgaaaaacccggtgttatgtcccgttgagctgctgccgtggttggcttgggagttcagcgtagacacctggaacacggattggacggaggaggagaaacgggcggctattgcccgtgctgcctatatccatcggcacagagggacccgggcggcgatcgaaatgtcgttgtcctcctcgccgttcgccagcgatgttatcgagtggttcgaaaagacgccccgagaggagccttacacgttctctcttgaggtgacgcaggacgaccggccgatcacgttgggcgatgtgcaggacctgaaaagcgcggtgatgaaaggtaagaatttgcgctcttggttcgatgtgacatttaaggagaacctggatggcaaggcgattttagccggctacatgattgcatcggagtcattctcaatcatgcccgtatttgagtttatcggcgtacatatcaacggttggatgacgtcggattttgcgcctacatcgtcgttttatggggccgtttatacgctggtaacacaaggcaattttggcgcgatcacctggcacgttacaggcccggcgacggtggccagtgatggaatggtaacaattaccggccctggaacggtcgctatcacgggaacggatgcccgaaatcgctcggtaagtcatgcgatcaacccggcccgttacttcatccctacacctgctgatattcagcttagccagtctgagatgcccgcatttattgaaaaacagggcggcaggatgtgcctggttgaggatttaattcgttggccgcaagcaggggggataaaagtacgcgaaatggggcatctgtggggggagtggggaaacatgacggcctacggctggcgaaaattttggatggggtcgacctcggaagaggcccgctgggtcacaggctccccggggagtcccccaagcttcaggcgttttgtgcggttgacctctgcaacattcggcagtgtttcgccgtgggaccctaatgattattcgacggccgccgtgattgaattggagaaaaactaa

SEQ ID NO: 431940 - DNA, 915 bp, Serratia marcescens
atggcgaccaattccgcaacgattaacctgtctgagctgcctgtgcccgatgcggtaaagatacccgatccggcgctgatttttgccggctggctggcgcggcttcgtgagctggacccggtttatgatgccttgctggagtctgaccccgtttttaaacaaggggaagccctggcgtatcactcaaccctgatccgccagggcatgaatgactccattcgggctgtattgctggccagcgcgaaagggaatgaccttgaccagatcggcgccaactttgacgtggagcggctgctgataaagcccggcgatccgagcgcggtcccgccggttgaaccggtatacgaagacgacgaggcatttcggacccgaatacagctggcctggtcccggttaagtaccgccggcgctgaaaacgcgtatacgttttttgccgcatctgccgatcccgatgtgctcgacgtccgcgcatacggccctgaagatcaccagctcctcggcgaggtctatctctatgtgctgtcccgcaccaacagggggatcccttcggccgaggtgctgaagaaggttgccgaagcggtcaataaaaaagaggttcggccgctgaccgattttgtcacggtaaagccggcggaactggtggattttgaagtgaccgcagatatccagatcccctacggcccggacactgacacagtgatgaaagcggcggaggatgagctggacaagtacctgaccattgttcaccgcctcggccggctggtttcgcggtcggccatagaccgtgccttacatcagcccgggatagtgacggtaaagctgctttcacctgctgcagatatcggcatggcaatggggcaggcgccgcgatgctcaaaagtgacgctgcgtaaggtgatcatcaatgccgaataa

SEQ ID NO: 431941 - DNA, 360 bp, Serratia marcescens
atgcagggagttaatgcggccagcggtaagcgcctggccgggacagcgcacctgcgccagtccgtctttgacattctgacaacgccgataggtagtcgcgttctggtgcgggattacggcagccgtctgttagacctggtggacaatccccaggacgaaagcacacgcgtgcatatcatcgcagcgactgccggcgccctggctcgctgggagccacgcctgcaggttaaatcggtgacggtgcagtttgccggcgccgggcaatttgacctgacgatttacggcatcaacacagaaacgggctacccgatcactttggaggagctaacgataaatggcgaccaattccgcaacgattaa

SEQ ID NO: 431942 - DNA, 621 bp, Serratia marcescens
atgagtgacgacgtgttatcagacctgcagcgccgggttgccaacatggtccgccgaggggttattcattcgttaaagcacggccctcagccattctgccgcgtggagattggcgagaatattacaacttggctcccgttatgtcagggattcgccggcgcccatcgcagtgactcaaacccctgtgcagtaggcgatcctgttacggtactctcagaaagcggggagctgaataacggccgcgttttccctggctggaatacgggcgccatgccggcgccagaaggcagcgacgcggaacacatcacccgattcagcgacggcgccgagttccgttacaaccgcgaaacgcacgcttttacgttgacgctccccgaaaacggcacctatgaaattatcggcaaagggacgttgcgcgggccggtagaaataacggacacgctgacggtgaaaggtaaaacggaactgcaggcagacactgccgttaccggcgacctgtctgccacgggggatatttccgacggcaaaagcacgttggcgcgggtcagagaaattttcaacattcacacccatcccgatccccacggtggggacaccgataaaacgaacaaccaaatgtaa

SEQ ID NO: 431943 - DNA, 555 bp, Serratia marcescens
atgccaacaccgattttaatggcgagctatcacggcgcgatattgtccgcactgcgcgaaattgagtgggtagccaatgccgatgattacccggaagtagtgacgcagctggaaacgccggcggtgtatttgtcgatcgctggctgggaaaatgcccccggttcggatggccaactgcgcgttgagtttgagaatgatctctttgttgttgtcgatcgcgccggcaccaacgaaatcacaaagccgcaggtttacatccgaacggcggccgcagacttgagccaatggatccagaggcgaacgtttgggcttgaggggttggagccggcggagtttgtcagagctggcccggatgaattcgatatcgcaatggaagattatatcgtctggcgtatcacgttcagccaagtggctgctatgggtgaggatccgtttgaatcgaaagccgggccattgaaaaaggtctttctgggcaaggcgccaaacatcggccgcgcgcacgttgacgattatcgccttatttacgagaaaaaagagggcgccggcgatgagtga

SEQ ID NO: 431944 - DNA, 657 bp, Serratia marcescens
atggcccgagaaagcaggttaaggcgtgatctgccgtttgatatcgatctgcaggtgctacagcgaatagccgtttccgccggcgcgaaccataagcagtatttgcgcgcctactcccgggcattaaaccgtactgccgcgacgttgcgaaagcgtgtcgttgccgatatgaaggccggcatagcgccgcgcaaccaatccatgatccgccggcgcctcctgtcgtttcgcctaacccgtggctcccagctggacgagggtaagttgtggtttggtctgaatgctatcaaggtgaaagacttgaagggccgcgtaaagggtcggatccggcctcatcatgaccgtcgggacccgagaacggggcgatttatcgcagctaggcgccgggccgccgctgaagttgggtttgagcctaaaggggccttgctggctgcaaaaaacttccctgatggtgaagtgggccgaacgcgcgccggccgtcggacagtattgatccgcgatcctcagacccgccgcgcaaaagaggccgaggtagatatctatgctccgatactggattacatcgaagacaacgcattttcggacgtggcgcggattttcttccatcactttgaaacggatttaaaaggccgcgtgaaggcgcggatcaatgtgtga

SEQ ID NO: 431945 - DNA, 369 bp, Serratia marcescens
atggatgggttcgataacctttttgatgaggctctgttcgatgctgacagccgaattattgaggtgatgggccgggaaatggaggtgtttatcaatggatcgtcgacgcctgtccgtgccgtttttgatgagccggccgctgatactaccctgccttatggcgccgcaacggtccaggacgtcgcccctcggttatttgtaaaaacggcgctggttgcaggcctgaaacctaaagatcgggtggagattggcgcggaggccttttgggtggtgaaggtcggcccggacgacacaggaacctgtgttgttacattggcgcgcggagtgccagggaagcccgcgccggtgatcgacaaatggagtaaataa

SEQ ID NO: 431946 - DNA, 411 bp, Serratia marcescens
atggctgctaaagacgagttgatcgccaaactgggcgagttgggcaaagtgttgggccgtgagctgagcgccgaaggaactatcgcagatttgcaactgcgtatccgcgaagccgaagaggaaatcgaagccctagaggaagacggcgacggtacagacggtggcaccggtggggcatctggttccggtccgttgctgcagacgaccaccgaacaacgccagccagtggcgccaaaatcagaaggtgaaatcgagtgggtaacggtccgcgtgctgacgacgttgcacatcaacgccttgcatgagacgcgcaatcaacccgtgaaaatggcgtatgccggtgacacggtccgcgtgctggattcggacgtggacgagctggaagacgctggctacgttacagagctttaa

SEQ ID NO: 431947 - DNA, 1038 bp, Serratia marcescens
atgtcgcaatccatgtactcgacgagcaaattgatcgccgtcacagagacaaaattcaagtttgacccactgtttctgcgtgttttctaccgtgaaagctacgaatttgatactgaaaccgtagacctggccaagatccccggcgaggtcgcaatggcggtttatatctctccaacggttgaaggtaaagtgctgcgttcgcgtggcggcctgaccacgcaatttaagccgggttacgttaagccaaagcacgaagttaacccgcaaatggtgctgcgtcgtctgccagatgaagatccggagcagttgaaagaccccgcttatcgtcgtaatcgcatcatcctgcagaacctgaaagatgaagagttggctatcgcccaggttgaagaaaaacaggctgtcgatgctgtgatcagtggcaaatacatcatgaccggcgaagagttcgaagaggtcgaagtagacctgcagcgcgacccggccaacaacatcacgcaggctggcgccggtcgctggtctacccaggacaaggaaacctacgacccaaccggagatctggaggagtacgcgctcaatgcgtccgggattgtcaatctggttgtgatggacccaaaagcctggtccctcttccactctttcaaagctgtgcagaaaaagctcgatacccgccggggatctgtggcttacctggaaaccgcgttgaaggatttgggcaaagcggtgtcggttaagggcatgtatggcgatgtggccatcgtggtctacgttggccagtatatcgaccctaagacccagaaaaaaaccaactacatgcctgaaaacacctttgtgatgggtaataacgaggcgcggggtatccgaacctatggcgcaattcaggatgttgaggcgctgaacgaaggcattaccaaggcccgccgttatccaaaaaactggattcaaacgggtgatccagcacgtgaatacaccatgacgcaaaccgcgccgttgatgctattggctgatgcgaatgaattcgtggtggtgaaagtcgcttaa

SEQ ID NO: 431948 - DNA, 333 bp, Serratia marcescens
atggtaaatcaagaagagtttaagcatgttcagccctttggtggcagcgatgcggcacataccgcgatcggcattagtggccttactgcggcaacgccggcactcaccccgttaatgttgaaagaagacgctaacacgctggtggcatgggatggggcaaaagccgggacggccgttgctattttggcgctggccatcgatggccctcaaccgaaaatcacgtactacaaatccggtacattccgggttgaggatgtgcaatggccagaagcagcggccactgatgaactgaaatttaacgcctttgttggctcggctatcagcgttaactaa

SEQ ID NO: 431949 - DNA, 1314 bp, Serratia marcescens
gtggatcaagcgcgtaacttaccccatatcgccagcatggcactcaatgagccgcttttattagaacccgcctacgcgcgggttttcttttgcgcgttgggtaacgagctgggcgtggggcgcctgattgatggcacaacaaacacggtcttatcaccgccgcaaatgaccgaattagccgcgtcctatggtcccgaacgcgtgactatctcggataacggctatgacatccagggtcggatcgccattgtcccgatatcggggacgttggtcagtaagtccgccgctttgcgtccgtattctggcatgaccggctacaacgggattgtttccagggtaacagcggcaattaacgatcccgacgttgacgggattttgcttgatatggacaccccgggagggatggtcgccggcggatttgatgcggccgatattatcgcccgtctgcgtagtcaaaagccgatctggtcattggccaacgatatgaactgcagcgccggccagttgctggccagcgcgtgctctcggcgcctagtcacgcaaacggcgaaagccggctctatcggcgtcctgatggcccacagtaattacgccggcaatctggagcaagccggggttgatatcaccctgatttttgccggtgctcacaaggtggacgggaacccctgggaagccttgccaaaggaagtccgggcaacatttcaggcaaaaatgaacgccatccggcaatcctttgcggaaaaagtatcgggctataccggtatttccgttcaggcggtgctcgataccgaagcggccgtgtacaccggccaggaatcgatagacgcaggtctgtctgatgaactggttatcaacaccgatgcgttagcggtcatgcgtgaggctatcagtaactcaaaagtaacccggtctataggaggccaaatgtcagtaaatcaaacccaaaccgtagcggatacgccaaccgggtcggaagtagccacagcacaaatggcagcggatccgacagcggctcagcccgcaggaagtgtaacagcggccgttaatgatgccattcaggccgaaaatgcccgcatcatggggattttagattgtgatgaggccaaaggccgtggcgcttccgcgcgtgccctggcagccacgccaggtatgacggtagaaaacgcccagcgcattcttgccagtatgccggaaagcgctcaggtgcggactgaaaccggacttgatcgcctgatggccgattctcccgaagccctgggacaaggggcagcggcaaaggccgaagaaaacgacttaatgaacaccccggtgtaa

SEQ ID NO: 431950 - DNA, 1602 bp, Serratia marcescens
atgaataaaaatccaactttacttggcccggatggcgcgacgccgctgcgtgaatacgccggttataccggtggcggtgtgggctttggtggccaaattgccggctggcaaccgtcttcacaaagcgtagacgccgcattactgccgcaatttgaacgggggaacgcccgggctgatgacctggtgagaaataacggctacgcagccaatggtgtgcagttgcaccaggatcatatcgtcggctcattctttcgccttagctatcgcccaaactggcgctatctcggtatcgctgaggaagagtctcgggcgttttctgacgagatagaggcggcctggcgagagtacgcagaggaccctgattgttgcctggacgtggagcgcaaacgtacctttacgatgatgatccgtgaaggcgtggccatgcacgcttttaacggggaggtctttacccagccttgctgggatcgtgctccgcatcgactgtttcgcacgcagtttaaaatggtcagccccaaacgtatccgaaacgcgcccggggttctcgacagcaaaacgcagcgagtcggcgtttcgctggacaaatatggtgccgcgattggttacagcgtgctggatgacagctatccgagctggggaacccgccgcgtttcctacgtgccccgtgagctggcaaatggtcggccggcaatgatccacatttttgaacccctggaggatggccagacgcgtggggccaatcggttctacagcgtgatggagcaaatgaagatgctcgatacactgcagaatacgcagctgcagagtgcgattgttaaggcgatgtatgccgcaaccattgagtcggagctggatacagaaaaggcgtttgattacatcctgggggtggggaacgtgaaaggccaggaaccccctatgaataaattcctggagcaatacctgatttattaccaggccgcgcaagtgaagtttggcggcgcgaaagtcccgcacctgttccctggggacaaactggaactgaaaaccgcgcagaacgcggataacggctattcagtctttgaacagtcgttactgagatacatcgctgccggcctgggcgtgtcctacgagcagctttctcgtgattattcgcaggtgagttattccagtgcccgggcatcggctaacgaatcctggcgttacttccttggtcgccgcaagtttattgcgtcacgccaggcgagcatgatgttttcctgctggctggaagaagccttgatccgtggggtggtaaaaatgccatcccgcgcacgtttctcattcagtgaggcgcgatgtgcctggagtaattcagaatggatcggcgccggccgcatggccattgatggcctgaaagaggtgcaggagtcggtcatgctgattgaggcggggttaagtacctttgaaaaagaatgcggcaagctgggcgaagactatcaggagattttccgccagcaggtgcgggaggcagaagaacgcaaggcagctggcttaacacagcctgcgtgggtggctgcagcttttcaggctcagctgcagaactcaacacaaaacgagggaggtcagcgtggatcaagcgcgtaa

SEQ ID NO: 431951 - DNA, 246 bp, Serratia marcescens
atgacctcgccgctattgcggctcaattgggaggataacgtggcgacactggcacaattggaagaagcccgaaaagccttacacgaactgctaacgggtaaacgtgtggcatcgattcaaaaagacgggcgcgccgtgacattcacctccgccacgttaaacgagctgcgcgcctatatctctgatttagaggttcaaatggggttagccagtcggcgccgaggtccggcggggttcggggtatga

SEQ ID NO: 431952 - DNA, 1926 bp, Serratia marcescens
atgaatatatcgaacaatcagctgactaatctgggacgtgccattgccgatggtttgcgtgtgttggtacgcccggtaccgatgactgcggttgaatgggcgaacgaatattattacttgccaaaagaatcttcttatcaggaaggccgttgggaaacgctgccattccaagtggcaattatgaatgcgatgggaagcgatgatattcgggaggtgaacctgattaaatctgcgcgtgtcggctattcgaaaatgcttcttggggtcgttgcctatttccttcagcacaagcaacgcaacgggttgatgtggcagcccacagatggcgatgctgaaaatttcatgaaatcacatgtcgaacccacgatacgcgatgtgcccagcttattggcaatggcgccgtggtttgggaagaagaatcgtgacaacacactttcaatgaagcggttttcgaatggccggggcttttggtgtttgggggggaaagcggcgaaaaactatcgtgaaaaatcagtcgattttgtttcctatgatgagctggctgcttttgatgaggacattgaaaaggaaggttctcctacgttcttgggtgataaacgcattgaaggtgcagtttggccaaagtctattcgaggttcgacaccaaaaattcggggtatgtgtcagattgaacgcgcggcaggtgagtcggggcatttcatgcgtttttacgttaaatgcccacattgcggttcggagcaatttctcaaatttggcgatcgggagaccccttatggatttaagtgggagagtggaaaaccagagacggtcttttacctttgcgaattcaatgcgtgtgtcattcaacaaagtgaaatgagtttggtgggcggacgatacatctgtgcggtatctggggagtacacagtggatggattacagtggtttgactccaagggagtggaaattcccccaccagaatcagtctcttttcatatctggacggcatacagcccgtttacgacctgggtacaaatcgttaaggactttagaaagacgaagggcgacccgggcaagctgaaaacgttcactaacacgacgcttggcgaaacctgggccgaggaagtgggggagcggccgttacctgaaaccttgctcgagctggccgaacattaccgggcagaagtgcccgatcgtgtggtttacctcaccgccggcattgactcccagcttgatcgttatgaaatgcgtgtttggggctgggtgccaggagaagaggcattcctgatcgaccgcgtgattatcatgggtcggcacgatgaagaggaaacgttgctgcgtgttgatgaggccatcaacacgcagtaccagttagccgacggcacgatcatgaccattggccgcgtttgctgggactctggcggtatcgatccggcgattgtttataaccgttcgaaaaagctgggcctcttccgggtaatcccgatcaagggagccagcgtttatgggaagcctgtggccaacatgccgcgaaagaaaaacagtcatggcgtttttctgacagaaatcggcactgacgtcgccaaagaagtcatttacagccgctacaaactagaacgttccgctgatggctcccccgttcctgggtttattcactacccgaataatccggcggtttttgacctggccgaagccgagcagatgacggcagaggaactcatagaaaaatatgagaaagggaaaattaaattgctctgggacgccaaaaaacgccgaaacgaggccctcgactgttttgtttatgccctggcggctttgcgtatcagcgtttcgcgctggcagctggatttggatgtgttactggccagccgccaacaatcaccgtccggccagcaggccagaagtaataatgacctcgccgctattgcggctcaattgggaggataa

SEQ ID NO: 431953 - DNA, 510 bp, Serratia marcescens
atggctgttttactcaataaaaaagacatggccacctcattgggaatatccgttcaggcatttgataaatggggagttatccctacagagaaacgtggccgagaggtgttctacgatgtccgttctgtactggaaaatcgtctggctcatcaggtacgaaaacaacaacctgacgaagatagcgaggttgctgctgaacagcgcctgcaaatcgctaggatccggttgacggaggctcaggctgaagcacaggaattgaaaaatcagaaagggaaagggttggttattgagacggcattttgcacgtttgctctttctcgggtggccggagaaattgccggtattttggatggcatacctttaaccctgcaacggcgcttcccaggtgtcgatccccgacacctggactatctgaagtctacgctggcaaaagccatgaatcggaccgccgttgtgggggaacgagtagaggcgtggatggatgaatatatcgaacaatcagctgactaa

SEQ ID NO: 431954 - DNA, 597 bp, Serratia marcescens
atgaatacagatattattgcatttgaacaattgctttctgctcaggaagtagccaggttcacattctggataatgattggaacttgggtcgctggggtggcaacatcactagcagtaatgataactctttatgtaacatataatcagaagcgcgtaaggctaagttgtgacatttcggagagagaaatcgttggtggattgtcatctttttttgatgatggtcaaaacgataaaggaatttctttcaatataactaacaattcagtttttcctgtgacattaagtaaagtgggtatgtctaacgcctgctttccttggcaaaagaaaaaatattttttcctgaacatagatatccatcaacatagtaataaattacccatgaaattagaaagtggagagcaatgtcatttctggattccgttaaatgagaaaggcgatgaatggtttgaatatatggcgggggttattagtagtgcggggttgacaccaaataaaatgagaattgtagtatcaactacatttggaggctcacctagatttaagtattcaaatgatattttacgaaaacttaattcctacaaaaggaaaagcacttga

SEQ ID NO: 431955 - DNA, 312 bp, Serratia marcescens
atgagcaaaagaacattttctataaaagaagaacaagcgatagagcttgctggaagaattgttgctgcgaaaatagtcatggagatcttaaaggaatctaaaaggaaagagaatatagttaattttttcaagcaaacaatgcttgaacttaaccagcttgactactccatatcaattgatgaaaaccactctgaacacccctcggtacaatcctatacactttatgagtcatcatcttcaaatatgctcattagatttgatgaaaatgacgatattgtcaaaaacccatattatctactcacctcttggtag

SEQ ID NO: 431956 - DNA, 375 bp, Serratia marcescens
atgaaacctacattgtcgcgggagctggcactcggcgcgctgatgatggcggtctggcgacgtaaatctgacggcgaggtcatcgtacactcagaccagggcagccagtacggcagcgacgactggcaacgattctgtcgggccaataatctggcaccgagcatgagccgacgtggcaactgctgggataatgcggtggccgagtcgttcttcagttcgctgaaaaaagaacgaatcagaaaacgtatctataaaacccgggatctggcccgggccgatatcttcgattacattgaagtcttctataaccggtcccggcgccacagtcatctcggcggcgtcagtccggagtccttcgaacaggcctcgtcgtga

SEQ ID NO: 431957 - DNA, 285 bp, Serratia marcescens
atgggcacaccacaatttacacctgaatttaaggaagaagccgtccgtcagataacggagcgcggttattccgttgccgaagtatccgaccgtctgggcgtttctgcacacagcctctacaagtggctacgggctatcaagcctgataacagcgaacagcatgcccgggatttactggaagccaaaagcgagatcctgaagctcagggcacagctgaagcgcactgaggaaaaacgggacattctgaaaaaggccgcgcggtactttgcaagagagcccgactga

SEQ ID NO: 431958 - DNA, 699 bp, Serratia marcescens
atggcagaagcctcagaaaagtatatgtacgctggttatcatctgacccccgcttctttcgcagaaaatgcaatcatagtctgcgaacgtatgaaaatacgacgtgaagatgtaatcaaacttgttcttgaataccatctgaacaatggaggtatcgaaggttcaactgttcttaactccacagcaaaaaaggcaaaaaatactttactgtcaaaagggcatcttaagtcaaatagtgcctacgggatatgggatttctgtactactggtgatgaaatcatttatcaggcaccagttgaaagagaagtgttcaacctcgtttatgcttactattttccagcataccaggaattagctgagctgaagaaagatgaccggtggccgatcaagattggcttaactactaccaacattgctcaacggatatcttctcaaacctcaacagccttcccagaggctcctgtcacagcattcgaaattgagtgcgatgattgctacaagctcgagaaggccattcactctgtactggatcacaaaaataaaagattaacctcagcattaggtaaagaatggtttttgaccaaccccaaagaattgggtgaaatattatcgtttcttggttatgaagtaaaaactccaaattcagacacttcaattccaactgctgccgactgccatgatgagatcgcctcctgctaa

SEQ ID NO: 431959 - DNA, 396 bp, Serratia marcescens
gtgatcgctctaggtttattggcgtgtttcaccatcagtaatcagacgctgcgccatgagagggacaagctgcaagtggttaacagccaacttactgaccagatcgactggcagaatagcacgcagcgcgtagtaactgccatcgatgaacaccgcaccaaggaactaaatgatgcgaaaaatcaggtcactaatctgcagcgtgatgttgccgatggcactcgcaagttgcagctcgccgccttgtgctcaacttccggcaccgccggcatggctgatgcttccagtccccgatttactgacgccgatgagcgggattatttccgtctcagagagagaatcgaaataactaacaagcagatcgccggattgcaggactacatccagcatgtttag

SEQ ID NO: 431960 - DNA, 1305 bp, Serratia marcescens
atgaaaaagctatttacacactcaccaatacatggtgacctctactataagtcaatttatgacttcttcgacggcccaaaactattttctgtaataacaagaagaggtgaactcttacttgtttattggactgatgagtctgattatagttactcatgggtagcatttcagatctcgaaaagtaaactactttctttcgaaaataagaaatttgacatttatagtatattagaacaaaaagatgataagctattcttctcaatagaaactccatttaaaaaagaaggaaaacctacttttaaatctaacctgggtgacattaaagattttattttaatgccagataaaaatatacacatcagttttgtcgaaaacataattactgaagatgagatattggagttagttgatgtaaactcactcacagctgactattctatccatattgacaaacctaaaaaaagcaaatcacttatagatttcagtatgatttcacctgtttttgaaatcttagatgaactatataaagagtttatatctgtcattaagttccatgacaagctcattccagtttgtggaaagccgggttcatttattttagactttaactctaaaggctttaatttgttagagaatgaactcgcgaaactttctgagttaattaaaaatagaaaagacatatctgatttcattaaaaccagtggaatcccatctcagtcacttgaaaaattgcttaaccatgtagtaaatgatgatttgataattgatttatcaaatataaacacggacatcaacttcctaaatataaacaaacttgatgctgagttttatttaaaaagattaaataacatcacctcgagaaatgtaaatagcaaacaagtcccccaggctgatagtattaataaaatttttgaggttgttgataacatatgggaaaatggatttcttttaagagagtcactgcagctttcagatagacacattctctattatacagaagcatctaaaatactcggttttatctctgacaccggaagaataacctcaattggtcaacaattagttctttctcctattagtaaaaaaatgtcaattacagcccagagctttgagaactcccactgcggctggacatggataatgtggagtaatgtaaaaaacattacacagctgaatccccaaacgtcaaaggcatatttagacgaatgcgcccctacattaagtgaatcaactaaattgcgaagggcgcgaacactaaaaacgtggtgtaatatattaaaagattcatatagggaattagtctaa

SEQ ID NO: 431961 - DNA, 825 bp, Serratia marcescens
atgattatttttctatacgcagtaattatctcaatttgtatatggtattttattgtttctttttttggcgcatggctatttgtagggtgggagcgtgatgcgttagggcaatttggtgactcatggggatggttaacgtcaatattctctgcgttcgcatttgctggggtgtttcataataatcaaatgcaaaagaaggttctaaaacaagctcaagtcgagtctaaaaagcagtctgaatttttaagaacacaacagtttgagtctaacttttttcaaatgatggggttgctgcaagaaataattaaagatatagacagagttggtgttaaggtgcgacaaggtagggattgtttcagtttgttctatgacgaaatttttgaaggtaggtttttatcaatttcaaaatttcaagagataaacaaaaagagcgcctttgatcattcgcgattaaaaaatgatttgagggatgtttttgattcagtatatatctcattgcaaagtgatttggcacattatttcaggttcacatataatatattaaagtttattgatgaatctgaaattaataaggatgatcaaaggagatatgtgcggatttttcgtgctcaattatcaaattacgagttgctaatgattttttacaattgctttagcactcatggaaaaaaatttgaagatttagctattaaattctgcctgtttgataatatgccgtctgagttactacaatgctggttccatatattgctaatagatgagggctgcgttaatgaaaatgatctaaaaaaagccaaggagcaattcgcaggacttagtgattaa

SEQ ID NO: 431962 - DNA, 999 bp, Serratia marcescens
atgagggggttattgaagccgatcatcgtacgtgaactcgggcaggtcatcttaaagccaggcaatgacttgatgatgatattcggcgatagggtgatggtgtccacggtaccagctgagtttcgggaaatgccatcaggtgcactgcccgcaactgagcagcagatagctgttgatccacgcttccgtccgttcttccagcatgaacgggttctttctgccgctggtggcattaacagtctggagagctggctggatcgtcgtcatgattgtcagcgcctgtgtgccgaggacgattatcacgacaagaacatggagaccatgcgctatggcgctggtgctattcgtctgtgctggcaccattcgcatatgtaccgtgataagactatggatgagctatcagccatagcagagcaaaatattgctgacttcgtggtgtaccgggccagaattcacttcatgtttgatgagagccaccaactgaccttgcctgaattgtgctggtgggcatgggtgaaagaagtcatcgatctattgcctgaggatgtcgcggcggcatcactgcgcatcaagctgatcacaatcccatcaggtcaccggagagaggccgatatcactcccagcctggcaccgagtcagattatcgccgatatagccaagaaggctgcaaaggtgttggtaatagatccggaaccgccaaagtcattcctgaagttgccaaagcgcgagcgatggacgagcgaaaagtttactcgttgggttaagtctcagccgtgtgcatgctgtggcaatccatcggatggaccccatcacatcatcggtcatggacagggcggtatgggcaccaaggctcacgatttttttaccatccccctatgccgaaaacatcatgatgaattgcatcgtgacacgtcacggtgggaagaagagtacggcactcagatcgaggtatggttcaaattcatcgattggtcgctaagccttggtgttatcaggtaa

SEQ ID NO: 431963 - DNA, 915 bp, Serratia marcescens
atgctggataaaaacacaggtatcggttgttttgatagagcagttaatcgcctccccagtcactatgcgggggacggggtggggaggctggctaaaaccaatgtgtggagtaatacaatgaatcaattgatcgcgattgatggcgtagctgtacgtcaggatatcaatggccgctattgcctgaatgatttgcaccgtgcagcaggaagcgaagggcgtcaacgtccgagcgtctggctgcagaacaatcaaacccaagagcttgcgcaagaaataagcaaagcaggaatcccggctttggaagtcatcaaaggggggatcagccctggcgtttatgtttgcaaggagctggtttactcatatgccatgtggattagtcctgcatttagcctaaaggttatccgcacctttgacgctgcagctgttggccagcatttttcacagacggcagatcgcattcaggcgggtattctgctacttgagtcagcatctcgaatgctgaacctttcaaattcgtcaaaattgggcgcctatcagaagctgcagaactttgccggtattcctaacctgatgccaacctatgccattgacgctccatctgattcggtagacggctcaagccgccctacgatgtcacttagtgccattcttaaggaacactcaatccctgtcagcccccaagaggcttatcgccggctggaagaaattgggattgttgagcaccgatcacgtcgaagcacatcgagagtcgctaagggaggcgttaagcagttctgggccgtgaccacaaagggccttgcttacggtaaaaacatcaccaatccaggcaacccgcgcgaaactcagcctcatttttacgattcccggacatctgaacttatgaagctgatgatgacggctaaggctagggcatga

SEQ ID NO: 431964 - DNA, 1047 bp, Serratia marcescens
atgcagttactggatcgcccaatagcgtttcagccttcttttgttgggctgggtgctggcgttaccggtgctgtactgctttcgcagttggtgtattggcaaaaccgaatggatggctggttctacaaaacccaggctgagctgacgaccgaaactggtctgtcacgctatgagcaggaaggcgccaggaaaaagttggtcaccgccggcgtgttggaagaagaccgcagaggggtacccgcaaaactctattttcgcgttaacaaaaaccgcctggaagccctgctgattcagtatgcggaaaaccagcaatccagtatgcggaaatcccgcattcaagaatgcgacaaaccagcagacaagaatgcggaaattccgcggacaagtctgcagaaaaaccccgagccagatcggggaaatcccgcattcattcatacaggagattacacagagaatacttcagagattactacagagaaaaaacctgtacgtcagctggctccaccagcagacccacaagccgactctctgaaaatcgattacaaggccatgcttgaggctttccatagcacgctccctgaactgccagtcgttcttaaaatcactgacgaccgccgcaagaagctccgcaaactctgggctgactacgagcttaatctcgagaagtggggggcttacctgcggttcatctcgaaaaaatgccgttggatgctggaagaccgtgcagataccaacaccggcaagacctggcgcaagaaggacttcgactacctgatcaccgagaaatgctacctcaaggtcaaggaggagcgggccaatgacctgccaaaggttcagaagcttgatagcgctgctcgggaggacgcttacacccgcttggtatcccaacgccgaaaaccccaaaacgaggttgaggctttggcgaaggaaatggccggatctcttgggcgtatgaccgattacgatgcacgcagggcgtgggccggtatctgggcacaggcagtaaccaaggcaagcgagaacgacctggagaggttggcatcatga

SEQ ID NO: 431965 - DNA, 183 bp, Serratia marcescens
atggataacgaagtgatcatcccgttcgaaatgcgctgtcgtgacagtcacggtgtgattgttcatgtgactggagttgatcgggtaaaccaccgggtcatattccaccgcccgggttacccctatgagtgcgtatgtccacgccgggactttggcacaaaattcaaaaaggtagagcaatga

SEQ ID NO: 431966 - DNA, 198 bp, Serratia marcescens
atgtttaaacaggatttggtggagcactttgggacagccacagcgtctgcgaaagcccttggcgtttcaaaatctaccgtcagtcaatggaaggaaacagttccttggcaatacgccttgctggctgagaagttgactaatggtgccattaagtacaaccaagcagcgtatgacaatactactgtaccggcggcctaa

SEQ ID NO: 431967 - DNA, 582 bp, Serratia marcescens
atggatgcaacaggggcatcaaagggtactgttagccaatgggttaacggtggcactgcgccatcagcaaaattcataagtaagcttgcagaagtccttggtgtatctgagcgatggttgactgaggggggactgattgaagaaagcaaagggaatgcttatccgggcccagacctcagacgcagggtcccattgttgtcatccgttcaagctggaagctggaaggagattgttgaaggcaacctgcaagacgtgaatgaatggattgaaacaacggcaaaagtatcaccctattccttttcattaagggtatctggtgactctatggatggtccgccaggtcaaggtgtttctattcctaatggctccatcgtaatagttgatcccgaggttgaggcccttaatggccgcattgttgttgctcgtgtcaatggttcgaatgaggctactgtgaaaaaattggctattgatggccccaatatatatctgatgccacttaaccctaactttaagccaattccattcgatgagaattgtgtgatcataggtgtatgtgtacgggtggaaatgaacctcctttaa

SEQ ID NO: 431968 - DNA, 756 bp, Serratia marcescens
atgatatggatgtcactggtgaaaattaaaaagcctctagctttaactgttatagcatttgttacgacgacctttgttgtcataggtaactggttttcttttgttaattcgtcatttgatttatattcaaacgttaaagatacatataaacaaaagaaagccgaagataacttaaatgtattatatacaggggtctctattagatatgtcgaatcaatatttgggccaccaatgatagaacaccatgatgaaagtcgtggtatgcatgagtatatctattcattccaaaaattctatcttcaatttgtttatactagtaacaataaagttattttatacactgtgacggtaaaggataaaaatttccatccaagaataccctatctaggaaaagagcttggggatacatttgacaattacgatgatagtgcggaatttttattttcaggttactcctcgaaattctatgaatatcacgaggccatttatttaggaaacccaggtaattataggaatttatatttggcgtataatccagcaggtggtgagtattctgagctaaaaccattacccgatattgctaatgacccaaaaaaacctccattagaaaatgatttagttatattcaggaaaattaatcgaccaaacacgttcgctattggagatcatcttggtgaccaagatgggatagagacattctacgggattggtataaacttttatgatgcacgcgatatcccaacattagattattaa

SEQ ID NO: 431969 - DNA, 633 bp, Serratia marcescens
atgatcaatactattacgatcgataccgaaacaatggataccaagccaagtgctgtaattctatccattggggcatttgcattcgatatttctgacgttcgtcagacacaacaaagcattatccagatagcccgtgatacagagctggctgattactcaaatacggccttctactgcctggtagatactttcggtcagttaatgcagggccgcaatgtaagcgtcaagacccaagcttggtggcgtgaacaatctgaagatgcacatgaagctcttgcgggagaccgagagccaattggccaaagcctcgccctgctctctcattggataaaagcccatccagatgcccggatattcttccgtggcactgacttcgatggttctatcctagagcatgcctatagaactaacgggatcgaatgcccttggcattggggtggcaaacgtgacgtacgcacttatatcgacgcaatgacaaagggaaaccgtggctatctacctaaaacccaccagccctgctttgcggttgttaagcataactcgctccatgatgcgatgaacgatgccgagcagatggccattgcctatcaacaaaatagcttccagatggatgccgaattgaggaagtcctag

SEQ ID NO: 431970 - DNA, 645 bp, Serratia marcescens
atgccttgcgcaacgccggatggcctgacgataaacccgtctggacaggttcttgcccatgccagcctttcagcgcggcaggcaaaggtgatgggtttgatgacgagcggcacctatggccacatttccattggctcatcagcgagtgccgccctgagcacgtcattggcgagcaagttgcaagcggcaacgcaaatgcttggttcgaccttgtacaagctgacctggaagcaatggactacgccttcgggattgtcccgttcccgtctgcgggcgtcggttctccgcacatccgtgaccgcgcatactgggtggccaacacccaccacgagggactggaaggacggaaaagaatgcctgaatgttccactgaactcattgctgggacgagtggcgtggttgacagcatggacagcgccgaaggcattagatggggaaaaggcagcaaggcctgcctacggagcgcgaacccaggccagactaatggtttctggcgagatgctgactggctcttctgcagggatgaaaagtggcggccagttagacccggctcattcccgttggctaatggggttaccgcaagagtgggacgactgcgcgcctacggcaatgctatcaatgcggaagctgcgcaaactttcataa

SEQ ID NO: 431971 - DNA, 1140 bp, Serratia marcescens
atggcagccagaccacgtaagaacaatgttgatattcctaacctgtatcccctatttagccgcaaggccaataaggtctactggcgataccggcatccggttacagggaagtaccatgctcttggtgacaatgagcaagaagctcgtgagattgcgatcgaagccaatggccgactagcggagcaacgtagccggcagatcctggcacttagcgatcgagtggcacaaattaagggtaaagatataactgtcagtacctggctcgaccggtattggaaaatacaggaagaacgactgagcacaggtgatatcaagcccaacacgtttaaacaaaaacgtaagcctgtggaccttctacgtcaaaagttcgctatgaaatgcttgcccgaagttgatgccagagatatcgcttcgttgttagatgagtacacagacgccggacagccacgtatgggccaggttgttcgctctgtgctgatcgatgtattcaaagaggctcagcatgttggtgaggtcccgcctggctacaatcctgcgcttgccacgaagcaaccacgcaggaagattaccaggcaacgcttgagcttagaggagtggcagaagattttcagtattgctgataaacagcatcggtacatgggcaatgcgatgctattggccgtcgttacaggacaacgcttgggtgatatttcatcaatgaaattcagcgatatctgggatgaccacttacatgttgtgcaggagaaaaccggggcaaagttggcattacctctttctcttcgttgcgatgcattgaacacaagcttacgtgaggttatctcgcgttgccgagattatgctgtcagtcagtatcttgttcattacttccgctcgacatcaatggcccaacgtggtgccaaagtaccaggtaatacgctgacaactaactttagcaaagctagggataaaacagatattgattggggtggaggtacacctgcaacgtttcatgaacaacgttcgctcgcagaacgtatctatagcgcgcaaggaattaacactcaactcttattaggacataagtctaaaatacaaactgacaagtatcatgatgatagagggaaggagtggataatggtcgatggaactcgaccattataa

SEQ ID NO: 431972 - DNA, 654 bp, Serratia marcescens
atgagtatgatgtcattaattatattgacattaattattattttactcatttgggtcgttaaagaacgtcgtgttgtatggtctgatcattccaatttcaataatgtctctgttggcttgtgtgcgattctgaccttagcatggggggcatacacctttgatgcccttaatcagcgtgacaaagccgctgtagaattgaaagaactgcaagataaaattaaaggtacggagtcaacgttctttgctatcgatgttaaaactgaacgttgggataatgggtattaccttttgcctgttgttaccgtaaaaaatagcggtacgaatccaattcatatacgaatgggaaaggattcgttaactgtaaaaaaagtattagttaaagatgacaaggttaaagctgttagcagctatcatccaaagttttacgaggttatttcgaatgatgatgctgtaaaacatacgcctttatatgacctgattattccaatatccgccgagcgaaaaataaattatgctttaaatgttaatgagcctggattgtattatttgacatttcaagcaagtactataaatgaaaaagggacagaagaaaccaaggaaatcaatggaatgccagttatatggtttgcttctaaatactttttcgtccagtaa

SEQ ID NO: 431973 - DNA, 1092 bp, Serratia marcescens
atggataataatttcaaagttgacacagtaaatacagactcaaaatgctgggttgttcgttctggtgtaagatatcgatatgtcagtaagttttatgaagatggatttatcgccactggacacttggacgatttcgctatagacgaggaggttctctctaaagaaattaattatgaaaatattgacgaatcaattgatggttttaatttaatcaattcaagaaatgttaagactcaaatagaaaactttattattgatatgcagataggcgatgtagtgttcactcttgacgcgaattatgtaattccaggtgtgataaaatctggagtttattatagtttggacgatatatctgaccaagatcagtttcgtgtaaggcgcgcagttgcatggggcgaccctattgctagaagaacaattccattaactattcaaagatcttttaacgcttatcaaacaatattttctttaggtgataattcgaaagagattttccattggttaatgtctttctttattagtggtgatgattattacagcagtctaagggttgatcagcctggggaattaaaacatcatactctaaagcaattatcagaattaattgatcggattcaagttttatcaatattgattgcagagaagtacgcagagaataacaatttacaagaagaaggatatcgtgtctcatatcctgaactgcaagatgcaatgtggagatattcagaagaaggattacttgatttaacatcgcagcagatattaatgtcacctggtgatgtgtggttaaaattctcaaatggttcaaaagttgcgggggcaatattcttatatttaattctaacgacttccagtcctggaaagactattcagtttactgaagaagtttatgggcaggagcttggaaaagttatggctatcgtagacgataatcgtgatgtgctcaatcataatttaaatattgaaaatatcaaaagacagcttatactgaatgctgcaaagcaaaataatcaattggttgagaatgatccaaccaaaaatactggggatggttttccagaagatggtgaaccaaggcacgtaggaggctaa

SEQ ID NO: 431974 - DNA, 2175 bp, Serratia marcescens
atgattgataaaaaccgaacgagttccttggcaagtaaggaaaatgacgagatcgattttggacggctgttagggacgctaatcgatcacaaatggttaattgttagtattacatcattattttccgtcatcggcattatatatagtctttttgcgacacctatataccaggctgatgcaactgttcaggtcgagcaaaacgaaggtaacatgctggtaagtaatctgtcccaaatgttgcctaactctttgccagcatcatctacagagattgaactgatttcctctcgcatgatcgtgggaaaaactgtcgaagatctccatttagatactgttgtcactcagaaatattttccgatttttggccgcggttgggcaaggctcatgggtaataaaccggggcaggttgccttatccaggctcactgtagctgagcctctagtcgagagtgctatcgagctggaagttattgatgatcaaaactacatcgttaccgtagataaagataaaatctttcaaggcaaagttggtcgcttggagaatgcaaacggcgtctctatgttggttagcgaaatctcagcgaagccaggaacggtgtttaatgtcaaaaagctcacaacgctggcagcaacggtacaacttcttgacgatcttacagtagaagacaaaggtaaggacacgggggttctttcactaaccctgatgggggatgatcctgtcctaatcaaaagaattattgaaagtatcagcaataattacttgattcaaaatgttgagcgtaaatcagaagaagcggccaaaagcctggcttttttaaaggaacaattaccgcaggttcgcgactctttaaatacggctgaagacaaattaaacagtttccgccaagcgaacgattctgttgatctgtctttggaagcaaagtctgttcttgatactattgtcggggttgaagctcagcttaatgagttgactttcaaagagtctgaaatttcgaaattatacacaaaagagcaccctgcttatcgtgctttattggaaaaaagagcaactctgcaaaaggaaaaagataagttaaaccagcgagttagtaagatgccgcaaacacagcaggagatcttgcgcttaactcgtgatgttgatgctggtaaagaaatttacatgcagttgctcaaccgtcaacaagagctttcgataacgaaagcgagcaccgtgggtaatgtcagaatcattgataccgctgttactcaaccgaaaccggttaagccgaagaagacgttaatcgttatcatctttacgctgcttggtgggatcgcttccgttgccgtagtactgctgaaaagcgttctgcatcgaggtattgaaagcccagaacagctggaagaccaaggcattaacgtttatgcaagtattccgttgtctgagtggcaacagaaaaaagatatagagacgttaatgcgcggcaataaaaaaaccaacacgcgttcaaaaacgttgttggccgttgggaaccctgcggatttggcgatcgaggcagtacgaagcttaagaaccagtttacatttcgctatgctcgaagctaaaaataatgttctgatggtttgtggtgcaagcccaaatattggtaaaaccttcgtcagtatcaacttggccgctgtcattgctcaggctgggcaacgtgttttagtcattgatgctgatatgcgtaagggctattcacactcattgttgaataccgattggcataatggcttatctgatatcttatctgctcagaccacgatggctaacagtgtccgtaaaacagaaattgaaaatctggattttattccgcgtggacagataccgccaaatccttcagagttgctcatggggtcgcgtttcaatgagctgattgactgggcgagtaagaattatgatatcgtgatgatcgatacgccacctattctagcagttactgatgccgctattataggacacagggcgggcactagtctgatgatcgcacgcttcgcatccaacacggtcaaagaaatagaggtgagtattcgccgctttaatcaaaatggcatagatgttaaaggtgttattctgaatgctgttgagaaacgggctagcagctactatggtgattatggctactatcaatatgagtatcgctcaaacgataaagcgtag

SEQ ID NO: 431975 - DNA, 648 bp, Serratia marcescens
atgatcacccgccgtcgtccacagattacctcgcgcaagcaaccccaacaggcgcgttcgaccgagctggtggcagccattctggaagccgccacacaggttttggccgaggaaggcgttactcggttcaccacagcacgcgttgctgagaaagccggcgttagcgtcgggtcgatctatcagtatttccccaacaaggagtcgatcctgttccgtctccaggtcgatgaatggatgcagacgacccggatgctgcaaaacatcctcgaagattccggtacaccgcccttggagcgactgcgaacccttgtgcatgccttccttcgcaccgagtgcgaagaagcagagattcgcggcgcgctcaatgacgtggctccgctctatcgcgacaaccccgaggcgcgccaggccagggccgaaggcgaccggatgatcgacgccttcatgatggaggtcttgccagaagcgtctaccgcatcccgcgaattggccggcgatctcatcttcactacgctcagtaccttgggcaacagcttttcccaaacccggcgatccaaggctgaaatcaaagcctatgctgatgcaatgaccgggatgttcagcgcctaccttcagacacttcagcaggatggccggtcgcgatcttga

SEQ ID NO: 431976 - DNA, 660 bp, Serratia marcescens
atgacctcaacactgaccaatctaccgctggcaccattgctagatcgcctgttcaaacaggccgaccgggccaccagtccggcaatggcgggcatctcgcgcgaagatcgtgagcgcctgatgagcagcaaaaccgagtacctcgacttctacagtcgcgccaaggacttgtggctgccggtgtcgcgcgagaccggcgtgctgctgtaccaactggcacgcagcacgggcgcgcgcagcattgtcgagttcggcacctcgttcggactctcgaccctgtatctggcggctgcgctgcgcgacaacggtggcggccacctgatcggcagcgagttcgagccttcgaaggttgccaaggctcgccagcatcttgttgaaggcggcgtggatgacttggtcgaaatccgtgaaggcgacgccctgaaaacgctggccacgaacctccccgactccatcgacctgctactgctcgatggcgccaagtcgatctactgcgaagtcctcgacttagtcgaacaccgcctgcgccccggcgcactaatcgtcgccgacaatgccgactacagccctgactacctcgcgcgcgtacgctctccgaacaagggctatctgtccgtaccgtttggcgaagacgtggaactgtcgatccggctggcctga

SEQ ID NO: 431977 - DNA, 867 bp, Serratia marcescens
atgcacgtatttgttactggcgccacaggctgggtcggctctgccgtggtcgaagatctgatcgctgccggccactcggtcactggcctggtccgttccaccgataaggcgacccaactcgctggaacgggcgcgaaagtcattcaggccacgctcgatgatctgaatactttgcgttctgtcgcatcgacggcggacgccgtgatccacaccgcgttcaaccatgacttctccaagttcatcgagaatgcggagcaagaccgccgcgtgatcgaggcgcttggccgcgtattggaaggatcgaaccggccgctgctcgtcacttccggcctgtctgggctcccgcgtggcgccaccgaggccgacctgcccaatccggcctcacctcgcaagtcggaggaagccgcgcgggctgcggcgacgcgcggggtgcgcgcagcaacggtgcgccttgcgccgtcggttcatggggtgggcgaccacggttttgtgcccttcctcattcgcctggcgcagcagaaaggcgtatcggcctacctgggtgacggccagaactgctgggcaggtgtgtatcggcgagatgccgcacgcgtctatcgccttgccttggagcaaggcgtcaccgaatcggtttatcacgcgatcgcggacgaagccgtgccgttcaaggcgattgccgaagcgatcggcaaccgcctgggtctgccgatcgagtcgcgcgaccgcgagcacttcggctggttcgccaacatggctggcgccgatatgtcggcgtccagtacccgcacgcgtgaactgctcggctggaaaccccaaggcccgaacctgatcgccgacctggatcagcctggctactacgccggctga

SEQ ID NO: 431978 - DNA, 2343 bp, Serratia marcescens
atgtcacaagaacaatctctttcctcgccgacaccggcgatggcgtcaccgcctggtgccaatgtcttcctgacgctgctgcccatcacgctggcagtcttcatcgggttcctcaccattggaatgcagatgccggtcctaccgctccatctgcatgaaacgctcggcatgggtacgctcgtgatcggcttggtcatcggcctgcaattcgtcgtggcactgctgtcccgaccctgggccggcaacctcgcggacctgcgcggcgccaagcgagcggtggtcatcggctgcttgctcgcagccagttccggcctggtctacctggcatctctggccttcgtcaccacaccgaccacctcggtatggatcgtggtgctgggccgcatcctgctggccctgggtgaaagtctgatcgccacgggggcgctgggctggtcactcgggttggtcggtccgcggaacgcaggcaaggtcatggtctgggtcggcatcgccatctacggtgcctatgcgctgggtgcgcccctcggcgtcgcggtgaacgcccagtggggattcgccggcatcgccgccgccgtggtagccattcccttcgtggccttggccgtggtttcgggcgtacgcgccgtcgccccttcggcaaccaggcgcacgccgttttacaaggtgctcggtgccgtgctatggcccggcatgggcctggcactgtccagcgtcggcttcggactgatcacggccttcatcgcgctgttgttcgccaccaaacagtggggcaacgcttcgctggcgttcaccgcgttcggcctggccttcatcggcgcacgcatcttcttcggccacttgccggataagctgggcggcgcaaatgtggcgctggtgagtgttgccatcgaggcgttcgggcagctgttcatctggcgtgccgactccgcgtcgctcgcctacgcaggcgcggccctgacgggcttcggctactcgctggcctatccaggattcggtgtggaagccgtgcggcgcgctccgccgcagactcgcggcttggtgatgggcgcctacgtggcattcatggacatcgcgctgggcctgaccagccccttggccggcgcgctggctggcgctcaggggattagctcggtctatctggccggcgccatcaccgtcgcgctggcgctggtcattgccttgcgcctgctttccgacgattcggcagcgaccgtgcaggctgacaacgcaagcgcaggcagtcccgccgccaggaatgccggagcaatcgccatcagtctgctgggtctactcgtcatcttcggcgggttatacgcatggcgcgcagctcgggccggcggcgctgcgcctcccgcgcgagcaccggcactggtatcgaccgtgctcgtgcagccgcgcaccgtcgccggggtactgcaagcggtcggcagcctgcaagccgtgcgcgaagtcgtactggccccggacacggccggtcgggtgacggccctcagctttaccgccggccagatcgttaaggaaggcgccacgctggttcagctctacgatgccccggaacaggccgatcgcagtgccgctgaggcgagggccaatttcgcgcagttgcagttgcggcgctcgcaggcgctggcatccagcggtgccgagccacgcgaactgctggagcagcgcaagacagaagccgaccaggccgccgccgccgtccggcaactggatgcacgcatccagcagaagaacatccgggcgccgttctccggccaactcggtatccggcgcatcaaccttgggcagtacctcaacgcaggcgaagctatcgccacgctgacgcagctcgacctgatgtacgtcaatttcaccctgccgcagcaggaactttccaggttggcgctcggcgcgcgggtgcaggtcactgtggatgccgttccgggcaagatcttcgacgccaaggtcagcaccattgagccgcgcatcgacggggaaacccgcaacgtcgccgtccaggccatcctgtcgaacaccgacaacctgctgaagtctggcatgtacgcggtggccaagctggaacttccggcgacggagcatgccatcgctctgccgcttacggcgatccagacatccgcttcgggtgacagcgtggtgctcgttcaggaggccgacgcgcaagggatcggcaaagccgtggccgttcccgtcatcactggccgcaggctgggcgacgacgtgctggtgacgcagggcgtgaagtccggcgacatcgtggtggtcgccggtcagaaccggctgctgccgggcggcaaagtaaagatcaatgccgcatcgtctgaggggactccgcgatga

SEQ ID NO: 431979 - DNA, 3090 bp, Serratia marcescens
atgaacttcaccgaccttttcatccggcggcccattatggccctggtcgtgagcctgctgatcctgctggcaggcctggcttcggtcttatccctgccggtgcgccagtatccgtacctcgaaaacgccaccatcaatatcacgacctcgctgccgggggcgactcaggaggtgatgcagggctttgtcacgacgcccatctcacagtccatcgccacggccagcggcatcgaatacctgagttcgacgacaacccccggccgcagcgaaatcaaggcccggctggtgctcaatgccaatgccgaccgggccatgaccgagatcctggccaaggtgcagcaggtcaagtaccagcttccagcgggcgtcgccgatccggttatcagcaagtccaccgaaggcggtaccgccgtccagtatgtcgcgttctacagcgacaccctgaccatcccacaggtcacggacttcgtgaaccgcgtggcgctgccgctgttcgctgggataccgggtgtggggcaagtcgataccaacggcgggcagacgctggcgctgcgcatctggatcgaccccgtgaagctggccgcgcgcggcctgtcggcgagtgagatcgcggcggccctgcgcgccaacagcgtgcagtcggcgccgggccagctcaagagttcgctgaccgtcaccaacatcagcgcagccaccgacctgcgcagcgtagaggacttccgccaaatggtgatcaagtccagcgccggcggcggcgtggtacgactggccgacgtggcgacggtcgagatcggcggccagaactacaacaatgcgtccttcgccagcggcatcccggcggtgttcgcggcgctcttcccgacaccggacggcaacccgctggacattgctcggcaggcacaggaactgttgccccgcatccgggcgactgcgccgccagggttgcaggtcgtgccaaactatgacgtggcgaagtttgtcaatgcgtcgattgcggaggttcaacacacgttgatcgaagccatcgcgatcgtcatcgccgtgatcttcctgttcctgggaaccttccgcgcagtcatcatccccgtcgtcaccattccgctgtcgctggtcggaacggcggcgctgatgctggcgttcggcttctcgatcaacctgctgacgctgctggcgatggtgctggcgatcgggctggtcgtggatgacgccatcgtggtggtggaaaacatacaccggcatatcgaggaaggcgcatcgcctgtgcgggcggccctgctcggcgcccgcgagatcgtcggccctgtgatcgccatgaccatcacgctggcggcggtctatgcgccgatcggcctgatgggcggattgaccggggcgctattcaaggagttcgccttcacgctggccggttcggtcatcgtctccggcgtggtcgcgctcacgctgtcgccggtgatgagttcgatgctgctcagttccaagcagagcgaggcgaaactcgccaggcaggtcgaacactatatagaaggactgacctcattctaccggcgcctgctggcccgcacgctggccgcgcgcagcgcggtgctgctggtcggggtcgccgtgctgggcgccatcgtggtgctgtttatgggcatccgccacgagctggccccggtcgaggatcagggtgcggtcatcgtcatcgccaaggcaccgcaatatgcgggcgtcaattacaccgctcgctatgcccagaaaatcgagaagatttttgaatcgctgccggagtttgacaacagcttcatgcacatcggcggttccgggcgcggccagaaccagatgctggccggtgcgatcttcaaggattggtcgcagcgttcccgctcctcaatccagatacaggggcagctccaggcggccggcgccagcatcgacggcgagacgctgacagcggttcaggtgccgccgctgcccggttccagtggcggcctgccggtgcagatggtgttgcgttcgcccgacgacttctcgacgctgttcgagacggccgagcagatcaaggacgcggcctacaagagcgggctctttctgtacgtgcagaacgatctggcattcgacagcccgcaggcccatgtcgccatcgacagcagcaaggcgcgcgagatgggcgtgaccatgcagcccatcgccgacacgctggccgtgctggtcggtgagaactacgtcaatcgcttcaacttccacgaccgctcctacgacgtcatcccgcaggttcgggacagcgatcgtatgaccccagacgatctgggccgcttctacgtcaaggccagttccggtgcgctggtgccgctgtccacggtggtccatgtggaaacgcggccccaggtcaacgctctgacccagttcggccagatgaactctgccacgatcgagctgctgccgcgcccaggcgtcagcatgggcgaagcggtggcactcctgcaatcgcagcccttgccggccggcaccagcgtcgattggctcagcgacagtcgccagttcgtgcaggagggcaaccgcctgctggtttccttcggtttcgcgctcgtcgtcatctttctggtgctggcggcgcaatttgagagcctgcgcgacccgctggtgattttggtgacggtgccgctggcggtgtgcggcgcactagtgccgctctggctgggctacgccacgctgaacatctacacgcagattgggcttgtcacgctgatcggcctgatctccaagcacggtattctgatggtcacgttcgccaactacatccagcagcacgagaacctgagccggctcgaagccatcgagaaggcggctgcggtacgtatgcgcccggtgctgatgacgacggcggcgatggtcgcgggcctggtgccgctggtgttcgcggaaggcgccggctcggccagccgattctcgattggcatcgtggtcgtgatgggcatgttgatcggcacgctcttcacgctgttcgtgctgccaaccatctacagctttatcgccaaggaccacaggactgcggagcagaacctgcgcgcccgtgaactcgcatcggcggaggtatcccatgcgtcttga

SEQ ID NO: 431980 - DNA, 1425 bp, Serratia marcescens
atgcgtcttgaacgaaagaaggcgctgccgcgcgccctgattctggccgtcgcccttaccatgacgggctgcgccagcgggccggactaccacgccccggccttgcctgaaaccacatcgggttcgttcatcagtcaatcgccgcaggtggacgccggttcgccgccgcctgcggactggtggaagctgtatgacgttcctgcgttgagcgccatcgtgcaggaagcgctggccgccaataccgatctgcgtgtggcactggccaatctggatcgggcgcgcgcgatctaccgggagacacgcggggaacgcttgccatcgaccaatgtgactgcgggcgcccgtcacggtcgcgaccagaccgctggcggggccggccaggcgccggtgcagtggaactacaccggcggactggatatttcctacgaactagacctttttggacgagtgcggcgcgacatcgaagcggcgcgcggcgataccgaggcggccgctgcggcccatgatgcggcccagatgctcgtggccgcggagacgacgcgctcgtatgtggatgcctgcgcctacgcagagtccgttgacgtggcacgttcgtccgtcgagctggcacagagaacgctggatctcgtgacccgccaggagcacgccggctccgcctcgcgccttgatgtggaacgatccggtacggcactggcccaggccgaggcagctgttccccggctgcaggcccagcagaacgcggcgctgttcgagctggcggcattgatggggcgtccccctacgcaagtccccgagccggcacgcgcctgtatcaaggcgccggaagttgcaggcgccattccgattggcgatggcgcgaccatgctgcgccggcgccccgacatccgccaggccgaacgccagttggccgccgacacggcgcgcatcggagttgcggtcgccgatctttatcccagggtcacgatcggcgcctcggcaagctacctgcgcaatgacgacctgcgcggcgaccgtacctggtcgttcggtttcgggccgctgatttcatggacgttcccgaacatgacggcggcacgaagccggattgcgcaagccaaagctcaaggcgcggcctcactggcgcgcttcgatggcgcggttctcatggcattgaaggagtccgaacagtccttgagcacgtatgtgggagccatgcagcagcgcgacgccctggttcaagcgcagaaccatgccgagagtgcattccgcctcgctgaacaacgctaccgggctggatccatcagctacctggatgtgatcgtggcccaaaacagcctgatcagcgcgaggtcgcaggttgcgaccgcggaccaacaggccggctcggctcgcgtcgatgttttcaaggcgctgggcggcggatggcaagagcgttcgcaggactga

SEQ ID NO: 431981 - DNA, 1413 bp, Serratia marcescens
atgaactaccatcttgttggcaacgccattgttgagtacagcggcggtttaaataacttacgccatgtcactaactgtatgacccgggttcgcatgacgcttgccgatcctgataaggtgaatattgaggcgcttaaaagcatcgagggtgtgctgggcgtcgtggaagacgatactttgcaagtgattgtcggccctggaaaatcgtcgaaagtggcgacagcgatcaatgaacgacttgcttcctgctcgcaaacagcaacgctgagcggcgttgagcaaaaagcggcattagcgagagagagagctcgcaaacctacgcgcaccaaagccgtgttgaaacacatagccaacattttcgttcccatcctgccgccgctgatcgccgctgggattttgatggggttgaacaacgtgttggtcaactccgccgccgcctatgcgctaacgcatgccattgcggccagtggcgaactttctccagcccagatcgtactggaacaacgccatctgctggggttgagccaattcctcgatatcatttcaaaagccttgttcagcttcctggccatctataccggcgtaaccacggcgaaagaattcaacggcaacgccatcatgggaggcctactgggcgccatcaccatcgctccccagttgcctctgctggggctgctccccggccagggaggattgatcggcgttattttctgcgtctggctgatgtgcgtgctggaaaagcaagtacgacgtgtcgttcctgatattctggacgtggtattgacgccgaccatcgtgctgacggtgatggccggcgcactgctgttcgccatcatgcccgtcgccggcattctgtctaacggcatcctgcacagcttgaacggcctgttggccacaggtgggctggccgccggtttcgtgctggcttcgctgttcccgttcctgatctcgctcggcctgcaccatggcttattcccaatccatctggagatgatcaatgcgaccggtcatgcccccctgttcgctatccagatcatgtccaacgcgggtatggtcggcgccgccacggcggtgctgctgttgacccgcgatccgatgatgaaaaaaatcgccaaaggcgcgatccccacctcgatcctcgctgtaggggagcccaccatcttcggcgtaaatattccggtgggattcgcttttatcactggctctgtcggcgccggtttcggtggcatgatggtcgtgctgctcggcgtttccaccaatggggtcggcgcggcaggcctgtcagccctgccgctgatcgcagacggcaaatatctgcagtatatcttcgcctggctcaccggctgcctggcagccttcgtgctgacctatatcacaggcaaactgcgcaaatacgatcgggaaatcgtctga

SEQ ID NO: 431982 - DNA, 1746 bp, Serratia marcescens
atgaaagccatcatgttaatgtttgactcactgaacaagcatatgctgtccgcctacggtagcgaccgggccatcacgcccaacttccaacggctgaaagaaagaacgatacgcttcgacaatttctacgtcggcagcatgccctgcatgcccgccaggcgcgaactccataccggccgctacaatttcctgcaccgctcctggtcgccgctggaacccttcgatgactccatgccggaaattctgaaaaagcacggtatccatacgcatctggtcaccgaccacaagcattactggcgcgacggcggcgccacgtatcactcccgctacaacacctacgagttcgttcgcggacaagagggtgactcctggaaaggtgtggtcgacaagccgatttatcattatgagtccggcgagccggaagagctcaagcaacgtcgtatcgccagccgcacacagcaccaaatcaacgtgcagtttatgaaggacgagcgggagcatccgctggccagaaccatccataaaggcctggagttcatcgacgagaatcacgcggccgataactggttcctgcaactggaatgcttcgaccctcacgagccgttcttcgtgccggaaaagtatctgcaaatgtacggcattaacgacacctccgttttcgacggctggccgccctattatttcgtcaccgaaagcgaagaacgcaaggacaccattcagaagtactacctggctttgctgaccatggtggatgactatgtcggccggattttggaccacatggacaagtacgatctatggcgggataccctgttaatcgtcaataccgaccatggcttcctgctgggagagcatgaatggtggggaaaaaatatcatgccactgtataacgaagtggcgaatatccccttcttcatctggcatcccgagcacccccatcgaggtgaatcgcggcaagcgctggcgcaaaccattgacatccccgccacgctgctcgatttcttcaagctggacaaaccggcggatatgcagggcgtctctctggtgccggcgatttgcgacgataccccaatacgcgactatgcgttgttcggctaccacggttgccatatcaacattacagacggccgctatgtctatatgcgttcaccgcaggtacacggggccgagagtctgttcgagtacaccctgatgcccaccagcatcaaccgacggctatcgcccgaagaactccggcacatgacgctacacccgggatttcgtttcaccaagggttgccaggtattacgcatccccgcctcttcagtgatggctcgaggcgccgatcgcttcgggcaccggctgtatgacctgacggagaatcctaagcaggatcgccagtgccgggacactgtcgtcgccgaacgtctgttgtccgccattcgatgccagctggaacaaagcgacgcgccgcccgaactctgggcacgctaccaattgtcagcccccgcatctccactgttgggggccgatccggactgggtgccggcattcaaagagtatgaaccgaagatgcgctacggtatgttggccctgacacagcatctggaaggcactcaccaaacggcgataattgataaactgaatgcttccgccaaaccatcatggaccaccgccgatctgtgggccttcgtgcaacaagaagtccctcaggaacaacacgcaagcgtgttttataaactggcactggaaatgcggcttgattga

SEQ ID NO: 431983 - DNA, 717 bp, Serratia marcescens
atggaacaagaactagactactcacgcggcgccaagccgctgtatgctcagctgtatgacatcttgctggagaagctgaaaaccggtgaataccggaagaacgacgttctgccgacagaagcagagtttgaagaaatgtttggcgtcagtcgcattaccgcacggcgagcactggccgaattggtctccaaagggttggtcaaacgccaagcgggcatcggtaccatggtcatcagcacatcggaaaaacagaacgtcaaaacccgcatcagtctaatcgatggtcagcaaacagagacgatagcgcgcaacaacctgtccctggctcaggtgcaacctcccgcgcctatcgcacaactgtttggcgctgatagcgcgatcctgctgacgcgcaccatttaccgacaaaatgaggtgccagcgcaggtcaactacatctatctgacccctcgtctaaacacgctgacgttgtcagatctggagatagggctgtactgcgcgttggaacagcgtaacgaaaacatcgatgccttcgaggacatcatcacagccgagttaccgacgcctgaagactgcgaaatcctcgacattgccccctccgtaccgctgctggtcaaaacccgtaaagggtacaacgagcagggcaaactggtggaatacaccatcgccaaacatatcgcacgttattatcaatacatcgtcgagaacagcaaatga

SEQ ID NO: 431984 - DNA, 333 bp, Serratia marcescens
atgagctggtgggcgcagggaaagtcaccggattaccggtttacattagccaatgaacgcacgtttttggcctggatccgcacggctctaacctttatggccgccgcagtcgggctggatcaactgacggactcaacatcactgagggtattgattatagcgctggctttcacggcggcgctactggcctgctacgcctaccatcgatgggcaagcaacgaaaaagcgatgcggcatgaacaaacgttaggctacccgcgtctgctcatttggctaagtacaggcctggcggcagggatattgctcacgctggctacgttggttcggccatga

SEQ ID NO: 431985 - DNA, 1293 bp, Serratia marcescens
atgacggccaccaacggttgcctggtcatggcgaaacccaccggctcggtttgcaacatcgactgcacctactgtttttatcttgaaaaagaatcactttatcccgaacgtcagcagaactggcgtatgtcggataacacgctggaaacgtatattcagcagcatatccatgcccaggatgacgagcaggtgcttttctcctggcaaggcggcgaacccactatgatggggctgccttttttccggcgcatcgtcgaactgtgtcaaaaatacgccggtggaaaacgtattcagcatgctttgcaaaccaacggactgttgctgaacgaagagtgggcgtgctttttcgccaagcaccacttcctgatcggcatttcgatcgatggcccgcaagcgctgcacgactgttaccgcacctcgcgctcaggcaaaggcacccatgcccaagtgcaggccgccctgactctgctgcaggagtacggcgtcgaattcaacacgcttaccgtcgtcggcaagcataacgttggtcaggcgcgcgaggtttacgagtttcttctggccgcaggctctcgccatattcagtttattccgttggtggaacgcctgagcacggcggagagcgccacgctgaagctggtgatgcctggcgaaagcgccgccactctggccccctggacggtgccggcctggcaatacggcgagtttctcaatcaaattttcgatatctgggtgcgacgggacgtcgggcacgtctacgtacaaatgtttgacgtggcgctttccgcctggtgtaagcgaccaccagtgctgtgtgtattcgccgaaacctgtgggcatgccttcgctctggaagccaacggcgacttatataactgcgatcacttcgtctatccagaacaccggctggggaatattcatcagcaagatatccgcaccttaaacaatagcgaacaggcgcaggcattcggccacgctaaaaagacatcgctgacgccggattgccgccagtgcgaattccgcttcgtctgccacggcggctgccccaaacatcgcttcaccgtgtcgccgtccggtcatccggggcataactatctctgcccggggtataaacatttcttccggcacatttcgcgcgagatgaacgtgatgaaggatttgctcgccaacggttatccggagcaagctatcatgtacgcactagctcaggaaaaacgggctggcgccggcagcgccaaacccaacgagccctgcccatgcggcagtggaaaaaagtataagaagtgttgttgttga

SEQ ID NO: 431986 - DNA, 468 bp, Serratia marcescens
atggtgtacaaaggcctggaaacggtgcgcaccgactggacgccgctggcgcagcagttccagcagcagctctatcagcgcatcttcaaacggcagccctaccaggactatgtgcgcgactacgtcggcaaaaccctgaacggcgacttcgacgatcagctggtgtaccgcaagcgcctgcgcaggaaactcgacgactatcagcgcaacgtgccgccgcacgcccgcgccgcgcgcatcgccgacgactacaaccgcagccaggggcggccgctgcagtatcagaacggcggctggatcagctacgtgatgaccgtcgccgggccggaaccgctggaaacgcgccattcgctcatcgactatcagcattacctcgaacgccagctgcaaccggtggcagacgctatactccctttcttgcacgacgatttcaccacgctggtcaccgggcagatggggctgttttga

SEQ ID NO: 431987 - DNA, 1107 bp, Serratia marcescens
atggaaacggcaaaatatattctgataaagctggtcgactggaaaacgcgccagcggaaaattcaatacctcatcatgctgctcggctccgcgatcctgagtgtgaacaactcgctggggaaggcattaacgctggagaagggcgatgcccgcttctcgctggccgtctccgaggggaatgtcatcacggactatttcgtcaatttcgtggcggcattcatcatcatggggggatttgtctggctgctggtcgacgcttaccaggaggctaaaatcacggtgcgcaaaaaggtggtggttatagaagggagagcgctgcgcaaagtcgcgacaacgccgctgcataaaacggcctcccgttacttcaacggcaagatcgacgcattaaccctcgatatgacgcagcggatgcgggatggagcgatcagtcacccggaagaggcctttgacgacaatatcagcacgctggccagcaatatcgccacccgcattgacggtatcgaacatcaggacttgacgctggtgtatggtgggcaattgccggttccattcaccttctacattggcgccatcctcgatgacaatggcccggtctgcgtctatgactgggaccgagcgcaagatgcctggcggctgattgacaacaacgccgccgacgacggcgccgattttaccctgatggaaagcctcgtcacctcagcggccaaagatgtggtgctggcggtctcgatgtcctatcaggccgacattgcggccatacgccaaactttccccgcctacccgctgtcgcatctctcacttaacgccacaacgctcggtaatcactggtcgctgtccaaacaaacccggctggcgctgcaatttatcgaacaggtcaaaatgctgacggcgtgcggcgccgaacgcatccacgtgatcatggccgcccccagcagcattgcgctcaatttcggccgccgttatgacaatcgcaatctggcgcagctcattgtttatcagtatgagaaagaacagcaaccggcctacccctggggggtgatgatgccgacgcagggacagcgtcggggcgcggtcgttaagcctcccgccgttctctcatccgactga

SEQ ID NO: 431988 - DNA, 555 bp, Serratia marcescens
atgagcgttgaacatgaatgctttatctcagtcgatattgaaactgccgggcccatacccggcgtgtgcagcctgctctctattggcgcctgcgtcatcgaccgcccggcggaacgcttttacattgaagtgcagccgctgaatctgcattacgatcctgaagcgctggccgtcaccggtttcaatctgcagacccaaatagcacgcggcatcgatccgaaagcggccatgcagcaatttgcccactgggtcaccgccgtcactgacgccgcgagtaaaccgattttcgtcggtttcaatgcggctttcgactggtcattcatcaattactattttcacgtttatctcggccataacccgtttggctttgccgccctcgatatcaaggccctgtacatgggcgccaccggcagccgctggcaagacacccgctccagccgtatcgacgcccaatttaatctcaaaaatcacggcagccacaacgcgctggatgacgcgctgtatcaggccgagatgtttttgaagataaaagcacacatgatggaaaaacgctga

SEQ ID NO: 431989 - DNA, 519 bp, Serratia marcescens
atgcaggcgtgcctaaaaacactttctacggtgaataacgtggttatcaggcatcactgcaaaccgctaactatcgcccagcaatataacgcgttgaaagccggcggtccgtatgaacggctgttgattagcgacaacgaccgtacgctgtattgggaagggtggctgcaaccctcactgttcagccgccgctacagggtcgcggttcggtacagcctcggaaccccaccgatttgcgtggtgacagagcctgacctgttcgcgctggcctgcacgcgggccatcccgcacctgtatcccgccaataagcatattcccggcgccaggctgtgcctgtttttgcctggctcacaggccggcaatgggctcagcgaatggcgcgcccagttaaaaatcagcgacacgatcattccctgggcgtcgctctggctattttattttgaacagtggctgcacacccgcgactgggaaggcggcggcaagcacccacgcaccagcgaggttaaaaatgagcgttga

SEQ ID NO: 431990 - DNA, 1227 bp, Serratia marcescens
atgtacggttccgccaccgccagaagcctgccttcaggaaaaaagcagcgtatcgccgatttattatcgcaaattattgaaacgctggatctcaccaaaacccaatacgccaacatcaaaagcgcctataacggggtcggcaccttcctgtctgaaggcgacgatccgctattgcaagatgccgttatttacccgcagggcagcgtgcggctcaacaccaccgttaagcccaaaaatgaagagcaatacgatattgatctgatttgctatctgccccatgccacccaggcggattataccggcgtgctatcggccattcgccggcggctggagtcgcataacacttataaagatctattaagccatttaccgcgtggattccgtatcaactatgccggggattatcatctggatattacacccggccgcgctcataccggcgcagcagaacgtcagggccagccgctatgggtcgttgatacgcaaaccgcctggaaggagtccaaccccagcggctacgccgagtggttcgatcgcagcgccagcgtgcagcccctgcgcatcgtcctgctcgcggactccgccagccgcgtgggcaccgaggcgctcctcccgctgccggacagcaccgacaaaaaattgctgaatcgcatcgtacaaattctcaaacgccaccgtgacgaatgggccgtcgagcaggatgacgtccagcagcgctgccgcccgatttcggtcatcatcaccacactggcttgccatgcctataaccacatcattgctgacaggcgcgcctacgacaacgacctggatattctgttagacgtactggaactgatgccggatttcatcgtgtgtgaacagggagagatacaggtcagcaacccgcacatgccggaggaaaacttcgccgaaaagtggaaccgttcagagcaggatgaggggcctcagcgtagcgaagccttttaccagtggcatgccgcagcccaggcgacgtttaataccatcgccgccagcgttggggaagataacctgttcctgagccttgaagacagcttcggcaaagcgccggtcgatagcgtcaggcaacgcctgatggagcatatgcagtcagccagagaacaaggcagcctgcatcttgacaagaaaaccggcgggctgatcgctaccggcctcgccagcacggcggcccatgcaggcgtgcctaaaaacactttctacggtgaataa

SEQ ID NO: 431991 - DNA, 285 bp, Serratia marcescens
atgtcggaccatcaagtcacctgtatcagaaaatccgatcgccaaaacgcgcatgagcgcattaagactattggcggcgtcaacgccgatggcacccgctggtcactgccccaggcagacgccattgccgggatcgaggcgggcacctggcgcttttgggtcaccgcaaatggccattccgtctgggtgattgtctcaatcagtgcggcggggaataaatacctcaagacgcaaaatgacggcgaacaccccaataacctgctcagcctgccggaatgcccctga

SEQ ID NO: 431992 - DNA, 1326 bp, Serratia marcescens
atgctaccagcggcttcatcggcgccaagcaagggtaatgccgatattccggctttgctgcagtttgccgagcaatacagcgaaaaaagctacccggctgaaaaagcccctgccgcactggatagctctcgcaccgaaaaacgcccaacccaaagcgtcgagaaaggtaagactgataaaaaaccgccacctcagcgcgaatcctggcgaattaaggataaagagatccagcaacagcgcacggaaatagcccagctaaaattacagctatcccgtctgcagcaaaacgccgtaacggcaacgccggattgggctgcgctatcacaattggcgcagagcttgcgtcagtcgctgggcatggcctcgacagaacgccaggcgaaagccaacctctcacagatacggcaacagtggtatcaggatcgagcggcattacaacagcagttgtccaaagctcagtcggaaaaccaggccttatcggctgcagccaaccaccaaaagaatttgctgatggaagcggaaaagcgcgacgtggtgcagcgggagcaacaggctgaattgcagtcacagcgccaactgatgcaaagcgaactggatgaaaccgttaagaaactggcagatacgcgagccgacatggcttctttgcaagcgcgaagcccccgtctggtgacggccgatgagctcaaaggcgcacagccgcgtgaggattacgccgcaggcatttcactgggagaggaaattctgcaaatgcaggaagaacggctgcgttggggagtgagagcggagaagggaatgctattggccggcattgcagatgcctttgcgggcaagcggatgttgtcggatgatgaactcaataacactctggccgccgccgagaaaaaagtggtatccgcaagagaagaaatcagcgcaacccaacggcagaaaggcgcggcctatctaagggaattcaagaaagatcagcgcgttcaccaggcatcatccggattttggtaccgtatcgactatgcgggcgatgcgcagatccccgctaccgcctcggtggatgtggtggtaaaagaaacgctggtcgacggcaccgtggtgcaagatatggaagcgactggtgccacactgtcgcagccggtggcggatttcccaccgttgtttaaagaggccatctcgctgctgaaaaaccacggtacgatgaccctggtggttccccccgagcaggcttacggagagaaaggctatccacctaaagtcccccccaacgccaccatgatttacaccttgcgcatagcggaggtatacccacccgctcaggctaaaaaacagccctaa

SEQ ID NO: 431993 - DNA, 393 bp, Serratia marcescens
atgagccattcgcccctatccatcacggcggtattgatatgtgtactgttggtcagcagttgccagtccaccaaaacgccccagacaaaatccgcttcggccagcacattgcaggatgaaaaggtcaagcgtgaaacccaggatttaaagcagtgccaacagaatttaagcgcactggggacactgaaaacggcggattacccggcaaaaaaacaggtgttcgacaatctgatgtccggcgcttcgcaatacgccggtgtgcgcacccaggtcaacgagcgcacgcaagagaccgttgatgccctctatcgttatcaggtgagctatcaatgcgccgagattaatcaggcgttacttaccgaactggcgaaacgcggtggtgcgataaaatga

SEQ ID NO: 431994 - DNA, 645 bp, Serratia marcescens
atgaaaagcacgcaaaatgccatcatgaataagacactgaacatcgtcatcattgacgatgataaattttataccgccggattagtgatggtattggccatttacttaaaaaaccaaggccagcaagcaaagttttcctcccatctcacctacggaaaaacggcagacatcgtttttcaggcaatacgttgcggcactttgattgcgcctggcagcgcaatctgcatgaacaacgataaaccagtgtatgtcgccatcgctgacaggaaagatgcccatttgcagcacttataccgtagcgttaataaatctaacatcctttatcgacaccaatcggtaagcctaatcttgcagctaatggaaaacgtcctgctttccctgcaaaagacatcggtaaaaacacaatctacttcggagaacttgcaacacttagcgctcacacaacgagaacgcgaagtgttgcatcaactcaagcagggaaaaacacctgcctgcgtagccagcttcctgggtatcaaggaaaagaccataagctcgcacaaacgagcggcgatgagaaaattgaattttaaacgaactaacgagctattccattggatgcttcaaggcggtttaacctgccaccaaccgagaaaaggaatttga

SEQ ID NO: 431995 - DNA, 486 bp, Serratia marcescens
atgaacagagtaatcgtctgggtatctatttttagcgtcattggcatggggctgtttttcttttacctaaacagtcttagctggaaaccgttccgctgcgatactcaagtgaattcgagtattgcaacaaagaatggcaactggattaattttaacgcgaatataaatgtcattacccttcataaagagcacagtgaagttcttgtgattggctccctcaaagaaaaaaacgaagattacacgatctacagaacaattttcgtcacacataaaccagcgaatattaatggttatagtgtaactgtaatcacgaatgaaaagcgccaccctaaagataacgtgcccgatacactctggcaacattatgtattaccagaagttccaggggtttccttctatctagaaacaaaacacctaaaggaaaactcaattatctacaagcgattagataacccaatttttgtctgcgccataacagaacagtaa

SEQ ID NO: 431996 - DNA, 798 bp, Serratia marcescens
atgaaatacataataaatttaatcatcactttcgatcctgacagccggttgttaatacttaggaataatgaccaactcactatcgggttatccaaaccaggcaccagattgttaatcgagctagttaaaaacaatagaaatgaactgacgcgtgaaacgctgatcaagcacgtctgggaggattacggattctctccgtccagtgccaccttgagcaaccatatcagtgagttaagaaaagcctttgaagcgcttggagtaagcaaagacattctgcttacggtgccacggataggttttaaaatggatgcagaaatccaccccgaaaccaaaccaccgaaagaagatagatctgttgaaatgtttgatcccgcggttaccacgagtgagccagtaaagcagcaaaacgtaacgcctcatcccacacattcgggcctcagaggaacgctgcagcgcacgctgaagctcggtctggttcttatcttcaccttactcgccattgctgcagcgataaagttgatgactgtgaacagtaatgaagagccaatgctcataggcgttcagtataaatgcaatttttataccctgggtaacaataagccaagcagtgaacagtctgcccatgcgcgaaaaatgctctccgatgcaaagatagactgtgcgcagataaatcgagacatctactatattgaggcacgccctgccaatgacaaactaaaggttcactttatggcggtttgtaccaaaagcaccaatatgagctatcaaacttgcaataactataaactggttgagtaa

SEQ ID NO: 431997 - DNA, 537 bp, Serratia marcescens
atgaaattgaataaaatcatgatggcagcagtattggcattcggtactgtttctggcgcacaggctgctgaccagggccatggtaaggtgacctttaccggttctattattgatgcaccgtgctctattactcctgagtctattgatcagaccattgagttgggtcagatctctaaagtggctctgcttggcggtgggaaatctaccccgcgcaatttctcgatcgatctggagaactgcacgtttggttcacctgccaccaaaaataaggtgcaggtaacctttacgggtatggaatctgcggctaaaaatggcctgctggggattaccggaacggctaaaggcgccagcgtagccatcactcaggctgatggtgaaatcatcaaactgggcgagccaactaaagagcaagtgttgcaggacggtaacaacacgctgagtttcgctgcttacatgcagggtgataccgcttcttccgcgtctattactgaaggtgaattccaggcggtggccgattttactctggcttataactaa

SEQ ID NO: 431998 - DNA, 606 bp, Serratia marcescens
atgtgtgtatatgcatgcggtatccccgcatgcctttttgacaatattacaaagcatggagcacgttttatgagggcgcataataccgttattatagtggtttcttgcctgttttcctttccagtggtctctgttttagccgacgagcacattgccggatgggggcgggtaaatatgcaagggtccattatagataccgcttgtgctattgcagttaacagccgagaacaaactattgacatgggggttttacccttgtccgatattattcgcgatgggaagggtcgcagccagcctttttccattgatttggttaactgcatcactgaacgccctggaaaggaaggttggaagaaatttcaggttacttttgatggtgaagctaatggcgggttatttggtgttaacggtgatgcctccggtgtggcgctgcaaatcatcgatacccacggtaatgtcgcaatgccgggcaaggctatgccgtcagtggatattattcccggcgatagtcaattgaattacgccatgagattggtagccaataatcatgcattaaaagcgggcgattatttatcatctatccgatttaagcttgactatttttaa

SEQ ID NO: 431999 - DNA, 2592 bp, Serratia marcescens
atggagttttcttcgcttggaaaaattgcgcctctgcattcgttaggtttttttatttcccttgcgctgggtacttcagtgataagcactcatgctgccgataatattcagttcaataccgatgtgctggatgtcaacgatcggaaaaacattgatctgagccagttctcgcgcagtggctacattatgccggggacctacggcatggtggtgcacgttaataagaatgacttgcaggagcaacagatcgcattttatgcgccggagggtgacccaaacggcagtcgcgcctgtctaagccccgcattggtgcaacaactgggatttaaacccggcgtgctgaaagacctgacctggtggcgcgagggagaatgtcttaacgagaccagcgtacagggaatggaagtgcgtggcgatctgcccacgtcctctctttacctgagcattcctcaggcttatctggagtacagtgacgagaactgggatccgccgtctcgctgggatgagggcattccggggttgctcttcgattacaacatcaatgcacgtagccagcatcagcagcgggacggatcgcgcggttatagcctcagcggcaacggtacggcgggcgccaacctgagctcatggcggctgcgcgccgattggcaggcgaatcttgaccatcagacggggagcgggcaaccgaccaataaacagctggactggagccggtattacgcctatcgggcaataccggcgctgcgctcgaagctgacgctgggtgaaaactacctggactcaggcatgttcgacagcttccgtttcaccggagcgagcctagtgtcggacgacagcatgcttccccctaatctgcgcggttatgcgccggaagttgtgggagtggcgaaaaccaacgccaaagtcaccatcagccaacaggggcgtgtactgtccgagaccacggttgccgcagggccattccgtattcaagacatcaacgatgcggtcagtggcgagctgaacgtgcgggtggaagagcaggacggtggcgtgcaggagttcgtggtgaacaccgcgaacattccgtacctgacgcggccaggagcggtgcgcttcaagctggcgacgggtaaaccgtcagactggcagcaccattcgcgcggcccgctgttcggtaccggcgaattctcctggggggtcagcaacggctggtcgctgtacggtggtgcgctggcgggcggcgactacaacgcgttgtcactgggtattggccgtgacctgatggcgttgggggcgctgtcgtttgatgccacccagtcgcgggcgcggttgccacaggaaaacggtacgctcagcggcggttcctatcggctcagttactcaaagaacttcgacgaatacgacagccaggtgacctttgccggctatcgcttctcagagcaggactttatgagtatgagtgagtatctggacgcgcgttattacggcacccgaacggggaatggcaaggaaatgtacaccattaccttcaacaagcacttccgcgactgggggctgagtacctatctcgattacagccacgagacgtattgggaccggccagccaacgatcgttacaacctgacgctgtcgcgttatttcgacgtgggccggttccgcaacctgagcctgtcactgtcggcgtaccgtaatgaatacaacgggacaaaagacgatggggcctacctttcactgtcgatgccgtggggggataactcaacggtgagctacaccaccacggtgaaccgcgacgacaccacgcaccaggttgggttttacgaccgggttgatgagcacaataactaccagttgcgggccggtagttcgcgcagtgggatgaatgtaaacgggtattacaaccatgaaggtgataaggcgcgtatgagcgctaacgccagttatcaggaaaatcgttacagcgctttcgggatgtcgatgcagggcggcatgacgatgacggcgaatggcggggcgctgcatcgaaccgggatgccgggtggcacccgcatgctgattgacacgcagggagtagcggacgtgccagtgcggggttatggcagcaccaccaacaccaatgcctggggcaaggcggtcatcggggacgtgaacagctattaccgcaacaaggcgagtatcgatgtgaacaagctcggtgataacgccgaagccacgaagtcggtggtgcaggccacgctcaccgaaggcgctatcggttaccgtcagttcgacgttattgccggcgagaaggcgatggcggtcatcaaattggccgacggcagtgaacctccattcggcgccacggtgatgaacgcccgtaagcaggagacgggcattgtcaatgatggcggcagtgtttatctgagtggcattaacgccggcgatgccatgacggtgcattggaacggcggcgcgcagtgtgaggtacgcatgcccacgccgctgccggcagacatgctgatgaatacgctgctgttgccgtgtcatccgctgggggcgcacaccgaacctgatacgcggacgcagggcgcgtcactggcagtggttgcacccgagtcggagccggctttgtaa

SEQ ID NO: 432000 - DNA, 825 bp, Serratia marcescens
atggccgggaatgaaaacatgcgaaagagcgaattgaacatgaaacaacatcacgaaggctgcccggtcgcgtccgtgcggaaaaaggccctgacagcggcggccgtggccggtgccctgctcgcggcattgctggcccagcaggcccaggcggcgatagcgctggaccgcacgcggattattttcgatggcagccaaaaatcggtgagcctgagcgtcagcaaccaaaacaagcagctaccttacctggcgcagggctggattgaagacgacaagggcaacaaaatccagagccccctcacggtactaccaccggttcagcgcatcgagccgggcaaaccgagccaggtgaaaatccaggcgctgcaggtggcgaagacgctgccgcaggatcgcgagacggtctattacttcaacctgcgggaaatcccgccgaagagcaccaagccaaatacgctgcagattgcgctgcagacgcgtatcaagcttttctaccgcccggccgccattgcgatggataacaatgcgccgccgccgcaggagcaactgaccctgagcaagcaaggcgacaagtatgtggtcaacaatcctacggcgtattacgtcacgctggttgatgctgccaccaaaaaagacggtgcggggatcaaaaactttgagccgatgatggtgccgccaaagggcaatttgccgttgacggtgagtgcggctgaggctggtaacagtccggtgctgacctacgttaacgactacggcggccggccgcaactgagcttcagttgctccggcagcacatgcacggtgataccggcgaaaaaagcgtag

SEQ ID NO: 432001 - DNA, 666 bp, Serratia marcescens
atgggcatgacacacgagacgggcagacaccgacggggcctgtgcggggcgattgagctgaagtattacggcgcgttgttcgggttggcgctgatggccccgataacgctgggggcagtggtgtggttcttgccaccggcgcaggcggcggtggacaactgggatgtcgaaggcgccaacggcaccttgtacgttcacggggcgttaaccgagagcgcctgtcggctggagatgaccagcgcccaccaggatattgcactcggtgaaacgggggcggggcgcctgagaacggttggcgcgcgtggcgaaccgatccgattcgagctgcgtttggaggattgtctacgcagcccggccggtagccgcgatgcgcgtaccggcggcctgatctgggcggacaatcagccggcggtaacggtgagtttccgtgcgacgcgtgacgccgataacccgcagttggtgaaggcgcagggcgtttccgggctggggctgcggcttgaaaatgcgcaaggggaagacgttcgcctgggcagcagggggaaaccgctgttgctgacgccgggacagaatacgctgagctacacgataacgccggaacgcactcccgcagctctgatggcgggcagctatcgggccgtggtggattttcatctgagttatgactga

SEQ ID NO: 432002 - DNA, 492 bp, Serratia marcescens
atgaatgggatcgtaacgctgcagcgaacgctggtgggtgtgctggcggccttgccgatgctggcttttgcagccccctcggccacggtcaccgtcaaggtcaccgtggtggcgccaccgccctgcgtgataaacgatgaccgaccggttgaagtggagttcggtgatgtgatgaccacccgggtgaatggcgataactacaagatgccggtcaattacacgctgtcgtgcaccgggggcacttcgaatgcgatgaagctgcaggtcaaaggcaatggcgccgtgttcgacgcgacggtgttgcagaccgacaagaccgggcttggcatcgaactgcgccagggcgacagcaagctggcggtcaacagctggctgaatttcacctatccgaacaagcccgaactgtgggccgttccggtaaaacaggccggcgccaccttgacgggaggcgaattcagcgcaggggccacaatggccgtggattaccagtaa

SEQ ID NO: 432003 - DNA, 501 bp, Serratia marcescens
atgagcaaaacactaaaagtcctgttgctggccgggggggtgatggcgggcatgactccggttcaggccaaagacggtgaagccgacatgacgtttcacggcaccctgatagagccgccgccctgcaccctcaacgacggcaatcaggtggaggtcgatttcggcagtcgggtgggcatcaataaggtggacggcgagaattaccggcaggggttgaactaccaaatcacctgttacagcgctgccggcgggaactgggcgttgacgctcagcctgagcggcagtgcggcagggttcgacagtgaagccctgtcgacggacaaggccagcctcggcattcgggtgtaccagaacgataagcccttcaccccgaacagcaccgtgaagataaatctggccaacccgccgcgcctggaggcggtaccgatcaaacaagctggcgccatgctgaccgaaggggcctttgaggcctgggccacgctgcgagcggattatgaataa

SEQ ID NO: 432004 - DNA, 576 bp, Serratia marcescens
atgagagggaaatcgggctggcgccagccttcaggggattcacgttctcggatgggcgccctgctgttggtgccgatgttgatggccgcaccgctatcggcgctggccgcgggtgacaataacctgtatctgcatggcgctctggtcgcagagccctgtgtaatagcaccgggcgatgaagaaatcacgctggattttggcaccatcatcgacaagtacctgtacctgaacacgcgcactctcgggcaagccttcgagatacatttggaggagtgcgacctgacgctgggcaagacggtgagtgtgacctttaccggcacggaaaatcacgccttgccgggcctgttggccatcgatggcggcagtgaggccacggggattgccatcgggtttgagacgccgtcggccaaacccctgccgcttaatacccatagtggcaaatctctgttgcaagacgggggcaacatcattgccctgagggcgtatgtgcaaggtgagcccttagcgatagccgaccagaccattggccggggcacgttcagcgcggtcgccacctttaacctggaatatgagtaa

SEQ ID NO: 432005 - DNA, 846 bp, Serratia marcescens
atgattcgaaccctttacctgtatgccatcatcatggcatttgctcctctgtgctcgccagccctagcagcgaaatggccatgggccgatggtatgaccgccaggtgccccagcggcgctgcgaactgtaattcaaaccccgtgtactcttggtcaggtgtgttaatggttgacgcacctgaggggctcccctctaacaaaggtacacgagtgctcatctatggggttcattgcagttcggggaaccgacctggcaattttacaggctgcaacttctcgaatccggcctcgcagtatggccatgctcctgctcaagtagggaaatgtgagaccaaaacagcaagcagttgggagctgaccgacgactcgatttgtgggctgcgaccaggtgaggtgcaatcacttcatattggggcgtacttgggagctgagtgcgccatctttgccaaggggaatactggcgttcaaaccgtagtatcaacaccatggggcgacgtgactgccgagcaagttgctaacacgtactcggcatactgcacgaaggctcctccccctcagcaagaatgtcgtatcgacttacccgatggcggggtgattgaccatggcacaatgcccccgacggggactgatacccacaaaattaccgcaacccttgaatgtggtggggatgaagttttaactgttatggggaatggggaagtcgatctaggaaagggggtcaaatcgcgtgtgtcggcggggggggtatcccacggcactgccgacatcgtctcgaatttgacacttttcaatgcggaaccggggccgcactcgggtgttctggttgttactgtctcaccccgttag

SEQ ID NO: 432006 - DNA, 144 bp, Serratia marcescens
atgaaaggtttcctgggcacggacccgtaccagaatatcctgtacaaaggtcgtctgcattttgccgtcgccgtatcgaccgagtacaccaccaaaatgctcttctacaggctgcgtaggatggcgaaaaacgatggcttttga

SEQ ID NO: 432007 - DNA, 411 bp, Serratia marcescens
gtggtgtatccggtgcatctcaatccgaacgtcagtgagccggtgaatcgcattttgaaaggcatcgacaacgtcatgctgatcgagccgcaggattatctgccatttgtctatttgatgacccaggcttacatgatcctgaccgattccggcggcattcaggaagaggcgccatcgttaggtaaaccggtgctggtgatgcgcgacaccaccgagcgcccggaagcgatagatgcgggcacggtgcggctggtcggcaccgatttggccaaaattgttgaagcggtgacccggctgttgacggacgaaagcgaatatcacgcgatgagtcgggcgcataacccatacggtgacggacatgcctgtcagcgtatcctcgaagctttaaagaatcatcaggtgacactatga

SEQ ID NO: 432008 - DNA, 1974 bp, Serratia marcescens
gtggtggagtttcaactcagcaggggattgccgaaagattcacgagattctctgggaaacagcccattgatgattgcggcccagaatgggcatttcgcaatttgcgaaatgttgttgcgtgcgggggtcgatgttgaacataaaaataacctcgggttttgcgccagtgacctcgcgcaggagcaaacgctacttgatctgttggcccattatcggcaatctcttccgcctgccgggcagcaaccagcaggggggccggctgatgatgcagaagttgaagccgaaaacgatgttgaaacagaacctcccgaaactgaagccgcgatgaatttcatgctgtgggacgccgaggtcgaatcggaacccaccgaggacaatctggcattacggcacgtttccgctgaggctcagcagctattatcccgctatcgaccgaaagatgattccgctgagtggcgcgatattgaactcatacttcctgaaccaccgacgccagtttctcactctccgcaaaattaccctcatctcttggcattgctcactggcgcactggatacggggcgtatctctgtccgtgacatctggcatgccggggaagaggatttcggtatgcagtggcctaaattctgggtcagcgtagaagcattgatcagggacttacctctgattgtggatgacgatgatgttactccgccaggcgctgttccggcgacattagcggcgagtgatcctcttgagccttggtttgatgctttcaatgcattggggctgttcgacattgtggaaaactatcttgtcgacatccgccagtgggatctccttgataagactaaagaagaacgtctcggacagcgcatggatacggcgctaattaatctgatgaaaatcctggcgggtttacctgaagctgaatatctgcagctgttgcatccgaatcaccttccagcgtcaacgcctgagattattgaagagcaagacaaagaggatggggcggatgaggaaatgcctcccgtatccgatgacgataaggatgacatcatcagctttaccgagctgttatttctcctgagaagtgggaaagcagacgagtatcaagataatcatattccccgtccagagtatgcagacctgcaagagctcgttgagcgcgccagaacgctcatccctgaggaaggtcttaaaatgagtcggtatgtcagcagttacagagaagcttgggaaggattaattcacgctaatttgcgtctggtcgttactatcgcgaataaataccgtgggcggggattagatgtcgaggacctagtccaagaaggcaatattggcttgatcaaggccgtagaaaaattcgactatcgacgcggatttaaattctccacgtatgccacatggtggatccgccagaagatcgcccgcgcgattgccgatcgggcgcagtttatccgtttacccgttcacttctatgagcaattcaggcgctggcgaaacagtcgggatcaattgctgtatgtccaagggataacgcccacgctcaaacggttgcaagcattaactgaacttccagaaaatcaactcaagcggatggcaaaatatgacgaacaaacggtgttgattggcgattttcatgaggactctctcgataataaggcggcgttgtccggagacgcgatcctgactggagaggatttcaccagcgctcccgttcagtatctggagctaagagaaagtatttcattggtgctggatacgcttttaccacgtgaaaaacagattataaaaatgcgttttggcatcggaatgacgcaagactccacacttgaagaggtgggtaaacagtttgatgtaacgcgagaacggatacgtcagattgaagccaaagcgctccgtaagctacgccattacagtcgcgcgtcgaaattaggcggtttcgtcgagcagtgggcaaccgcgttaagtgatatgcaggaagaggaatga

SEQ ID NO: 432009 - DNA, 1494 bp, Serratia marcescens
atgcgccatgcgccgccgaatgcggcaattatgatcgaagctctgcgaggacttggttacaacacggccaccgcactggctgatattatcgacaacagcattagtgctggggcccgaaaggtcgatgttatctttcactggcgcgagtcggatagctatatcgtagtccgggataatggttgcggcatgtcggccgttgaactggatgttgcgatgcgtttgggtgttaaaaatccgctgacaaagcgttcaggatacgatctgggccgcttcggtcttgggctcaaaacagcctccttttcgcaatgccgccgcctgacggtctcctccaagaaagagggggtaacgactatcctgcggtgggatttggatattctcgccgcaagtacggacgacggttggtatttgcttgaaggcgctgacccaaggagccaggaggcgttagcgcaagcggaacctgagtccaacggcacggtggtgctgtgggacgttttagaccgaattgtcacatccggctacggggagaaagatttcctcaatctgatggatggcgttgaacaacatctggggatggtgtttcatcgattccttgaagggggggctccccgacttactctcacgcttaatggtcataaaattaaagcttgggatcccttcctaagcggacatccttccaaaccctggcattcgccttcggcaatggcgccaggtgcccccgcagtgaaggtggagtgtcatgtcctgccgcatcaggatcacctgacgacgcaggagtatcaacagtctcaaggaccggcaggatggactgctcagcaaggattctatgtatatcggaatgcgcgattgctggtagcgggcaactggcttggactcggtagcccccgggcctggacgaaagatgaaacccaccgccttgcgcggatccgtctggatatccctaatgatgccgacatagactggaagattgatattcgtaagtcgatggcgcgcccgccggtttcgctgcgtccttggttaacccaactggcgcaatcaacgcgcgatcgtgcggtacggacatttgcaaaacgtgggaaaatgaataagtgcaagcccggcgaggaactcgttcatctctggcaggcgcagaagacgtcatcaggtgttcgttaccagatttcgttacaacatcctgtcatcagcaatgtcctttcgcaggctggtgagttatttccacaaattcaggccatgctcagactgattgaggaaaccgttccggttcagcaaatctggcttgatacggctgagacaaaagagacgccgcggacaggctttgaaaccgcaccgcccgcagaggtgttatctgtattgcaggtcatgtaccagaccctagttggtcagcaggcgatgtcatcggcgctggcgaaacagcatctgcaaaatatggaacccttcgataattatcccgaattaattgcacaacttcccgacgatcaacaagagaaatcgctatga

SEQ ID NO: 432010 - DNA, 2859 bp, Serratia marcescens
atgagtctgaatcccctagatgacacgcaactgagtgtattgcagattgtgcagacgctcctgcaaggtctggataaaagcacgatcacacccggtactctgcgacaacatattgatatggtttgtcagatgaaaccggagtggagccgccttgataaccgggagattctggtcgaagagttgattcgccgttatagcatctggatgggagaagatgcctctctgagtaatgacgaagggcatcaaccttggttgaccgccgatgcaaaacgtgagtggcgctactggcatcgatatcgacaatggcttggcaaaacgatgccatggggagttctggatacccttgaccgttcaacggatcgtgtcctgggattacttgagcaaccgaggcgggaagggtgctgggaccggcgtggtctggtggtcggccatgtacaatcggggaaaaccagccattataccggactaatctgtaaagccgcggatgcgggatataagataatcattgtacttgctggtttgcataacaacctccgctcacagacccaaatgcgtcttgatgaaggatttcttggctacgagacgagtccactcagagaaaaagtgaccatcattggtgtgggcgatattgatagcgatcccgtcattcgtcccaattacgtcactaaccgatctgaaaagggcgatttcagtgccggagtggctaagaacctagggattagccccgagcaacgtccctggttgttcgtggtaaagaaaaataagtctattttgaagcgcctgcatacctggattgaaaaccatgttgccaccagcgttgaccccatcaccggaaagcgttttgtttcggaattaccgctgttaatgattgatgatgaagcggataacgcctcagttgatacgggggaaatagtctgcgatgacgatggaaaaccagattctgaacatcagccaacggcaataaatagcctgattcgtaagctgttgatgcagttcagccgtaaggtatatgtcggatataccgccacgccctttgccaatatttttattcacgagagcaatgaaacgcatgatgaaggcccggatttgtttccttctgcctttatcattaatctcggtgccccctctaactacatcggccctgcgagggtatttggtcgggccaccgcggaaggccggaccggagagttgcctttgatcaggcgagtgagtgatcactgtagcgatgacggaaaaagagggtggatgccggtttctcataagagctcgcaccatcccacactggatacgctaacgcatttcccggactcgttaaaacacgccatcgacagctttttattggcatgctgcgtcagagaatcacgtggtcagggagaaaaacacagttcgatgctggtccatgtgactcgcttcaataaggtgcaaacggtcgtttatgagcatattgatgcctacattcaggacgtgagacagcgactgacgcgaagtattggacacgaaccttttttacatcagcttgagtcactctggctggccgattttctgccgacgagtcagacgatccgtgacgttatgccgcagcaggttccggacgacgccttcgcatggcaggagatcgtcgacaagctgtataccgtgattgaaaacgtgtcggtacgaatgataaacggaacggcgaaggatgcgcttgattattcggacagtgcgacaggcttaaaagtgattgcgattggcggagacaaactggctcgaggtctaacacttgagggattatgcactagttattttttacgcgcctcccgcatgtatgacacgttaatgcagatggggcgctggtttggttatcgccagggatatctggacgtatgccggctgtataccaccgatgagctgattgaatggtttgagcacattgctgatgcgtcagaagagctgcgggaagagtttgacagtatggtcgccagcggcggcaccccgcgtgatttcgggctaaaagtgaaatcacaccccgtgttaatggtgacctctcccttaaaaatgcgtagcgcgcgctcactatggctctctttcagtggcactgtggtcgaaacaatttcgttgtttaaagaaccggagtatcacaagcgtaactacgtcgccttccagcgtctgaccgggcgcatcggtgctggcgcgcggatccctgagaggcgacgcggagagaagattgaaaaatggagtggggtcatttggcaaaatatctcccctgagccgatcgtcgatttcttaacggaatatgagacccatgctcaggccagaaaagccaacagcaaactgctggcggatttcattacgcggatgaatcgtgttgatgaactcacccaatggacggtggcggtgataggggggggcatcgatcgtcctcacgatgtttgcggctttcccgtaccgcttatgatgcgtaaagcgtctgaaggggtcactgaccgctattccattggccgtttactttccccacgcgatgaagggattgactgtgatgaatcgacctggcttgccgcgctggaagaaacgcagcgtatttttcatgccgatcccggacgcaatgaagggagagaggagcccgtcattccgggaggtgtggtactgcgtcggattaaaggatttggtatagacgacatcccagcacagcgtcaaaaagggctactgcttatttacttactggacccgcaacaggcattgtcggcagaggaatatcaggccgatgccttacctgtggtggcttttggcatcagttttccgggaagtagcagtggggtaacggtggagtacaaagtgaacaacgtactgtgggagcaagagtatggtgcggctgagtaa

SEQ ID NO: 432011 - DNA, 1029 bp, Serratia marcescens
atggtgcggctgagtaaagacgatctgctagcggcttggaaagccttggatcgatctcagatcgacgaacagcctggcgctcagggctggcgcgggattcggctttttacgcaccagggttgtagctttcatgccgggcgtcgtcagcctgataatgaagaaatgctgattgccatgtttcctcatcctctttcgccgggatcgacggcgcttccgtcctgtaaaggatttcgcgttgagatgaccggaacagaggaggggcggcagaacggtttgatgatccgtcgtcagcaaacggggaatgcggatgtctttacgacgatgattctggatattctccattcgctcctgaaagtttcgaaaccgtgtctgtttgaaaccctgctctgtcggattcgtttatggcaggcatttatggagcgagatacccgtccactcagtcacgaagaagaagtggggttaatcggcgaattgacgtgtctggaacggttgatcgagagcggtcttgcgccgtcaacggcggtcgaagcatgggtaggaccgcagcatggcctacaggattttgcactctatgaacgcgccattgaggtaaaaagcaccacggcagagcagggtttttgcgtaactatccactctcttgaacaactggactggcagcgggcaggctcgcttgtgttgtgcgggttgcgcttcagcgagcatcccaccggcgcgaccctgaatgatatcattcaccgtctccgtcagcggtttgagggaaactctctggcggcttgtctttttgagggatcgctttgtcacggcggatatttcactgaacatgctgaattctatacacgtcatttcttgctaacagaggcgttcgcactccccattgaagcggattttccctctttgacgcatgccaatatcccgttgccggtggtgagtgcgtgctatcagctcgaactcaagacacttattcctcaggctcaaaattttaaccattgcttgtcaaactttgcaggattaccacatggaaattattga

SEQ ID NO: 432012 - DNA, 1797 bp, Serratia marcescens
atggaaattattgattttttacgtcaaacgcagaatgatattcgaaaggaatatcaggagcagatggctcagccaggcgttgagtcgccttttcaggaactgatttttaccgatatcgtcatgcgtcacatggcagatatcggcatgacattcgacgatgccgaaacgtgccactttattgcgaaagtcagtgggcacaatgtgcgtctcagcggttatgccttctcagaagatagtgatcaacttgacctttttgtcagtatttatcacggcagcgatgagctttgtcatgtcccggatgccgagacaaaagcgattgccggccactgcattcaatttttgcagaaatgtgttgacggtaaattatcatccacgctggatcgatccaatgatgcctggcaactggtgacgaccatcgaacagtcctatacggaactagagcaaatcagaatttatgtactaactgatggtcaggtgaaaaaccgctggtatcagtcccgtgaggtggccggtaaaaccataaaattagaggttatggacattgtccgcctgtttaaccattggcaggaaggtaagccacgcgatgaactgcaggttaattttgatgaggtggcggggggggcgctcccctgtgtctggatcccggatgaaatgggtgagtacgattatgcgctgacggtggttccaggtgagacactgcgatttatctatgaaaaatatggcaaccggattctggaagcgaatgttcgctcatttttgagccagacggggaaagttaacaaggggattcgtgacaccttacgtgagcagcctgagcgttttatggcttataacaacggcattgtgattgttgtcgatcagattaggcttggcgaagcgccgggaggtggccctggtattgcgtggatgcaggggatgcagatcgtcaacggtgggcagacgacggcttccatgtttttcaccaaaaagaaattcccggcaactaatctgcgcaacgtgcgtgtacccgcaaaagtgattgtgctgaaacagacgaataatgcacaagaagagatgttaattgcggatatttcgcgcttctcgaatagccagaataaggtcaatatttccgatctgtcagctaatcgaccggtacatgtacaactggaaaaaatggcaaatacggtatattgcccggacggatacagtcgttggttttacgagcgagcaaacggtagttataaggttatgctggaacgagaaggtaaaaccccggcgggaatcaaacggttaaaagacgcaattccgccatctcgtcggataacgaaaacggatttcgcaaaatatcactgtgcctggctccaacgtccggatttagtcagccttggtggacagaagaactttgccgcattaatgacgatgattgacaaggatactgagcgttatggggatgagctgagcattgagagttttaaaaattacatcgcacaggccattttttataagaaagcctataagttgattcattcacttttccccgcatttaaggcaaacatcgccgcctatactgtggccgcctattcgcatctttatggcaatcaaacgaatctggtagagatctggaatcagcagggcattgatgaaaatatgggtaaatgccttgtcagcttagcccatcgggtgaatagtcttctgactgaatccgcgaacggcaggatgatttcggaatgggcgaagaagcctgaatgttgggactatgtgcgcaataaaatctatttctccacgtcgggaaaaacggatggcctctcacatgattaa

SEQ ID NO: 432013 - DNA, 1578 bp, Serratia marcescens
atgagtacaacttcattaccgattccaatagtagatctttttgccggacctggtggcttgggtgaaggcttctcttcgttgaaaaacgggaccgcgttccagatcgcagtttcagctgaaaaggatcctattgctcaccaaactctccgtctccgagccttctatcgattactctgtagtagtagaccaagcaaactgggtgattactatcgcttttgcaatggccaagccgaaaaaccatacagctgtgaaacagaagatctttggcataaggccggtaaagaagctatgtgcatagaaattggcagcgttgatggaaatgctactcttgatgcttcaattaaagcagcattagataaacgccccactgaagaaccctgggtgttaattggtgggccgccttgccaagcgtattcactggtaggtagagccagaaacaaaggtaacgctgactacaaggcagaagatgatcatcgccattttctctatcgtgaatacttgaggatcatacaaaactaccaaccggatatttttgtcatggagaacgttaaaggaattctctcgtcgaccataaatggcaaaaaaatattccatgaaatcctgaaagaccttgccaatccaaatgctgccttgagtgcagaaaaaaaaggtcagcgctatcacatagtgtcactcgtcagcgatcaagtgtttagtgatggtgatgatccgagtcagctggatctaacgaaatatatcattcgtgccgaagactttggcataccgcaggctcgccatagagtcattttattagggataagagaagatcgctatcaagacaagttgcccaagttgtcttgccaaaactcagtatcagtcgaagatgctattggaggtctccctgctttgagaagtttgttaagcaaagaaaaggactccaatactttatgggcagaactagttggtaaggaactgcaaacactggcagaggctgcatcgacatctgacgataccgtaaaaaatttagcaccttatctacaaaaaaccgcttccagcatcggctgcgtccaagccacaggaagtataaggctacctagaaaagccggttatttaggacaaacaggacatgataatctagatgaatggctattagactcctacctaaatgtctggcttaaccatgaaactcgtggtcatcgcatagacgatcttgcccgttatggttatgccgcaaccttcgcttctgttcacaaaagatcgccaaagggacataaggaatttaatttgccaagactcgctcctgctcataagaactgggagtcaggcaagttttcggacagatttagggttcaaattaaagataacccgtcgacaacgattacaagtcacatatctaaagatgggcactacttcattcattatgacccgatacagtgtagaagcctgactgtgcgagaagcagctcgactacagactttcccagacaactactttttccaaggcggtcgaacccaacagtaccaccaggttgggaatgcagtgccaccactgctagcaaataaaatagccaaaatagtttctgaaatccttcaaaaatga

SEQ ID NO: 432014 - DNA, 1065 bp, Serratia marcescens
atgaaaattatcgttaccggcggtgccgggtttattggttcggccgttgcccgccatattatcaatgataccgctgatcacattttggtgctggatagcctgacctatgccggtaacctcgaatccctggcgccgatcgccgatagcgatcgttactccttcgaacaggtcgatatttgcgaccgccaggcgttggatcgcgtgttcgccgccttccagcccgatgcggtgatgcacctggccgccgaaagtcacgtcgatcgttctattgacggcccggccgcctttatagaaaccaacatcgtcggcacctacaccttactggaggcggctcgccagtattggcacgccttggacgccgagcccaagcaggcgttccgctttcatcacatctccaccgacgaggtgttcggcgatctgcacggcaccgacgatctgtttaccgaaactacgccttatgcgccaagcagcccgtattccgcctccaaagcggccagcgatcacctggtgcgcgcctggttgcgcacctatggtttaccgaccgttgtcaccaattgttcgaacaactatggcccttaccatttcccggaaaagctgatcccgctgacgatcctgaacgcgctggaaggcaagccactgccggtatacggcaacggcgcgcaggtgcgcgactggttatatgtagaagatcatgcgcgggcgctgtataaggtggtcaccgaaggcgcggtaggtgaaacctataatatcggtggtcacaacgagcgcaaaaatatcgaagtggtgcaaaccatttgcgcactgctggatgagctggtgccgcacaagccgggtgatatcgcgcattatgcggatctcatcacctttgtgaccgaccgtccgggccacgatatgcgctatgcgatcgacgccgccaagatcgatgcggagttgggatggaagccgcaagagacctttgaaagcggcattcgcaaaaccgtggaatggtatctggcgaacgaagcttggtggagccgggtgaaagacggctcctatgccggcgagcgtctgggtttgacccgttaa

SEQ ID NO: 432015 - DNA, 870 bp, Serratia marcescens
atgaaaggcattgttttagcgggcggttccggcacgcgtctctatcccatcacgcgcggcgtttccaagcaactgctgccgatttacgataagccgatggtctattacccgatctcggtgctgatgctggcgggtattcgggatatcctgatcatctccactccggaagatatgccctccttcaagcgcttgctgggcgacggcagccgtttcggcatcaatctgagttatgaaattcagccgagcccggacggcctggcgcaggccttcctcattggcgaaacgttcatcggcggtgacagctgcgcgctggtgcttggcgacaacattcacttcggccagggcttcggcaacaagctggagtcggtggtgaagcgcagcgaaggggcgacggttttcggctatcaggtgatggatcctgaacgtttcggcgtggtggagttcgacgataacttccgcgcgttgtcgctggaagaaaaaccggccgtgccgaaatccaactgggcggttaccgggctttatttctatgaccatcacgtggttgagatggccaagcaggtgaagccgtcggcgcgcggtgagctggaaatcaccactctcaaccagatgtatctggagcgcggcacgctgaacgtcgagctgctggggcgcggtttcgcctggctggacaccggcacgcacgacagtttgatcgaggcctctcagtttatacacactattgagaagcgtcagggcttcaaggtcgcttgtctagaagagatcgcctaccgaaaaggctggttgacgcgcgagcaattggccaccgaagccaagctgctcggcaaaacgctgtatggccagtatctgtcgcagctgatcgcggaaaaataa

SEQ ID NO: 432016 - DNA, 1050 bp, Serratia marcescens
atgagcactgtacatatttgtcctctggataaatttattccttcattcattgaatttgtgaatgagaaattcgatcccgatgaacacacgttttgggtctatggcgataaggtgcgtttcgctttgccgccggcggacaacgttcactatctcggggcggatctgtttggtaacgtcaagccgacgttgaagttgatgacggccattcaacgtcacgagcgggtgattctgcacagcttccatggcatcaagatggcgctgttgctgctgttgaccccttgggtattaaaaaagtgctattggttcatatggggtggtgacctttaccaataccaaatcggcaagcgtaacttcaaatggcgcctgacagagcttctccgccgcccggccattaagcgtatgggcaactttgtcacttacatcaagggcgattacgagttggctaaaaagtggtacggctgcaccggccggtggcatgagtgcctgctgtataccagcaacgtatacaagaaaaacgtcatcgatgaacgtgcggcgggcgaggacagtaaaaccaccattctgctgggtaattctgcagatccaaccaataatcattttcccgcgttcgatatattggaaacgtacaaaaacgagaatattgagctcgttgtaccgctctcctacggcgataaacgctatgcggcagaagtggtggccgaaggtacgcggcgctttggcgagaaatttgtaccattaaccgactttatgcctttccagcactacctggcgctgctggggaaagtggatatcgcggtgttcaaccatcatcgccaacaggcgatgggtaacaccatttccctgttggggctgaaaaaaacggtgtttttgaatccaggcaccacgcagtgggacttctttcaagaaaaggatatccaggtattggatcttcaaacgttttcgctacgcagcctgagcgcggcggaaaagcatcacaacgagcaaaaaatcgaagcctatttctccgctgagaatcttaccgcgcagttaaaggccgtctttacttcctga

SEQ ID NO: 432017 - DNA, 1131 bp, Serratia marcescens
atgataccgttcaacaaaccaccggtaaccggcaacgaaattcaatatatcaatgcggcgttggagaatgggaaattgtcgggcgacggcccgttcggcaaacagtgccagaaatggtttgaaaacaagctggggtgcaaacacgcgctgttaaccccgtcttgcaccgccgcgctggagatcgctgcgctgctggtcgatatccagccgggcgacgaagttatcatgccaagctacaccttcgtcagcaccgccaacgccttcgtgttgcgcggcgcgaaaatcaaatttgtcgatgtccaccctgaaaccatgaatatggatgcagcgctggtggctgcggcgatcaccgataaaaccaaagccatcgtgcccgtgcattacgctggtgtctcctgcgatatggatgcgatcatgcgcctggccgaccagcataacctgctggtggtcgaagacgccgcgcagggcgtcatgagcaaatacaagggcgatttcgttggcgttaaaggtcacctggcggctttcagcttccatgaaaccaaaaactacaccagcggtggtgaaggcggcgcgctggtgatcaatgatgagcgttttatcaaacgcgccgaaattttgcgtgagaagggcaccgaccgcagccagttcctgcgcggccaggtggacaaatatacctgggtcgatttcggcagcagcttcctgccgggtgaactgcagtcggcttgcctatgggggcaactggaactggcggatgagatcaacgataaccgcctggcgacttggcacaagtactacgcgagctttgcgccgctggcggagaaagggctgctgacgttgcctactattccggcggattgtgagcataatgcgcatatgttctatgtgaagctgaaggatattgagcaaagaacgcagttcatcgctcacctgaaggcctgtggcgtgatggcggtattccattatattccgctgcactcggcgccggcgggcaaggtcttcggcaccttcatcggcgaagacaactacaccacccgcgaaagcgagagactggttcgcctgccgctgtactacaaaatgaccgatgccgatcagaataaagttattgaaagcgttgtgaggttctttgagtga

SEQ ID NO: 432018 - DNA, 1398 bp, Serratia marcescens
gtgaacgcccgtaagatcctggcgttcgccatcgggccgatcggtaatgccgcgctggggttgttgaccctgccggtcattacctggctgttttcggcggacgacgtaggccgaatcagcatgctgaacgtggccgtgtctttctgcgcgctgtttttcagtttggggcttgatcaggcttacgttcgggaataccacggtgaatccgatcgcgggcagctgttgaagaacgtcgcgttccccggcttgctgatgatcgtagtcatcagtgcagtgttcctgctgttccccggcagtttgtctgcgttgctgttcgaacagaaagacacggcgataagctggcttatcatgttgattcttttggcgtcgttcatcaaccgtttcttgtccctgatactcaggatgcaggagaaggggatggcgttttcgctcagccaactgatgcccaagctgatgacgctgatcgtcatcggcctgtgctacgttctgtttacccagcatacgctgatgcaactggtggtggcgaacgccgtcggttttatcgccgtatcgctgatgctgatgtggtcttcccgggcggattggatagccgcgctgcgcagttcgctggactacggcaaactgaaagcgatgctcaagttcggctatccgctgatcttgggcgggctggcgttttgggggttaaccactgtcgataggatgttcgtgcgagcctattccggctttgaacagttggctatcttctcggtggcggttagcttcgccggcgtggcgagcatcctgcaaagtgtgttctctactgtttgggcaccgatggtgtacaagctggcggagtctaacgaaggcggcgaacagcagatggtagccaaggtcacgcagtgcatgctgattgccgtggtttgcctgttcagcttgggcgggctcttttcctggctggttgactttgtcttgcccgctaattacgtgaatgtgaaatatattctggttgcgagtctgggattccctttgttgttcacactgtcggaaacgacggcggtcggcatcggcctgagcagaaagaccgcttacaccatgctggcttcgttgagtgcgttgctcatcaacgtggtggccaatgcattgctggtgccacgtttcggcgccggtggcgcggcggtaagcacctgtctggccttctgggcattcctgatcctgagaacggagttctcgattatcagctggaagactatgccacgttttgaaatgtatttcttcactttcctctgtctggcgggggcgtcggtttcagcgctggcaggcgagaaaatgaaatacgagctgtttatctattggggtatcttactggccgtggtgctggtgaggaacctcaggttccttaagtcgttcgccaaacgataa

SEQ ID NO: 432019 - DNA, 1197 bp, Serratia marcescens
atggcaaatccttatttcaacctgttcaacgccccgggcagcaaggcgttttcctctgccgggctgatcgcgcgcctgccggtctcgatgaccggtatcggcatcatcaccatgctctcacaggtacgcggctcttattggttggcgggcgcggtagcggcgacgttcgccttttccatggcgctgcttgcgccgcaaatcgcgcgcgcggcggatcgtcacggccaaagccgcgtgctgccgtatgccaccgggatcagcacgctcgccctgctactgctgttgctctgcacccactatcgggcgccggactggacgctgttcgtcttcgccgcgctcgcgggcggcatgcctagcatctccgcgatggtcagagcccgctggagcgaaatttatcgcggcacgccacagctgcacacggcattttcattcgagtccgtgttagatgaagtggcctttatcgtcggcccaccgatcgccgtggggcttagcgtttcactcttcccagaagccggtcctctggtggccgcgctgcttctggtggcgggcgttgcggcattcgcctcccaaaaaagcactcagcccccggtctacacccgcaataaccagcgacagcgcgccatcctggccatgccgtcaatgcagatcctgctgctggcgctgatcgccctgggcaccatcgtcggcaccgtggacgtcatcagcgtggccttcgccgagcagcaaggacagccggccgccgccagcatcgtgctgtcggtttatgcgttcggctcctgcctggccgggctgattttcggcgcaatgaagatccccgtccccttgcctcgccttttcttatacgcggcgttcgccaccgccttcaccaccctgccgctgctgtgggtgcacgatgtcttgacgctggcggcggcgatgtttgtcgcgggattgttttttgcgccgaccatgatcattgccatggggctggttgaaaacatcgtgccgccctcccggctgacggaggggttgacctggatggtcaccggcctggggataggcgtggcgctcggcgccgcattggcgggcctggcgatcgatgccgcagggatagcggccggcttcggcgtcacgctcaccgccgggctgatcgtgctgctggtggcggccggcggctaccgcttaatgcggcgaacgctggccttgaaagcggcgtga

SEQ ID NO: 432020 - DNA, 1737 bp, Serratia marcescens
atgtcgcgtactaaaaacaagatcctcgatcttaacagtgctttgctccagcagggaaaaacagctgcaggcactcatgcagaaacttcggcatcatctgcactgccagtgagtgatatgcccttggtgcttactctcgaccagctaagcgtatcgccgtacaacccgcgaatttcgaggaatcctgaatatgatgaaatcaaggcggggattagggttcgcggcctgagaactgtgccattagttacccttgatcctgaacaacccgaactgggttattttttcagtgatggtggcaacacccgttattcaatcttgcaagaattatggcaagaaacaggggatgaacggttttaccgcatttcttgtgttttcaagccatggcccggtcgtttgtcctgtcttcttggacatctggccgagaacgaacaacggggagatctggcgtttatcgaaaaagcgctggggatccgggatgcccgtgccctgtatgaagaaaaattgggtaaagctgtttctctgcgtgagctctcaagtttaatgagtgctgatggatatccggtgcatttctccagtatcagccgtatggaggatacggtgaaatacctatatccattcatgccatctcttcttaaatcgggattgggagccccccaaattcgtcaattgcttgctttacgagctgaggctgaaaaaacttgggaggaacatagtgttactgtcgaggttcaagaaccgtttgatagcgtctttggcaaagtttgcagccaatttgatgaccccgaaatttactctctggatatgtttcgtgatgagttgattggtgcgctcatcaacgcgttgccacacccgttgctcaattatgaccgctggctactggagctcgatcccaaagagcaaaaccggcgcaagcacctcggtgagcctgagccggcattaacgcctgagctgtcaggcgaaggcaatactgtcgaactggcgccagcactgcagcagggaaataccggcggcccgacggtacctgaagtacagggagaaggctcttctttggtgctggacagcgcgttgcatgaatcaacgagagatgccgatgatgaatcacagaacgctcatgaagaggaaacgcctgcaactcaaactgaacgccgtgttgaaactcagcctgacttatatggcgcgcctccggtgttgtcgggtgacgttgaaacggctttagacggtgagaataccacagcccccctgccggaccctcatgagccgacagcccctcacagcaataccgtgacacagccaaagcaaggtgcaacccctgttgcagaggtgccttttgccgaggtaggacttgagccggtctcctccatttgggctatttctgccctgcaggatgatatcgagcacctgcaggtgatcaccttccgattggcattcgaactggccgaagtggcgggctgcgaggcggaaatcaaagccgataaagccgacttgcaggctgccggctacgcattgactgccgaacgtccctctcgctttaccgcgttactcctgacccttgccggcaacaacctggacggtgcctcatccagctcgctcaatgaagcccttatcggttcggaaaatgcggctgactggcctttgcttgacgatattcatgcagtgaaattgatgcgcctcattcgtgttttgcgtcgtttgcgtgaactgcagcgtgacttacctgcaacagaggaggcagtctga

SEQ ID NO: 432021 - DNA, 645 bp, Serratia marcescens
atgaaaaaaacaattctcgtctcttccctggcagcactcatgctgaccgggtgcgttactcagcagccactgcagcagcgcgatatttcccctgtcacgccttcggttaccgtcacccgcaacgttcaaccggtcagcccggatgcttacgggcaggtgcctgaggtcgtgcgctacgaccgttatttactggtcagcaccgacccggcggccgttcagcgtgatccgctctcgcaaatcatcgatatccgtattccggcatcagtaaaaccgacggtggctgacgcgttgcgttatgcgctgcgccagtcgggctattccctgtgcgcgaccggccctgcaaacggcgtgctgtaccgccaggcgctgccggcggtgcagtaccaactggggccgatgcgtttgcgtaccgcgctgcaggtactggcaggccccgcgtggcagctcgaggtagacgacgtgcaacgtgttgtctgccacagcctgcgtgacgggtatcagttgccggcgacacagctgccgccggtgacggtggttccggccagggcggtttctgcaccggtttcagcgcatcctgctgcaacggtcattgcacctcagccagttaacgcggtaccggcaaccggcgggtggctgaaaaaatga

SEQ ID NO: 432022 - DNA, 774 bp, Serratia marcescens
atgaacgacaagccttttattgagcgcgtgtcagcgaataagccggcctgggccgatacgcagattgagccctggagtcgggttgggtaccggcaggccgaagattttatcacccgtcattactggactgatcgggggagccttaatgtgttccgtatcgtgggcaccgaccacccgcagtatgccgggatgagctggcttgacctgttgcaccggggcaaacgcatggatatcaacatcccgcttattgaaagcaacccggattattacaccgaagccacacaaccccataacggaatgagttttgtcagcctggacggactggactggtatgttagcgcggatggcaatcaccgcagctgcctggcgcgtttttatttccatctgctggggtatggcgtgacgcaactacacaatgtctctctgagccagtatcaggtcgaccacgcctttatgacagcgtgtgaggccctgtcagcgatggtgtcggtattgcggtcgcggggcgtgtatctggcactgtcagcacgccgggtgtcggtttcccgtgatgatactcccggctggaaagtggatacctggcataccgatgttacggtgacgctggatgatacgaccggtaatgacggggagcagcggtttgtcctgcatcaggccggggacgctgagcagttacgtcgccagcttgaaatccggtacctcgaaccgggtgccacatcgaagacagtttcctggtggaagcgcctgtttgcgccaggcaaggagggggcatga

SEQ ID NO: 432023 - DNA, 426 bp, Serratia marcescens
atgcggaaaaatctgtttaaccgagtcctggcgaccgctgtcattgtcagcgtcatggcgttggccggctgttcgacgtcgaaagaagaaatgctgccgccaggcgacagctcgatgctggaattgtggcagggtgaagacggtggcggttcagcgcgtaatgcggtggcggcgcgcgacagcctgcgccggccgctcaccgagaacgaaagccaggcaacagccgcaagcgatcgcagctacagccgcacgcaggaaagcgaaatcagccagcagttcccgcgcctgccgaatcccgatctggtgatgtatgtgtacccgcacctggcggatggtaacgcgccggtgccggggtacagcaccgtgttcccgttctacagtcaggtgcagtatgcgatgccgggtgaacggacggaggcctactga

SEQ ID NO: 432024 - DNA, 807 bp, Serratia marcescens
atggatatttcactgcttacaggacaacggactaacgcctggtcagcaaccatgattaatctggaagctcgaaaactcattaataccgcgaataccgtggcgtctcaccatcttcaggatgggctcacaagaatcaagttcatggaagatattaaatccttcatatcacagcaattttatcttgctcgccaggcaaaatctgaagaggaaggaatttcctatttaaagaacttaagagcagaaaatgaaaatcttctcgagcaagatcgcttactcagaacaaaggccgccaaactgtatgcaaaggtagaatttatcaaggaaaacaacaaagtcgtgggttatgccatcacggctgttaacgtcgtcctggccggtctggaagttgtaggtggatttgcaatagcagcgacaggaacccctatcggcgtcatggcgggagtaatacttatcgctgatggcttcaatacgctttcgcgtgaattcgatcagcaagtacaaagtaaacctgattctgaagggatcctcgctaatggtgtcatggcaaccgctgagtttatgggattcagccgagatagtggtctcggtgcttttaaagcagtaaccctcacagctaacgcttacagcatattcggattactcagaagacctggaacatggcggctgttccactatctaccgactgatttttatcgcaaggtcgaaaccatgaacagacctatgttgacaatgaaaatagtaggctatggacttaaggcaaaagttgtattcgatttaatggcaccgacagcagactcagctcattga

SEQ ID NO: 432025 - DNA, 612 bp, Serratia marcescens
atgtttagagggataattaagaggtttagtaagaaagtgaattatgagactgaattcacttctgctgtgaagcgctccaggaattggaagcttgaagtgcctgatattaaattgagtaaaactccatttctgactggggacaaagctgaggctgcgttaaaagttatacagagtattgcttcaaagcatactccagaagaagtttcacaacaatgttttggatatatgtatttcgttcaagatgcattagaggaagctttgcaaactccgctttattatactttaggttatattgattatgaaaagagacccgttttttatacaagcgagaaagggttgaaaagtaaattggggaatccgatgtcaggtgttggggcgataaatttacatgcatggctgacgacgccatatatggaaattatcgaccttacgtttgccactacatatggaatcgtgaataatatcccatcagccattggccgctgttcatttcaacattactctgaatttaatgaaaacatggtctatcatcctcagttaattggcgaggattatttgaagcagatcggtgccttcgtcgattttagggcattaaatgtatttgtaatataa

SEQ ID NO: 432026 - DNA, 150 bp, Serratia marcescens
atggtagccgacgtccgggctcgtgagagcgcggaatattggtacagctgggattggtcgctaatggcgacgaccatcaggtataccgggctcactatggcgagcaagcctactaaggacaggatcagcgtcctggccatcatgaggtaa

SEQ ID NO: 432027 - DNA, 243 bp, Serratia marcescens
atgaaaaagtataactttatctacaatagcgaaaagttcttactctgtgatgaaagtaaaaaaaatgaaagtgaattggagacgctaatggggaatgggtttcaaaaattggaagttgaggctgaatcaaaaaaagaagccgtgaaaaaatttaaagaaaaattaggagagaatagtaagtctctcgaagagtatacaaaggatatctcattcacatctattattgaagcatttttaagataa

SEQ ID NO: 432028 - DNA, 1335 bp, Serratia marcescens
atggagaaaggtgcactaagtattaattcgataatgaaagatgacaatgatgatggatgttttaacgaagcaataaatattatagaaacgaaagggtttaagagagttaaggttccggataatatccactttatctggattggtgatctgcaactctcaaatatatcatatataaaagtatgggatgatattaataaaaataaatcggtatttttatggatagatatctcctcctcgtttgttaatttattccaacaatctttaaaatcatattgtgatgacggtgggaaagatatattttacctccgtaacaaagcatttgattacatttggcctaagataaaagagggtgagacgtttaatgatgcggcgagtgaatttcttgatacgataaatcatgagtatgttgaggacggtaattctagcaagcatatacctgaaagtattaagataatgaatattcaagaactgtttagtaatgagttcattaggtataaaaagttttactattatgagttaatattgagaaataatcttgcatgtgcaagcgattttcttaggcttttggttttacacaggtatggcggtgtgtatatagatatagatacactaccttatattgacaatatttatcagaacacaaatgtcctcttggataagcttaatatacgtcatgatgaaaacgtttacttagctaagtcccacgccttcttatgtaaatttaagtatgtaaatgacagtttgacgggttgcaaaggctatttaaaaaatatcgagaacattaatgatttagagattagtaatattttttatgcaataattttagacgtcaacaatgttgattatcctcagatctcttctcttggtgatatttatgtttacgataatttaatatcaataagtacagtggaatttataaatggggtcttttttaataacataattgcgtctacaccaagttctcattttttaaaaaacttacttaaaagagtagcgtttaactatagttatattgaaaaaaataaaaaaatatttgagggtggttccttgatgccttcttttgagggggggacttcggcctttggcttcttacttaattataggcgtgatgtaatttctgaaaatgaattcgtaacattttatttggccgggccaaagttaatatctaatacaatatatcgagttatttgtgggcttactggattacataggattttatcaatcgataaactcgccaagcttatgcaaaatgacgtcatagggataggattccaaaagcaaactttagatacgcctttaggtactaaatccgcttggagagaaagggatgaataa

SEQ ID NO: 432029 - DNA, 1011 bp, Serratia marcescens
atgaataaatctggaataagtgcattaataatcgtatgcgatgctgaagattcaatattaagaactataaactctatcattgatgttatggatgaagttatcatcgttgatactggctctgtcgacaatacgctaaatgtgatacctaaagataacgaaaagatcaaaatttttggttatcgatgggataatgatttttccgaaccgcggaattatgcaatagatcttgccacaggaccctattgtattgttattgatgctgacgaatatctagctgagagctgtctaaatggatttagagataaaatatattcactattttgtggagaggaactaaccctatatgcgccagctatagataacatgaatggctctgtattaaggaataatgcaaggatttttatgaaaagggcctctttaagatataaaggatttgttcatgagtatctttatgaagataattatactataaagtacacacctgaaattatattaaagcataccgggtatttagaacatagagaattagagggtaagaaaaatagaaacttacgccttttgaagcgtcagttggataagacaccaacagaactaagatggaaatatttcatgcttagatatttagaatcacatgataaacaatttgaagatattctcaatgagtttggtaggttatccctgccttacaatcgtgatatcgaaatatatgcacttaacgtaaaatcgagactgataacatacctcttagataaatctaattttgttgatgcatattttcatgctgatgagcttttcggaatctacaaagataaaaatagtttcttgcttcattttatttctctctacttgatgtcaacccaacgttaccataatgatatgcttaatttgagagaagagctcaataacattactaattatcctcatgacgagttcataattgaaactatagatgaggaagctgtgtcagcaatcatgaatagttttctgctagactttgattacataacttga

SEQ ID NO: 432030 - DNA, 2100 bp, Serratia marcescens
atgagtaggtattctctgaaaaagctgttaagtcagctggatatgcggctacgcagccgtgttccattagttcatcaaactgaatcctctgaatgcggtttggcctgcctggccatgatttgtggtcactatggcaagaacattgatctgattgctcttcgcagacagtttaatctttcagcccgcggtaccacactatccggactgacaagtattgccgaccaactgggactatcaacccgacccttgtctctggatctcgatgagattaaggccctcaaaatgccgtgcatactacactgggatttcaaccattttgtagtactcatcagtgttaaccgtaaccacgcaatcctgcatgacccagctcttggataccgttccatcaatctgacagaactttcacagagttttaccggtgtggcacttgaagtctggccaggtagtgcgtttaaggcaaacactgtgcgtaataggctcagcttaagaacattaataggcagtgtgcatggactcaagatgacgcttggcaagatttttttcttgtctcttgtgatagaaaccatcaacctgatgatgcccgtaggaactcaattagtgatggaccatgcgatccctgcaggagatcacggtttactcactcttatttgtataggcctcctgttatttattctacttcgtacagcagttagcatatttcgctcctggtcttccctgataatgacgacactcatcaacatccagtggcaatcggggttatttaaccatctactaaggctgccattaagctatttcgaacgacgcaaactgggtgatattcaatcccgatttggctcactaaacactttacgtgagacatttacgagtagcatagtaggggcgctaatggatggtatcatggtgttcggtgtaatcgtgatgatggcgttatatggtggctggctaacttggtttgttattggttttactacaatttatgttcttattagacttctaacatatggaacatatcgacaattgtcggaagaagcgttagtcagggatgctcgaacaagatcatactttatggaaaccctatatgggatcgcaacggtcaagatgcaaggaatgagcgaacgtagggccgctcactggctaaatttagaaattgataccatcaacactgaaataaaaatcaccaaaatggatctgttttttggtggcataaattcatttatcggggcttgtgaccaagtgataatcttatggttaggtgcaagcctagtgattgacaaccaaatgactataggcatgtttattgccttcggtgtattcagagagcagtttgcagatagagtttcctcactaactagctttcttttgcaattgcgcatgatgagcctgcataacgagcgcatcacagatattgctatacactcgcaagaggctagaaaacctgatgtttcgataaatgtcgccatgcgccctgtttcattagaagcgtataacttaagttatcgctatgatagccagtctataccagtttttactggcttatttatcaaaatttcacctggagaaagtgtggcaattacgggaccttctggggctgggaaaacgaccttaatgagagtattgtgtggattattcaccccagatgaagggaaagtgattatcgatggcactgatatacagcagcttggtattaataattaccataaaatgatcggttgtgtaatgcaggatgataaattattttccggctcgatacgagagaatatttgtggatttgatgataacgaaaatgaggattggatgattgaatgcgctaaggcaagttatattcatgatgttattatgaaaatgccaatgggttatgaaacattaattggtgagttgggtgaaggattgtcgggaggccaaaaacaacgtatatttattgcaagagctctataccggaaacccggtattcttttcatggatgaagctacaagctcattggattttgaaagtgaaagttatgtaaaccaagcgataaaacagttaaaaataaccagaataataattgctcatagggaaacaactattgcatctgcagacagagttatatcgttaaagtaa

SEQ ID NO: 432031 - DNA, 1275 bp, Serratia marcescens
gtgtttcgccaggaagcgattgataatcagaaaatgaaatggcgtggtagagccctccttctccccggtgtacccttttggcttacggcagggctatgtctgttttttctcgtcgcatttttcacttttgttatcgccggtaactatactcggcgggtcaacgtgaccggcgaggtcagcacctacccacgcgccgccaacgtctattccaccgttcagggcgtagttgtcaaacagttcgtcaccgagggccaaatcatcactatcggtgctcccatttatcaaatcgacgtcagcaagagtacccgcagcggtgtggtcagcgacaaccagcgccgggatatcgatagccaactggctcgtatttcacagatcatcaaccgacttgaaagcagtaagcaagccacaatttccatgctggaaaaacaaaaggcgcagtatgcagccgcattcgcgcgctctaccgacatcctacgacgggcccaagaagggattcgcatcatgaaggacaatatggaaagctaccgtcactatcaaaccaaaggactaattaacaaggatcagcttaccaatcaggtggcgctgtattaccagcagcagaacaatttgttgggcctctctagccagaacgagcaaaatgctctgcagatcaccgctctggaaagccagattcacactcaagccgccgagtttgacaatcagatttaccagatggaactacagcgttacgagttgcaaaaagagctgctaaacatcgatgctggcggggttatcatcgtccgggcgttgactaacggacgtgtcgattcactgagcgtcacggtcggccaaatggtcaatgtgggtgacagcctgcttcaagtgatcccacacgatatcgatcactatgccttggtgctctgggttcccaacgatgccatcccctacattaataccggtgataaagtcaatttgcgttatgacgcctttccgcctgagaaattcggccagtttgccggcaaggtgtccctcatttccaaaaccccggcctctccacaggaaatgctgacctatcagggagcccccaaatcagcgctgactagtgccataccgtactacaaagtgatagtcagaccagagaaacaggccattgcctacaacggcaagagtctgagtttggaaaatggaatgaaagtacagagcaccttgtttctagaaaaaaggagaatttatcaatggatgttatcaccattctacgacatgaaacacagtgcaacggggccagtcaatgagtag

SEQ ID NO: 432032 - DNA, 1785 bp, Serratia marcescens
atgaagctgacgacctttaagaacggcagcaggctggcgatcccggccattttcgccgcgctgtttttagtggcttcgaccgtcacgctctattactacagcgccaccctgtcgaagaaagggctgtatgccatcgccggcacgcaggagaactactcctggtcaatcgccaagttctccatcaagctggcggagttcgacacgctggtcgagcagcaaagccacgccgcgcaggtggacaacgacaacctgcggctgcggttcgaaatcctctattcgcgtttttacgtgctggaaaccgtctccgaatcgacccagccgctgtacgccgagccgggctacccggaagtggtcaaacagatgcgcctgcagatggatcgcatcgataagctgctgagcagtcggaaaatcgacttcggccaggtttccgcggccatgagagccatcaagccttacgccatcgaaatggccaacctgaccgaccacgccgaggtgaagcagcgcaccgccgcctatgaggattacatcgagaaacggcacattattttctatgggctggtgatcgtcatgttctcggtgatcgcgctgatcgccatcaccctgatcgtgttccgtcagcagcggctgaccattcgccagcaggccaaggccatcgaggcggagaaagcgacgcgcaccaaaaacgccttcctcggcgccatcggccacgagctgcgcacctcattgcagagcgtgatgtcggccatcgacgtgctggtgaatacccgggtgtcggctgagcatgcggacaccttccagcggctggagaccgccgcgcagcaaatcgaaagccagatgaaagatctgaccgactacgcgcacctcgacagcggcatgatggaattgcgcatcgtgccgttcgacgcgcagaagctgatcgcggagaccgccaacgaaatcgccaccctgacccgcaaagagcaggtcaaactgagctgtgaagtggaatgcagccacctgctggtgcactccgatccgctgcgcatccggcagattatcgtcaacctgctgaccaacgcctacaagtacaccgaaagcggcagcattacgctgcacagctgcctgcgccgccagccgggcggcagttcgttgattatcgaagtgaccgacaccggcatcggtatcgaaaaagaccagctcgatcagatcttcaagccctttacccagttggatcagtcgcataccaagcagtatgccggcgtcgggatggggctggcgatcgtgcacggcttggtgacattgctcgacggcaccatcacggtgtacagcgaaatcaagaagggcagcacctttatcgtcagcattccggtgcagatcagtgaagacgaacgcgccgacgcgcccgccgccgccaatgcctctctgcagcagaagccacagcaggtgctggtggtggatgacaacaagtcggtgggtgacgcctttgcggcgctattggacaagctgggctaccagcacgaactgtgcgactcgccggagcgcgcgctgcagaagctgctcagacgcccttacgacgcgctgttgctggatctgcagatgccgggcatcgacggcgccgccctggccaggcagctgcgcaaccgccgcggccccaaccgccatgtgccgatcatcggcatcagcgcctacacgccggagcagctgacggcggatcagcgcgccctgttcgataactacctgatgaagccggttcggctggatgcgctgtcaaacgcgctggccgaggtgttccccgctaaagattaa

SEQ ID NO: 432033 - DNA, 156 bp, Serratia marcescens
gtggttatcgagttcaacctgccactgctggaagagaaagccaagtctaccctgacgccggtcgttatctccaacatggacgagatcaaagagctgatcaaactgtccggcagcgtgaccgttggcgaaaccccgatcatccgcatcaagaagtaa

SEQ ID NO: 432034 - DNA, 147 bp, Serratia marcescens
atgcccggcgcccccatgtcggtggcggtggttttcagcacttccgccacctgcgcgccattcagatacgggaaacgctccatcagcaccgcgacgctgccggccacgtgcggcgccgccatcgaggtgccgctgtatttggcgtag

SEQ ID NO: 432035 - DNA, 228 bp, Serratia marcescens
atggtcaggttgctcggcgccaggtcggcggagccgcccaggaactccggcagcaccttgccgaacgcttccagcgcgttctgcgacgccttgcggctggcgatgttggccgggttggcctgcagtttttccacgaacgccttggcgtcggctttccagtcggccggcagctcgccgttcatgcggcgcttgaactcggcggccagctccgggaaggccctggcgtag

SEQ ID NO: 432036 - DNA, 1299 bp, Serratia marcescens
atgacggtggtgcagtcttaccaactgctggagagccaggggtggatcgtcgcccgcccgcagtcgggctactacgtggcggcgcgcccgcagccgctgccccagccttcgcgcggcgagaagctgttgctgagcgagcaggtggacatcaacgcctttattttcgacgtgctgcaggcctgcaaggatccggatatcgtgcctttcggttcggcctttcccgacgccacgctgttcgcccagccgaagctggcgcgcgcgctgagcagcgtggcgcgcaagttcacgccgcacagttcgctggccaacctgccgccgggcaacgacgcgctgcggcggcacatcgcccaacgctatgcgctgagcggcatgcaggtcgcgccggacgaaatcgtcatcaccgccggggcgatggagtcgctcagtctcagcctgcaggcggtgacccaaccgggcgactatgtggcgatcgaatcgccggcgttttacggcgcgctgcaggcgctggaacggctgcggttaaaggcggtggcgatcgctacgcatccgcaggacggcatcgatctggacgcgctgcagcaggcggtggaccagtatccgatcaaagcctgctggctgatgacccatttccagaacccgcagggcgccaccctgccggaggccaacaagcaacggctggtgacgctgctgcgcgaacggcagatctcgctgatagaagacgacgtctacggcgaactgtacttcagcgcggaacggccgctgccggccaaggcgctcgacagcggcggccagatcctgcactgctcgtcgttttccaaatgcctggcgccgggctttcgcgtcggctgggtggcggcggggcgttatgcgcagcagatccagcgtttgcagctgatgagcaccgtttccaccagcgtgccgacccagatggcgctggcggattatctgctgcacggcggctacgatacccatctgcggcggttgcggcgcctgctggcccagcgccaaagcgcgatgcgtcaggcgatcgcccaccatttcccgccgacggtgaaggtcagccagcccgacggcggctacttcctgtggctggagctggatccggcgctgtcgtcgatggagctctaccggcgcgcgctttcccggggcatcagcatcgcgccggggcgcatgttcaccaccggcgaccatttcaaccactgcttccgtctcaacgcctcttttgaatggaacgaccgctttgaagaggcgatcaaaaccttagccaagcttatccgggggctagcggcggcaggctga

SEQ ID NO: 432037 - DNA, 1518 bp, Serratia marcescens
atgatgtccgggttaattaacacgcaccatgcatccgtacatcattttctggaaggtaatcaggaccatgatcgccgccattatttcggcggcgtcagtaatctatttaaactcgaaggcgctatagccagcctgaatgcaaccttctggcaaaaagcactgaacatgaccgatgtttacgaatacatgccaaataatcggcgtactgagtggaacgagcaaatacgggaaatgaaaacacccgatttcgaagaagaaactgtgcgaccaacaataatggaactgctgaactcgcggcagcaatttttttctgagcgcgtagacggtattttccgcgctctttccggcaatcacgtaaccaacagaccggaaggtttcggcaagcgcatgatccttgcccgggtgttcaccgattacggcatgacgaatcacgatatgagcggctatatccaggatctacggcaggttatcgcgaaatttatgggccgagatgaaccccgctggcgcgtgaccgacgatgcgctacaggaagcccggtaccgccacggtgaatggctggtgcttgacggtggggcattgcgtgtacgggcctatctgaaaggcacagcacaccttgaagttcacccggaaatggcctggagactcaactgcattctggcgcacctgtatccgatggcgatcccgcctgaattccgccaaaaacccaagaaaaagcttaaagatttcgtgctgatgagcaagccactccccttcgccgttctggaagtgctggcggggttaaaggcagaacgccacctgccgattcaacgcaatcgatgggacgattggacacaaccgctcactaccaacccgcacaaccgtcgctttgactggcgagacgaagacaaggcaatacgagggcaagcgggcaaagtattggaaatgatcgggggtgtactaatcaaagctggcccccagaaaagcatcaacatctgggagttcgattacgatcccgcccgagtgctgggcgagataatcgcttctggttgcattccagaccatcaatcgcaccagttctaccctaccccggaatcactggctgaatgggccgtatctgaggccgaaatacagccgggggaaaaatgcctggaaccgagtgctggcaccggaaacatcgcggtattcatgccggcggatcaaacctgctgcgtggaaatatcagctctacattgtcgcgtactggaagcaaaagggctaaccgttgagcaagccgattttatcaaatgggctgagtccaccaccgagcgcttcgacaaggtggtaatgaacccaccattcagcgaaggtcgcgccaaagcccacgtagaagccgcagcaagcctggtaaacgttggtggccggcttgtagcaatactgccaagtgggatgcagaagaaagacattttacccggctggtcctgttcatggtccggccttatagataacgagttcgacggtaccagcgtttcggttgttctgctgaaagcagaccgtaagtga

SEQ ID NO: 432038 - DNA, 828 bp, Serratia marcescens
atggctaactctataaacaagcttattgatgacaaaataatcaagcgcggaaagaacggtttactaatccggctggacgatattcacgttcaggaaggtttcaataaacgtgttgaagacgagcgcactctggctgctgatgatgacctattcaatcacctatcagcgggtaagccagttcctcctctcgaggttcgcccacgcgatgagggtggcgtgtggattgttgaaggccacaggcgtcatcgagcctatatacgttgtcgtgatgccggtaagcctgctgaatggatagcaattatgccattcacagggagcgatgtggagcgcatagcacgcatcatgaacagcaacagccaacttgcgcttactccctacgagcaatcgcgggtcgtcaaagaactggccggatttaatctttcccctgatgaaatcgccacgcttgttggaaaaagccgaacaacggtcgataagctcctggcgttgagtcagaccaaccatgatgtgcaaacactggtcaaagatggtgctgttgccgttgacgctgcccttgagcgcgtgaaagttcacggtgattctgctggaaagattttagcgaatgacgttgaaaaagcgcggactcagggcaagaaaaaagttactaaatccgttatcaaccgtgagttcagcgccaaaaaagcccgccgactatgcgagcttctttacgatgctgccccaatgacccgcgaggaaggcgacgttttactgctggcaaagggaacgcgtgaggagattaatgccatcctaaacgattatcgccggttgggagagaatacagataatgggtga

SEQ ID NO: 432039 - DNA, 327 bp, Serratia marcescens
atgaaccgtgaagaaattattgaagcaatcgcatcagcctcagagttaagccaccgcgaaggtcgcgatattttcgccagccggatttactccatgattgaaactggaaaaattccaggggtaatattagccaccactgatgtgcaacagttaatgcaagaaaacaaagcaatgcgaaaagcgatcgcatttgctatttcccctggcatatggattcaaagagaggatgaaatattccaatattgcggtggcacttggtatgcagaaatactgaaacagtctatttgcaaggataacaaacttgaaatgaatgaaggtgggctgtga

SEQ ID NO: 432040 - DNA, 564 bp, Serratia marcescens
atgaacgctcgtacaatcgacttagccttagaaattagcaaactggagtctctcgcagctgaaggtggggaactcacccctgaaatgatcgccgataccctcgaaggcattgaagggatgatggaggataaatttgatgccaccatgagtgttattagagatttcgaagcaaaggcagatgcctgtaaaaaagaagcagctcggatagctgaacgtaaaaagcattgggaccgtcagtcttccgcacttaaaaagtacctgctggagtgtcttcaactttcagaacgtacaacatttaaaacaacgttgaatacctttactgcccgaaaaggtagcgcaagccttgttattgatgacgttgatatgctgcctgatggattcgttgaatcgcatactgaagtcattaacgatgtgcagaacgacaaaataaaaaaagctcttatggaagctttaaaaacagtggaagaaatgaagaagaaaggcgaagtgccaccaccagaacttttaaatcctgtgccaggcgcacacttagaaataggcgcaacaacactccaagtgcgctaa

SEQ ID NO: 432041 - DNA, 2382 bp, Serratia marcescens
atgtctgacaaacaattatatacagcatgctggtatcccagcgaacaaacagcagaagaaaatggtgctcgtcgcgttgcttattccttctatgcagctaacgagaaacaagctcgagccaaagcaacgcttcattttatggagcaattccctgatgccgacgatgcagagttcgagttaaaaatttacgttgtgcaggaaggaatcccctgccctgaggtcgagacttgggatgaaggcttcttatatgagaataactggaatgacgagctgggttatccagaatcaaaatccgataacggtctcattgatttcagtaaattgtctgagtcacttcgcatcgatgtattggtgaaataccacacgaccgaaattaccaatgaacaactttccggcgcactagaagccccggaggatgcagcgagtaactttgacagtcatattgccgacgccattaaaaagacgccagcagttgcgaaaatgtaccctgagcgaatcttagacgcgatcgattatatccgtgagaaatgccctcctaccaagaagtggcctgagataaaagcggttctggccggttggctgaacaagcgcaatgacgagcgcaaagaagaagcctccacgtcaggattgcaaactgtgagtgcacagcagaacgcgaccgatgaaacgctgcgtgtaccctctggcgcgactgccggcggcggtaatctgacagaccgaggtgagggttttaagcacgattttgattcactcgcgcttgaaatcgcccttggccgtatagcgcggtctatggatttcgatatctacaatttgcgtagtgcgcacattaaccgtgctcgcgaaatgatcaaactaaaagagcgcccatttcccgcgctgtttagcgcataccgtaatatgccgggcgttctggactattcacgcgccatcattatctactcggttaaaaccgcgccggacaacatcgaggccacaccagggaaattgaccgagtaccttaataaaacgctgaccgaaaccgatcacgccaatcctgacccacacatcgttgcggttgcctgtggtatcactggtgagaattataacaatgaagaaaccgaacagaactcggcgagcgctacttgcgcactggctgatgagcaggcagcgatcagcacagtgggagcacaacaaccagatgcgaacactgcgccggaaaatctggaagatggatcaccggtagagcgcaccgggccgttttactaccgcacatctgaagggcaagttggccgcgcaaataaacttgcgaagctggatctcgtactcgcccaagggtgtgaggagatcaccaaagaagaataccagtcgctgaaagacaatccaccggcacagcgtcaaagcaaggacgaacagcaattagcaaagaacgatcgtaatggactctattctgttgaagaactaacaggcgagcaacaacaaacccaaggcgcagcttcctcaaatgagggtgaaaaaaaggaagtgctcccagctcaaccggaaccacccgtgttccagtctatcgctgccgatctggaaaatgacctcgcagaaaaaggcgataacctgaaaatttggcgcagtgtcatgcgtacagatcctcgctatacgaaggatttgaccggtgcaggatttgaaggcacaagcatcaacgccgaatacatgattatgcgtgccactgagatattcggccctattggcagcggctggggttatgaggttctggaagatcgcatgatccctggtgctccaatgagcgaagcgatatatgaagggcaaaagttcattggaaagcgcatgttgcgcgatgcagatggcaccctgatcactgagctgaatcacagcatcaagatccgtctgtggtatctaaatggtgccaaagaacgctgtgttgtcgaagcctacggcgctactcaatacatgtatatgacgtcgaaaaacatcattaaatgtgatggcgaggcgcaaaagaaatctctcacagacgcaattaaaaaatcgctatcactccttggtttctccgccgatgtttggctggggctttacgaccaagctgaatataagcaagagaacgccatccggttcgacctcattaatgccagcgataaggccgaggacgtaacacttattcgtaaagaactggacgagaaatttaaagccaacaccaaaagcatgcgtgaagcagttacaccgaatgagatttctggcattgcttcatcgctcactcgagtcatgggcattcacctaaaagatgctcgcgaaaggggtgacgcagaatacgccaaatacattgaaggccgcttgcgccgtctcgaagaagttaaatccgaatgcctcactaaattgcaggagaaagccgcatga

SEQ ID NO: 432042 - DNA, 264 bp, Serratia marcescens
atggatattacgcttggatttaaaaaactatcgctaattaacggtgaggaagtcacggtaagtatagcccctagcgcaatgaagaagatgatcatggggcttctttctaatggttatcttaccactgaggatctggcaatttacatgactgagcaattatctatttgtgatagtcaaagtctcaagcacgtattaccagaagataccgcaaagaaattaatttcgacctatgaatccgtaaaaaatggagagaactatgtctga

SEQ ID NO: 432043 - DNA, 234 bp, Serratia marcescens
atgtacacaaaggacgcacttaaattttttaaaagtaaaagcaagctggctttagctgccggcgtaagactcccaactatttacaaatggggggatcttgttcctgaagggcgagccatgcgcctgcaaacggcatccaatggcgttttggtttatgacccgctcgtttatgacagtcatgctaaagcaaagcgcgaaggggaactgaatcatgaaaatcagtcctccgattga

SEQ ID NO: 432044 - DNA, 381 bp, Serratia marcescens
atgaccagagttacagcaaagcagcttgtggagcttattcagggcaaagaactgagcaccactgaaattttcgcagcggtcaaggctgcacatcctaccaacacaatgacgcggcaagagttggtgattcggttgcggtcgatgatcatatcgccggatgtagaaatcaccaagcgaggacgggggccgaaggcgcggtacaagctgatcagcgcaaccgataaattcatcgaacgggccgaggtgaattaccacgcgagcactgtaaccggtatacaggataaaaccttgtggcatttcaattcacttgagttgcggttctgccacatccacaaaatgtttgatcaggcgctggctggcgtgcgtgggaggactgtatga

SEQ ID NO: 432045 - DNA, 201 bp, Serratia marcescens
atgaaaaactcattcgctaactttgttaatcaaaacttcaagccaggaagcctgcgttacttcgatgaagaaattggtgcgtacattgtttcagagcctggctcaaagcaatacagctcaacggcaatggcggctactgaatattttaatggcatcgaatggttgccggtagacggcgatgaggagttccagcatggctaa

SEQ ID NO: 432046 - DNA, 138 bp, Serratia marcescens
atggctaaccgcagaccgcggctggtacgcggggtagaaatcaccacagaacgcgacatgtggcagcagagcaaacattatcgttttcgttccggtatgtactatgggcggatcagatatgtggaggtaaaatcatga

SEQ ID NO: 432047 - DNA, 642 bp, Serratia marcescens
atgaagaaattcaccgacatgcaggttttatggttaaaagaaaattgcaacggtctttcatatcaggagttaacagaagcccttaactacagatttaattgcaatcacactaagtcatcggttcgtaataaaattgtgactatgcgtttgagtaagaaaattagacttgagcgtcaatataccgaagcgcaattatcattcctgtatgccaatcgcgaattgccctacgttgagttaactcagtcgttcaataggatgtttggtgagaacaaaaccgagggagctatacgagtagcagtgagaaccaacgggtggggtagattaaataaacgatcgattaggcaggataggaagatagagattaaagggagaaggctccccttagacaaatatgtgtgggagtgcgtcaatgggccaattcccgaagggtacacggttatacatttagatgatgacgttgaaaataacaaaattgacaacttgaagttggctccaagtttcacgaggtcagcatttttgagggctggtggtggaacagcacctaaagtactagcccctgcgctatacgcaacagccatgttgcagaacgttatcaaaaagatcgaaaaaataggagcggctaagccagccgcaagggaatga

SEQ ID NO: 432048 - DNA, 600 bp, Serratia marcescens
atggcacagatccagctacaaaaaattggtcctgcaatcctgaccccggcaacccccgaggccagcgagttcgtgcagcgtattaaactcggtgagtggatacacgccgactttaaacgcgttcgtaactatctattccacaagcgttttttcaagctattacagcttggttttgactattggacaccgactggcggggcaatcctcccagaagagcgcaagctggtaaatggcttcgttgattatctttgccagcatgttggccagcaacataacgttgcgcttgcagatgccgccgagttgtacctggcggacgctgcgcatacccgcactggtgacttagttctactgaaatcgttcgatgcataccgtgagtgggttaccattcaggcaggatattacaccgaacacgtctatcccgatggcagccgaaaccggcgcgccaaatcgatctcatttgcaaacatggatgaaatcgagttccagcagctttataaatccgcgctgaatgttttgtggaaccacatcctgtttcgttcatttacgtcccaaaccgaagttgagaatgtagctgcgcagctgctggagttcgcagcatga

SEQ ID NO: 432049 - DNA, 654 bp, Serratia marcescens
atgagccaaaatccatattgccaggcactggcagagttaaaaaatcgccattcgcacatgcttaaggaagtcggtgatcaatggcgaacaccggatgatctttggtggggaattaatgcaaaattcggcccgttctcgctagatctgtttgctgacgaccataatgcaaaatgcgagtcatattacaccgctgaagataacgcactgattcaagattggtcggctcgactggcagagctcggcggagctgcttacgccaatcctccttatagtcgcgcacagcagtatgaaaaccaatttatcaccgggatgacccacattctgcagcacactcttgccatgagagcaaacggcggccgttatgttttcctaatcaaagtcgcaacgagcgaaagctggtggccggagaacgccgatcacatcgcatttattcgtggccgtatcggcttcgatctcccagattggtttgtgccggcagacgataagcaaaaaccgacaggtgctttcttcgcaggtgccattgtggtgttcgataaatcgtggactggtcctgcggtcagttatatcagccgagaagaattggaagctatggggcaaatgttcctgtcgcagatccgacgcgcagcgatgaaattaatcggagaggcggcatga

SEQ ID NO: 432050 - DNA, 285 bp, Serratia marcescens
atgagaaatatttaccgcaataaaaaatggcttgctgctgtcggtcagatcgaacagtgcgttttgtgtggtacgtggggaactcaagttgctcatcgcaatgaaggcaaaggcatggggctgaaagttgatgattgcgctactgcggcgatctgcgtgtgctgccacgatagcattgataatggcaataagctctcacgggacgagcgtcgtcagttaatggatcgcgctattgttctgaccttaattcagattgcccgccgtgggctggtggtaccgttatga

SEQ ID NO: 432051 - DNA, 717 bp, Serratia marcescens
atgatgaacgaacagcaacttgaatatgtacgtatcaatctacgcgctgcgctgttggactcatcgggcggaacgaaagggcagttagaggcatttgctgaacatccgccagcagataagcaacgaaacccaagaaaacctgtacatattgttgcactggatgatggccggggaggtattaggcacgttaaagctgaaaactcagctttatatgtgctggaaactcgcagcagacgcaggccattaccgccgataaacgagtacgagtttgctgctgcaccttggcgtagggctgtaaatttactgtctgaacatgaacaagcttgggtacgttattgctatggccacaacctggacttcaaacttcagaccctgatttgccagcatgtatgggaaacatacgagaaggagcttgtgggcattaaacttcaaaaacgggttagattacggctaatttcattggtttggttggcagtgcaggacgctgcagcgaaaaataagaatgaggaatacagagaatatgctgcgacggtgctggctaacctattgtctataaaccgtgatacttggtatcaaacttatgccgctccttggcggctcttaaaatcgataactacgagtttggatgaagaggttttaataaaggtgaaagaaagagccattatttctgactcagggggggatattgcaaaacccgacactttacgctatatttaa

SEQ ID NO: 432052 - DNA, 276 bp, Serratia marcescens
atgtctaagcagataaccgagagtttggttttccgaccagcaagtgaactaccgactgccaaactaaatggtcgcgcggtgctggtgttcaacccctgtgatggttggcatgatggatttgtccgtgcgcgagaagaggatggcgaggtttatcacgtcggcatttacccttggatgggcagtgagatgctgccgcacgatttctacatcacctgggctctgctacctgacgaaagcaagctggctgagcaattcgagtcagagagacgccgttga

SEQ ID NO: 432053 - DNA, 804 bp, Serratia marcescens
atgaccaaagaaaaaaatcaatcggcgctggcgattgtctatcgatcgctcaattcgttgattgcttacgcaagaaattcccgtacgcatactgacgagcaggtgcgtaaaatcgctgacagcatcgaggcgttcggttggacaaacccggtgctgatcgatgaaagcggtgagattatcgccggtcacggccgggtgatggcggctgatctgttggtttttgatgaggttccttgcatcgttctggctggtttgaatgaccagcagaaaaaggcatatcgcatcgctgacaataaattgccactgagtgcaggctgggacgacgatatgcttcgtctggagctggctgatctcttggatgcggatttcgatatttcgctaactggctttgatgaatcagagctggatgctttattcgcggatgacgagccgcaggaaacgggcgatgatccgtatacagcaaaaatcgacacgccggtttatgaaccatcggaagttacgccggccatttctgagctgtacgatgagacaaaaacgcgaagcctgttgaagaacatcaaggctgcagatcttcccaaggagctcgcagcatttttgatgtgcgcagcagaacgccacactgttttcaacttcaacaaaattgccgattactacgccaatgcaccggcggatatccaggcattgtttgaagagtccgccctggtgatcattgattacgggcaggctatcgagaatggtttcgtccacatgaccaaaaacatggttgatatcgtgtacggtgatgaggagaacggagatgcgtga

SEQ ID NO: 432054 - DNA, 873 bp, Serratia marcescens
atgcgtgaggatttctgcgcgtttattttgacgcatggccggcccgataaaatttatacctaccggcagttgaggaaacaaggatacaccgggaaagtttatatcgttatcgatgacgaggataaaacccgtcagcagtacattgagcaattcggcaacaatgtgcttactttctcgaaatcggagattgccagtcggtttgatgaggctgacaacttcggcgatcggcgttcaattttctacgcccgcaacgcctgtttcgaccttgcgaaaaaagtagggtgcaaatacttcatccaactggatgacgattacaccgcctttcaattccgcgtaggtaaagacctggaggctgggtatacgctcattcaggatctggacgccatcttgtgcgaaatgttggcgtactacgagtcgatccccgcagcgtcgatcgctatggctcaaggtggcgattttctcggaagtggcggtgataaaaatgcggcctggcttaagcgtaaggcgatgaatagtttcatctgctcaacggaccgcccattcgcttttatggggcgagtgaacgaagacgtgaatacgtatacgaaccttggccggcgtggtgagttattcatgaccgtcggggcagtccagctattgcagaagcagacgcaaactaactccggcggtatgacagagctgtacttggattcaggtacatatgtgaaaagcttttactcggtgatgttttctccgtcatgcgtaaaaatttcactgatgggggccattcacaaacgtattcaccacaaagtctcatggaataacgctgctgtaaaaatactgcacgagaaataccagaaatcctccccgaataaaaacgggggtgatgcatga

SEQ ID NO: 432055 - DNA, 1005 bp, Serratia marcescens
atgagcaagcctgatgggaaagcaatcgagcgtgatttctgtgctggcgtgctttccctccaggatgtagcggataagcacggaatcacgataaaagccctgcgttacatggcgggtaaaaacggctggaagcgtactaaaggggcaagggcaaaagcggggcaaaaaaacggggcaaaaaataattctgccccaaaaaaaacgccccaaaaaaagcagcaagatcctgaaggcttccaacagccgcgccgtaaaatttccaatgaagaaaaatcctcagaggacgattttgatctggcatttgaccctgatgaattcggactttctgaccagcacgctctttttgtttattggtacgtaaaaacaaaaaacagagtcgaggcgtatagaaaagcgggctacaagtgcgaaggcaacgctgcttatgctgctgccagccggctgtataggaatgttaaggtttcgaaggctatcagggcgctgttaaatcgcttccgggaacgctacaccgcagaccttgatgaaattgtcgatcagctggtggcgataacgcgggccgaccctaatgcgctaacgcaataccgccgtgtgaattgccgccactgctggggcgaaaataatttataccaatggcgagatattcaggagtacgaccgcgccgctgcaaaagcgatgaaggatggccggtcagagcctgaatacggcggccttggctttgtcactaacgctgaccctaacccggattgcccgcgctgcaatggcgagggcgaaggggaattgttgataggggacacccgcgaccttgatgcaaatgagcacgcttatttcctcggcgtgaagcagaccaaaaatggcattgaggttttaaccgaagataaaaaatcggcacgacaaatgctgattcaattaatgcagcccaaaggaggaaaagccgccgcagaaagtaaagagggcggtgagcctcaaattattatcaacctggtgaattctcccgatggcgactga

SEQ ID NO: 432056 - DNA, 1422 bp, Serratia marcescens
atgaacgaagatgatttcgaaatcggcagctgctctcattcagagttgatggcattgctggacagcgatgatatccagccaggttccacggcgggttatcagacctgcaaaacggtctacctttaccacccgttgggcggcaagatggtggatcgtcccattaagatggcgatgaatgaaccgcgcaccgtgcatgttgctcagtcttatggccttgagcagcgcctgcgcgatgcgttcgagcgcgaatggaaagctatgggagctaatcagcacattgccaacgctgcgcgaattgcccgaatttacggtgtgtcggcggtggcaatgctggtggataaccaggaaccgaatgaatcgctcgattaccgcacgctgtataaacacaacgtcagctttaatatcctcgacccgctgaacaccgcgggcagcatcgtgttgaatcaggatccgaatgcgcaggactttcagaaagtcgatggcattcgggttgccggaaagccatatcacaaatcgcgctgtgtcgtcgtgcaaaacgaagacccgatctatttggcttacaacccggcggcattcggattcaccgggcgtagcgtctaccaacgcgcgctttatccgctgaaatccttcatccagaccatgcgcactgatgacatggtggccgtgaagggcgggttgctggtaacaaaaattcaggggccaagctccgtcgtcaacaacatgatgcagaagctgagcggcattaagcgcatgatgttgaaaagagggaaaacgggagaagttctgcaaatcggtgacaaagataatatcgagtcaatcgacctcagcaacctggaaaaacctctcgactctgcccgtaagcacattctggagaacgtggccgccgccgctgatatgccggcgatcattcttaactctgagacgttcgctcagggcttcggggaaggcactgaagatgcgcgcgccgttgctgtgtacatcgacaacatccgtgaatggcttgatcagctttatgcattctttattcgtgtatgccagtaccgggcgtggagcattgagttcttccagtcgctgcgagccgacttcccggaactgaaaaacacctacagcctgtatttctcgatgtggataaataacttcgaataccgctggccgtcctccctcaaggaaccagagagcgaaaaggtgaaggtagacgaaacgcgctttaaggccatcgtcagcatgctggagtcgatactgccgcaactcaccgctgaccccgctaaccgcgcaacgctgatcgagtgggcgtgtgaaaacgccaacgctaacgagaacctcttccctcaacggcttaacctcgattatgactcgctaaaagataatccgccgccagagccaccgaaggctgaagagccgggcggtgggatgatgctatga

SEQ ID NO: 432057 - DNA, 822 bp, Serratia marcescens
atgaggacatttacaagaacggttcgtgaggcggtgaagttctttcttcgcaacggctacacgtctcgcgaggagctggagcgctggcagagcatcatccggcaggctgctgagagtgaaacggcggacgactacatggcgatggtcacgcggaacctgactaaatcgtacgatctgcaggttggtcgcgctggcgcgctgaaacggcaccagggcatatcccgctttacgctcaactacctcgaaccaaaactgaggactgaactcgacaggcggatcctgtccagcgctgaccttatccagctcaaccgcaaaaaagctatcgacacaacgttgtcgcgttttagcggctgggccagcagcataccttctgccgatagcatcgcgctgtctggcattcaggggacgatgcgggcaacagcggatcatattcagaaggctgccgagaaggtggactatgaagcgcgccgagtgatgatcgaccagaaccgcaagctgatagccaacattgataacgtgatcgcaacgagtaataacgcgattgcggcgatttggcacagccattggcgcaggcccggttatgacttccgcgaagaccacaaggagcgcgatcagttgtactacctgattcgcgggaactgggcgcaaaaaaacgggtatgtgaaagccggtcctgccgggtatctcgatgaaatcactcagcctggtgaagaggttttctgccagtgctatgtgacctacatctacaacatccgcagtattcctgaatacatgctgacccagaagggtcacaagttcatggagtcaatgaaagcagcatag

SEQ ID NO: 432058 - DNA, 1596 bp, Serratia marcescens
atgttccgtcagggtaagttcgtcttcctgatccagcgctctgatgatggaacgtggtgtcaacctggcggcacggtcgaaccgggcgagctcgctattgatgctgcgcgccgcgaagtgctggaggaagtggggtatcagtacgatggcccgctgaatccgcacagcgtctacggtgattacctgacatttcgcgcagaggtgccggagcagtttgaagcgaagcttaacgacgaatcgctggccgccgggtggttccatattgacgatctgcctaagccgcttcatcagccttttgctgagatgctggcgcagcaggcgctcaatgaaaccgaagtggccgcactcatcgctgatgggacattaagcagcccgcaatactttatcaacatgtggatgttcgccatccgggtgaccggaacgggggttacctggcgctctgcagatcaacagatggcattccgtaacccggatgactatctcactcctgagtttctccagcgcgttgccggtgtaccactaatttggctgcacccggagaaaaacaagctcgatagcgatgaatttgcgaagcgtgttatcggcaccctgacgaacagttgggttgccgataatggcgaggtctgggctattgcccgggtgtatgacgccgaagccgccggaattatggcgaccaagcagttaagcacctcgccaaccgtcacgtatagcgaaatgcaggactcaatcatcaaaatcgacggtcagcctctattggtggaaggttccccggtattgctcgaccacgttgcaatttgtgaacagggtgtatgggacaagctccttgcccctactggtgttaaatctgattccattccaaatgaggctgaaaagatggacgaggaaaaaatcgtagcgcttatcaacaaagcgatcgatgcccgcatggcaaaagctgattctgaggcgaaagaggccaaggaaaaagcggatgccgaagaggcagccaaaaaagaacaggctgattctgaggcgaaagaagcagaagaagccaaagccaaagccgacgcggaagaagcggccgccaaggaaaaagccgacgctgaggccaaagaaaaggctgatgctgaagaggccgaacgcatggcaaaagaaaaggcagattctcaactgcgtcaggaaattgctgatctgcgctcccgcattccaaccgaactcagtgacgaagaacgtaacgaggttgctgacgcgcaggtgaaggctgacagcgtgttctcctgctttggcaaacgcgcgccggtcccgctgtctggcgaaaagccgctggcataccgtcgccgtctgatgatccagttgcaggaacactcgccggactttaaggccgtcgatctgtcatcaatcgctgattccgcgctgcttggatttgctgaaaagcagatttatgccgatgcgcaaaaatcggcaagcctgtctgtcggccctggcacgctgcgtgaaatcaaacgcgctgatgcgaccggccgccagataagcacattcgaaggcgatcctgctgctacctgggctccgttccagtcaggtaaacgtcaggtcaccagtttcaacaaccaggcttaa

SEQ ID NO: 432059 - DNA, 861 bp, Serratia marcescens
atggctaatttatctcttaatccgatggcaaccacgaatgcgctgggttccttcggcgtgcagtccgacggttatgtccagggcattgctctggatgacccggctaaccgctttaatctggccgcgggcaccgtggcggcaacggaaaccaaacctctgtggggcggtctgccggtggctgaacttctgccaggcacgcattctagtccgcgcggttcacaaatccgccacgctgcgtcagtcgccgagttggaaggcttcaccgtgttcaatcaggcgcacaatgggctgaccacaccacagtcaccggtgccactgtacgcatccggtatgagcgtgtcgtactatcgtctcggctccaacatgcgtgttcccctgaaagcgtctgcgcaggttgttgcgctgggcaccagtggcgcatccgtgaagacggctctggcctgggactttgtaaacaaccagctaaccaccgcagcagcggcgggttttgccggtgctgatatcgcaaccaccgctgtgacgtatgctgctggtgtggcaacagccgttaccgaatcagcccacggcctgagcgctggccagtacgtgaaaatcagcggcgtggcgccagctgcgtacaacggcaccgttgttgtggtttccgttccaaactcgacctccttcacttatgccccggcgactgcaccaagtggcgcagcaaccacgcaaggcactttgggcgcagtaacgctttccgacatcacgctgccggtaaaagtgatcgccatcgaatcaggaaactcaaagactgtcagctatgacagcaagacgggtttcctgacctggaataacaccgacagctgcgcgctggtcttactttaa

SEQ ID NO: 432060 - DNA, 1032 bp, Serratia marcescens
atggctgcaattacccccagctacaccatcgtcaatccgtcgtatattgcgccggagatgatcctcggttaccagcaggcatcaggtgcgtttgaaaccatcgccagcggtaacccgcaagttcgcctcggcgttggcgaccagtacgtctacatgcgccgactggatatccgtacccaatccacctccagccagtctggaaacggcaaccagcttccaagcgtggcgctggatgcgaagatgatttctaccccaacttatctgttccgctgccgtggtatctacgatcaccacgacatggcagcggccggtaactggaactttgctctgccggaggcccagcgcctcggtatgcgccaaggcatcttccagcagctccgttccgctctgctgtacggtatgaaccccgcaggtggtgagggactactgaataccgctggcgcgaccaccgagtctctgccgccggacagcaacaacaacaccaccgtgctgacttatgatcacggccagatggctgtgtatctgctgggccatgttcaggccgctatgacccgtaccatgcagttgggtcgtcagcagcgtgtcgttatccttggtcctcagcgtattctcggcgcaatggagattcagcagatcgtgcagctgacttcttaccagcgtcctggcggcggtactgataccgtgggtaacacggtaaaagaagtgctgaaaggggcaaacgtccaggttgactgggtgtatgacgacaccttaatcggcgctggtgcgggcggcactgatgcggtggtaatcaccatcccggaggttgaggtgccaatggttaactcgaccgttaacaccaacgaattcgccaagttgaccccgtctcttgctgcgaacgccctgatgttttgcgacatggccgcgccgcgtgaaattccgacaccgattgctggtggcgctattgatgttctgtccgaaatgcgttctaccgctggctgggcggtccgcccggaagccatcactatcctgtcgatggcctacagcgcctga

SEQ ID NO: 432061 - DNA, 483 bp, Serratia marcescens
atgaaactttttatcgctaacacaaccaaacaacgccaaatttttgcttaccgcaaattggagaccggtcgtcttgtccagatcccgattaaccacggcgatcagatgatggtgctggacggctccactgaagaggtggaatcagttattcagcatcaccagatgtatgggctgatcgactcaacgagaatcgaccaaagccaggcatttgttggcttgtgctacagccttaacaagcccgtatctgcggcggtaatcgagaagaccattcgtgataacgacattcacttgacccgtggtgcgcacggacgccgccaggcatccgtggcggcgcttgacagcgcattgcgtgatagcggtaccggttattccggtgaaatggaggtcagcgcagagcaggcgaaaggccgcgatgataacgaagacgcagacgtggttaacgaaaccatcgtgactgaaaaatccgggaacaagaaaaaatga

SEQ ID NO: 432062 - DNA, 429 bp, Serratia marcescens
atgacaacgagcctgtcgggatttattgaattcattcgaactgacatgaaggtaactgctgaacaggttcccgacgactctccgtcattttccctggcttatggcggcgcggtcgaatgggttaactcggatatcgcgtgcgttgtgccgaacctgtacaccgttgctgtgtataacctcggcgcgtctttcctggtcaactacggcactgaacccgtgtttgctgaattcaggaagatatatggcctcaatgatttcactgcaggggttattaccggagccagtgataacgcaacaagttctcagcgtttggtgccagatttcttcaaaaacttgtctctggcagatctccagatgcttaaagacccgtatggccggcgctatctgatgattgctgagcagtttggcagcctgtgggggttgtcatga

SEQ ID NO: 432063 - DNA, 435 bp, Serratia marcescens
atgatcacctttcatctgggtgttatcgatattccttacggggatgagaacacaacaaccagcgacgttgcagtatatctggaggaaaaataccagattatgcagaccttcttcgatcggtatggcaatgacattgccgagctgatgagtaaagacctcgccgcaaatcttgaaaacatgttggcaggcgcaccgccatcaagggatccgcttgcagaatccatgtcgcggatccacgacttgttcgtggcctttctggataacggcgagatgaacggaatgccgggagttcccactcgtcgcgcgctgcttggcatctcgaagcgtttcaaaaataagaggggcgatccgcgagaatcatttatcgacacaggaaattatcaggcagccatgcgcgcctggataagcggggtgttaaatgccttccctgagtga

SEQ ID NO: 432064 - DNA, 2010 bp, Serratia marcescens; identical to SEQ ID NO: 427709

SEQ ID NO: 432065 - DNA, 693 bp, Serratia marcescens
atgaaaaacggttgtacggtattattactttctttttttattgttagttgtagtgcttgggagcgaggtcaagcaaagactgtagaacagaagcgtgattttttactaaaaaatggcccgcagtttgtccctggatatctttctaagacgccactcagtatctatgaactgagaaaacaagtcgttaatggcgggggtgagacaaaagaattcctacatcagttggtagatgaatgttatacgtcacatctcgattactgcactattgagaagtatttcgttgcgaaagagaagatagataaggaaaagaaaagaagaaataaagttccagtgaagaaaggggagcttttttactgtaaagtaaaaattcatcatgaattagggccagttgatagcaccaatatacgagttggtgtaaaagataacatagataccgttggtttcatttttcctaacggatatcaaattatctctcccaaattggaggtggtagacttagcatcaggtgatagatatggaaggtcttcggatgggactaaagaggtaggtgctagttatgatggaaacagctactccattacattgtttgatgaatatgaggtgcgaaaatttaatggagctgcgattacccatacttcaaagttagagatttcaggaagaattgatgcatgggattgcaaaaaggcaaaataa

SEQ ID NO: 432066 - DNA, 918 bp, Serratia marcescens
atgccccagaaaaaagcgacgctcatcggactgatagccatcctgctgtggagcgcaatcgttgggttgattaaaagcgtgagcgaaggttttggcccggtgggcggtgcggcgctgatctacacctgtagcgcagtcctgctgttattcaccgttggcttcccgaaattgcggctgtttccaccgagctatctgatcctcggcagcatcctgtttgtctgttatgaactctgtctgtcgctgtcgctgggcttcacccattccggccgtcaggccattgaggtcgggatggtgaactatctctggccgagtatgaccatattactgtcggttatcgtgaaccgacaaaagaccaacccgctgattattccgggcgtcattttagccgtcgccggaatttgccgggtattaggaggcgaacagggtttctctttcactgagatgacccataacgtaatggaaaatccgctcagttatggcctggcatttagtggcgccattatttgggcaatatattgcgtggtcacaaaaatcatcgccaatggcaataacggcattaccctgttctttattttgaccgcactgacgttatgggggaaatacctcacttccccgcaaccagaatttattctctcctggcatacatggataagtttattgctggccgccatcgccatggggtttggttatgccgcctggaacgtcggcattctacacggcaatgtgacagtgctggcggccgcttcgtactttatcccgattatctcggcggtactggctgcggttatgttgaagtcacacctgaacatcgcgttctggcaaggcactgccatggtgagcctgggctcgctgctctgctggtggtctacccgcagttctgcgccgaaagccttacctgtaataaaagaaagtaagtaa

SEQ ID NO: 432067 - DNA, 597 bp, Serratia marcescens
atgatagccaccaaagacagggttcgcattgtcgaaacccgggtgttgtccgatgactggtacctgctgaaaaaaatcacctttgattttctgcggcgcgatggcgtttggcagcggcaaagtcgcgagacctacgatcgcggcgacggcgcggtgattttgctgttcaaccggcgggcgcaaacggtgatcctgacgcgccagttccgctttccggtgttcgtcaacggccatgacggcatgttgattgaggccgccgccgggctgctggacaacgcgtcgccggaggcgcgcatccgcgccgaagcggaagaggaaaccggctatttcgtgcagaacgtggagaaggtgttcgaagcctacatgagccccggctcggtcaccgagaagctgcactttttcgtcggcgaatatcaggcgggcgaccgcgtcaacgagggcggcggggtggtggcggagggggaagatctggaggtgctcgagctgccgctggcgcaagccctgcaggcggttcgccagggcacgatcgttgacgccaagaccatcatgctgctgcagtttgtcgccttgaaccgcacgttggaggaagaacgatga

SEQ ID NO: 432068 - DNA, 459 bp, Serratia marcescens
atgtcctggttgcagcgtttgcgcattgataaatttttgctggttctgattttggtggtgatcgtcgcctcgctgttcccttgcgaaggcatctggaaaaccttctttgaacacctgaccaccgccgccatcgcgctgttgttctttatgcacggcgccaagctgtcgcgcgaggcgatcgtcgccggcatgagccactggaagctgcatctgctggtgttcctcagcacctttgcgctgttcccgctgcttgggctggcgatgaacctgctggtgccgggcatcatgaccccgacggtctatctcggcttcctctatctgtgcgcgctgccggccacggtgcaatcggccatcgcctttacctcggcggcgggcggcaacgtggcggggcgatctgcagcgcctcggcgtcgagcattctcggcgtgttcctgtcgccgctgctggtgggcgcgttga

SEQ ID NO: 432069 - DNA, 519 bp, Serratia marcescens
atgcgattgaacacttggagcaaggcgctgctgccgctggtggtgttggcctgcgtctcggcgactcaggttctggcggcggagagcgataccgggccgatccccaaacagctgctgggcaactggcgcgtcagtaaaattgtgccgactcagactaccggctgctgggatcaacagcaggcgcagagcctgatcggcggtaaaatcagctataaggcggatgcattcagctggaacggcacggcgctgaaaagcgaaggtgccaccgtcagcaccgtagaagcgcaggagttcgtcgaggacaattccggcagcagttcctacatcgatttcccgatgctgggcatcagcacgccgtcggtcgagcgcgtggccattcagcacgcggatactgtcatcaaaggcatcaccgatcagggcaccgatggggtgcccggcgataacgtgctggtgaaagacgccaacacgctgatcctgtcgctgtgcaacgtctggtttgaggcgcagcgcgagaagtaa

SEQ ID NO: 432070 - DNA, 168 bp, Serratia marcescens
atgatattcatattgttccggtggttattggaagtaagagagccgggctatttcaaacaatattgggggtggcactggttgccactgctgcatatttcactgggggtgctgctattggaatgggggcggggttttccagtgctggagcatgggggtctgcttcattag

SEQ ID NO: 432071 - DNA, 1680 bp, Serratia marcescens; identical to SEQ ID NO: 425087

SEQ ID NO: 432072 - DNA, 636 bp, Serratia marcescens; identical to SEQ ID NO: 182412

SEQ ID NO: 432073 - DNA, 1248 bp, Serratia marcescens; identical to SEQ ID NO: 127352

SEQ ID NO: 432074 - DNA, 1767 bp, Serratia marcescens; identical to SEQ ID NO: 182414

SEQ ID NO: 432075 - DNA, 2118 bp, Serratia marcescens; identical to SEQ ID NO: 127351

SEQ ID NO: 432076 - DNA, 429 bp, Serratia marcescens; identical to SEQ ID NO: 26632

SEQ ID NO: 432077 - DNA, 1125 bp, Serratia marcescens; identical to SEQ ID NO: 119502

SEQ ID NO: 432078 - DNA, 795 bp, Serratia marcescens; identical to SEQ ID NO: 119503

SEQ ID NO: 432079 - DNA, 876 bp, Serratia marcescens; identical to SEQ ID NO: 119504

SEQ ID NO: 432080 - DNA, 852 bp, Serratia marcescens; identical to SEQ ID NO: 119505

SEQ ID NO: 432081 - DNA, 837 bp, Serratia marcescens; identical to SEQ ID NO: 119506

SEQ ID NO: 432082 - DNA, 660 bp, Serratia marcescens; identical to SEQ ID NO: 119507

SEQ ID NO: 432083 - DNA, 621 bp, Serratia marcescens
gtgctgagggcgcctgcggcggtgcgcccaagggttgttatgtttaatatggcagaactttcctgtcgctatcattttgacgcccgctattcgctcatagatatgcctgtcgcgtttgcggctttacttgttatacccaacctgcctgatttttatcgccagcatcccggaattgaaattatcctgagcagctcagaccgccgacggaatatgctgcatgatggcctggactgcatactgagggtgggggagctggacgatggcgactatatcgcaaaggaggtgggaaccgttaaaatgacgacctgcgccagtcctgcgtatcttgatcaacacggcaccccggaaacaatggacgagttgcagcagcatcaggccgtcaactggattaacagcagcaacagacaagttatgccctggacattcgggacgtcagagggctccaccgaaattgaacttccaggcaggcttgtcgtggataactcagaagcctacattgcagcaggcctggcggggctgggaatactacagggcatgaatatttttttgcagccttatctcgatcgcgggctgttggtagaggttctgccagataatacgtccccgaatcgcaaactgtaa

SEQ ID NO: 432084 - DNA, 1134 bp, Serratia marcescens; identical to SEQ ID NO: 119510

SEQ ID NO: 432085 - DNA, 309 bp, Serratia marcescens; identical to SEQ ID NO: 113671

SEQ ID NO: 432086 - DNA, 2652 bp, Serratia marcescens; identical to SEQ ID NO: 182429

SEQ ID NO: 432087 - DNA, 978 bp, Serratia marcescens
atgactcttctggtgacagctgaatgcgttgacgatctgttaaacgatgtccataagtcgatcctgactgacggattttggaatactcccactaaaggagcaaatattgagattctgggagcctacctgattctcaccgatcctcgccgtagaataagcaagacagaatcccgcggtaaaattatcagctgtctgggggaattgctgtggtacctctccgcccagaacgatctcgatttcatccggcacttcatacctcgctacgtaaaatacgctgaatccgacggcagaatacacgggggatatggtccgagattatttagtatgcacgggctgtataatcagctggaaaatgtcatcagcctgctgcaggagaaaagaactactcgacgcgcactgatacaactatttgatgcctcagatcttgttacggataatccagaacagacagaatatgccgatattccgtgcaccatatcgttgcaatttattgtcagacaagacgcactgcatctttttgtctgtatgcgctctaacgatgcctttatgggcttgccccatgatgtgttcgccttcacgatgttgcaggagctggtcgcccgcctcaccggatgcaaattggggcattatcatcacttcgtctcaagcctccatatctatgaagaacattttgaacaagtaaaagcgctacagcaagaaggctttatgagtaccttgccggtgatgggtgatatgcctgaaattcaatccttaaaggacattacagtcatccttgaagcagaaaaggctctgcgggaaaacaaggaatttgatatcgatactatgcccctgagtgactactggaaggatctgctgcgcgtgataaagatccattttttgttgcgttcacatacgtcggcacacgatgaactggcccgccaggagcttactgcactgaataatcaggaataccgatttatttttgacgggaaaatataa

SEQ ID NO: 432088 - DNA, 945 bp, Serratia marcescens
atgaatagacacagtcaggccagccagctggtcgccgctcttcaaaacttcagtcgcaatgaacatcttctgaacggactgagttctccggctcactataatgtattagcctttcagattatcgacagtattcgccgcattcgctatatggcaactctgacatcacgaaccgattatatggatccgctaagaaaagagccgaactcagatttatttgatcctcttcgtgctgcttgtctgcatctgcgtgacaacaactatgacgaagcctgctggctggttttcctggccacgcattttggccggagtaataaaactggctgggttttgtgccgcgatatttacagtggactgggtacccagacgtggacatgggatgccataacggatgactttgatgcttttgaacggtggtttgccagcgtttctgatgagctgactcgtcacagcagtctcaggcagtatggtaaccaccgcaaatatgaaacgaaaaaatatcattcacgtcgttctatacctgtcgtttttcgttcttatctcggattcatcggtgcaacatacagccacgaggcccggtttgcagaagcaaggagtcttgcagctacacctgctactcttttcgaattgctgtattcaggcctgaatgcggtggtttcattcggacgaaccgcccgatttgattacctgactatgctaagaaaaaccgggctcatcgaggcagaaccggggcatgcttttttgaagggagctaccggccctcttcagggaagccggctgctgttcagtaacagccggagcgccggtgacagtcttgaggctctgaatgataaactggcagagcttgccgaaattatccctgcaccttatctgaggatgcaggtcattgaagacgcgctgtgtaactggcagaagtcacctgatcgctacgtctattttggcggctga

SEQ ID NO: 432089 - DNA, 1083 bp, Serratia marcescens
atgatggtaacacaggacttccagcctgactgggtatctccacccggtgatacgattatagatctgatggatgaacacgggatttctgatgaggagctgagtaggaagatcggcttgtcccttgatcggggtcagcaacttcttgaagggaaactccgattgaatccgttcctggcagacaaactcgaagagctgttcagcgtatcgacggacttctggatcaggcgcgaagatgcttatcgccagcaaatagaacatattcagaaagtgaacagcgactggctggaatcattgcccgtacgcgatatgatggaatttggctggatcccaagaaccacaacgcgggaaagtaaattccggcactgtctgtcgttcttcggtatacactccgtgagtgagttttttcacaaaatacattctgatgctccactggtcgcctttcgtaaatcattgaatctgacaactgagcctgtcgccgatctggtatggctgacccgggcagaacagctgagtgcaaaacaggtctgcgcagaatggaataaaaaggcgctgcaggcgcttttgccggaacttcgcagagcaacaaatgaacctgatatgggcatttttatcccccatattcgtcggcttctcgcgactgccggagtttcgctgatcgtgctgccaacgcctaggggatgccgggccagtggtgccacctgctttttcactccagaccgcgccacgctggtcatgagtttccgctatctcaccgatgatcatttctggtttacgctgtttcatgagatcgggcatctcattctgcatgaggcagtgcgggtccgtgtggagggtaaagaaggcctgacgacagaagaggaaaaagaagccgatacgtttgcggtagacgtcctcattccggaagaatacaggcaacaactcaggcgctatggtgtccgtcactggcgggacatcgtccgtacggcccggaaaatgggcgtatcaaaagggattgtgctcgggtacttacagcatgagggtaacattccgttttctcaccttaaccggcttaaggtgagattcagtaaagaagatattgtataa

SEQ ID NO: 432090 - DNA, 276 bp, Serratia marcescens
atgaaagataaacatcaagaaaccgaagcactgaaagatgtgttagctgaaatgcaacgtcaggatgccaaatggggagcggaccgcaatctggatcctttcatctggggcgccatccttggggaggaagtgggagagtttcatcaggccgttctccatgaccgttttgggggaaaagcagccggtaccagcagagaagaagcggtgcagattgctgcggttgcgctgcaaatcatcgaatattacgatcgcgtagatcgcgtacaaacccgctga

SEQ ID NO: 432091 - DNA, 255 bp, Serratia marcescens
atgggtattgctcacagcccttgcacgaggatgcccttcttcggaaaaaaaatcaatgatctagttatgatcaacagttacgctctgatcaacaagatgggctccgatgaagcctggactgatttgtgcaatgagtgtctgcagaaaattgataatgtctggggccgaatggccgaaaaccaaaaagtatttctgagggccggagcgccgtcttctgtaaaggcttgcggtccatatgatggcatgctggcttaa

SEQ ID NO: 432092 - DNA, 10017 bp, Serratia marcescens
atggacgcgctcatcgcttcaccctatacccacacattttggaatgagtacatgctcaatccatactcctgcgagtacaacctggtgctggatcagacgattaagggagaattggacgtcggccgactgcgcgcggcgatcgacggggtttgccgtgactatattctgtttcaccacgttctggatgacagcgcctcgcaattacgctgggtaaggtcggcgaaaaaaattgcgctggaaacgctcgatgccgattgcgatgtcggtaagttaatcaacacgccgttcgatctccgggaagggccgctgtgccgcttctacctgattgagctggctccgcaacgctataacctgatcattgtcgttcatcacatcctgatcgacggcctgtccggacaggagttctacagcgccgtttccgcctattacaatcgcggcacggcggtgacgccgccgcaggtggatgaaacggacatcagcacattgtaccggcgctatgaggcggatatcgcggcgttgaaacacgagttcggttccgcgtcattctggggcgacatgctggccgaatgcgccccgcgcgtggcgttgccttatctccccggcgcagcggccgaagcgcccggcgctggcgaagtgcgttttgcgttgccgttcgccgaatggcaagcgctgaaatccggcgtcaggtatgccaatcctttcctgatcttcaaaacgctgtgggcgctgctgatcgcccgacaatctgcgcaggaaacggtgcatatcggttatcccatcgcgccggagggcggcgaggcgctgttcttcggcgcacaggtcaacactgcggtgtttcccttgaccctcgctccgggagccacgttcaatcagctgtaccgcgcgacgctggcctacagcaaagcgctcaaggtggctggcaagctgcggcacagccaattaccggtttatgacatgctgagcctcagtccggtgcgtcaactgaacgtcaactttacccaggcttacctgaaagatgcgccgctggcgctcgaggggtgtcgcattggcgtcaatcaccggttcaatgtcgatctggccggttcggaactgctgctggagtatcagcccaccgagcaggcctttgagtttcgcctgcgctaccgccccggtctgttcgacgcgacccagatggcggagatggcggagcagtatctctggctattgcagcgcgcgttaaccgaaccggatgcgccgattgccgcttggccgcaactgacggcgcaacaggttttgcgctgccgcgacgcctgggagagcgggcctgcaacggccgacgcggaagcgacgctgctcgacggcttggcccgccaggcgcgccgtcacccggaacgcatcgccgtgaccgacgccaaaggatcgctcagctaccgccagttggcgcagcgcagcgatcgtctggcgctgcggctgcgggcggagtatcaacggctgcgcggcgtggccatgccgccggagacgctgatcccgctgtatctgcagcgcagcgtggaggcggtggtggcgatgctggccatcatgaaggcgggcggtgcctatgtgccgctggatcccgccgcgccggcgcagcggctggattatatcctgcaagaggtaaacagcccgatcgtcctgaccgaaagcgcgttgcaggccgcggcgcagcgattggcgccgggcgatctttgcctgtcggcggatgaaccgcttgccgatgcggatgccgcgagcttgccgcgtgtggacgcccggcagttggcctacgtgatttacacctccggcaccagcgggcggccgaagggcacgctgtgcgaacaccggggtgcggccaatatggtgcgtggccatacgcagcgtttgttgcgcaatgagccggatgcgctcaactgcctgcagttcgcctcgctggcgtttgacgcgcacgtctttgaggtgttcatggccctgggcaacggccaccggctgttcatcgcgagcgaagcgcagcgacgagatccggcgttgttgtgcgaacagatggcggcctggtgcatcgaggcctgcttcttgccgccggcgctgcttggcaccttccctgaattgccggcttcggtgcgctatctcgcgaccggcggcgaggcgagcgcgcaggaagcgctcgaccattacctggcccgcggcatgcaggtcgccaacatgtatggcccgaccgaagcttcggtcagcgccagcctgaatatttatcgccgcaacggcgcgcgcaatatcggccacgccatcgccaacatgcgttgctatgtggttgacgagcacgataacttgctgccgctgggggcggaaggcgagctgtgcctggccggtgtcggcctggcgcgcggatacctgaacctgccgacgttgacggaggccgcgttcaccgccaatccttttgaactgcgtgagccgtaccggcgcctgtaccgcaccggcgacagagtgcggcgcttggccgacggcagtctggagtacctcggacggcacgatcagcaaatcaagatcaacggctatcgcatcgaattgggcgagatagaaatgcagctgcgcgcgctgcctgaggtggccgaggcggtggtgagcctgcgtcccggcacggcggatcagctggcggcctggtatgtgccgcaacctggcgcggagccggaggccggcgacatcttgcaacggctggcggcgcagctgccgcactacatgttgccctcggcgatgcgggcgctggcggcgctgccgctgacggtgagccgcaaggtcgattaccgggcattgccggaaccgttgccgatcgaaccgcaaacggcgtttcgccggccgtgttcgccgctggagattcgcctgtcggcactgttcaatcggctgctggggggcgatgtcggcgtggatgacaacttcttccgcctcggcggcaactccatgatggcgatcaggctgtgccacgaagtgaataaactgccgggggcgaagatctcggtgctgacgttgaatcagcacccgacggtggccgcgctgagcgagcacatcgctgcccagcgtcaggcgccgccggacgagctgccgatcctccccggcgggctgcgggaggcgccgctgtcgcttcagcagtcgcggctgtggtttgttcagcaactgtcggtgaacgccacgcattatctgtcgccggtgctgctgcggctgtcgccggatatcgatgacgaacgttttgcgcagtgcctgcaggcgatcgtcgagcgccaccagatcttgcgcagcctgattcgccagaatgatcggggcgaagccagccagtgggtcagcgacaccgcgctgccggtgcctgtgctaacgctgagcgccgatgaatttgacgccgcgctgacgcaagcctgcagccagccgatggatttgacgcgcgagctgccgctgcgcgccacacgctaccgttaccgcgatgcggcggagcgggaaacgaccgtttgcctgttggtgttccatcacatcgtctttgacggctggtcgcttgaggtgctgctgcaggaattggacgcgcgctatcggggaacgtggcgcgaggcgacagagccggcgttgcaatacctcgactatgcgtgctggcaacaagcgccggaaaatgtgcagcgccgggcggaagaattggccttttggcggcaagcgctggcgggctgccagcaactctcgctgccgttggactttttgcggccggcggtcttcgacgagcgcggcgacaacagcgaagtgccgttgccggcggcgctggtgaaggcgctggatgcgctggcgcgcagagagggggtgacgctgcatgcggtgatgctggcggggttcatgttgctgctgtcccgctacagcggccagaacgatgtcatggtcggcacgccgttggccaaccgcagccgccctgaactggagaatctgatcgggttcttcgtcaatacgctgcctttgcgccggcagatcgacccgcgccatcgcgtcgtggagtttgtgcggcaggtcgcggccacgacgctgcaggcgcagcagcatcagacgctgtcgctggaagcgctggtggacgacctggcgctgccgcgcgatttttcgcgccatccgctgttccaggtcatgttcgcgttggagagcgagggcggcgcgcaggcgcgcccggactggctgtcggtggtcgatctgagcgcttatgaacgcaccgccaagtttgatcttacgctcacgctgacgccgcagggggagcagatgcgcgcgcgcttcaactttgcttcggcgctgttcagcaaagcgtcgatggatcggctggccggctactatctcgccgtgttgcagcagatggcgcaccacgacgactggccgctagaaaatatccgtctgcaaccgcagagccaggcgctgccggcgtcgcccgccttcggctatgcgtttgaacgcagcctgcaacaggacttcgtgcagcatgcgcggcgcaatccgcaggccgtggcggttgtcgacgagcagggcgaaatgacttacggcgagctgcacgcggcggcgctgacgcttgccactcagctgcgcgtgcaagggcggatgaccggtgacgccatcgccgtcattgccgacaaggggcgccggcaaccggtagccctgctggcggcgctgatgtgcggcaaggcgtttttgccgatggaggcggcatggccgccgcagcggcggctgaacgtgatggcgcaggccggcatcaatacgctgctcagcgatacgccctgggcctgcgacgagatcaatctgatcgaactgaatgccgcagggctggcggcgcagctgccgctgccggaacagcgcctgccggcgctggatgctgggcccgacagcctggcctatatcattttcacctcgggatcgaccggcacaccgaaaggcgtggcgatcgaacatcgcagcgcggtgaatatgctggaaggcgtgcggcggtatttcggcctcaacgagcgggatcgcagcctggccctcagcgcgttgagcttcgatctggcgatcttcgacattttcagcccgttgagcgccggcggcgcggtcgtaatgccggccgagcgggatcggaccaatccgcaggcctggtatcagctgatgatgacccatcgggtgacgcaatggctgagcgcaccggcgctgatggagctgttgctggattatgtgaacggcgcggggttgacggccgggcctgtaccggcgctgcgggcggtgatggtggggggcgactggatcgccacctcactgccggaacgctgcctggcctgggcgccgcacggccgtttttgcagcgccggcggcgctacggaggcggcgatcttcaccatgctgtacgaagtgccgcgcggtcagaaaattcggtcggtcagcattccttacggcaaaccgttgccgcaccagcgttgttatatcctggatgccgggcggcggcccgccgcgccgggtgtccgaggcgaaatctatctggcgggggaaggcctggcgcgcgggtattacggcgatccgcaacgcaccgccgagagtttcttctggcatgacgagctgcaggagcgggtgtatcgcaccggcgatgcgggccgatggctggaggatggcaacgtggagtttatggggcgcctcgatcagcagatcaaactgaacggctatcgcatcgaactgggggagatagaacatgccgcgctcgcctatccgggcgtgaccgcctgttgctgcgtgctcgtcacgcaaccgcagccctgcctggccgcgtattacgttgccgatgagacgatcgccccccaggcgctggctcagcacttgagcagccaactgcctccgtacatggtgccgcaggcgctgatgcagctggcgcagctgccgctgaccgaaaacggcaagatagcccgacaggcgttgccgcagccggaaagggcggcgcgtgagttcgtcgcggcgcagggcgaatgggagaacgcctgtctggcggtgtggcgcgatctgctgcagcggcaggatatcggcgtggaggacaatttcttctcgctggggggcaactctcttctggctattcaggcctgttatcagatcggccggcggctggcgcgtgaggtcacgctgagcgagctggggcggttcccgacgatccgctcgctgtgccgcgcgttgtcgcaacaggagcagggcgccgcgccggtgtcgatcccgccgctgcggcagcgcgagtatccgctctcttcttcacagctgcagctgtggtttatcgagaatttgaacggcggcggcaatctctaccacgtgccaatgctgttccgtctcggcgacggggtgtgcctggcggcttacgagcgcagtttgcaggcggtggtcgcccggcatcaggtcttgcacagcctgattgtccagatgccatcccaaagcgtcgtcgcccgtgcctgtgaactgacgctttcgctggagcgcgtgacgctggcggcggcgcactggccggacaggctgcggcaggatatcgaccggccgttcgcgctgggggcagaattgccgatcagggcagccgtttaccgggtggcgcagccggatggcgggtgggtgacttacagcctgattctggtgcatcacctggcgtttgacggctggtcgcagccggtgctgttgcaggagctggacgtgctgtatcaggcgcagcggcaagggcaagaggccgggctggcggcgttgccgttacactatggcgactatgccgtctggcagcggcgctggctggaatccgctcaggcggatgaggcgaaggcgtattggcgacaagcgctggatggatggcaggcgctggaaatgccgctcgatttcgtgcggccggcccgcttcgatcatcgcggcgccaaccacgtcatcgcgctgccggaggcgctggtggcgcaggcgacgcagttcgcccggcgccagggcgtcacgccgtttgcgctgtatctcgcggcctttaacctgctgctcggttacttcagcggccagcaagacattctggtcggcacgccggtcgccaaccggccggtggcggagacccgctcggcgatcggattcttcgtcaacacgctgccgctgcgttcgcagatcgacgatgcggcgtcgctgaacgactatgtaaaccgggtctttgacggcgtgctgcaggcgcaacggcatcagaatttgccgttggatcagctgatcgagctgctgcaggtgccgcgcgatctgtcgcgccatccgctgttccaggcgctgttcgcgctggaggaagtgggggatgcgccggcctggctggcgccgcaggatctgctggcgcactaccaggcggccaaattcgatttgacgctgagcatacagccggcgccgcagggcggcagggcgatcttcaactatgccaccgcattgttcgcaccggccacgctggcgctgttgggcgagtattatctgaccatcctcacgcagatcgtcaatcacggggagcagcgcgtcagccagttggcgctggtctcggagagcgaaatggcgcggcaacgcgccttccatcaatcctgtccgccggcctacgattttgagcgcgcgatccatcatgatttcatccgtcaggccgagcgccatccgcaacggctggcgatcgtcgatgaatggggcgaactgagctacggtgagctgtatcggcgcgcgctgacgctgtcgctgcagctgcgtcagcacgcggacatgcgcgccgataccatcgcggtgatggtggacaaagggcgggcgcaaatcattgcggtgctggcgattcttatggccggcaaggcctatttgccgctggacggcgcctggccggaacgccgccgcctggatatcgtcgcgcagtcgcagacccgaattatcctcagcagccgggagtgggcgaccagcggcgaggccaggctgttgaccatcgatccgcagggggccgtcacggcgttaccgccggcggcgccgggagagcctgtcttgccggcgccttccgcgctggcctatgtcattttcacctccggctctaccggcgcgccgaaaggggtggcgatagaacatcgcggcgcggtgaacagcatcatcgataccttgtgccagctggaactcggcgcggacgatcgcgggttggcgctcagcgcgctgagtttcgacatttcggtgttcgatattttcggcctgctgtcggtgggcggcgctatcgtgatgccgtccgaaaccgaacgctatcagcctgaggcctggcatcggctgttgatgactcagggcgtgaccttctggaactccgcgccttcggtgatgacgctgctggtggagcagttggaatccgccgcgtcgcaggcgcagtggccgcagctgcgcaacgtggtgctggtgggcgaggtgatctcccgccaactgccggcgcgcattcgtcaatggcggccggggtgccgagtcgtcagcgccgggggcgcgaccgagagctccatttggtcaatcctgtacgacatcccggagacgccgatccaggcgcccagcgtgccttacggtcaggcgatggcccatcagcgtttttacgtgctggatcgtcatctgcgcgtgctgccgccctgcttgccgggggagcaatacatcggtgggatcggcgtggcgcgcggttattaccgcaatccgtcgctgaccgaagagaaattcatctaccatccggagctgggggagcggctttatcgcaccggcgacgccggccgctatttgccggacggcaacctggagttcctcggccgtatggattttcaggtgaaaatcaacggctaccgcgttgagctgggcgaggtcgagcaatgtgcgctggcgttcggcgcgatcaaatcctgttgcgccgtcgtgctgtcggaggcgcatcggcagcgcctggcgctgtattacgtcagcgaggcgccgctggatgaatcggcgctgttggcctttatgagcgggcaattgccgttgtacatgctgcctgcggcgctgatgcggctggaagcgttgccgcacaactccagcggcaagctggatcgcaaggcgttgcctacgcctgctgcgagcgaaccgcaggtttatgtcgctcccgcgaacgagctggaacagcagctgtgtgcgctgtggcaggcggcgctgcagtgcgggcaggtcggcatgacggacgatttcttcctgctgggcggcacctcgatcaaggccatttccctgtgtgtcggcatgggcgaattgatggccgcgccggtgccggtggtgcagctgttgcaaagccgcaccttgaaaaacctgctggccgccaacgaacgccgcctggtcttgccgcttaaccgttgggcagagggcgcgcccgtcgtatggatgatccacccggcgctggtgggggcggaagcgtttcacgctttcgctcagccgttgcagggccgattcaactgttatggcgtcgacaaccataacctttaccatcaaccggccatcgactcgctcagcgatctggccgaacggtatctgaacgacatgatcgccgccggcctgctgcaaggcgccgggccggtgcgcattctcggttggtcgctgggggggatcatcgcgctggagattgccgcccgcctggaggcgcgcggctgccgtaacgtgcaactgtatctgctggacagcttctaccggcaggctacggcggagttgcccttggatcagctgctgccggtgctgggcatcgaaggcgaggcggcgacacgcgccatggccgcagggcaggcggagcgacggctgtctgaggggagtctgagccgcaggctgcagaccaccaaggtgacgctgtttaaggcgacggagaggaacccgcagttgccggaggtggtcacggcgccgctgctggcggtggcggataatgggctaggcgcggtctgtgagcggctgagggtcatcccgctggcttgtcatcaccataacatcctgctgtgtgaagaggcgatcggccaagcgctcaacgatgacgtttga

SEQ ID NO: 432093 - DNA, 990 bp, Serratia marcescens
atgcaaacacgcaaattggggcgcgaagggctggaagtctcggcgttggggttgggctgcatggggctgagttttggctacggcccggccaccgacaaacggcaggcgatcgaactgatccgcgccgcggtcgacgaaggcgtgacgttcttcgataccgccgagatttatggtccgttcaccaacgaggaactgctgggtgaagcgttggcgccggtgcgcgatcgggtcgtcatcgccaccaaattcggtttcgatctgccgcagccggcggggcaacaggtgttgaacagccgtccggagcatattcgccgggcggtggagggttcgctgaaacgcctgcgggtagaggccatcgatctgctgtatcaacatcgcgtcgatcccgaggtgcctatcgaggaggtggccggggcggtgcagcaactgattcgcgaagggaaagtgaagtacttcggcctgtcggaagccggagcgcaaaccattcggcgtgcccacgcagtgcagccggtcacggcgctgcaaagcgaatattcgctgtggtggcgtgagccggagcgtgaaatcttgccgacgttggcggagctgggcatcggtctggtgccgttcagcccgctcggcaagggctttctcaccggcgccatcaccgaggacaccaccttcgacagcggcgattttcgcaaccaggtgccacgcttcagcgccgaagcgcgccgggccaaccaggcgctggtggatgtgctggggcagatagcgcagcgcaagggcgcgacgccggcgcagatcgctctggcctggctgctggcgcagcagccgtggatcgtgccgatcccgggaaccaccaagcgccatcgtctgcaagaaaacctcacggcggcggcggtcgcgttggcggcggacgaactgggcgagattgagcgcgcgctttccgctatcgacgtgatcggcgatcgctacccggcgcatctgcagaaaaacgtcgggcgttaa

SEQ ID NO: 432094 - DNA, 1464 bp, Serratia marcescens
atgaaaatgacactcaatcagtcgattataatcaataagttatctatcgacgtcaaaccaggtctcgatcaagatgggcgagtagtgtacttacccaacatagatagaaaaccttatcttatcactgacagccatcgtgattcaccagtcggtttcggtgtcaaaatcagtgcaacgaaaaagacctatatcgttcagcgacgagtgtcttctcctggcaatcgccctaagacaggggggaaatctccatcggaggttatcaggtctacaattggcaatgtctctgatttcgctaacatcgatcaagcccgtgaaactgctcgcaatttagttcaaaccatgaagttgaccaaaaggaaccctaacaagataaaacgggagtccgatgcttctgagctcactatcagtgaagtgtttgctcaatatcgtcaacaccttcttggcaggtctaaaccagctaaacccaacacactcaatgtcctgaacaaagcagaaaacaggctttctgaatggtcagggcttcgagtgaaggatttaaccggtaatgaaattcttcgtaagtttgatgaaatcgcaagtagagcaagaaccgctgctgaacaaaccttccgttgggccaatgttgctgtcagacatgcaatcgaaattgaagccagcaatgcccagacacaacaacgagaaccttcattgtcatataaccctttttccattttaaaagtgcagaagaagttcaggactcgttctgaactggaagatagctatcgtgcgaaaggtgtaagaaacccactttctccaaaagacaccttaggtaggtttttgactgcattgcataacaagagaagcttcaaccgccttgggtgcgattatctgctactcaccgttctcttaggtgctcgtaaggaagaaacagcatctttatgttggagggaagctctcaccaatgaagaagcaaaaacgacaagctatgttgacctgagtaacagaactatccgtttttacgacactaagaatcgaaacgatcacgagcttccgatttgtgatgccgtcaaaagaattttggaagatagaagagacatagtaaacgatacggtaacccggaaggacaaacagaagtgggttttcccggcccgttcttctcgaagtaaagttggtcactattccgatagcaaaagtctaagggaatatatctgccaagaggcgggaatcctgaagcttggtatgcacgatctacgaaggacatttggtagggttgctgaagaacttgtttcatatgccgtcgttaagagactgctcaatcacagaaatacaacagatccaacagaaaggtatgcagaacctgatcaagaacggatttttgaagcattacaaaggattgagttgcatatgcttatgactgctcctaaattatacaatgtgttacttgcttcggctaagtatcctccattacctgaaacgagggagtga

SEQ ID NO: 432095 - DNA, 189 bp, Serratia marcescens
atgaccaaagcaatatccgaattcaccccggactacaaagaccagcaacaagaggctatggctcgataccacgccaagcttgatgcgctgcgcagcgttctgatcgatcgcggcggctgtgaaagtaaggaaagcctggaagctatcgctgagaacatcagtgcagcgtttgacaagattaagctgtga

SEQ ID NO: 432096 - DNA, 438 bp, Serratia marcescens
atgaacgaacaggctaacaaagtgctggcggaactcctgcaaaaggcaagcgcaggtatcgatgcggccgtatctttcagccaggcgcagattcccgatgttgtgcaccagcttctactttggaatttcacacgaagcatcgtgatgtcgatattgtgtctgatcagtattccatttgctgtctggttcctgaagaagcaattcacccggaaaaaaattggcgagttcgtcaagtacggtgagaaaaaagagcaatatcagtggacattggtattcgatagtgagggcggagcaagcccagccattacgatattagcgttctttgggctgctatatgcgagcttcgttggtagcgtgctgcttaatatgacctggcttaagatttggctagcccctaaactttacctcattgaatacgcagccagtttggtaaaatga

SEQ ID NO: 432097 - DNA, 552 bp, Serratia marcescens
atggcgagagacggtaagattaacgcgcagatggaacgcttctgccaggaatacatcaagaacccagacaaccagactgcggccgccgccgccgccggctataagaatgcggccgtgtcggcgtcccgcaatatagacaacccgaaggtgcaagagcgtatcgcggagctgatgaagcatcgcaataagcgcaccaagataggcgctgactacgttctcaagcgactggtggaaatcgatgagttggaccttgccgacatcatgaacgatgatctgacgctgaagccactgagcgcgtggccgaagtcgtggcgacaattcctgtccggcgtgaaggtggcggaactgttcgaaggccagggcgatgacaagcagatgatcggcgtgctcaagtcaataaagtggcctgacaaagtgaagaacctcgagctgattggtaagcacgtcgatgtacaggcattcaaagaccgggtggacgtcaatgttaacgtgaccctggccgatcgtatggccaacgcccgccggcgagcactggagaaaaacaccaagtga

SEQ ID NO: 432098 - DNA, 750 bp, Serratia marcescens
atgacacggacactaacgactgagcagttgagagaaatcatgtgcgtttacggaaatacgcacccgtgctatctggctgccgctgagtgtttggctaaccgggaggcgcagccggtggcatgggaaatgcgctactggaacagcggccacaacatgtggcacgactgggagcgcatcacagcagaacagcacgcagagatgagcgttaagtttgcgacggacaacgattacgagtttcgtgtgctgtacgatgcaccgctagcgccaaaatcgaacgcggcagactgggggatcaacatgcaaaccggtacgccgatcctcgtctacaaaaactgcagcgtgattgagtcggagcaagcgcactacgtgctaccgctcatcaacagcgcagttcatccagcgccagcagtgccggtgctaatcaccgaagacgaacaagaggaggatgtcagccaggggtatgccaactcattccgtgggggctggaacgcctgccgcgccgcaatgctggctcaacctgtcagtagcggttgcaagtttcctgaggaatggatagcgtgcagcgatcggatgcctgacgaaactcagccggtaatcgttgtttctgacggaggggtagttcaacgcacggtatatcaattctgcgatggcgtatggagtgattggtatgacgaacatgaccatttgaatgcagatacgttcactcattggatgccattacctgcagcgccggagggtgggaatggctaa

SEQ ID NO: 432099 - DNA, 276 bp, Serratia marcescens
atgccaacacattcagagctgattagcttcacgcgggacagaaaggagaacacaacgaccagcgtctatcacactgagcagcattcacgaaacgcccggacggtcgtcgagcaggaactgattatcaaaggtgaaggcatgttccggcgatataccgccgacatgcgttttgatgacttccccgcctgcggatctgagcgtgaagcagccctgaaacttgccgattggatgcagcgtcttggcgctgctattgaagaccactggagccagccatga

SEQ ID NO: 432100 - DNA, 801 bp, Serratia marcescens
atggacaataagctgagcgaactgagcaagccggtggcgtgggcattcaaagacgccaacgacgttgagcatgcatcgataatcaagaaagccaatctgtatggtcgtcacgatttccagcccctctactcgcaagagtacgtctcagccctgcaacacgaatcagcagttaactgggaggcggcgacatctctcgttgcagagagcgaggaattaaagcgggccttggaagcgtcaaagaaaagcaatgcattcctcaaagagcagctggcgcaattggcaaacttcaatcccgactgggacatgcttgaagcgtgcagagaaagctggcgtgaagtagctgctgcacttaaggaagccgaggccacgctggaagcgaaggataagcgcatcgccgagctggaagccatccgagcagacgcctcccaggtgttcaaagaaatcggcaacgagttgggctgcaatcccgacaacgagtcgatcatgatggctatcgacaatttgaagcaagataacacggccctaagagatcagcgcgcgggattggcgcgcgaggcgaataggctggaaacccacaacgcaaggcttagggaatggaacgcagggttggcacaggaatccagtgagctacaggccaagctggctgcgccggtgcggttgccgaacaagaacgatgatgagttttggttcgatggcgtgttccaggttgcgaggttcgaccgtgcagttgagcgggccattagcgctgctggattcaagtttgtgggggatgagcagtcatgccaacacattcagagctga

SEQ ID NO: 432101 - DNA, 279 bp, Serratia marcescens
atgccagcaaatgaactgaagcctggcttcatcactggcaccacaaatcatgacgaggtgcctcacgtccgctgcactatctgcggtggctattacaaagcagatgagccagaagatcatcaatgcgatgacacgcggatgagagacgaggatttagaccgttgccctgcatgcggcgaggatatgtgggctggcaatgaactgtgcaaaacatgtcagtgggaaaaggatatggaagacgcccctggcggtgacagcgctagggaggtggagcagtga

SEQ ID NO: 432102 - DNA, 543 bp, Serratia marcescens
atgaaagagcgcccagtgattttcaacggcgagatggttagcgccattctcgacggccgcaagacccagacgcggcggattgctagagctgacaactccaaccacttgcttggatgcccattcggccaggtaggcgatcggttgtgggtgcgcgaaaccttcgccggtcactatctcgatgatgaccaaattcaggacatcaaagatggcagatgcaaagcgaaagacctttgtgagtatcgctcggattacggagatgatgctgactgcgctgacggatggacgccatcaatccatatgccacgctgggcctcccgcatcctgctggaaatcaccgccgtgcgcgtggagcgcctgaacgatatcagcgaagaggatgccaaagccgaaggcgtgaaagccggtgtttgccctggtcacgaacacatgatgcatcaggtggcattcagggagttatggcaatccatctacggcgaagaaagctggcgcgccaacccctgggtttgggttatcgagtttcgtcgcttggaggtggacaagtga

SEQ ID NO: 432103 - DNA, 270 bp, Serratia marcescens
atgatggaaatcttcgacctcgaaaacgtctacgacgagcagataagcccgctgatgcagaaaatcattgccatctgcaaagaaaataacatgccaatgatcgcctcctttgcgttcgagaattgcgaagagagaaatcttggctgctgcacaaccatccttaacgatttcgatgatcgcaaagttgctgagtttactcaggcggtgcgcatcattcaaaaatcgccacaggtattcggtttcgcgattacttccggggaggccaaatga

SEQ ID NO: 432104 - DNA, 516 bp, Serratia marcescens
atgaaaaatatcgttgaaaatcaatatataaaaattgataactcagatttctcttttctcaccaatcaaaagccatggttaaaaatcccagcagatggaagcccgttaacgttcacaggaaacgcagatgaggcggcaaaggagtttttcaacgccctgattcgagtgcgtgacggctatatctcagcactgaaggctgagcgcgatgcgcagcagaaacgagccgatgcgctggctgtggagagcaagacgctgtccgacgcgctttctttgatttcccgttgctacaaacattctccgcacattcaaagcatgtgtgttgttgaaaccccagccactgacgcagcacttgcagctatccatgcgcagggagtggagaggctcatcaagctgaagatggaacagcttgccaacatgcatccagacacccacgcatttggcgctacagccgagtctctgcgcgctcagattaatgagttgcaagcatttgccgccgagctgcgggaggccaaatga

SEQ ID NO: 432105 - DNA, 1014 bp, Serratia marcescens
atgcgtgattacggcaaggtgcacacgtcattttggtccagcgatgacatgcgccacttgtcagacgatgcaagattgctggcgctctatctattgaccgggcagcacacaaacatgatcggctgcttccgactcccggacggatacataaccgaggatgttaattggccaatagaaagggtttcgaaagggttacttgaactgtctcaaaggggttttataacccgaaatccaaagagcaaatgggtgttcattacaaactttatgagatggaacgccatcgacaacgttaaccaggcagttgcggccctgaaattgttcggtcaaatacctgatgacttcgaagcaaagccagcaatggcgcgggtattcattgaattgatgacaccaatatcagagcacaaaaatgcggaaaaaataaagggttgggaaacccttttgaaacccttcgcaaaccgttccgtaaccagtagcagtagcagtagcagtagcagtagcaggataaacccccactctgacgcgcgtgaagaaaattcggctccacctgaagaactggattcaccaccgttcccattaaacgggaataactttggaaagtttcagatggtggaaggttggacgcctggtcccgactttgtgaaaagtgcggcactttgggggagatcaatcgggaatggatattcacagccagagctggccgagtttgtaacttactggatcgctgaagggaaagtgtttcagcaagctcaatgggagcagaagtttgctcaaagcatcgtgaagcgtagagctatcgagtcaaaatctggaggcaatgatggacgaattcaacaaggcgccaatacaggcggcagagctgtcgagagaatacgggcagcaatcgctgctgagcgccagcgagaaggcataccacctgtgggaaatgatgggcgagatgtattcggatcggtgggtggcaaagaacgggacgatgccatcattgacctggaaagcagcgattggcgggctgagtga

SEQ ID NO: 432106 - DNA, 210 bp, Serratia marcescens
gtgaaaattattaccaggatagaggccgcaaagttaggcctcaccaaatattacaccggcgtcgcctgccgcaatgggcatgtatgcgagcgttacacggtgaacggggcgtgcgtggagtgcaatgccagccatacaaaggcacagcgtcagcgtatcagggagatgattacgcttgccaaagagagcggcgaggtcgcccatgcgtga

SEQ ID NO: 432107 - DNA, 306 bp, Serratia marcescens
atgaacgcacagcaagaattagatattgaaaaaatcgtttccagcttcaccgagcaggacaacgaggcagtttatgcagaggttaaggcattagatgagaaagtccctctccatgccttcacgaagatgctcaagtcatatcttccatccgacacagatgaagaagttcttaaactcggtaccgactccaccaagtaccaagagctggcaagcacagcgatctggaattgcctcactgagctggttaagcgacagcgcgcaatggagatctaccgccggcgccaccagttcgatgaggtggcgtga

SEQ ID NO: 432108 - DNA, 897 bp, Serratia marcescens
atggtagctgcaattaacaccggaaaagcctatgcagggttccgccccgcacttgatctttcagcgtcgattcttgatccgcaagcattgtttgctagctacaagagccgcgtgctggcggacggcgggcatattcccgacgaatcaggctgtatcgaacggtttaaatttcttttgctcaatgcaatgtatgagcgaactgttgtatctctgacaccggcctttggcatcaaaacggacagcgcgggtaacgttctgaccgtatataacttgctcggtgaggcaggcgacctattggcagtatcaaaaggcacaccacctggccagatgctgtatgacacatcgacccgttcgatcaatgttcaaattacgtctaacggtggtacctggctccaaagccggggcagtatcgtgatgcagaaggccgcaacttatctgcttgccggatgcatgagcgatagtagtcgcgctgatggcaacggtttaactttcggctatccgataggatcgctcccgatgacatatatgcgaacgatgattacgaacaaccaagccatcactgagtcatggcgttttggtactcgtgattcaggctggccagcggatgttggtggcgcgttgatggtttcagccacactgtatgaagactacgtgccagcggctggattattcgatgtgacatccggtgttatcaccggttatgaaaagggtaagttcgcgatgaaaacgacctcgtcaacgggtgccctggcagacctgcgcgatcggactgctgccctggtagtcggtacacctggcagcactacaacgggctgctatggaacattcagggatatgttacacctacattcggcgtctgaagcggatgcggtgctcgcatctcgattgggtatttaa

SEQ ID NO: 432109 - DNA, 2373 bp, Serratia marcescens
atgttccatattgacaacccgagcggcgtcgaagtaatgccaaaggttagcgatgttgaaagcaccagcattcgcttttttaccgaagaaaaagacaaggcgtcttacccaggcgcagactggtttaatatcgtcatgcttgagctgttaaatattctcaagctatcaaatgtcgcaccagacaagtttaaatataaccaaatcgcaacggttattgtttcattgataaatgaacgcctttcggcgcaatccagcgtatttgatacggttgaggaaggactgagtaaaaccgaaaacggacaatattttagtgttcctcagggattggatagcgaacaatcgttcaaatattatcagaatgacaatggcactgcgttactcattactgacgcgcccagctcgaactcagtcaggattttgaatgactttatggctgtactgtctgcacaacaggcctcgttgcagaagacgacagaggttctaaatcagtacagttcaaacaattggcaatggatattatcgagcctacgtgggccgtctgaaacggctctcgcgcttgataatgattttggcctgtgggtagccggactgacgtcatcactgcaagattatgtcgagcagcttattccgaaagacctggcgaaccgctatcaaaatttgcagtacgctatcgttgccagaaatgggattgatggcctgttgacgattaacgacaacggcgacattcgcatcgtcggcaccgatgatgtactgcaagagcgcttagacacactctgttcaacaacgttctctcgcaccattgtggggttccagcacgtcatttttgccgctgatttgaaaacggctctattcgctattgatgataatggtggcgtattcattcctggggttgatgggccgctgcaagacaaattgggcgaatcacgcgccaaactggtgacatctggcggggttcctgcggctgcatgggataatacggtggtgtggtctgagcgccccgttcttaccgttcagaaactgactgatgccgggatggttttcagctacttgcctggtggagaagctgctgctggtgcaggcgtaatgtatatcccgtctattcgtgaaatgccgctcgatgcgactgaaattcatggcggtggatcgacaggccaatccttgaataccccatacgacaaaaccggcaatacaaacgtggtgaaccgtgacccagcctatcgtgggcggttactcgccgccaccaacggtaaaccggaaggtgatggcgggcgcggtatggggaacgctgacagaacgacgattaatgatatgtcatacccaggttatcggcagggtaatgtcttgccgctctacaataagctgatgtcatttacaccgggtaacgtggtctttatgcacgctgggttcgccgttggtggtgccccgttctccaaaatcaaaaaaggcactgtcccttacaacaaggggttggcattaattcaactctataaaaccgctgctgatgccgttgggaaaccctattcatttaaattcctgaccattgagcatggtgaaagcgacaacgacaatggcgataacccaaatccaggcgattatctggctaaagagacggagtacttctctgatttccaagccgatgtaacgcctatcacggggcaaaccgaaccgttcctggttgttattgggcaggttggaagccgtgtgaataccaaagcgggtgaaattgacgaagagggaaaccctaccggggaaactatcgtcgtacagccatattcagtcactgcggttgaccagaccgcgtatgtgcgccacaacccggatacagccatcatgtatggccccaaatatcccctgaactggctgtttagtgacggcacgatgagccatttaaatgcggccggtaaagtcctccagggcgaatatacggcgcaggctatccactggcatctctacgacacggaaaagaaaggcacgtggactgggctgaaaattcgaaatgtaacgctgaacggcgcgattgcggatttactctgtgatgtcccttacaccccaattgtcatcgacagcgcatttatccgtgactgccctggtaaaggcatcagcctggagcataccagcgccacggtggtgaatgtctcaatcgtaaacggtaatacgatccgtgttgaatttgataaggctccggctactgacgacgtgttgctaatcggatttacgaatacacaaccacacacaaacggcagtgtttaccccacaacgtgcttccgcgactcgtcgcctgtcatttctaaatgggtgacgcgttccggggttccgttcccgctttataactggatgtgcttagaccgtattcctttgactggagaaatctaa

SEQ ID NO: 432110 - DNA, 885 bp, Serratia marcescens
atgagtgaattttctttctctgacactaaccaggctctgtggttgttccacttcgacgccaagggtgtgtttatcggtagtgggctgaccatcataccggcgggtacgggattacctgccaataccactacagttaaatgtgatccgcagagtggctttaccggcgtttggaatgggacaggctgggattacatgcgtgataaccgtgggacgcgctactgggataaattcggtaatggttcagttatcgtggaattgagtgacgttattcctgacggtatgacgctcattgagccacctaaaaaactcgcgggatatgtattactgttcgagcatggggaatggcaacagcttgaggataaagccgggcaaaaatattacgataatctcggcggtattcatattgtccctgagccatatttcatacttccggaaggtaatacatttgttgaaccaccagagcctaaattagggttcgcgacccaatgggcaggtctggactgggtttatgttgaagaccaccggggaaaaactgcctatcacattgaagatggctcgcctgtcgtcatttcagatgttggcgcgttgcctgacaccctgacattcattatgcccgccactccctttgacgaatggaacggcaccggctgggtaaccaatcaggacgcagtggtaaaaaaccaggtcgagcaggcccgcatgaaaaagaatgcattacgcaatgaagccgatgaagaaattgccgtcctcagtgacgccgttaaatacggcatcgccacggaagatgagattgccaaacttgaagcctggagccgctaccgcgtcttgctgatgcgtgttgaacctgaacttgcccccaacattgaatggcctgcgaagccttaa

SEQ ID NO: 432111 - DNA, 753 bp, Serratia marcescens
atgttccatatcgataatgcaagcagtgtggcggaaatgcccacggttcacccgcagttatttactcagcccagatggtttaccgaaggcggtgaaggcatagagccaacttacccaggctgcgattggttcaacatcatccaggccgaaatgctcaacgtgctgacgctggcgggcattgcaccggacaaaaccaagctggatcagtttgcccaggccattcgtcttatgtccaccgactacatgatgccggtcggcatcccgtacccatggccgggttcgtctgctcctgcggggttcgcgttgatggttggccaggcgttcgacggcgcagcctatccgaagctggcacaagcctatcctggtctggtcatccccgatatgcgcggccaaagtatcaagggcttaccggcggcaaatagggcgctgttgagctatgaggctgacggcaacaaatatcatgcccatgggctggaaatcgacagcaccgatttaggaactaaagagacctcaaccgacccaggccacgaccaccaaggtggcgttgccgctcctggggcagcttatgcgccattttataccggtacggataacaccggcgattactcaaagaatttaacgagctgggccgggcaacaccttcacaccatggtgctggggtggcacggccatacagggcgggttaacggcgacggcaacccagaaaccaccgtcaagaacatcgcatttaattacatcgtgaggctcgcgtaa

SEQ ID NO: 432112 - DNA, 585 bp, Serratia marcescens
atggcccacagcgtaaccgagtggcaggatgccttgcagcagatgatgccgcgcggtcgagcctggccgcgtgaggaaaccgccaatttaaccgcgttgataaggggcgttagccaccgtttaaatcggcttgaaattaacgccgacttattgctggcggaaatgcgcccggaaactaccgttcagctcctgcctgagtgggaaaattatttgggattgccggagtgcaatattcccaataatgattttttatcgcgccgggctgcggtggttgagaaatatcaccgcaaaggcgggttagcaccgtggcaaattcaaaacgtggcgcacgcgctgggattcgatattacggtgcgggaaatattaccgcatcactgtctgcgtaattgcatggcgcgtatttacccaaagcgctaccggtttttactgtccattacggtacatgacacgccggtcactcggtttaccgtggtggaagatgtgctgacgccattgattgaataccacacccaaatgctggagtgcgtattaaccaaatatcgcctggctggctacggctacgaatatatttttgaggtgaattaa

SEQ ID NO: 432113 - DNA, 1074 bp, Serratia marcescens
atgccctttaacgtgcagagcctgcgccaaatcatcaagaccggcgagcaggatattgagattgaactggatgagcagttaccgccagtcggcgttgagcgtgccctcaacatcgcgttcagtggtgccgttcgggacgtgtacgaccaccagacctggattgccgatcaagtggtgccgtcacctcgctccgacgatcagaccatcatcgacaccgccaacgccgaaggcgtcatccgcaaggccgcgacctatgccaccggcaaggccatcttcaaagggtcacagcccatcccgctcaacaccgagatgcaggcccgtaacggtaacggttaccacgtcattgccgcgagcgcaccggtgaacggtgtgcagaccgccactatccaggctgacgacgtcggcgcgtccggcaacctggatgccgacgcccagctaacgctggtttcccccattcccggtgtcgagagcaccggcgtggtggacggtaacggccttaccggcggcaccgatattgaacccatcagcgagctgcttgatcggctgctgttccgcaagcgcaacccaccagtgggcggtgccgtccatgactttgtcatctgggcgcgtgaggtggctggggtgtctcgtgcctgggcgtgggatgcctggcacggcggcgggacggtaggtcttgcctgggtgtacgacagccgcccggacattacgcctacggcagcagaccgcgtggcgatgaatgcctatctgttccgacatgctgatccggccacgggcaacttcgtcggtaaaccgggcggtattgaggtgtggatcatcacgctgaccctcaagccagtccggcccgcaatcaaactggtgccggataccgatgagacgcgcaaagccacgctggcgaatctcatagcactgcaaaagaccctgtcgcccgggtcaacgctgttgttgtccagcctgcgcaccgctattggtactgccaccggcgtgactgattaccaactcgacatcaacagcgatatcaccagcgccagtggcgaactgatcaccctgacggaggtggtatggcccacagcgtaa

SEQ ID NO: 432114 - DNA, 450 bp, Serratia marcescens
atgaccatcagaataaattggcacctccccgcaggcggtgatatcgaagtaacccacaatggcctttcgtctgacgaaggccttgttactttagtgctgatttgtctctttaccgacgcccaggcatccaacagcgacattatccccgacggcaccgatgaccgtcggggctggcctggcgattcattcagtgatttctcatggggttccaaactgtggctgctcgaccgcgagaagctcacagagagcgtgcgcctgcgtgtggagaactacgccagcctggcgatgcagcccctactgcaatccggctatgcccgaaccgcccaggtcaccgccgccatcgtctcttccgagcgcattgacttcactgtcgtcctgacccgcccaggtaactctaccctgaccgttgacattaaaaaacgctgggaggccttagaccatgccctttaa

SEQ ID NO: 432115 - DNA, 540 bp, Serratia marcescens
atgggactgaacccggcgaacgtcgcccgctcgatcaccgccatgggacgccgcgtgcgccttatggtggaccgcgccgtggtgcgtatcgtgaccgacagcctggggcggcaaaacctccaggtgcaaaccctggcgaacgagaccaacgacagcgtcgaacgcttccagaactacggcatgtcatcggtgccgcccccgggttcggaagcgattgtggtggccgttggggggcgacgctcgggcatggtcgccatcgccgtcgaggacaaaactacccggccgaaagggctggaccccggcgacgtttgcgtgtatcaccgtgatggccacaccatcaccctgaagaaagacggtatcatcgaaattagggggaaagcggttaatctggttgctgaagaatcctgtgacattgtgagtaaactcattaatttcaccggtaaagccaccttcagtgaagatataacggttggggaaaaaagcttccttgaccatattcataaggatggcgacggtgctgatacaacgaaaccgttatga

SEQ ID NO: 432116 - DNA, 1089 bp, Serratia marcescens
atgtctgatgagttaaccctcaacgtggacaataaaatctggggcggctggacggagatgagcatcaaccgcagtctggacagcattgccggagagttcgacctggaggtgacggcgcagtggtcgcaggcggcacctcgctccatcaagccggggatggcgtgcagcgtcaatatcggccaggagcgcgtgttgaccggttacatcgacgactttatcccgagttacgacgacaggaacgtttccctgcgggtcatggggcgcgacaagaccggtgacctggtggacagttccgtggtggataagtccggccagtggggcggccagaaactggagcaaatcgccaccgccatctgcaagccctacggtatccaggtcatcaccgagacggataccggcgatgcctttggcggcgtcaccctcgaacagggcgagaccggtttcgagctgctcgatcgcctggcgaaacagcgcggggtgttgatgacctccgacgccctgggacgactggtcattacccgcgcctccacccgccgagccaccgtctcgctggtgctcgggcgaaatatcctggcagcgcggggccgcttcagttggcgagaacgagcgagtcagtacatcgtcaaaggctcggtggccgccggtggcgctacctgggatgaccagccggtgaaggtcgtcggcggacggcaaacggtggtcagcgacccggagatcaaccgctatcgcccgaaaatcctggtcaatgaagataacctgacggtgggcggcgcgagcgcacgcggggagtggtacaaggccagcgccctgggcgaggccaacaccaccgagattacggtgaccgggtggcgggaaaacggcgacacaggcccgctatggcaaaccaacattctggtgtccgtcgatgaccccattcagcagttgaaggcggattggttggtcaagactgtgtcgttctctcacggcagcaatggccgtatcaccgtgctcagcctggtgccgccggagtcgatggacttgcccgccgagaaggccaagggcaagaaaggcaagaagaaaaccgccaagacggaggcaacatgggactga

SEQ ID NO: 432117 - DNA, 1257 bp, Serratia marcescens
atgaacgcaaaatgggaagacttgcatgatgccgcgttccgaggcgtggcgttctacgtcaaggacattgagggcaacggtggccgtcgcgccattccccgggcatacccgcgcaaggaagtcggctggacggaagacaacggcgcggaactgacccagcaacaggtcaccggcattctcctgggcaacgactacctgatgcagctcaagcagttgctggccgctctcaatacccctgggccgggcgagctggtgcatccctggtatggcgtgcaactggtgcaggtcggcaaggtcacccaccgtctgagcactgaggaaggcggcatcgcctatatcagctttgaggtcttcgaagccggtcagcagttgttcccttctgcccaggaagacaccacggccaccacgctcagcgccgccgatcaggccaaggccgccctggcgaacggtgactacttcgaggcgctcgacggcctgggcagcatggtcgatacgctgctggatgacatgcagggtctggtggcgaatttgcccacgttgccggacgcgctcaacgactggatggaccgcctcaaccgcttcaaggacatggccggtatcatcgttgcaacccccggcgagttgatccgcgatgtcacgaaccttatcagcgacatcaaagacctggttaccgaagccccctgggcgctgcgcgtctatgaccagctccgggacaagtgggccggagaccgcgccgcgcgggccgcaaccaagtccctgtcggacaatgtggccgtcaatgcggataccggctttgccagcagcgtgacacccaccgccctggtcgatatttctgcgccgatggccgccaacatcgacgactttaccctgatggtggtcaccgctgcgttgattgccaaggcggagaccatcgccacagctaccttcgagaccagccaggaagcccgccgtgccggtgacgacctggcggcgctgctgggcacacaggccacggtggcggtggagtccgggcaccgtgatctgtggcgtgcgctgcgtgaattgcgctttgccgtggtcaacgacgtccgcctgcgcagcgtccagttgccggagctgcgccgcgtatctccggtacgcaccacgccggtgatgttgctggcctggcgcgagcgcggcgacgccgagcagcgggacagcctggtgcagcgtaaccggctgcgccatccctcattcattcaacccgggcaaatcatcgaggtgatcgacaatgtctga

SEQ ID NO: 432118 - DNA, 1773 bp, Serratia marcescens
atggcaaagcgccttgatactgaaatcatcatcaatctggcgggcaatttgaccgccaaggcacgccaatacggggccaacatgtccgagttcgcccgccgtaacgagcgggccatgtccgtggtgaaggccaccagtgcagcagcgggtcgtggactggatgcactgggtaaccgctacacggggataatcgcgggatttgcgggtagcgccatgctgagagacttcgccaccaccgaccgccgcattactcgcatggggctggcggcggaaaagacacgcaaagaaatggccgatatgtacagcggtatgcaagattcggccatcacgtttcgggtcgatgattctgaagtggtgagcgctatcgagaaggtcggcaccgttaccggcgacattgatttcggtttcaaaaaccgcaacatcatcgccccttcgattgctgcatccggtgctgatggcgaaagcatcggcgctctgttttcacagttcaccaaatttaatctgggcagcgaaaaagaaaccttacaggcaatggatacgcttaatcagctcggtaaggaaggcgcgtttgagctgaaagatattgctgaacgcggtgttaaagccttctctatgtatgccgccgcgggtgcaaccggggttcaaggtatcaagggcgttggtgtggcgttggagagtgctgttgatgccacgggcgacacaacaacagcctccacagcggttgaaaacctcattcgtgatttacagattccgaaggttgttaagacgttacgacaaaatggcatcagcgtttacgacaaagaagggaaaatgcgtcacttacccacgctgatgggggaaatagcccaaaagtcaggtagtaaaggtgcagagaaacagaatgctcgattgcttggcgcgggttttaatcaggacagtatcctgctgttaagtagcgtaacgtcaggtaagggagcggagaatctcaagcgctacaacggcgttgtggccgatgggcaagggattatgaaagatgccgagtatgcgtctaaggacttcacttccgcgatgtcgtcactcagtacaacctggaaaaaatttgccaatagtaatcttgcccaccccgttcaggaactagctgatgcgttgaactctcttgaccaggaaacggtccagaactggctggagataggaaagaacgtcgctattgctggtgcaggcttggtcgccacccgtaaagctttccagattggtaaaggtgcttatgactttctacgccccggcaaaaaaggtatcccaaccggtatcgccgacgtgtttggttcaggcgtgatgccagtgtacgtcaccaatatgcagggcggcatggggagtggtgatagcggtttagggcttcctgagtcaccaggtaaaaataggcatgataaaggaggcctctttggggtggcgatcaacaccgccactgaaattgcctcccttattgacttcccggataccgatgaaaagcgtgccgctattctcaagcgtgccaaagagaacgccgaacgttcgaccatgtgggatgacgtcaaaaactggtttacgtcggcgccagaatttcatgacccatccccctgggcctccctccagccacagaaccagaacccgacctatccgatggtaccccagcagcttcagggcagcattgaggtgacggtgaaggatgaccgggtacaggtcaccaaggtcaatgtgaatgcgcccggtgtcaccctgagtgccgccagcggcgtgcgtaatgtggagcaagactga

SEQ ID NO: 432119 - DNA, 384 bp, Serratia marcescens
atggcgcagatgacagagacattgatccacggcctggtaaccggcaaaggcaccacggatgaaaccacccacaaggaggtgacgctgcgtgaactggggtcgaaagacatcgttgatgcgcagctcgcagctgagcgcgtagtgattggggagaacggcaaggcggtagcctattgctctgaggtcttgatgggcctggaactgctccgccgtcagattgcctccatcggcagcatcccggggccgctgagcctgaaacagctttaccagcttcaccccgaagacctgaagctgctgacggcaaaggctgatgccttggacgacttgctgacggaggtcgccgaccgggggcgacctgatgccgatggcgacggcgctcagtaa

SEQ ID NO: 432120 - DNA, 351 bp, Serratia marcescens
atgattttaggtgaagcatcgattcgcgtgaacggacgcgaactgccgaccaaagggacgtccacgctgaaccccggcggctataaccgcacgatgcacagcggcggcggcaagaactggggctactcccgcaagactacccatccgacagtccaggtcacgctggcggcccgggatgacgtggacgtcattgagattggcctgtgggagcaagttaccgtcatgttcgagggcgacaacggccagagctatatggtgacgggggccgcggcggagaacccggcatcgctgtcggaagataacgggcagattgaggtgacgttcatcggcaccaagtgcgtgaaggtgtaa

SEQ ID NO: 432121 - DNA, 1485 bp, Serratia marcescens
atgtcattaggctctattcccaatgatctgcgcgtgccgctggttgcgattgagatcgacaactcgcaggcgctggacggcgctccggcgcaacaacataaaatcctggtgattggctaccagggtcaaggcgcgaccgttccggcgctgacgcaaaaccgcattaccagcgacagcgcccccgaggtgttgtatggccgtggctcgatgctggcggagatgcttaaggctctgcgcaagggcaacacctacaccgagacctgggcaatgggcattgccgagccgggtgaccagaccggcgcggcggcgacgtctgagctgacggtctccggcaaggcgagcgcagccgggacactggcgctgctggtctgcggcaaatctctccaggtcggcatcaaggcggacgacagcgccgccaccgttgcagccgccgtgttggcggccgtgaatgctgataccaccttgccgatcaccgcagccgtcaaggccgatgcaccggagacactcaccctgacggccaattggcgcgggcagaccggcaacgatctggacgtgcgcgtcaattactacccgggcgagcagacaccggtgggtctcgtcgtcaccgctgcgccattcaccggcggcaccggcaccccggacctgacggcggtggtcgccgccctgggcgatgagtggttcaaccatatcgtctgtccgttcaacgacgtggcgagcctcaacacgctgcgtgatgaactgctggaacgttggggggctctcaagatgattgaggcagtcgcctacaccgccgtgcgcggtacccatgcacaaaccggcacctggggcagcacgcgcaatgacttcctcatcaccgcgatgggtaccaatatcgcgccgcaaccgtcgtatcagtgggcagccgcctatgcggggattgccgcataccacctggcgattgacccggcgcgtccgcttcagacactggccttgccgggtattttgccgccggacaagtccgtgcgctgggacatgccggagcgcaacctgcacctgtttgatggcgtggcgacacactacgtggatgccggcggcaacgtctgcatcgagcgggaaattaccacctatcgcgtcaaccgcttcggcgatgcggatgtgtcgtacctggatatcacgtcaccggcgacgctgggtcatatccggtacgtcatcaagaaccggttcaccacgcgctacccgcgccacaagttggcggacgatgatgtcctggcaacgctggagccgagtcagccggtgatgaccccaaaactctgcacccaggagttgctggatatcttcatcaccgagctggagcctgccgggctggtcgaggacttcgacgactacaaagccaccttgcaggtcacgcgggataccgctgacaagaaccggctgaatttcatcatccacccgaacctggtgaaccaactgcgtgtgttggcaggcctcatccagttcaagctctaa

SEQ ID NO: 432122 - DNA, 219 bp, Serratia marcescens
atgaaaaagaaactgattaagcccagtgccgaggcgctgcaagtacgtaaaccggacggcacccaactgtcgccggatggcgaggaactgttgttaaccgcattctggcggcgacgttacgccgaaggcgatgtgacggtcgaggacatcccggtaccaaaaaccgatgcggccgaggttaatgccccagccaccaaacccaccaaagcggagaagtaa

SEQ ID NO: 432123 - DNA, 621 bp, Serratia marcescens
atgagtaccgaacgcccgagcctggtgaccctcggcagcaccgtgagtgccgccgagcggattgttgcctggctgaagcctgaactgctgggagacgaccctgaccaggtgaagatggtcgagcgtcatatcggccagttcagcagcccggaggacgtgaagcgttatctgtcgggtcgtgatggctgtatccgcctggcagcgttgcgggtgcgggacatccatcatcaatcgggcggcatggtcggcctggtgacctgggcggcgtatgtgatgaccaccgatgcctgggcctatggccgtgacctgcgggcggaggtcatggtgagcaaagtggcacgccggttaacgcatcccggtgcggccaaaaacctgggggcggagagcaaggcgacggacatgaccgccgacaacatctacagcggcagtctcgacagtctgggggtgaccatctggacggtgacctggaaccaggcattcaggctggatgaagaagtggatatcaccacactgccggacttccttcgcttgggcatgacggtctccgcccacggcggcgaagaaatcaacggcgtgatcaacgtgcgagagcaaaacgacgatgaaaaagaaactgattaa

SEQ ID NO: 432124 - DNA, 543 bp, Serratia marcescens
atgggcattcaggttgaagtcctgggtacggcgaagcttgccgatatcaagatggctatggagcgcctcgccgatagcggcttgcgtgcggagctactcgacagcatcggtgcggtggcggagtcccaaacccgccgccgcatcaccgatgagaaagcctcccccggcggcgagccgtggcaggactggagcgcccgttacgccaaaacccgccacgggaatcaaagcttgctccagggcaacggcgatctgctcgacagcgtcacctttgtcgtcgaacgcgaccgggtacacgtcgggacgccgctgcgctatgcgggcgttcaccaggaaggattcagcggtagcgtgtcggtcggcgcacatcaacgtcttatccgccaggcgtttggccgcgcactgaaacacccggtgtggcaaagcgttggcgcacatagccgcatgatgaacattccccagcgtgaatggctgggcctgtcgaacgctaacagcaatgagctgttgcacgtgattggcgatttctggaaggaggtattgccatga

SEQ ID NO: 432125 - DNA, 435 bp, Serratia marcescens
atgagatacgccacccgtgaagacctgctgacggctgacggctcttttgtctggaacgtcgccatgaacccggagacggagcagcttgacgaagccgccatcagccaggcgctggacgacaccgacgaggagatcaactcctggttgtcacgtcgcttcaagttaccgctggaaacaacggtgccgcgtctgctgcaacgggtggcggtgtccatcgccttttactggctggccgatcgagacaaccaggttaccgagctggtgcaaaagcgctatgacgaggcggtcaagacgctgaaggatatcgccaacggccagcgcgacctgggcctgccgacaacggatcaacccacggaaggtaccggcggcaaagtcatcatggtcggcgagaacacacgtctgttcacccgtaatagccagaagggcgtgctctga

SEQ ID NO: 432126 - DNA, 348 bp, Serratia marcescens
atgggtgacgccaccggtactcaactcgatgctgagcagctcaaccaggcacagacgttgaccactgagacgcaggcatcgcccggcgatgctaatccggcggacgttgaggtgttgctggtaaaagccgtgtcaggcaacggcttctggcgtgccgggaggttctggccgcatgaaggtgtccatgctttcgtcagtgatgatccagacggcgataatgctgacagcctggcggaagacggcgcaactccgttcattagcgttgctactgccgaacggctgaaagcagagccaaacctccatgtcactgtcgtcgaaacggtcagcaccgacgacaagggggaatga

SEQ ID NO: 432127 - DNA, 918 bp, Serratia marcescens
atgccaacacctaatgcagagattttgcacgccctgacaacctccctgagcgccgcgtttaccgccgggctgtcaggcgtggagccgcaatacctgcgcattgctactgaagtgccgagcgggtccgcctccaacacctacggctggctgtctgatttacctggcatcaaggagtggatcagcgaccgccagctcgccgtgctgagccaacagggttacaccatcagcaacaagacctgggaaagctctatccgcgtgaagcgcgaaaacattgaggacgaccagattggccaatacagcgtgattgccaaggcgtttggtcgccaggtgagcgaatttccggacacgctgagcttcccgctgctggtcgcaggcttcaacacgctgtgtttcgatggccagaacttcttcgacactgaccacccgatggccggtggcacctacagcaacatcgtgggtgacggtaccgagacaggcgagccgtggttcctgattgatgaatctcaggtgctgaagcccatcctgtaccaaaaccgccgtccctttaagttcgtctccctggatgacctcaacagcgagcacaccttcctgaagaatgaatttctgtatggggtagatggtcgctgcaacgttggtttcggtttctggcaaaccgccgtggggtcgcgcgcgccgctgaacgtggcgaactatgagaaagccgttgaagtccttcaggggatgcaacgtgccgatggttccccattgggcatccggccgaccacgctggtcgtcgggcgcaaaaaccgcgcagcggcaaaacgggttatcgacgccatgctggtcgatggcggtgactccaacatctactacaaggatgtggatatcctcaacagcccgttcatcgtgacgcctgctgcgccaccgtccggcggctaa

SEQ ID NO: 432128 - DNA, 957 bp, Serratia marcescens
atgtccgttgaattgctggcgctctgtttcgagctgccggacaccattgacaacaagctgcctgactggctgccgatgttgcctatcggccccttcacagggcgcgatggccgttcgtggatcaacaacgaacccgaagccgtcatttccaaatcgctgcaatttagcgacgtgccgttcgatatggagcactccaccgaacttaaagggacgaaaggtgaccccgcgcccgcctacggctggattgacgacctgaaaattcagggcgatcaggtctgggcgcatgttgcctggaatgctgagggcgctgaactcatcttggggaaaaagtatcgctactacagccccgccttcggttacaccgctgatggcctggttacgaagttatccagcgtcggcctgaccaacaaacccaatttatttgtacctgcccttaactcggagaacaccgacatgaaactgcctgaactgattgcggcagctttgggcctgggcgcagatgccaccgttgaatccggtgtcactgctatccagagcctgaagaccgccgaacaggtcgcattgaaccgtgcgcaaaatcccgatctggcgtcctgggtgccgaaagagacccatcagctggcgctcaatcgtgcggaaacagcggagaccgcgttgaaagaacgcgcagagaaagacgcggaaggcctggtggatgcggcgattgccgcaggcaaaatcgccccggccaaccgtgatatgtacttggcaacctgccgcaccgaggaaggtcgcaagcagttcggcgcgttcaccgaggccgctccggtgattgtgaacaccgacccggagaaaaagaaagcgccaggccagaaggataagcaggcgctgaccgaaaccgaggtggccatgtgccgttccatgggtatcaccgaggcggagttcctggccgccaaacctaacgccactgaggaataa

SEQ ID NO: 432129 - DNA, 840 bp, Serratia marcescens
atggctgataacgacattgtccccaaggaggccctggcctggttcaaggccaagaagctcaaacccggctttgattatcgtgatgtgtggcttgaggaacacagcgccgcatttaccgtggcgaagatgacgcagctcgatttgctcagtgatgtgaaagccctggtcacccaggcgctggccgagggccagacctttcgcgactttcagaaagtattggagccgctgttggtcaaacgcggatggtggggagtgcgggagatggacgacccgctgaccggcgaaacccgcgtcgtgcagctcggcagcgatagccgcctgcgcaccatctacaacaccaacatgcgcactgcccgcagcgccgggcagtggctgcgtattgagcgaaccaagcgcgcgatgccgtacctgatttataccctggggccgtccagggagcaccgcgtggatcatctccaatgggccaacacttgcctgcctgtcgatcacccgttctggttgactcacatcggcccgaacggctggggctgcaaatgcggtgtgcgccaggtcagtaaatatgagtacgaccagatggtgcaaaatggtgtgacggagaccgcgccggtgttcgacggtaacggccaacccaccggacaggtcagtcgctccagggtgccattgaaaacgcaggctccgccagtcaaaaacgtcaaatggttgaacaagcgcaccggcgaggaggaactggtgccggagggcatcgacccggggtggaactacaaccccggcatcagccgccaggccgcactggagcgtcagctccaggccaagcagcaggcttttgatgccggtcgctga

SEQ ID NO: 432130 - DNA, 1578 bp, Serratia marcescens
atgttaaacaagctgaccggagtcatccgtaacctgtttcaccccgtcaccggtgacaaggtagaggtaagtcaagacctgctgaaggaagaacaaacccgcgcccgcgctaccggcacccgccgcgccaacgccggtatcagcgtcgccagcaccatcacgccgcaacgcctggcgggggtgctgcgcaacgcggctgacggcaatgccctggattatttcatcttggccgaagagatggaggagcgcgatctccactactccagcgtgctgcgcacccgtaagctcaccgtcgccggtattatcccgacggtcgaggccgccagcgatgatgcgcgcgacgtcgagctggccgatgctgtccgcgtgatgattgagcgcccgcagctccctgagctgctgtttgacctgcttgacgggttgggtaaaggcattggtgtggcggagatcctttgggacacctcaaccgttccatggatgccgcgtgattattcctgggttgatccacgcttcctcaagatggacgcagatacactgcgccaggtgcatgtgttgaccgaagcggagccgttcaacggcgagccgttggccgcgtacaaatacatcatccatcagccccgccttaaatccggcttgccgctgcgtaacggcctggcgcgtctggtggcggtcatgtatatgctgaagtcattcacggtacgcgactggtgggcgttcggtgagaagtttggtttgccgatcaccatcggcaaatatggtaataacgccagcgcagaagatattcagaccctgattgacgccatcgcgtctctggcctccgatgccgggtgcgccatcccttccaccatgcaggtggacatggtcgagaccgccagccgccagggcggcggcgacttgttcaagggcatggcggaatggtgtgacgcacagaccagtaaggcggttctggggcagacgatgaccaccgacaacggcagcagtcagagccaggccaacgtgcatgaccgggtgcgcatggatatcgccaggtgggatgctcgccaactggagaacaccctcaatgagttcctggtgcgaccattcatcatgctcaactatggcccgcaggccaattacccgaaagtctgcctgcgtatcaatgagccggaagacctgaaggccatggtggaggcgctggttccgctgattgaccgagggatgaagatccagtcgtcggcgctgcgtgacaagtttggcctggacgagccggaagaaggttccgatatcctgcaacctgccgggagccagagtggctatgccatgttgcccgcccttaaccgcgaacagttggcgttgaatcgcgagtctgcaccggatgatattgacctgttggccaacgaggggatcaacgactggcagcgcgttggcacggcgttcaccaatccggtattagcgctggtcaatgaggttggcagctatgacgagttcctggcgcgattgccggagctgcaagccagcctggatgccagcgagtttatcgaagggttgacgcaattgtgcttcaaggcgcgcggcctgggagatatgaacgatggctga

SEQ ID NO: 432131 - DNA, 1569 bp, Serratia marcescens
atgctaacagccagcttaaacgccattgcgaccggcattaacggcggggaggacttcgatgaaaacgaagtcctccttggttatcagcggcgttggatcgccgacgactcaccgctgaagattgcggagaaatcccgccgaaccggtatcacctgggcggaagcggcagacgccgctttaacggcatcgaaagccaaagccgccggtggcaccaatcacttttacgtcggctccaacaaggagatggcacgcgagtttatcgatgcggcggcgatgtgggccaaagcctacgacctggccgcggcggacgtttgcgaagaagtcctggccgatgacgataaggacattctgacgtttgtcatctacttcgccagcggattcaaggtgcaggcgctgtccagcaaccccagcaacctgcgcggtatgcaaggcaacgtgaccatcgacgaagcggcgttccatgaacgcctggcggaggtgctgaaggcggcgctggcgctcaccatgtggggcgcaaaagtccgccttatcagcacccataacggcacggacaatctgttcaacgagttgatccaggacagtcgcgccgggaagaaacgctattccgtccataccatcacccttgatgatgcgtgccgcgatggcttgtacaaacgcatctgccaggtgaaaaagcgcgaatggagccagcccgccgaagaccaatggaaagccgatctgttgcgcgataccgccacgcaggatgacgcgctggaggaatactattgcgtgccgaagaacggcagcggcacctacctggcccgctcaatccgagagcgtgccgcacgtggtgacggccccgttctgcgctttaccggctcggcggagttcaacgccctgccggaagggatgcgggcgctggatatgcgggaatggctggagcacaccgtgctgccggtacttaaccagctccccgataaacgtcacgcgctgggcgaagacttcgcgcgctccggtcacctgacggtctttgcgccgatcactatcaacgatgacaccacgcgaacggtgccgttcctggtcgaactggcgaacgtcccctataagcagcaggagcaggcgctgttcttcatctgcgaccgtttgccacatcgtgacggcatcaagcttgatgggcgcggcaacggcaactacctggccgagcaggccgccgaacgctacggtgccgaagtggaagtcgtgatgccgtctgtcgcccactaccgcgagaacatgccgcgcttcaaggcagcgtttgaagacgatgaactggtcgtgccgaagcatgaggatgttgttaacgacctggggcagattgtcgtcttgcgcggcgtgccgggtatcgatgaccgggagaataccggcagcgatggccacaagcggcacggtgacagcgcctatgcgattttcctggcctatctggccagtaaagaggattgccgccgttatgagctgcaccgactcaatcaacccgaacggccggaggagcgcgatgagcgccgccaaatgcgcatcacgcgcgggctgaaaaatcaacgagggctactgtaa

SEQ ID NO: 432132 - DNA, 576 bp, Serratia marcescens
atggccgatgaaaagccgacccgtggccgtccgtcaaagattgacctgttgccggagaacatccgtgacgcgctgcaccagatgctgcgcgacaaacgccacactcaggaagaaatccgcgaggctatcaacacgctgattgaccagcatgagttgccggacgacatgcagctcagccgtaccggcctgaatcgctacgccagccgcatggaggccatcggctccaaaattcgcgcctcccgcgagatggcggaaatttgggccgccaagctgggttccgcgccgacgtctgacgtcggcaaattgttgatggagtttgtgaaaaccctggcgtttgaaacgtcaatggcattggccgagaccgagaaaaccgttgagcctaaggcgctaggccaattggcattggtcgcgcagcgtatcgaggccgcgcagatggtcagccacaaacgcgagaaagagatccgccaggcattcgcggaagaagcggctgccacagcggagaaaatcgtgtctcaggcgggactgtctgcggataaggcagcagatatcaaacgccagatattggggattgcatga

SEQ ID NO: 432133 - DNA, 213 bp, Serratia marcescens
atggtctgtctggagatagagtccgatgtgattgcgccagcctttgaaaaggccaccggcaagacctatgaccgcgagtcaccagacagcttcaccaacacgttcttgaacaataacccgtcttacaagcgcgccatggatacgctacgacgggccattggcaaagagcgcaaagcgcagatatcagcctggagaacgaagcatggccgatga

SEQ ID NO: 432134 - DNA, 288 bp, Serratia marcescens
atgcgagaaattcttgatagcgatcagcgactggtcatcctgcgctccttgctggagtgcggtgacagcgcgaacgaatccgtgctgcaaacctgccttgaggcgtatggccacagtacatcccgtgatgtggtacgcacacatctggcctggctggcggagcagcgacttgtcagcctgcgcgatgtggccggatgttatgtcgcgacgatcaccggtcgcggtgacgatgtagccaacggccgggccgtcgtgcctggtgtcaaaaagccacgggcacgggggtaa

SEQ ID NO: 432135 - DNA, 303 bp, Serratia marcescens
gtggattgggaagtcgttaaaggcaactgggccatcatttgggcgttgttcatgtctgccgtcaacgtgatccagttactgctcgccaaaacttatgtgaagcgtgaggagctggagttgttccgcacacgtctgcaatcgatggagaacaccatcgccgggctaccgagtcaaaaagacctgcaccagttgcagcttgaaatgagcaatttacggggagacctacgagaactcggcccggccattcgccaggtgaaacacgtcagcgatctcctactggaaaacgaattgaaggataagtga

SEQ ID NO: 432136 - DNA, 606 bp, Serratia marcescens
gtggatccaataaccgtgtctaccgttgccggggtgctgatgaaagccggtccatccgtgctgcgtgccatcggcggtttgttcggcagtgcctcagccaagacagcggacaccgtcgccgggatggtggaagccgtcaacagtgcggtcaacccgcaggaccgccagcgcgtcctggaacagaagctggcgtcactcccgccggagcagttcgtgcagctcgagtcactcaagactgagctggagaagatccaggccgaacgtgaacgtaaccggtttgccgatcagcaggcagcccaccacgaacagcaggaaactatccgcaacggtgacaacgccgttgatgactatgtgcgccgcacccgcccgttgatggcgcgtctgtcactctacagctccatcgcttatgtgttgttgctggctgtcggacagcaagcggcggcgattgccactgctgtcggtcatgtgctgacgatgcctgcaccggattgggatatcgccctgatgttggcgaccccagcattggggtatctcggtttccgcacgcttgatgggttcgcccgcttcagcaagtctagcaagcacaaactgccggtggtgaagtga

SEQ ID NO: 432137 - DNA, 354 bp, Serratia marcescens
gtgataaccatgaacaccgtgaacaacatcgttaactctgcctggttggtcggcatcttgctgttgatctccctgattctggccaccggattaccgcaggcctcgttgtggtattggctgctggcgctgctcggcggtggtttggcttacctggggatttggcttgaggacaaaagcaatgcattttcccaccgggagatgctttccgtattgctcagcaccctcggcaacttcctggggatggtggctttcttcatcgcgccattcggcggtatccagttgctggcctttgccaccggcctgctggctgtacgtctggcttgctataaggggctgctgccgtggatccaataa

SEQ ID NO: 432138 - DNA, 246 bp, Serratia marcescens
atgggtaaaggctgggatgagtcgatgcgccagggccgccgcgatcgcctcaaaaaagaggtgctccaccgcatggccggtggccccaaaccggagccggttaactatcggggctgtgacggcactcatgccagcttttacatgaagggctgggagtccgtcggcccacgcgatattgcctggcagtgccagcgttacaaggaacaacaccgtgataaccatgaacaccgtgaacaacatcgttaa

SEQ ID NO: 432139 - DNA, 582 bp, Serratia marcescens
gtgagtcagttcaatcctaccccagcgtttacccacgccgttgcttttgtcctgggcaaagaaggcggctacgtcaatgaccctgccgacaagggcggtgagaccaagtacggcatttccgacaagcgcgacggcgtcgccgacggtatgactgacgttgacggtgacggccagcccgacacccgcatcaaagacttgaccctcgaacaggccagccagatttacttccgtgattactggtatccggcttactgcccggattggccggacggcatctcgctgttggtctttgatgccgccgttcagcatggcgtcaagaaagccatcgccatgttgcagtcggcagcaggtgtaaccgctgacggcatcgttggtcccaaaaccagagccgccgttgtcagtgccgaccctgaatggctgctggcccgtttcctggtctaccgcgcccgctactacgccgacatcatcaagtccaatccgtcccagggtaaatatctcaacggttggttcaaccgcttggatagtgtggcgaataccgcatgggaagtcgtcggcggctcggcgtcggtcgttcggaactaa

SEQ ID NO: 432140 - DNA, 399 bp, Serratia marcescens
atggctgataaccttgaacttttcgacgacgaccaggatgatagtctgctgagccatcttgacgacgccgatgaaggcagtcgttttcctgcactattagccgagcttaacgcgctgctccgtactgaattggtacgattaggctatgacccacgccattcgcttgagctggttgtagccatcagtaaacagattggcggtatgcaggtgtattttccacgaggccaggcgttagaataccttgttcgtgatatgcgaatctggcgtgatttcactggagacaatgttcatgagcttgtagaaaaataccatgtcacatacaaaacggtgtataaagccatcaagcggatgcgtaagcttgaagtcgggaaaaggcaactatctctggatatggagtaa

SEQ ID NO: 432141 - DNA, 528 bp, Serratia marcescens
atgaagctaggccgctgtcctgtctgtcattctgatttgcatctcgacgccatcctggaagacgacgctgggcgtgagttgctgacgttgttaaccaaactgccggggggagcagccaaagcgatggtggcttatatagggttattccgcccggagaagtcgaacctgtcccattctcgggctgtgaaactcatcaacgaagtgcttgcacagcatcagccgggtcgagtgctgacccatgccctgagcgaaaccgttgagcgtatacgggcaaagcgcatcaagggtgacaaaaagccgctgagtggccacagctatttgcgggaggtttaccgcacttctgaacagatgttcgcgcagaccagcaatatcgctgcacgtgaacgcgacgaaagcaagcgtgagactgaccaggataagagccgcgacgattatctagcccatatgcaccgcctgggtcaggacgtgtcaaaattgcctggcggtgcagagtggctggaacgtaatggagggggaaaccatggctga

SEQ ID NO: 432142 - DNA, 555 bp, Serratia marcescens
atgaataaaccacaattaatccgattgattcatgtagccaagggaaagctgagtatccctgacgatgcctatcgtgcgttgctggcgaacaccgctaacgggaaaaccagttgcagccagatgtcggttatggagctgcgtgacgtctatgcagagctgcaaggtaaagggttcaaacgtagcttcaagaaaaccacaaagcgtgtgcgtgagaacgccaagggcgcaccgcgtgtggaggagatcagcaagcttcgagccatctgggccaccatgcaccgtcacggctttgtcgaaagcggtgaagagaccgcattgaacaactacgttaagcgcatgagtcgccagctcaatggcggtgccggtgtagatgaggtgggctggctcgacggctatctggcgtttcgtgtgctggaatgcctgaagcaatggcatatccgcatgatgctggcaacgctggacgcccgcaagaagccccgcccgcaacacccgctgaccggtgaagaggcacggagctatgacattatctttgatgcttacgaggactcactatga

SEQ ID NO: 432143 - DNA, 615 bp, Serratia marcescens
atgagtaacgaaatcgaacaagcaggataccgtaaaaatgcccaggggcatctggtaccggagaacttgatccgcccggtcgataagctgcgcgacgatgtcgtgctgaatatcgtcgaagccgccaaggtgttgcgccaggcgatggtagatttcaaagctgcatctatgcaacaaatcggtgacttcatcgacctgtcatcgaatgagtacggcgtggagtatggtggtaccaagggcaacgttaccctgccgagctttgacgggcaatttaaaatcctacgcgccgttggcgaccatcgcgtctttgatgagcgcattcaggcggcgaaaaagctgattgatgactgtgtcatcgcctggtcagacggtgcgaacgacaacctgaaagcgctggttgaccatgcttttcgcgtcaacaagcaaggccgcattgatgtgaatgaagtgttgggtctgcgacaggttgaaatcgatgacgcacgctggcaagaggcgatggacgccatcgccgattctatccgggtcacaggtaccagtcagtacctgcggatttacgagcggcagccaaacggcaagtacgagcaaattagcctagatattgccggggtctga

SEQ ID NO: 432144 - DNA, 624 bp, Serratia marcescens
atgagaaaagcgccttatcatacttacaatatggctcattttaattttctaattgcaaataaatcactaccacgtaacgaactgcatagtgcatttaactcacattttgaatttcatgtttcagtcgcagcctttaaaaagttgataaagagagctggtttaacaagaacaggctcgaagaaggttccttggtctaccgaggaagcgcaattcatacaggataacatccaactagaaaatgaagagttatttagtcggtttaccgcacaattcggcagggtaagaagccgttccgcaatgtgtaacttcattaattatcgggggttaagaagaacgaaaattgtacgtaggagtatagaaatcaatggggtgaagatgtgtctacatcatttcgtgtgggagtgtgtccatgggcaacttcccccggagcattgcgtgatttttattgatggcgacatatcaaattttcgaattgaaaaccttaaagcagttccacggagtgctgtatcagccgctgctggttggttgggcggagatatgtataaagtaaatgaggcagcaatttcggtatgtgccttaagaaatcggattaagcaagcttctgttaaagcaagcaattattaa

SEQ ID NO: 432145 - DNA, 240 bp, Serratia marcescens
atgagaaataagttcatagatttgattaatcataactttgcagcgttggagcgtctgaatcaagaggagttgagcattgacgaaatcaaggctgaggttgttcgctcaaaggccatagccgaagtttccagcgttattattaatggttacaacacggtgctcgaggccaataggcaagtgtatgaagggtatgccagcagcattccaaaagtacttggggtagacggaggtgaaaaatga

SEQ ID NO: 432146 - DNA, 198 bp, Serratia marcescens
atgattaacccaaccaagttggtaaacgcgctgggctggctgcaacgccgcaacgtggaaatcaaaaatgtaaatgtcagccgcgcccatcccatcgttgaggtgaccgcaccggatgctgacctgaaacgtaaagcgcacaactatcactcagtctatgccgccacaattcaggggtgcgttatttactggaaataa

SEQ ID NO: 432147 - DNA, 957 bp, Serratia marcescens
atgaccaacgtaatcgatttagatcagcaacaagaaaaaattagcgacattcgcaacaccgtacgcgccaccgtagaaaactccggtattacctatgcatccgtggcgcgcgaggttggtatttccaccggttcgatctcgcagttcatgagtggcgaataccgtggtgataacaacaaggttgccagtaagttgagtgtctggctggacaatcgccgccgtcgtactacagagatgccgaccgcaccggacttcatcgccacccgtaccgtgaagcaaatctggagcgcgttgcaatatgcgcaattggcccaatgcatcaccgtgatttatggcaactcaggcgttggtaaaacccgcgccctccagcagttcgctgctgagcgtccgaacgtgtggctgattaccgtatcaccgtcacgctccagcctcagtgaatgcctatatgagttggcattggagctggggattggtgatgcgccgcgccgttctggccagttaggtcgagccatccgtcgcaaattacgcggtaccaatggtgtggtgcttgtcgatgaagccgatcacctggactactccgtactggaggaactgcgcatcttgcaggaagaaaccggagtcggtttggcgctgattggtaaccatcaggtttacggaaaattgaccggtggcaacagtcgcaatatggactttgcccgcctgttcagccgtattgcaaaaaaagtgtccatcctgaaaaccaagaaagccgatgtggaagcgatagctgacgcatgggggctgaacggtaaggccgaacgcgagttgatctatttattggccgataagccaggtgcgctgcgtaccatttcccacacgctccgcctcgctgcgatgtttgcccatggcagcaatgaaacactcagtgagaagcatattcgtgacgccgttaaagaccttgaaggagttgcctcatga

SEQ ID NO: 432148 - DNA, 1905 bp, Serratia marcescens
atggctaaacgtgaagggtggaactggagaaagcgtgaaggcgttcgtgggaatgcgattgaattttccctcacagctctgccgccaacagcccaggttcagttcatcaagcaaaccggcaatgtcatcgtttcaggtagaaattatgaattaaaaaataagcaggaagcctattgccgagaggtcctttggcatcactgggaatctgcgacggagaagcagcgcctggcggcacaaaagaaaactgaagccgttcatgcggtatctgccctggttgataccggcattgatgttgttactgcatttgacgctgtagctgaaacccacgacgcctccgtggcatcagtgcgccgctggtattacaccgcccgtaaatatgcgcgtgatgactggatggcggtgctgctgggccaatacggaaagagcatcgaaacccgccgtaaaaaggaagcttattgcgaccaggacgcgtgggactttttactggccgacttcctgcgcccggagcgtccggcattgcgtactgtttacgctcgcctgcgtgaagcggctaaagcgcatggttggactatccctagcctgtcttccattaggcgcaaactggagcgtgaaatccccgtagaacagcgcgttttactccgtgaaggtgagcatgccgttatgcgtctgtttccacatcaggagcgcactgtggctgatttggctgcgatgcagtggataaacggtgacggctatcaacataacgtgtttgtgcgctggtttaacggcgaagtgatccgccctaagacatggatttggcaggacgtcaaaacccgcaagattttgggctggcgtaccgacgtcagtgaaaacagtgactcaatccgtttgtccctgtctgatgtggttgaacagtttggcataccaaaagagctgaccatcgataacaccatggcagcagcaaacaaatggactaccggcggtgttcctaaccgttaccggttcaaggtcaaggaagatgaccctatcgggattattcccatgttggggatcaaccttcactggaccagtgtgctgcatgggcgtggtcatggtcaggcgaaaccggtagagcgcgcattttcccacggtggtctgggtgaggttgtagacaagcacccggcactagcaggcgcacacaccggcccgaacccgatggataaaccggacaattacggtgaccgggttattgaggccgaagaattcctgaaggtgttggccgaggggatcgcgttctggaaccggcaaccgaaccgcaataccgaaatgtgccagggcctgctgtcgtttgatgaagcattcaacgaacactatgaacaagccaccgtccgtaaagccacaccagagcaacgccgcttgctgttgctacctgccgaagcggtacgcatcaacgagtctggcacgttcacaatggaagctggcggcaaggttcagtcgcgcaagaaccgctatttcaacgagcgcttgttgggcttgaagccgaacaaggtcgtcgtgcggttcgacccgcagaacctgcaccaaaacgtcctgtgttacacgctggatggccgctttatttgcgaagccacctgcatagagaaaaccgggtttggcgatacgcaggccgcacgtgagcataaacgcaagcgtaatcagttcgtcaagagcaccaaagaggccgccaaagcatcgcagcgtatgtcagcgctggaggctgccgagctgctgccagacaccatgccgccagcgccgccggaatcccgcgtggttgagttgtatcgccctgtaggcaacacactgcggcggcagatggtggaggaacagttagaagacgatgaatcagaagacgcgtttgacaacgcagtgagccagttttacagcgcattacagaacaaacagatttaa

SEQ ID NO: 432149 - DNA, 1809 bp, Serratia marcescens
gtggcgctgattttgctcagcgtgacgtttctggggctttcccgctacggcgacatcaaactcggccccgatcatgcgcaacccgattttcgctaccactcatggtttgccatgctgttttcagcggggatgggcatcggcctgatgttcttcggcgtggcagaaccggtaatgcactatctttcgccgccggtcggcacgcccgagagcgtcgaggcggccaaacaggccatgcgcctgacctttttccactgggggctgcacgcctgggcgatctacgccatcgtggcgttgattctggccttcttcagctatcggcatggcctgccgttgaccctgcgctctgcgctttatccgatcatcggcgaccgcatttatggccctatcggccacgccgtcgatatcttcgcggtcatcggcaccgtattcggggtcgcgacctcgctgggttatggcgtgttgcaggtcaacgccgggcttaaccacctgtttggcgtgccgatcaacgaaaccgttcaggtgatattgatcgtggtgattaccgggctggccaccatttccgtggtttcagggctggagaaaggcatacgctttctgtcggagctgaaccttggcctggcgctgttgctcctggccttggtcttgctgttggggccaaccgttctgctgttgaaatcctttgtggaaaataccggcggctatctgtccgagctggtcagcaagacgttcaacctgtatgcctatgagccgaaatccagcaactggttaggcggatggacgctgctctattgggggtggtggctctcctggtcgcctttcgtcggtatgttcatcgcacgagtttcccgcggccgaaccatccgcgaatttgtcacgggcgtgctgttcgtcccggccggcttcaccctcatgtggatgacggtgttcggcaacagcgccatttacctcatcatggaaaagggcgcgacagacctcgccgctacggtacaacaagacgtggcgctggcgttgtttaacttcctggagcatttcccgttctccagcgtgctttcgtttatcgccatggcgatggttatcgtctttttcgtcacctccgccgattccggcgccatggtcgtggatacgctggcttcgggcggctccagcaacacgccggtttggcaacgcattttctgggcgtcgctgatgggcatcgtcgccatcgccttgctgatcgccggggggctcagcgcgctgcaaaccgtaaccatcgccagcgcattgcctttctcggccatcttgctggtctccatttacggcttgcttaaggccctgcgccgcgacctgaccaagcgcgacagccaaaatatggccaccatcgcccccaccgccgcccgcaaccccattccctggcagcgcaggctgcgcaatatcgcctatctgccaaaacgctcgctggttaagcgctttatggacgaggtcatccaaccggccatgacgctggtgcaggaagagctgagtaaacaaaacacgctcagcagcatcaacgccactgcggaagaccgcattcgtttcgaggtcgatttgggcgatgagcttaactttatctatgaagtcagactgcgcggctacagttcgccgacgttcgctctggccgggctggataacgatgaacagcaagccgagcagcacaagtattatcgcgcggagatctacctgaaagaaggcggccagaactacgatgtcatgggctggaatcaggagcagttgatcaacgatattcttgaccagtacgagaaacacctgcatttcttgcatctggttcgttga

SEQ ID NO: 432150 - DNA, 906 bp, Serratia marcescens
atgaaccgaacaatccttctgcccttgcttatattatttttggcatctatcttgatgttttttttattagttgtttacggtatcgattctgaagcccttttttctgttgagcttaccaacccaaaatttggagaatatctagctgctcttggcacatttggtgactttgtcggcggattaacaaatccgattattggaatggtcggttttttagcccttatgttcacgattaccttacagattagacagaataagcaaacctctgaacaatcctacgaatcaagcatattcaatctaataaactttcaaaataatatcattgagaacttggaatacaatgataataaaaaaagagctgcattctcaaaatttcttgatgaacataaagaagatttcaatggtgtagataaaaacacggtcatgagacctcaccatacatatagcttagcgcgcataagttatgagagctttaacaataattcgaatgaggttttcggtcactactttagaaatctttacaccatactcaaaacaattgatgaacttccagaacgatttaacaggaaaaaatattactcacgaattgttcgctcacaactttcaatgagtgaactgacagttttatttctaaactgtcttttcaaagtttgtgatgatggaaagtttgctgaattactgattaaatatcagatattggaacatttaaaagtaacttcaatatctaaccctaaatccgcattggacattgagccttgggagttagattacaaaataggagacaaggcaacagtttcgatctatgaaatggcatattacatgtatggtgaaaaaagttttcggcaaacaacttcgcaagtgaagaaaccacacatggtgcttttgggaaaaatagagcgaattgcctga

SEQ ID NO: 432151 - DNA, 732 bp, Serratia marcescens
atggtacaaatcccaagaagtcgaatccttttcaaatatcgcaaatttgataaaagctgcttagaactactattaaatcgagaactttggtttgcctcaccggccacgttgaatgatccatttgaagcagagtcttctatacatgaagttttagatgctgtgtgggcccgctatccaatcccaactacagagcgcaaggcttatgaggagtacctgcatcagcagctaagttcagctggtatttgttcatttagcaaagcccgtaagaatcagttaatgtggtcacattatgctgatgagcataaaggcgtatgtataggatttaaagagcacaaaattagacctcatggctcttatatataccctatcgatgtgacttatcaagatgagtacccttttgaagaaataattgaacgcttcaattattttgagcatatctatggaatgaataacttaaaatccatcgctggcgatattctaatatcaattcttggaacaaaatatacaagctggaaatatgagagggaacggcgattagttttcgttaaatccattgcacataagttcgaaccggatgcagtaaactccattgccttcgggctaagaatggcagaaagagataggcagacattacggaatttactatcgggagctgagtgggatcatgtgaaatggttccagtcaataaagtctgcgacgaaatactcgcttgagtttgagcgagtaaagtaa

SEQ ID NO: 432152 - DNA, 891 bp, Serratia marcescens
atggaactgatcgcttacgacaaaaatgcacttcagcaaatccacgactggaaaaacccacagcgaggttttctagctaaatcatttgaattaatcagcaaacctctaaacagcgccggagagatggttctttcaacgcctgtcgtcggcgaagccattcaatcttctgtacagggtctggtgggtgtctgtaacgatgccgcgctgtggtcagtgcgaccagaggcgattttcgaagagtttcgtaatgacgggcatgtccacatcaatcactacgaagatattgaaacgctatgcctcgaggacatcgataaaactgtcggctggctggctgctaaatacaagggcatcgcattggcggaaggtgcaggcgcaggtgtgatggggattgcagggatggccatcgatatacctaccctcattacattgaatctgcgagccattggagaatacgcgacatattacggttttgatatcacccgtcaggaagaacgactttttgcctttaacatattggggctctcttctgcttcatcgactatggcgaaaaacgtcgctatggcacagctggtaaaaatatcgcagcaggtcgcaaagaaagtagtctgggaggaattagaaaaacaagtgtttgtgaagattattaggcagatagccaacagcctggggattcgcctcaccaaagcaaaactggcccaaacgatccctatcgcaggtgcggccgttggtggaggttataacgcctatttcaccagcaacgtctgtgatgcggcttaccacctctatcgcgagcgcttcttggcaatgaaatacgatccgtctgtaattgatgttacggtaaaacctgcagatgattttttgcccggcgacggcgatccggttttcgaatga

SEQ ID NO: 432153 - DNA, 375 bp, Serratia marcescens
atgcctggcaaaataacatctgcggtggtgatcctgctggcgctggcggccgtcatcggcgctggtgcttggctggcagggcgacactaccaaccgacgattgaccgtctcaacgaggcgctgacgcagtgtaaggatactggccggcaacaggcatcggcgatcgccagccagaacgctggcattgaggcgctgcagcgcaaacagcaagagctggaaggcaaggtaaaggcagagcaggaaaaagcccgtagggaagcgcagggcgactatgagagggcaagcgaggttatggcagagcgcaccacaggcgatgtgtgcgcggcggcgtctgatgcgtttgacgcagagctacgccgggagcgtgcacaatga

SEQ ID NO: 432154 - DNA, 258 bp, Serratia marcescens
atgaagagtctgttcatggtttccgccctggcattggccggctgctcgagcgtaccgcaggcgccgtcatatgttgaagttaaagtcccgatcgctgtgccatgcaaaactgcagacgttgcgcgcccggcgttcgcggttgaccagttgcctatcggtgctactatcgacgtccagatgcgagcgctgcgcgctgaacgccatcagcggatcggttatgagcgtgagttgctggcagcgaacgaagcgtgtaaataa

SEQ ID NO: 432155 - DNA, 825 bp, Serratia marcescens
atgagcacagctaaggaattgattgagcgtgaaggatttgtagttttccgcaatgtctttactccagaagaaatgtccagaatggattcttctatccataaattctttcaaagaaaaggggtgacttaccggtatggactaacacagccaaacatagcggttgaagagccagagttttcatgggtcatcagtcatccaaaggttatagaagcctaccgctctgttttcggccaagatgattttgtctttacttcacatgctgacatccatcacaacatggggtttggttggcataaagatgacgctaagggcgcctacttttcagagccttactttattccagattgccgcgtctacaagatgggaatctacatgaatgatcactctactgatggtaatggaatgtctgtgcgtgtagggtctcatctgaaggataacctgactgatggtgaagcggtatcgctggctacaaaacctggggatgttgtgatttttgacgtaagaattactcacgccggcaaagaatatgacatctttgagcgaggtttgctgaagttgggtcgtatacttggtgatacaactgggaaatcgatggtaggaagaaaagtcagggatatttattgcggatttaaaacgggaaaacctaaacgcagtttcttttttacattcggagcaccaaacattttcactaacgattttgctcgcacaaatatgcgccggcaactagaacaatcgggcgggaaaaaattcaaattaccggattcattgtcggctgagcttcataaaaacggcattaagaccttaaatttcgacggcgaactttaa

SEQ ID NO: 432156 - DNA, 312 bp, Serratia marcescens
atgaacaagagaactaagcgtactttcacccctgagttcaggctggaatgtgcacagctgattgttgataagggatactcgtatcggcaagccagtgaggcgatgaatgtcggctctaccacgcttgagagctgggtacgccagctcaggcgagagcgtcaggggatcacgcactctgctacccccattactgcagagcagcaacgtatccgcgagctggaaaagcaggttcgccgcctggaggaacagaatacgatattaaaaaaggctactgcgctcttgatgtccgactcactgaacggttcacgatag

SEQ ID NO: 432157 - DNA, 372 bp, Serratia marcescens
atgtccagcccgaaacgcttccgttttactaatcagctcattaaatccctgccccctaacacatcagattcacgcagcaccgatgccgaatacagcgataccgagatttctggcctgaagtgtctggtcagcaaaggcgaaggacgtaaaaaatttttgctccgctacctctatcatggacgaaaacgcgccatagctattggtcactggcctgaggtggatgtcaccttagcccgtaagatttccatggagcataaacgctcacttgccaccggaactgaccctaagcaggaacgtgaaaacaagagacaagaaatgacattcgatgaactctttaaccagcattatctggtatgtgtagtggcacagtaa

SEQ ID NO: 432158 - DNA, 1251 bp, Serratia marcescens
atgggaaatcgaccaacttgggttttgcttgtgtctcacgggtcgttcgatttcccaccccgcgatgcggggttgaagcaagatatgaacttttcccttcactcttatatcaagcacctgcgtgataccgatgcttctgaagattacatcaagactgttcagcggcatgccagaactttagtgaataataatcttcctgtgatccttacgcttggtcatctcgcacactcgacaaattctttccacaatactcttttaaatatagttaaacgagaagtagatccatatagagtattttcaattgggaaaaaaagtggtggcaagcgccttatatgtgcacctgagctaaatttactaaatgttcagcggtggattaatcaatacatactaaaatcagagctagcgctaaaaaaaatatcatcaaataccactgcttatgttcctggcgggagtcacattaaaaatgcagagcgacatgttggcgcttcttggattattaaaatagatattgttaatttcttcgaatcaatatcagaaaggcaagtatattatgtatttagagagttaggctacagggcattagttgcttttaatttggctcgtctatgcaccagaattttgccacataagctagataatcgcaaatataacaaaaaaagatggagatcaaaaaaacaatatgcttattgtaactcaaaagttgccggacatttacctcagggagccccaactagtcccatgctcgcaaatttagtgtgtgtcatgttagatgccaagcttcagtgtatagcttctgaatatggactatcatacactcgttatgcagacgacatgacattttcgggtcattttgacgataaaaaaactgcattgatattcatgagagagatatcaaatacagttattaactatggattcagcattaactctcaaaaaagttccatcgcgaaagatggggggcggaaaattgtaactggattatctgtcgatggcgaacatattcgattaccccgtgtctataaagataaaataaggcaagaaatattttatataaaaaaatatagtcttgaagatcattgctccaaaacgagaaaaggaaacagattttcttatatcatgcatttggcaggtaaaattcgctacgctactttagttgaacccgctttcggaaataagatgatatctgaattcgtcaatatatttcccgattttttagatatggagaaaatattaaacagcagcataagataa

SEQ ID NO: 432159 - DNA, 1266 bp, Serratia marcescens
atggctcaacctatacagctctccgaacatgaattaagcgaagtatggttagatcaattccaaacaagcaaagatagagcgcttgcaaaacaattaataaatcaactaaaactagtatcagggcgagattttgaaacagggattgaggaagccctttgtaatttacaacatagattaagacaaactattggtgtttatcctattagttcaccattagcagaaggtatatctggctataacattttcaccggagggattccagccgatgatgatactaagtcacgtgaatccgggcgtagaagaaaatttggtagcgaagatcgtgttgggcatatactagcaaaacttcaagatcgattcaaacgaagcaatggagcttcaataatcgaatgtttgccaacactaaaccagttacgtacacagggaataaaacatattgttttggtcgatgatatatctggcagcggaaaaagaattactgattattggaataatataccacgtagaatcaaaagtttattatcactaaaaaaagttgaattatggattgttctttatgccataacccccaaaggtaaaaccgcaataactaaagctatgccaactttcccgatatctaatctaattacagttttacctgaggtaactctgaaagagttaattagtgatgagtcattagaactttgtagaaaatatgcatcgttaattgggcttgaatcatcagccattggctatcgtggtagtgcctgcccgataatttttgaacatggttgtccgaataatcttccagctatcttatgggataataatagacggaactggcaggcgctctttccaaacagatcaataccctctttgttacgttcttcctttgatagaaataatagtatccagagacatacagaggctttatggaatacaaaccagccaaagcttgcattgagaatattagattgcttaaatgaagataaaccattaccccttaagtatagagttatatttacaattcttggcttacgtaaacgtagaatgtcagaacggaagatttcatcaaaattaattttatctattagtgagttttcaaaatatttaaatgaagcgcaatcgattggtttatatgacaaagctacatcaagcgtaacaccattaggccaagagttcttatctcgttttcgtaatagaattaatcaaaaaaaacataactgtgttattgtcaataacgatgagatgtattatcctctccaatgtgaagggaagattcgttaa

SEQ ID NO: 432160 - DNA, 903 bp, Serratia marcescens
atgagggacgatttttctaaagctattaaacaagtcctggctgaacgggtagcgtggcgttgttctaaccctggttgcagaaatgtgactgttggtccgcatttggagccttcaaagcgtgttaaccttgggcaagcatgccatatcgaagccgctgcagaaggtggtcctcgttacaatagagatatgaccaaagctcaacggtgttctccggataatggcatttggctttgctccatccatgctcgagaaattgatgttgatgcggttcgcttccctgttagtctcctccgtgaatggaagttagctgctgagcagaatgcgctggaagaattaggcaaggctagagataaagaacatcctgatgtatacacagaaaatattaatcgtcatcgagagtttttttcacatattcgtgatatggaatattttcagttatataaaaatataagtcagcaatgttttgttttacgtggcgcagggctattcaatataatagtaaaagaccgcttcattgatattgaatttaacaaagatttttattccaatcaattatatagagattgtcattatattgatttgataaatctaccggtgaaagacttaattgactttgttgtgtgctcccgccaatttaatgaaacaatagagtcttttagtttaacttatgactttaggccaaatgagtataatgaaatatatttttcttttcatgtgagcactggtaatattaaccctaatgagttcggtgtttcatattatagtaactatattgtaaatgatgatgaattgagaaatgatatgggggtacgtgttcccccctcttgtgaatctatatacctcaagatattagtagctagttataatatttaccgaagcatagttacataccaatcaaactaa

SEQ ID NO: 432161 - DNA, 1254 bp, Serratia marcescens
atgatgatcgcgctgtcgtcgatgttgggccaggtgggcctgccgggcggcggcttctcgttcggccacggctcgatgaacggcgtcggcaacccgcgcgtggacacacccgcgccgaccatgccggtaggggaaaacccggccgggctggcgatcccggtggcgcgcatctgcgacatgctgctgcaccccggcgaaacctatcaattttgcggcgagacgcggcagtacccggatatccacctggtgcactgggccggcggcaacccgttccatcaccatcagcagctgaaccggctggtggaaggctggcagaagccggatacggtgatcgtacaagatatctggtggacggcggcggccaaaatggcggatatcgtgttgccggtcaccagttcgctggagcgcaacgacatcggcggctcctcgcgcgatcgctacgtgctggcgatgcatcaggcgattgcgccgcagcatcaggcgcgcaacgatttcgatatcttcgccgatctggcggagcgcctgggctatcgcgagcgctttaccgaaaaccgcggcgagcgggcctggatcgaagatatctatcggcaatgcggcgcggcgcagcggcgcgccggcgtcgcctggcccgagtttgaggatttttggcgccggggctatgtcgaactgcccgcgccggccaaggagttcgtgttttttgacgcgtttcgcgccgatccgcaggctaacccgctgcagacgcccagcggcaagatcgaactgttcagcgagcggatcgccggttatcgctacgaggatttcgctccgcatccgcagtggcggccgccgatcgagtggctgggggcgccgcaggccaaaacctggccgctgcatctgatctccattcaaccgagcgatcgtctgcacagccagatggatccggcgccgctggcgcagggcaataagaccgccgggcgcgaaaccctgtatatgcatccggaggacgcggcgcagcgcggcgtggcggacggcgccgaagtgctggtcagcaatgcgcgcggcggctgtttggcgggggtctccctcaccgacggcgtgacgcgcggcgtggtgctgatggcgaccggcgcctggttcgagccgggttacgacgcgcagcgccggccggtcgagcaggcgggcaacccgaacgtgctgacgctggatatcggcacctcgccgctgacgcaggggccgaacgccatgagttgcctggtggaggtcagcgcgcgatga

SEQ ID NO: 432162 - DNA, 363 bp, Serratia marcescens
atgattacgccaatggaagaaaagcgccataagctgttatctgaggttgctgaccatgtcgccgaaacagcatctgactatgggtgttcaactgaacaggccgagcatctggggctggcggtggcaaatttcctggcagagcatttcggtgggcagaatttcacgtttcctcgtgattacgtttataagctggccgttcgtgatctgcagatttacaacgagttcaaaggcaacaactgggccgacctaagttcccgatatggcattaccgaacgagggttacgcaagctgattcaccgagtacataaacgagtgatgaagcacaagcagccgatgctggatttgttcggtggcggggagtaa

SEQ ID NO: 432163 - DNA, 426 bp, Serratia marcescens
atggatcgcaatagtctggttaaattgattcacgtcgctaagcgtgaccgccgactggatgatgatacgtaccgtcaactgctcgatagctatacggggttaagctccacgaaagaaatgactatcaagcaattagaatcggtgatggaggcgttttatggcctcggattccggcggacatttaaaaatcctggaaagattacggcgaccgacgagcaatcgaagaaaatccggtcattgtggctggagatgtttgaggcggggtttgtccgtgatagttcggagcgtgcgatcaatgcgtatgctcaccgcataacgggtgtgggtcggctggaatggctgggaacggatcaggctagtcgcgttatcgagacgttgaagaagtggcagaaacgcgagctgaaggctcaagctgcattgcaataa

SEQ ID NO: 432164 - DNA, 723 bp, Serratia marcescens
atgacccacaacaatgaaaagtatctggcgaagatcaagaagctgctgaatctggccagacgtagcaccaacagcaatgaagccgcgaatgcactgagtcaggctcaggcattaatgcgcaagcatagtctcactgagacggatattgacctgatggagattggtcgctccagcagtaaaggcgcaccatcgcaggcgcaaaaaataccggcatatatgaatagcttggccaacatgatttgccgcgcatttggtgttgattgctattaccaatataaacgtgagtttattcgtggcggccaacggacggtcgtattcttcggccctaatgaaaggccagaaatcgcggcatatgcatttgatgttttgtcacgtcaattagtaaaggcgcgtcgtgagtttacggcaaaaatgcggcgtaatataaagccgagcacaaaagtctcccgtgcggatcagttctgtgagggctgggttgatggtgcatatgccgttatcgatatttacaaggtagctgcatctgagaaaacacttatggctgcgtattacagccgccttaaagaagaaatggaatttaaagagtccacccttcgggctgcgaaaaaatgtcgcggcggtgatgacgctgccgatgccggttacagggctggcaagcaggcacaactgcatcaggctgtacatggcaagggcggttctttgacaggcataggagtaaaaccatga

SEQ ID NO: 432165 - DNA, 294 bp, Serratia marcescens
atgtctatagcgactaaccgctcgacgttgtaccgcatggccatgaaacgctttggcccagactctcaactcctgaagctggccgaggaggccagcgaactgagcactgaggtgtcgcgcaacctgaacggtctgagcgacgaaatgaagctggccagcgagatggccgacgtggagatcatgatcgaacaatttcgacagaatggtcttgatacggccatcgatttccacaagcggcaaaagctcatgcggctggcagaacgcctgggagttaactatgacccacaacaatga

SEQ ID NO: 432166 - DNA, 207 bp, Serratia marcescens
atgagcctgcaatgcaaaacctgtagtgaagacgtagaggagctcgatttcgagcaggcaagcattatgcaggggcatgacggcacctggtgtgtggaccttatcctgacctgcccgcattgcgggcagacctacaacgcgtttgtgcccaccagcgagctccagcctttacctcacgatgattattcggaggggatatgtctatag

SEQ ID NO: 432167 - DNA, 525 bp, Serratia marcescens
atggcaaaaggtaaaaagcggcttaaagctgcggctgttccgtacgccgcgcaaacgaaaactgaggtaattgacggtattaaatccctcggagatttacagcgtcaattaacccgtatcgaaacggaaatgaatgaccagattgcagcggtaacgcaataccactcgccggagattgaacgactgaaggcagagataagcggtctgcaacagggcatacagacctggtgcgaggccaatcgcaccgaactgacccatgacggaaaaacaaagactgtcaatttaaccacgggcgaggtgatttggcgtaaccggccgccgagctgcacgatacgcggtgccgaggcagttattgctgccctgaaaagactcaagctgactcggtttattcgttccaaggaggaaattaataaggacgcgatattaaacgaacaggcggcagtaaaagatattccgggcatcactattaatcgcaacctggaagatttcgccatagtgccatttgaacaggagatcgcccaatga

SEQ ID NO: 432168 - DNA, 225 bp, Serratia marcescens
atgggtgagaaaataaaagtcagtattaccgctgacatgcatattcacctggataaaacggtggaaatggataaagccgactttgacgaataccagcgtatctgttccgaaggagtcgacctggattcacgcataggagaaatagcctgtaaatatgacctgaacatcaacgacagcagtttcgaaaatgacccggaaaacatcacattcgaaatagttaaataa

SEQ ID NO: 432169 - DNA, 303 bp, Serratia marcescens
atgcgtactactcataaattatcgttggtggtggaaagcgagggaattcaaatagccatcatcaccacaagcaaagcggttaccacattatctgcccagggaattacggttaaacgtatcgacatcgaagaaggccgccgaccaacggtggtcattcacccgaacgccaccacgcgcagaatggtggcccagggtaaagcggttcgatattcaacgggcaccgatgaacaggggcgctatcaaaaattccagtaccagttggataagtgccgggtcgtttgggaggagcgaggtaatgggtga

SEQ ID NO: 432170 - DNA, 1164 bp, Serratia marcescens
atgttggtactaaaggcgatgatgcaagagcacggtattgatcagcagatggtcgcagacgctgcccaggtctctcaaccgaccatttcgcagatagtgaaccacggcatctggccaaaacgccgcactgcagaggtgcgggaaagcatcagccaatttttagcagcgcgcgggctggatacagctggcgcatttgaagaggtgcaggcggcggacaccgcccgcaccgatatctcaccacacgccccaacggagggagacgacaatatgttactcgcaaaacaggtattacatccagcaacgaaaaagcacttcggtttgttccgcgacccgttcgccgacgatgccctacagggctctgaggatgtgttcacgaccccggacattcgttacgttcgcgaggcgttgttccagacggcgcgccacggcgggttcctggcggtggtcggtgagtccggtgcgggcaagtctacgctgcgccgtgacctgattgaacgcatcaaccgcgagaatgcgccggtgattgtgattgagccctacatcatcgcgatggaagacaacgacaacaagggcaagaccctgaaagcggcgtcgatcgccgaggcgatcatcaataccctcgcgccgctggagggcgtcaaacgcagccaggaggcccggttccgccaactccaccgcgtgctgaaagacagcagcaacgccggttacagccacgtcctggtgattgaggaggcccactcgctgccgctgccgacgttgaagcacctcaagcggttctttgagctggagaacggctttaaaaaactgctctccattgtgctggtcggccagccggagctggcgatgaagctgtcagaacgcaatcaggaggtccgcgaggtggtacagcgctgtgaagttgtcgagctgctgccgctggatacccagctggaggcgtttttgacgtttaagtttgaccgcgccggtaagccggtaaaagaggtgctggatgccagcgcaaccgacgctattcgagccaggctcagcaataacatcggcggccgtaaaggtgttgttagcctgttatacccgctggctgtcagcaatttaaccatcgcggcaatgaacctcgccgcacaaatcggggtgccggtagttaatgccgacgtaattaaaggcatttaa

SEQ ID NO: 432171 - DNA, 1623 bp, Serratia marcescens
atgacagacacacgcaaacgccgcacggatgcgggcaccagtgcgctgacgcgcgaggatgccatgatgatctccgcactgttgactgaatctacccgtaagaacggcaaacgcctgtatgcagtcgccgacgcggtggcagagctgcgggccaacggcatgatttctgccgaggccatcgatgaaggtacgggcgaagttcgcccgctgtcagaaagcgccatcattcgcgccatgcgggcctacggtgtgcatcccgaccaactgatggcaccagaacccagcacccggctggccagcctgcaccctaaccatgtttggctggtcgatgcctcactatgcaccctctactacctgcagaacggcaagaaaaccaccggcctgcaggtgatggacagcgccgaattctacaagaacaagccaaaaaatttggcacgtatcgcccatgaccgcgtctggagttatgaaatcaccgaccacaccagcggctggatctacgtcgaatatgttctcggtgccgaatccggcgagaacctgtgctcggtgctgattaacgccatgcaggagcgtggcggcgcagatgtgctgcacggtgtgccgaaaattctgttcatggaccccggctccgccaacaccgccgccatgacaaaaaacctgtgccgggcgctgagcatcgagatgatcgcccacaaggcggggaacgcccgcgcgaccggccaggttgagaaagcccgcgacatcatcgaacgcaagttcgagccgggcctgaaattcgtcacggtgaacagcctggatgagctgaacgcgatggcgaagaagtggcgcagccactttaacgcgacggctatccacagtcgccacggcagtagccgcaacgatatctggctgcgcattaccgctgaacagttgattaaagccccctcagtggaagtctgccgcgaactggccgtcgccgcaccagtacgccgtaaggtgcagtccacactggaaattccattccagagccgcaagtacgacgtatcaagcgtaccaggcgtgatgattggcgagtatgtgatggtgacccgcaacccctggcgcaccgatgtcgctcagattgtgctgaccggcgaggatggccacgaggtgttccacttagtggatgaggtgccggagaacgagtttgggttcgcaaccaacgccgcgattatcggcgagagttaccgcaaaccggcggataccgtcacccagcaggtcaatcaggagattgagcagattgtcaccggcactaactctgccgacgcagcagcggcggcgcgtaaagccaaagcactgccattcggtgggcgatttgacccgtatcgcacgattgacgacaccgagctgccgtcctacctgccgaaacgcggccaggaatcggatgtgcgcggcccacgcatagaacagcgtccgctgacgcacgttgaggcagcaaaagcgctgcgggaggtattcacggcgcagggccgggaatggcaggcacagcactataacctgttggttcagcgtttcccggacggcgttccggtggacgatatcgccacgattgccggtgacctggctggcaagcaccacgtgacgctgagcgtcgttaacggccaatag

SEQ ID NO: 432172 - DNA, 912 bp, Serratia marcescens
atggccagacctaaaaacgaaccggcaccaatggtagacgacacctttttacccgctgacctgagcgaaaatcagaaccaaatggctctgcaccagcagcagatcatggagcaatttggcgaaggcctgccgtatgagcgctctcgtatcgttcatgagaccaagttctatatggctcaaagtgccgaagccatgttggaggcaggcaagcgcctggtcatcctcaaggagaacgaaccgcacggcgatttcaccgacattattgaatcccagttggcgctctcgaagcgtacagcgcaggtcatgatgcaagcatccctcaagtatttgtcgccaaaactggagtcaaaagcgcaggcgcttgcgcatttgggtaagaccaaactgttcgagttgatgaccgaagacgacgatgagctggcagcgctcgccgacggcggcaccattgcaggcctggatattgacgatatcgaccgcatgaccagccgcgagctgaaagccaagctgcgtgaagcgcgcgaagatgccgaagcccaacgccgtgtgttgtccgacaaaaacaccaaaattgatgacctgaccaccaagctgcagaaacagtcgaagatcaagccgcccgcaccggacgtcgaggctgaaaaactgcgtaaagaagtcagtgccatcgccttcgaagcggaggccgtcttgagtggcaaactgcgcgaggctttctctgttctcaccacccattgttcagaccatgagatcgatccgccatacgattttatggtcgggctgttatgccaggtcgaacgcgcgataaaccagttgcgcgatacctatgacctggagtcagcccctaccggtagtgaccggcctaactgggtggacctgccggataacgacaccaacaacgcaacggtgatgtga

SEQ ID NO: 432173 - DNA, 309 bp, Serratia marcescens
atgagcaagaaacccggcacctcatcatcagcaacgcgcacgctgcgagtactgattgccctcaagggctacacgatgacaggtctgtcaaacggcgagctggccaaagcgttgaacgtctctccagccaacatcagccgcgacttagccaccctggttgacgtcggtcttgtgattcaactcgacaacggccgctacgcgcacagcatccaaatgctgcagatcgccacggctcacgccgaacacatgtcccgcatgcaggcccgcatgaatgaaaccacccagcgcatcatggctggaacacgttag

SEQ ID NO: 432174 - DNA, 225 bp, Serratia marcescens
atgaacaaacgacagattcaggctcgtctgattgagcgtggtagtaactttcgccagttcgcgcttggtgcgggttacgaaccgcgcactgtcactcaggcggtgagccgttgggccggtaaaaaagagctaccgcgaggcaggctgacgtacaagattttgcgagacctgtctgtcgcaattggcggggaagtcacccctggcatccttggaaatgtggagtaa

SEQ ID NO: 432175 - DNA, 768 bp, Serratia marcescens
atgaaatcgacaccgatcataccttgggtgggtggtaagcgccgcttggctaaaaaaatcctgcctcagttccccgatcatacctgttacgttgagccgttctgcggcgcagcagcactgtattttatgaagccgcccagcaaggtcgaggtgatcaacgacatcaacggcgaactggtgaatctgtatcgggtgatccagcatcacctggaagcgttcattcagcagttcaagtgggcgctggtgagcaggcagatgttcgaatggttgcagatcacgccagaggtaacgctcactgatattcagcgcgcagcgcggttctactacctgcagaagcaggcgttcggcggcaaaatcgaggggcaaacgttcggcacggcaacaacgtcaccgccgcgtttcaatctgttgcggattgaggaggatttatcacaggcccatatgcggctggcacgtacctgtattgagcacatgaactgggccaaatgtatccaacgctatgaccggccacatacgctgttctattgcgatccaccttactggcagaccgaagggtatggcgtggagtttgggtttgagaactacgtggtgatggctgaattggccaggtcgatagcgggcaatatgttgatctcagtgaacgatatacctgaaatgcgggaagtttttgcggggcttcacatggagagcgttggtatccattacaccctccaaggggcaggcagaacggccacacaacataaagaactcgttatcagaaactggtga

SEQ ID NO: 432176 - DNA, 1008 bp, Serratia marcescens
atgactgagcaagccattgaagtcaaacacgtcgtagttcacgttttggtcaagaaacagaatggggatgcttcagagcaattgagccctgaagagcgtcaggttactcaagcctcccagcgcctgattaacgatatctgtgcaaaatatgcaggtcgcacaggtaaaggttacggctattttgaaggtgatacagataactacccgatggaacggatggctggtgattatctggatggcgctgatgatttttaccatagttcctgcaggatgatgcatcacctgacagagcgctcacagcgagagaatatggctaccggtgggttcgttctgttcgcccacatcatgataggacgaaacgagcatcttcttattgcaatcgttaatgctaccgttgggtcaaccgttgatgacgatctcatcattaaagacagtacctatctggatatagcaaagttgcgtatggccggtcgtattgacttaacagcatggaaaagcgatgcggaacgctatatcagttttcttaagggtcagggaaacgtatcaaactattttaaacaattcctcggctgcaatgatgtactgatcgccaagcgtgaatcagaaaaactgcgagatactttgactgcatttgcagtagaaaaaaaccttgaaggtgcagaaaaagacgcatttcttaagacagctttcgagcatttgaatgctttaagcaaggctggtgaaccactcaatctggaaacttttgttaatgctgtctggccccaggcaccagaggaattgtctggtaaacttgcttctgaagagttggagttgtcggatggttttgtgcctgatggtcgcgtcatccgtgcgctggtatcttttaaaggtaagtcaaagcactgggaactcaaatttgaccgggaagggacaacatcgggggatattgactatgaccctgagacaaatattatcactctgcgcaacgtgcctgaggagtttagagaaatgtggctgaatgaggtttaa

SEQ ID NO: 432177 - DNA, 1200 bp, Serratia marcescens
gtgacgatttcgtttgaggcactgacagatctgtaccgtcgcatggaattccgtgaggaatgccgtgtcgggacgatgtcgctctctgaccagtccgaatgtgatcttattaacacattgcttgacgatcctcgtgagttcggactttctgttgagacaggaacggttgccccaggtaatacgataacccttcgcatcaccccaccaagaagcggccttgggcttgtttttgccacgtataaaatcctgttaaacgcaccaaagcaccagtgccaggaacctgcgaagtatttcatccttgaggcgaaatttcgcaatgatgatgttgaggtacctgccttcattagtaactaccgagctattctgaagttcgttgacctgcttaaagaaactgcagcctatttcgacgtctccacctgtcagttggtctttctgagaaaagaagttattaagttgtcgccactcttttcagcggaaaccgtgcaacagctgaaaagagattgtctcgacaaccttattgcttgtttcaacgacgatacccacaaggaccagaagctagacattctgattgaaagcattcaggcagtctgtgaaggcgttgattcgcagagaatgtttgcatttttgttggacaacattcaacgcctgcatgaaaagttcctgaaaggatatcgaatctattcttctggattctcttacgacaaggtgatggaccagcttcgcacagcaaaagttgaggagatggggaagatccacaaagcgttttcggatattcagaaccatattcttggcatcccagtggcatctgtcgttgtcgccacccaattcaaagaggcctcaatatggtcaggtcagggaatcacgaatacgataattctgctgggatgtatttttgctgcaacactaatctggctggctctctctaaccagatgcagtctatgagggccctgagcgaggaaatcgaatacaaaaaaaagcaggtaaataaggagtactctttcatcaaagatgatgtggaaggcgtgtttagtagtattaaaactcggcttaaaacacagaagcgcaccttttggattattcgaggggtactggtcatcggtatcatcacagcgcttgtggtttattgttggtacacaaaacccgttcttgattggatacagcttctgatggagaagtttttcccttccggtggtagttga

SEQ ID NO: 432178 - DNA, 369 bp, Serratia marcescens
atgtcactacttcacaaagtccgtcatcagcgcctgcgcaactggatcatccttgccgtcgttctgctactcaccatctctatcgtttcgccgatgcagctgggtgtcacgctgtacaaactgtcgctggtctctatcgccgccatcctcggttatcacctcgaccgcgcgctattcccgtatgccagtcccggcagctacctgatcgacgactggaaaaataccctgggtaaaccgccggtcccatctggacgcaacgaaccggagttccctgtcgcgaccggctacgaactggtgttcgctgccgtgctgctgcgccgagcgctgattgtttccgccatctgtatcggcgtcacgatggggttataa

SEQ ID NO: 432179 - DNA, 621 bp, Serratia marcescens
atgcgatgcctgttatctggtctgtttctgctgctcagtgcctgccacccggtagccgctgccatccctgaggatgcgcggcaatatcagcgcgaactgacccgcaacgcccgcgtggtctgggggctggatgcgccggtggcgacgttcgccggtcaaatccatcaggagtcgacctggcgcgccacggcaaaatcgcctgttggcgcacttgggttggcgcagtttatgcctgcgacggctggctggattgcgggcatctaccccaaaagcctcggcgacaatcagccgttgaacccggcctgggcgatgcgggcgctggtgacctatgaccgttggcactatgaccgcatcaccgctgcaaccgaatgcgaccgctgggcctacgccctatccgcctataacggcggactgggatgggtacagcgtgaccgcaagctggctgcctcgcgcggcctggacgccgggcgctactggaacgtggtcgagagtgtgaacgccgggcgctccgccgccaatttccgcgagaaccggggctacccgactcgcatcattcacgtgtggcaaccgctctatgagcgggctggctggggctcgggggtctgccatgacgatgaataa

SEQ ID NO: 432180 - DNA, 279 bp, Serratia marcescens
atgccctcaaaaaaaccgctgctagtcgcgttaattgcgtgtttgatgctgacgtcatgcagcaactcaccaccgcccagcagcgtgctgctgccgccacaacaaccggtattaccggccgagctggcagtgcggtgcccgccaccggcgctgccgggcgataacagcgccgacgccgccgtcgtcgcgctgaaaacggtttacgaccagtacggcctgtgcgccggtcggctggccgaaattattcaatgtgttcaagggggtagttgtgggaattaa

SEQ ID NO: 432181 - DNA, 303 bp, Serratia marcescens
gtgggaattaatgaattgaggttcgactgggcatttctgcaatgggcagtgatggccgtcgtcggggtatatacctggctgattggccgccagtcggccagccagaaagagctgctggagttgcgcacccgcatcaccacgctggaagcgcaggtgaaacaggtaccgacccagtcgcagatcaccgaactcatcagcaagctgagccgcactgaggcgcagatgcatgggatgcaggagcagatggccgcgacctatcgtcgtaccgagaacatcgaagcctatctgttgcagaagaaataa

SEQ ID NO: 432182 - DNA, 297 bp, Serratia marcescens
atgagttttgccgacttcctgcgcgaagaccagcgcctggtcatgttgcgctttctggccgagatgccgagctacagctccaacagttcggtgatttaccaggcgttgacgcgctatggccatgctccgagccgtgaccaggtcaagaccgagttacgttggctcgaggagcaagggttggtgcgtatcgacgatatcgagaccgtgctggtcgcacgcctcaccgagcgcggtgccgatgtcgctgcaggtcgcgccattgtccacggtgtcaaacgccctggcgcgggaggctga

SEQ ID NO: 432183 - DNA, 612 bp, Serratia marcescens
atgtcgctgcaggtcgcgccattgtccacggtgtcaaacgccctggcgcgggaggctgagatgggccgtaaatcgaccattcacaagttgccgaccgacgttcgggcgcatatcgaacgccgcttgcgtgaagaccagctgacgctggatgagctgctggaggatattcgccagcacttccctgatacggatgaaaccccgagccgcagcgcgctgggccgctataaacaatcattcggcgagatggtcagccgcatgcgcgagcaggaccagatggcacgcctgctggtgagcgagctgggcgagaacccggacgaccgcgcgggggcgctgatggttcaggccgtcaccaccttgaccacccatgccgcattcacagcgcagcaagaagccgatccggatatcgataccgtgcgtcacctggcacgcgcggctaaagatgttctgcagtcccgtaaggccagcctcgacgagcgtcgagaaattgagcgcgccgcccgcgagcgtctgttgaaagagcaggaagagaacctgcaggaaaccgcccgcgcccagggcttgagcgaagaccaggtacagttctggcgtgaacgcgtattggggatcaagtga

SEQ ID NO: 432184 - DNA, 1680 bp, Serratia marcescens
atgaaaccgttagcctccacggtccgtaccgttgaatgggacgagttacccgcccgcgcccgtgacatcccgtttgccttcaacccgttcgaggacggtgttttgatggcgcaccaggctgaatgcctgagttatgacgtgtccattctggctatcccgaaaggccgtcgaaccggcatcacgtttgcctggggactcaactccacgctgatcgccggtgcgcagaaagcggctggcggcgataatgtctactacatcggcgacaccaaagagaaaggcctggagtttatcggctacgtggccaaattcgcccgcgtgattgccgcgcagcaagcacaagaagtatcggcgatcgaggagtttttgttcgaggaccaggacgataagggcagcacccgcatgataacggcctaccgcgtgcgattcgccagcggttttcaggtggccgcgctgtcctcacgcccggccaacatccgtggcctgcagggtgtggtcgtcatcgatgaggcggcatttcaccaggacgttcagggcgtgctggatgctgcaactgcgttgctgatctgggggggacgtatcgtcatcatcagttcgcataacggcaagaataacccgttcaaccagttctgtaccgacattgaggccgggcgctatggcaatgatgcggcggtgtttaccgtcacgttcgatgatgccgtggccaacggcctctacgagcgtgtctgtgcgatgaagggtgagaccgccacgattgaggggaagaaggcgtggtacagccgtatacgcaacgcctatggcccgcgcaaagcggcgatgcgcgaggagctcgatgccatcccgcgcgacggaaacggcgtatgtattcccggcgtctggatcgaacgagcaatgccagaggaacggcccgtgctgcgcctggcgctggatgacgactttatcaacaagaccgaggttgagcgcgaatcgtggggtaatgcctggattgaaacgtacctgcagccggtcatggccgagtgcctgaacccgcagctgcggcatgtgttcggtatggactttgcccgccaccgccacttctcggtgatctggccgattgaaatcaccgaacagctgcgccgcgtcgtaccgttcgccatcgaactgaacaatgtcccgtccggcctgcagcagcaaatcctgttctggttcatcaaaaacctgccgcgccagtctggcggtgcaatggatgctaccggtcccggcatggtgctggccgagtacacggcagaccatttcggccgcccgcgcatcgccgaaatcacgttgaaccgcaaatggtacggggtatggatgcccaagttcaccgagctgttcgaggacaacatgatcgaactgccgcgcgacgaaaacatcgcccaggatttgcggacagtagaaaccgtcgacggcattcagatggtgacttcgctggaacgcaaagacctgaaagacccggaactggtgcgccacggtgactcggcgattgccggttgcctgggcaactatgccgcgctcaacctggcggcggagatcgcctttgaatccaccggcgtgcggccggtttatcaggtgctgttgggctatggctctacaggaggcggcgagttgacggataccggcttcggtacggtgcgaggattgaatgactttggaggatttatatga

SEQ ID NO: 432185 - DNA, 1515 bp, Serratia marcescens
atgagccgtaaaaaccgacgccgtccaggccaggcgacgcctgccatgccgcgtccgcaactgggacaggagtttgcgtccaccggcgacggccgcgatattacccgcccgtgggtcggtgcgctggcgctcgcagaggacagcgttttgcagagtcgcggagcgccagacctcaaaatttaccgtgaggtgctgagcgacgaggaggtaaaatccgcgttcacccagcgccaggatgcattgatttcccgcgagattaaggtcgaagccggtggtgaacggccgattgatatcgaagccgccgacgccatgcgtcagcaaattgatagtctgggctttgaccgcatcacccgtctgatgcactacggtgtgttttacggctatgcggttgccgaactgatttacggggtccgcgacaacctgttgtggttcgacgagatcaaggtccgcgatcgtcggcgcttccgcttcagcccgacaggtgagctgcggttgctgacaccgcagaatatgaccgtcggtgaagcgtgcccggcaccgtacttttggtcattcgcgaccggcgcagaccatgacgacgagccctacggcatgggcctggcgcactggctctactggccaacctttttcaaacgtaacgacatcaagttctggctgatcttcctggacaagttcggtatgccgactgttgcgggcaagcacccggagggcgcaacacctgagcagaaacgtaacctgttggcgctgacgcgcgccatctcgactgacagcggtgtcatcatgccggagggtatggcgatagaaatgttgggcgcgtcacgctcgggcgctgccgattaccaggcgatgtataacgccatgaatgaggccatccgacgtgtggtggtcgggcagatttccagctccggcggcgcgtcaaaaggcatcggcggcgacgagtctctgcaggacaaaatcctcacgtcgatcgccaaatccgatgctgatgtgatctgcgagtcgtggaaccgtggtccgggcaaatggctgaccgagttcaatttccccggtgctgccgtacctgtggtctcccgcgtgtttgatgatccggaagacctggccgcgcgcgcagagcgtgacaaagccgtcagcgaaaccaccggattccgtccaacgctggccagcacccaggaaacctatggcggcgagtgggagccgaaaccggccgttgccccggcggtaccggcggcccggccatccagtgccgagtttgcagaacatacgcatggcccggacgctcctgccacaatggccgaacggcttaatcgtgagttaaccccggtgaccgacacctggttggcgcagctgaagcagttggttgatgatgctgagtcgctcgaggcactgcgcgacggcctggataaactgctgccggacatggacctggaacagtacgccgaggtgatggcacaagcgatgtctgccgccgcgctggcgggacgctatgaactgctggaggaaatgaatggccggtaa

SEQ ID NO: 432186 - DNA, 1218 bp, Serratia marcescens
atggccggtaatattgcctacggctcgctgccgttccgcgagcagcttgcctttttccgacgtaaactcaacaccaagactgatgcttggacggatgtttacggtgccgagcatgacaacgagtttatggtggccggtgccaaccgcgacgatctgctggcggactttcgccaggcgattgaacgtgccatcgtcgaggggcgcaccctggccgatttccgtaaggactttgccagcatcgtcgcgcgttacggctggagctataacggcggttttgaatggcgctcccgcgtcatttacgaaaccaatctccggtcatcgtatatggcaggtcgctatcagcagctgatggccatgcgggattcccacccctactgggagtacgtccacagcgacgccgtcgaggagccgcgcgaggaacacctggcctgggacgggatggtgctgcgctgggatgacccgtggtgggtggcccattttccgatcaacgcctgggggtgtcagtgcggcgtgattgcccgcacggaagatgacctgacgcgaatgggcaaagacggaccggacactgcgccgccggtgcggtttatcgagcggactatcgggcagcgcagccctggcggtccccgcacggtctttgtgcccgagggcattgaccccggttttgagcatacccccggccgcagtaaatttttcagccaagtaccgtccccgcgaggcggtgaaccagcggcaccggagccgccggatgctgcaacggccagcgctgagataccgttgccagcgcctcaacccgcgccagcagagccctggcgtgggaatgccattgagagtttcctgcaggcgtttggcgcgagatccaatacgccagcggcgtttcgtgatgctgcgggtcaacgcattgcgatcgggcctgagatgttcgccgcccgcgatggcgagggccagatggctgaacctgcagagcgtctgcagctgctcgcgcaggctatcctggcacctgatgagatatgggcgcaggtggtttggttacaggcactgcagcgcgcggttgtacgccgccgttatctggcacgttttacccgaactggccaggctgaaccggtggcggtggtattcgaaaccggtaccgatggctgggccgccagcaccgaattgacgggagaggcactgcaggcatttcgccagggcgtgcgcttgtactcgcgaggagatgagtga

SEQ ID NO: 432187 - DNA, 564 bp, Serratia marcescens
atggccggagccacgctgacattcgactatcaggatgcgctcaatacgctactgcgcacccaggcagcgctggcagcccctgaacctttgctggcggacatgggcgagaaactgctggagtttcaccagcaacgctttcgcgcgcaggagtcgccagacggcactccgtggcagtccctgtctgcccgctatcaaaagcgcaagcgccgcaatcaagacaaggtgctgacgctggatgggcatttgcgtaacacgctgcgttggcagatcaacgccaatgaattgctgttcggtaccgaccgcatctatggtgccgttcaccagttcggtgcgacgattgagatagcagcccgaagccaacaggcctattaccggcagaagaaaaacggcgaaatcgacaaccgctttgtccgcagatcgaaatccaacttcgcgcagtggcataccattccggcccaccaggtgacgataccggcgcgcccctggctgggggtgtctgccgaacaaggcgaacgcctggtcgaactggcccggaattacctgcagcggtcgctaaaaccgtga

SEQ ID NO: 432188 - DNA, 1146 bp, Serratia marcescens
atgactaccaaaacctcgaccgccaccattgccgtttttgcaccaggtacccataccgcgatggatgggcgcacgatgacgttcacaaccgaagactgtatcgatatggccaatagctatgatccaagtctgtcggaatccccctttgtgatcggccatccgaaactgactgccccctcctacgggtgggccaaacggtttgagtttcgtgacggctttttgtatgccgaacctcatcaggtcaacccggcctttgccgaggccttcaatgcgggcagctataaaaagcgctccttgtcgttctaccaacccaactcacccggtaacccgaaacctggccatttctatccgcgccacgtgggcttcctgggtgccgttccaccgggcgtaaaaggtttgccggatgccgagttcactgagttcgctgaaggtgccgacgatgcgccgctggaattcgccattccctgggaaaccgaactgctggttgatctgctgcgtggtatgcgtgactacatcgttgaaaaagacggtgccgaacgtgccgacctgctgatgccgcagtggcgtattcgttctctggaagaactggcagccaatgctgccgatgctgaaaacaactcaaccatttcaccactggcatatgccgaggagctcgatgtggacccgaacaagaaaaacaccgttacggcggaggcgctcgccaagcgcgagacagaactggcagagcgtgaagccaaattacggaaagaagaatccgctgcgaaggagcgcgaggcgaaggcacgtcgagaagcgatcgtcagctatgccgatggtctggtgaaagccggttccattctgccgcgccaaaaaacgggcgtggttgaggttctgcttagcctagacagcacgccgctgtcgtttgcagatggtgacactacggtgaacaaaacgccggaagagttgctgcgtgatgtgctgaacgaaaagcccaaggtggtcgacttcaatgagaagtccggcgaagaaggcgacgttctggactttgccgacgccagtgccgtggctgacgccgccaacgtctacgttgccgagcaggccaagctggggcgcaccgtttccatcaccgatgcagtcaatcacgttaagaaaggagcgaagcaatga

SEQ ID NO: 432189 - DNA, 378 bp, Serratia marcescens
atgaatatcccagtcctgacgacggcgcacaaagtggaagcggttgtattgcctcgccagctcgtcacgcacggcaccgttgccgatgaaatcgtgcctgctgccgacggcagcaaactcatcatcggggtcaccaccattatcggcagcaccatcggtgaagccgctgacgtgatccgctacggtctggctccggtcaaatatggcgctgacatcactgccggacaaccgctgacggcagatgccgaaggccgtgccgttcctgcagcagccggaaacttctatatcggttttgccgaatacgccggtgcggaagacgacctcggttcagtgtggattgcacccggtcaactggcggcggccgctgcgggcggttaa

SEQ ID NO: 432190 - DNA, 930 bp, Serratia marcescens
atgtcaaaagcaccgtttccgattgacgcgcacctgacggccatcgccatcgcgtatcgcaacactagcatgatcgccgatgaggttttgcctcgtgtgccggttggcaaggctgaatttaaatggtgggagtatgacctcggtcagggtttcaccgtgccgaacaccaatgtgggccgtacctctcaacccaatcaggttgagtttaacgcggaagaaaaaacctcatcgaccaacgactatggcctggatgcaccggtaccacagtccgatatcgataatgcgccggcgaactatgatccgttggggcgagctgcagagcgtacctcggacctgattctgctcgatcgtgaagttcgcaccagccgagaagtattcagcgcagcgaactatgccaccggcaacaaagaaaccctgagcggtgacgaccagtggaacaacgataagagcaagccgatcaagaaaatcaccaccgcgctcgacaagatgatcatgcgcccgaacgtggccgttttgggacgtacaacggcaaccgccttacgtcagaacccatcggtggtgaaagcctataacggcacgatgggggaagacggtctcgtgccgctgcagttcctgcgcgacctgcttgagctggaagacatcctggtcggcagcgcgttcgtcaatatctctcgcccaggtcagaagcctgttctggtgcgagcttgggcaaaccacgcgtcatttatctaccgcaacaagcttgccgacacccagggcggcgtcactttcgggatgactgcgcagttcggcagccgcgtgtcgggatccattcccgatccggacatggggctgcgtggcggtcagcgggtgcgcgtcggtgagtcggtgcgcgagctgattgtggccccggactgcggttacttcttccagaacgctgtcgcggggtga

SEQ ID NO: 432191 - DNA, 525 bp, Serratia marcescens
atggccgtgacctggtatgtcccactgtccgagttggctgagcgccccggtgctgttgaactgtctcagtcaactgctgcaatgggtaagccgcaggcgcgtccggaaattctggatgcgcagctgcgcggcgaagagacctcatcctggccaccggccgaggtcgaggttgctctggcagcggtagaaaaaatcggtgatgccgtggaggaaactcaggggcttatcgacggctacctgcgcaagcgcggttacaaactgccgatgaccaacgtgccgtcgatcctgaccggttgggcgcgcgctatcacccggtacaagctgcattcgcatcgcgtttccgacgagaagaccgatccgattgtgcgcgactaccgcgatgcgctgaagctgctggagcaagtcgcggccggtaagttcagcctgggactgggtgattcactgcccgctgccggtggccccccgcaaattaccgggccgggccgcaccttcagcatggactcgctgcgggactacggcaaatga

SEQ ID NO: 432192 - DNA, 447 bp, Serratia marcescens
atgagcagcgcaccgtttgacatcaatctggttgtcgcgcggttgcaggagctcgacccacagcccttcagtcaaatcggcaccattgtcgagtacagcaaagtcaccgacctgtcggggtttgcgatgcccggtgcctatgtgctgatggggccagagcgcggcgttcccggcaacggtagccgcgcccaggtggccgaagcggtgatcgggattgcgatcgcggtacgcaactacggtctgggagccgagggattgacccatgaggtcaatcccctcattgggcaggtgcgcgaccagttgatcggctggcgtcctacgctcgccagtaccacgggactgcagtggttacgcggcgatgtcctggattttgatggcggaacgctgctctggatggacacgttccaggttcaacatgtgatcgggggcagacgatgccagaagtaa

SEQ ID NO: 432193 - DNA, 753 bp, Serratia marcescens
atggggcagcttgaaacctattactacggtcagggcaaggtattcctcgctcgccgtttaccgaacggtcgtccaggcgcgtatcgctggattggcgacgtctccgcactggcgctcgcgctgaccgtggagaagttgtcgcacaaggagtcctactccggccaacgcaccacggcccgcagtttcccgaccagcaaagatggcacagtgaccagcacctggcatgagttgtcggcggaaaacctcgcattggtgctgtacggcgaccgcgtggttatccctggcggcagcgtcacggcggagttgttgcccacaggcatcaaagccggtgaacgttttgcgctggcgcatcagcgcatcagtgatgcggtgatcggtgaactcgtcgaagggacggattacgagctggactacacctacggcgcagtgacgttcctgaacgacctgactgctgcaccgtccattaactacaagtatgccgggggcgtgaacactacattgttcacctcgcaccccgaaaactatgcgttgcgattcgagggcatcaacctggcagaaggcggtgcggcaaaaattctggagctgtacaagctgtcgttcgacccggtctcaacgctggcgctgatccagggcgatacctccctggccgggctggaaaccactgccaacgtgttgttcgacaatgtacaaccgaacgacccgaccatcggtaaattcggtcgtgttattgatgttgcggagccggtggaatga

SEQ ID NO: 432194 - DNA, 492 bp, Serratia marcescens
atgagccgcgaaccgcaacaggccgcaacctcacaggatgatgacctgtccgtgttgctgtccacccgcgatatcaccatcgcgggtcaacgcctcaccgttcgcgagttcaccctggtggattcgctgacgatgaatgaggagttgaagccggtggtggccagcctggcagatgtcatgcaaagcgaatggccctcattcgaggcggtgcaggatgtgctggccacgcatgccgacgcgttgccgaagttgatcgcctgctgtatcgaccagccggtcgaatgggtcgctacgttgccgggcagtgacggcactgcgctgatggactggtggtggacggtgaaccgacgtttttttatgagcgctgccgtccgtcaaatcacgctgcgcgcagtcagggagaaaccgtcactttcggccgcatcttcgccacgctcatccgggcaggccataacccagaccggctcggatactacaccgcccgccagctga

SEQ ID NO: 432195 - DNA, 3276 bp, Serratia marcescens
atggctgccggaaactcatctctcaacctcgccctgcgcatcaccgctgacctcaacgaagccaagcaggcagtggagtcattgaccggcgacattaaaacggccggtacgacagcacaggcgagcaatcaacaatggcaggccactaccgatgcccagggcgcagcggcggacgccacccgcaacaatgcctcagcccagcaatcactcaacaccgagctgcagaactcggtcctcatggctcaacgtgctgcccgcagcgccgaggaagtgaccgccgcgcagaatgcgcaaagcgcgcgcggccatgcgctgtatcagcaggagcagaaagccgctcaggctcaggaagcggcagccaaggcagcggaagcgcatggcaaagaagtcgagaagttgaagaaagacctcgacagcctgcttggaagcattgatccgacggcaaaagcattaggcaaactcgacgcccaggaagcgcagctgcgtaagtcccgcaaggctgggctaatcgacgaaggtaccttcaacgattacctgggtaagctgggcgcacagcgtgaagccatcgaccatctctccgaaggcacggagaagttcaacctcaacaccaaaggggcccagcgcgaactgaccgtgctgatgcatcaactggttcgcggtgattttcgcagcgccagcaacaacatcatggatttgggcaccaagaccggtctgctgccgccgctgttcagtgcgaccacgttggcgatcggcggcacaatcggcgctgtggccggggccggtgtggtggtagccagcgtgctgcgcgaccaggacgaattcaatcacagcattcagctgaccggtaactacgcaggggtgaccgcaggtcagctggagatgatggcgcaggccggtggccagctcggcagcaactacagccaggtgcgtgacatcctgaatggcctggtcagtagcggcaaatttaccggcgagacgctggacaccgtttcgcaggcagcctcggcgatggcgcagttgaccggcgactctgccgatcaggtggttgcgcagttcgtcaagatgacagacagcgtctcagactgggcggtcaacagcagcgagcagtatcactggctggactccgaaacctaccagcgtatccgcgccctggaagaccaggggcgcaaagaagatgccattgagctggcgtcccaggcgtacaaaaaagcggcgattgagcgcctgggtgaaatcgagaccaaactaaactgggtcgcccgcggctggaagaacgtcaaagatgctgccgccgaggcctatgcgggcctgaaaagcggcaccagctcagcgttgaatcttgattctccagaagaagcgcgagcgaaagaaatccaggacattaaacaacgcctaaatagcgcgggtagtgaaattgaaataaccacccgaggtgagggttacgctcgccaagttagtaacgataaaaaacgtttagctgcattggagtcagaagcagcagcacaacaaaaaattgcggcagaagcgactaaacgccaacaaatagaagacaagagcaatgcggcctctaaagagcttgaaaagacctgggcgaacaaccgcacagcggtagagaaagaagctgatgcactggatttgctgaaaaaacgctatacggatatgtgggcggctgaaggtggtcgagaaaaattgcgcgacctgggcgtatcctcctcagatggccaaaatttttccggtggccagtgggataccgatgttaaagcccttgatcagtccggtaagaaagctgagcagtacaacaagcaactgcagcagacgctgaaccagaaaaaggcgctcacccagctggcgcgcgttgaagccgacatcagcaatggttcgctgaaagatgccagcaaggccgagcaagataaggcgcgcgccctcgccaaacaaattgacgctcaggcggctgccaataagtcagccaagtcagacgccgccgagacgaaaaaatcctttaacgagaaccagcgctttgtcgaacagctggagaaacaggcttccaagcgtgtcgagggagctgccgctacgcgcgcccaggaaatcgcgacccgcaatctgaccgccgaacagcgtaagcaggcggaggcggcgaacgcggccatcaccgcccaggaattcaaaaaccagaatctgcagctccagctgcagtacatgcgcgacaccggtgatacggccggggccagcttgctggagacccaatcccgattcgccgatatgcgccgcgagtttgaggccagcggcaacacgaaagggctcagcctgctggaccagctgctgccggtggccgagaccaaaatccgcgtcgatgatctgaagaagcaactggatgatctgttcgcctaccaggcccagcaggaaaccagtatccaggcgcaagtccagggtggcctgctgaatgaaatccaggggcgccagcgcctggtcgaactgcatcaggaggtcggcgacaaggtcaagggctatctgccgcaactgaaagagatggctaacgcgccaggcgaagccggtgagaaagtccgcgacatgatccgccagctcgaactgcagctggataagctcaaccaggcaggtaatgagctgacgatcgcatttcgtgacggcctgcagagcggtatcgagagctcgctgatggggttggccaaaggcaccatgagcctgagcgatgcagtgaagaacctggcgctgaccatcatcaacagcatggcgcaaatcgccgcgcagcagctggcgcagatggccacgtcaagcctggtcggttcgtctggcggtatgggcggtgtgctgggcagtttgtttgcggcagacggtggtcacattcgcggccccggcactacaaccagcgactctatccccgcgatgctgtccgattacgagttcgtcacccgtgctgcagtcgtacaacaacccggcgcgctggattttctgcatgactttaaccgccacggcatggctgcgctggaggggtatttgccacgcgcccggcatgcgaccggcggattggccgggttacccgcccccgtcgcaagtacaccgagttcggtaccggatacctcgttagctggcccatcggccggaccggccatgctgcaaccgctgcagcagacgctggtacttgatgccgtcgatgccttcaccaaggggatcgggacagtccagggcgagcgtagcgtcatgacggtcctgcgcgccaacgttccaactctcaagcaaatgctgggggttaaatcatga

SEQ ID NO: 432196 - DNA, 1185 bp, Serratia marcescens
atgacggcgctatttccctggctgatggagcccgactggaccggcagcatcaccgagacgctcgagtggaaaaccgacgtattgcagtcgccgagcggtgccgagcagcgcatttctcgccggttgtcgccgcgccgcctgtttgagttcagcatcctggcgggtgacgtcgaccgtcagtggctggagaacgcggtatggcaggctggcggcagtgcctgggcaatgccggtcttccctgatgtgaccgagttgcaggcctcggtcacggccggagcctcgcagctgcaggtcgatacgcgcggccgcgatttttcagtgggtggaacggtgttgctgaaaaatgctgaggctattgcgtcacctgccgcgctggtgaccgtcagcgcgatcggcgctgattcgctgaccttgtcccagccactggcagcgggctggcgggcgggtacagcggtgtaccccgtgcgccctgccgtgctgactgaccctccgtcgttcacccgcatcaccggtggcctggccagcgcccaggtgcgttttcgcatcgccgaacataacccattctcggcagcaacccgtcttgcgctttaccgtggccatccggtgctggagccggaggctgactggtcggaaaacctgaccggcgcatatcagcgcctgatgatcgagctggataacggcagcggtatcccggcccggctggacactgcacgccgcccattctatctgcagcgccacacctggtcgctgatgggccgcagcgagcaattcgcgttgcgccagctgatgtaccacctgcgcggccgtcagcgcgcgttgtgggtgccgagccagaatgatgatctgactccggcgggcgcgctggccgggaacacgttgccggtgatccgctgcgggctcagcgagatgggcgtcgtacctgggcggcgtgatctgcgcatcctgttggccgatggccgcacgctgtaccggcgtctgaccggcgtggccatcaacggccagacagagctgctggcgctggatggcgagtcggtcaccgtcccgcagcgccaaatcgccagcgtgtcgtttatgacgttcgccaggcaaaacaacgattcggttgcctggcagcacaccaccgacgctgacggttttgccagcgtggccacctcatttataggagttcgtgatgagctggagtga

SEQ ID NO: 432197 - DNA, 816 bp, Serratia marcescens
atgagctggagtgagttcgaatattcggtggccaatggccagccgctgaccctgtacgagtttattcgtggcggcgcagtgcattatcgctacaccaacgccgatcgcgacattcatttcgctaatgtcgactggcaaacagtggctatcagcgacagcgggctcagcgccgggaacggcgacggcatggatatcaccgtgcctgccaataacgccgtcgccatgctgttccgtggtgttccgccctccagtccggtgcgcatccgcgtttaccggctacatgcggaagatgctgcagctgagtttcgcaccgtctgggtgggtacagtgacagaggccaagcgtgaggcgatcgagcgaaccaaactggtgacgtccagcctggccagcacgttttcccgcgtcggtttacgcctgacctatggccgcgcctgcccatacgcgctgtatgaccacaactgcaaagttgatccgctggcgttcggtgttagcggtctggtcgtgactgcgatggatggtgtcagcatcactgtcaatctgcccgagggcacggcggcggactggttctccggcggttatgtcgagtgggcggtggatggcatcactgagctgcgcggcctgcgggcgcaaaacggcaatcagatgaacctgttcggcggctcggccggttttgccgttggccaggtggtgacgctgtatccgggctgcaaccgcacaattgcccagtgcgacagcaaattcggcaatcacctgaactacgggggaatgccgcacatgccgggtaaatccccgtatcaaatcatcaagctgttttag

SEQ ID NO: 432198 - DNA, 234 bp, Serratia marcescens
gtgtggttcgccatcgccaaatatgtcgctgtcatcgtcgcgtcatacctggttaaccaggctctggcccctcggccgaaaaacaacacgccggaagcggcgacggaagaaagttggcaactgccgcaaccggcagagggaacgccacagtgcgtattcttcggcgactgctggactgatgactggttcgtgctcggttacggcaactaccgctatgacgccatcaaaaaatag

SEQ ID NO: 432199 - DNA, 198 bp, Serratia marcescens
atgaaaatcacgatggaacatatccgcgccggtggcggttgtgcctggggcctgcgaaccttcttcgctcgctaccagctggacttagaggcattcctccgcgagggcggcatcgactctgaaaaattcctggccactggggatgcgctcgcgatcaacatcgtccgcctggcggaaaaaaacgaggaggatcaataa

SEQ ID NO: 432200 - DNA, 2718 bp, Serratia marcescens
atgggtggcggcggtaaagggtcaaaaaaagtcacggttggctatcgctactcctgggacatccactccggcctcgggcgaggtccggttaacgagatcgtcgcaatcagcgccgataaaaagaccgtgtttgcgggtactgaggggcaaatttctggaaacacctccatctatatcgaccagcctaacctgtttggcggggaggatacggggggcgaaggtggcatccagggcacgctcgatgtgctcatgggcggcccggaccaggtaccgcccccgtcactgctgaatctgttgacagggttggtgccgggctttcgcggcgtggtaacgacgtttttctctggcctggtcagttgctacagcgccagcccgaagccgtggtcgtttcgcgtgcgccgcacaacctccgggtgggacaacaacgctgcctggtatccggagaaaatgcttatcctgctggagaacactgtcggccagctcgatgatgagtcgaaactctctccagatcaggtcgcgaacctgcgccgtattcacgcgatgaatccggcgcatattttggtcgaatgcgcgacgaatcgggattggggacgcggtttgtcgctggccgatgatctggacctcgacagttatcgcattgctgccgaccgtctctacgacgagaaatttggcctgtgcttccgctataaccgtcaggacagtctggacacttttgtgcagcaggtgctcgatcacatcggtgctgtgcaatatggcgacctcgaaaccggcaagatggcgctgaagctgttgcgtgacgattatgtggtcgacgatctgccgctgttcacgtatgacaacggcatcatcagcgtccaggacgatgacagcagcagtgcagatacggcaccgaatgaagtggtcgtgacctatcacgatccggtcaccaacagcgatggcgaggtcaaggcgcaaaatctggggtcgattcaggccgtggggcttatcagcagcacggtcgagtaccgcgctattccaacccatgatctgggtgctcgcgtcgcgcagcgcaatctggaaatggggacatccgggctgacgcggctcgtgatcaacttcgaccggcgcggcggcattctgaagccaggcggtgtattccgtgtgagcctgcccgaccgcaatatcgcgaatatggtgctgcgtgttggccaaatcagcgagggtgacgatggttccctgaaaatcaccgtggtgcaggacgttttcgggcttccctcgacgtcctatagcaccggtgaacagcctggtggctggacgccacccgaccaaaccgcgcggccggtgacggatatgcagctgattgagttgccctacgcagtactggcggggacgctctccgagtctgaactgacctatgtcaagcctggctccgggtttgtcggcatcatggccagtgcgccgacgtcgctctccatcaactatcaaatccaaagccgcgcggtcggtgccggatttatcgatcgcaaccagggcgactggacgccgtccggcagtttgctggcggctgtcgggccgctgaatcgcacattgcgcgtggtgatgccgttcccgccatccgtgggcgacggcgcgatcgtgggcaacgagatagtccgaattgaccaggtgaatgtgtccgcaggctccctctccgtggggcgtgcctgtgctgacacgctgcccgctgaacatgcggcagggaccccgatccgattctaccgcgatgccatcgaatccgatggccaggagtacctagggggcgagaacgtggatgtgcgtttgctgacgcggaccggcaccgagacgctggccgcaaatttggcacctgtcggcagcatcactatggcccagcgccaatatcgcccgtacctgccaggcaacatccgagtaaacggtattccgtatcctgccgaagtggccccggccgctgcctacacgctgacgtttgcccatcgcgaccgcgtgctgcaggcggaccggctcattgactgcactgaggccagtatcggcccggagccgggttcaacgtacagcgtggcgctggtgcgccaggacacatcagaaacggtctggacgcaggtatcagatggcaacacggtcaatctgccgtaccacaccgacggcgtggatgcggctgtgcatattttgacgctgagtaccacacgcaacggcacagaatcgctgtatcgctaccaggccactctcccggccggacgctatattccggtaccgccgccagtttcgatgactatcccggcgctggaggtcattaccggcgatgactggcaggccgcgacgccagcggataccacgaccggcgcggtaccggagtttattgcgttgggagaggcggcgggagcgaccgatggcgcggcacctgcattcgttgcacgcgggctgtccatcccggctgatgatatcggctacccggcggggacctggcccaattcggcatacagctttggcccgcatcaggtgctgatgttggctagctatagcccgtcgctgactgtactggtgttcgccggtgatgccagcgcgttttcgattgagtccgtcacgggaacggctgcgccggtgacatggtcagcggggatttatcgtgccgctgaagaaatgaccctgtttacctcatcggggagcattttgaacgagggcaaaatatcgctgacgttgcgtgaacgaggtaacgcaccatga

SEQ ID NO: 432201 - DNA, 804 bp, Serratia marcescens
atgaatgaaacctattactatggtcaggggaaagtctatttagcccgtcgagatattaatggtcgcccaggcgcatatcgctggctgggtgatgtttcagaattggcaataacgctggcgttcgaacagaacgtttcaaaaatttctcgccgaggacgtttatttaattcacggcgttttatttctggctataccggctcgctcgctgccacatggcataatttttccagtgacaacctgtcgctgttattgcgtggggaggcaacaaagacgacagcgagcatcgttgatagagaagtattgcctgctggtatcaacgcaggagacaggataagcctggcccaccagaacgtgtggggcgtcgagattgccgggttgaccaaaggaaaggattacattgttgatgcggtctggggcgcgcttcagttcctcattacgccgccccaacagcctgtcgaattgggatatcaacatgcaggcactacctcggtacctattgtgtcggatagcgatcatgagttcgccctgcgattcgagggcatcaatttggcagaacggaatagcatggtgttggttgagttatatcgactgtcttataacccgctggcaggctggcaattaattactagtggcacctcattagcaggattggaaacgacggctgaattattatttgacccttctactctcagtgatacctcgctgggccaatttgggcgcgtgacattttttaaagagttaaacggtattacccataacggtgtgattaatcacaacggccaatttacccacgggagtaattaa

SEQ ID NO: 432202 - DNA, 294 bp, Serratia marcescens; identical to SEQ ID NO: 167069

SEQ ID NO: 432203 - DNA, 837 bp, Serratia marcescens; identical to SEQ ID NO: 16864

SEQ ID NO: 432204 - DNA, 399 bp, Serratia marcescens; identical to SEQ ID NO: 16863

SEQ ID NO: 432205 - DNA, 1110 bp, Serratia marcescens; identical to SEQ ID NO: 113667

SEQ ID NO: 432206 - DNA, 276 bp, Serratia marcescens; identical to SEQ ID NO: 16862

SEQ ID NO: 432207 - DNA, 294 bp, Serratia marcescens; identical to SEQ ID NO: 190812

SEQ ID NO: 432208 - DNA, 489 bp, Serratia marcescens
atgatccttgcatcaatggggtaccgcgttacggcgtctactggacgcccggaagaggctgcctggctctataaaacggtcggtgtggacgagattattaaccgttccgagctctcctgtcccggaaaaccgttacagaaagaacgctgggctgccgccattgatacagtcggtagccatacgctctgcaatgtatgcgccggggtgcgttatggcagtattgttgcagcctgcggcatggcacaggggatggaactaatggggaatgtggctccgtttatcctgcgtggcgtcacgctgaaagggattgacagtgtcatgttcgcgaaggaaaaaagagcggcgatctggcagcaggcggtacagtatttaccggagtccagactggatagcctgaccaccgtttatccgctgagtgatgccatcaatgtggccgaaaaacttctgagtggcggaattcgtggccgggcagtaattcagtgtagctaa

SEQ ID NO: 432209 - DNA, 657 bp, Serratia marcescens; identical to SEQ ID NO: 119515

SEQ ID NO: 432210 - DNA, 297 bp, Serratia marcescens; identical to SEQ ID NO: 26486

SEQ ID NO: 432211 - DNA, 489 bp, Serratia marcescens; identical to SEQ ID NO: 119516

SEQ ID NO: 432212 - DNA, 300 bp, Serratia marcescens; identical to SEQ ID NO: 119517

SEQ ID NO: 432213 - DNA, 2478 bp, Serratia marcescens
atggagcttattgccggagccactcatgaacacttcaggatagtggtgccctattcggcaagacaggtttcagcctcactttctgtggcgggtttcagcgggcgtgagtttattgcaaagcggattcctgtaagttttcaggttcctcctcttatttcggcaggatggcaggaagcgttaaggcagtactggaaagaaacagtaaatgaggatgcagggatagcgtgccgggaagcaacggtgttgcttgagcgctggaaaccctctgagtatcctcgtatcacaccgcgattaatgaagaagtttgttaatgatattcatattctgaaccttaccgttcctgcaacagaagatcatcgccatattcttattgctctctacttactggtggtcagatacggggagcgagatattaaagtattacttcgcgatcccaaagctagtcagaccgaacccggtattgctccggatgattttgacgagatgctctcgctaacttatcaacaaatatcccgaatttttaataacgatacagaaagatggagcgaatttctgatgagcatccactatcagtccacggtggagcttgccaggagcgagttgcttgatacgcctcttaaagacgcgattggtgctataaatatcccacggcttgaagaactgacggccttgtggggtttcgctgaagcatggcagcgagtggcaccacatattcagatgcgagactggctggtttcttatagccggatggatgagaagtgtcaggctctcgccgaaccgcaactcaaagtcgcagtgcaaatgctgaatcagagttatgctgtttcactcagagaaaagaatgatgaaggtttcgtattgagtctgcagaaactgatggctgacgggcggataagcctagagcctttcgtcgaaaggcaaatatcgtttattgtgagtaaacttgatgaaattcaggattcagaaaaattggaggctgaatccacgcagacgttgctgcaggaagctgattcatactctgttctggccggtgaatcactactgaataaaatggagaattttgtagatggcgtattttatgtggaataccttgtcaataatgaagagaccttgtcaaacctgaaaattggcacactagatatcggaaatcacggtcgggaggagatgttacgctatggagctgagcaacctcagatagacctttttaatccgggaattatccggcatatcaatattgcatcgaaggcggtacagaacgtaattggaaagaatgatggtacaggtggggctcaggttagctctgcaataatgacgcttaaaaatcgtcaggttgttgaggacgttatccatttcagaaaaattgttctgagcccggactggaataataatgttttaaatcaatattatcttaataatacggcgacgaggaatctcttccctgcggaatttgctgcacaggctgttgctcacatggtgctccatggtaactatgccggtatcgagtcgtacagtgaacatattggtgaggaacggtttgacctggctttggctgcatatcttcgttatctacgtactgccgagagtatctttatagcacttaaggataaaaatgttctgccgtacatcaaaaatgctgttggcaggattgttgatttaggtcttctggtgaatatacctgtcctgagctttgttaaaggtcagtatgacgtcatcaaagaagctacaaatgcaacctctcttttaatatttgtgcgagagcgtcaaaaagcactgtcagagaaaataattgagtctgatgtgaatgctatgggtccagtatttctccatgacgtatatcagtcaggtgagcagtttgatattttgaagaaaaagctgaacgccctggcatgtggagtatttagttcttctgaaaggcttattgagtgttttacggttcttcctgtgaacatgcgctttatccttgaacaaatgcaacttcaggggcagcatatccggatggaaggtagtgtgggtatctttgcatcatggttccgtgatgcagagccagacgttgtcacaaatgccgagaacattcatttcctgtggtcttgcctcgacgatacccagagagagactgtacttgatgagttgcacgatgtcttacttgaaagacatattcgtattgacagccgtattgcgattattacccgttttcataatgagttgtcgtttattgaacctgagaaggccgttgaacgcagggctattgcggcgctgtttagcgcttctgttgataatgtattattgtctcaatggcttgaccgtcagacgttttcattttcatcatggtctccggaggacgcccgtacggcaacgagttgtataatgaataactcggagatttttcctctcatctgcaggaattcacagtatattaaaaacagaatgttaccagagaaagcggacgttacagaagatagtgatacgtttccggactga

SEQ ID NO: 432214 - DNA, 330 bp, Serratia marcescens; identical to SEQ ID NO: 119089

SEQ ID NO: 432215 - DNA, 1026 bp, Serratia marcescens
atgatcagaattatagggtgctcgctctgttcgatcaccgagcatgaagggcgcatcatccagagccgttcggaagattcgatcgttcgcgaaatcgaagagatccgcgacaaggtgccgggcttcaccggcgtgatctccgatctcggcggcccgaccgccaacatgtatatgctgcgctgcaccaacccgcgcgccgagcagacctgccgccgcgcctcgtgcgtgtatccggagatctgcacctatatggacaccaaccacgagccgaccatcaagctgtatcgccgcgcgcgttcgctggagggcattaagaagatcctgatcgcttccggggttcgttacgatctggcggtggaagatccgcgttatatcaaggaactggcgacccaccacgtcggcggctacctgaagatcgcgccggagcacaccgaagaagggccgctgtcgaagatgatgaagccgggcatgggcagttacgatcgcttcaagcagctgtttgatcactattcgaagcaggcgggcaaagagcagtacctgatcccgtacttcatctcgtcgcacccgggcacccgcgacgaagacatggtgaacctggcgctgtggctgaagaagaaccgtttccgcctcgatcaggtgcagaacttctatccttcgccgatggccaattccaccaccatgtattacagcggcaaaaacccgctgagcaaggtggggtacaagagcgaagacgtggtggtgccgcgcggcgatcgccagcgccgcctgcacaaggcgctgctgcgttaccacgatccggccaactgggcgctgatccgcgccgcgctggaagagatggggctgaagcacctgatcggcagccgccgcgagtgtctggtgccggcgccgagcatcgacgagcagcgcgaagcgaaacgcctgcagcgccatacccggccggcgctgaccaaacataccgatatcaatcggcagcgcacgccgtccaaccggccgccgcgcaaaccgattcgcaaagccaagccgtaa

SEQ ID NO: 432216 - DNA, 219 bp, Serratia marcescens
atgatattccccaaacgtaaaccattaaaaccatcagccattgccaataaataccttttcgcccgggccttattcaagaacgtgcgaccaggaattgaaattggcgtattggctgggcgacaggaagtgcgtaagtacatgtccggtgtgtggtggaacaatgaccccattaaagccgccggtaatattcatcgtaattggggagggattggcgcatga

SEQ ID NO: 432217 - DNA, 2694 bp, Serratia marcescens
gtgaacaagatatacataccattagactgtggagagtctgcggttcttaaggatccagatactttacttccccggaatatttacgagcagctagctcaattcattgccaaggccgttagcgaagtaccgaaacctcatgaagcgctcaatgaaacgcgtagccacaaggctatatcaattgacggtgcgagggggacgggaaagacgtcggtgctggtgaatttaagcgactatctggagagtaatgctcaacagttggcgggaaaaattcacatccttgatcctatcgacccgaccttgcttgaagatggtgagtcgctgttcttgcatattattgttgctgccgtgcttcatgataaagagattaaagaggcccagggtagagatcatgataagtctagaatttttactcacaagcttgagaatttggcccacggactggaatccgttgatttgcagcagaatcagcatggaatggataaaattcgctcattgtatggtagcaaacatctagcaaattgcgttgaggcatttttaaaatctgcgttggatctgattggaaaggaattattaatactgcctattgacgatgtggacacctcacttaatcgggcatttgaaaaccttgaaatattacgtcgttatcttacctctccgtatgttttgcctattgttagcggcgatcgtgacctttatgacgaagtctgctggcgtgattttcatggaagattgaataaagactcatcatataatcgtaacaagtcttatagtattgccaaagaattagcaattgaatatcagcgtaaaattcttccactgcctcgcagattgagtatgcctagtgtaagtgattattggctgcaagatggtattgatgtcactctggataaagatggcattccgcttcgaaactttatggcgtggttgaagatatttattactggtccagtaaatggccttgaaggtagcgatttaccgctaccaatcccgtcgatgcgtgcattaacgcaatttatcagtcactgtagcgatttaatatatgagctacccgagtcatttaaaaataaaaccagtacactgggtatacgtcgaatgtggcaaatgcctgatgtcccaatttttgtaattgaaagatttgctaaagaacatcaggcattgcgtaaggaagccaagcgtgaatatgctgatgcctataaatccttcaatgatgagctaaagaattctggcttggagacaggtagttcatggctggaagagattaatgaatctgcctggaactataagttgtatgagtactttcgctttgaaccaaaggccggtgtggtttttttaacgctccaggcaaaacagtattggagtgcatgggcgaggggaggatatcgtaatcaatctgtacttgctgcaacgctttttcaacctctgcaacatgatttacgtgactatgaaatttttgaaaaaaataacgacctctctgactgggaatctcagttgaaaacaagactacctgaaacctggttgtctagtataaaaggacaacggacgcttttaccgtatcctgtggctgaggtgggtgttattaccagtttgaaatggaaatattgggaagaggttcaaaactacaaatttgataataacgtggaaaataaggcattttttcttatttccatattgacgcaaaggaatttctttactaatgctaagcaatctatagttttaaacattgggagggtgtttgaattaataatcacaagtcttgtttctgatattgagttagccgacctgcagcggattatgcagcgctccccattttattctgccagtgctcttgctccgacaaaagctttgtatctagatgagattatccccaaaaaaggtacacgcttgaataaccgatttgagtctgagcgagatcttgttgatgacctgttggaagaggctccagatgagaatgaatttttgttaaaaaatctttgcgatgatattaatcggtggagaaaagagcacagtgttgcaaatatgaatatatcaccatggttagtctataaagtttttaataaagtatatagtcaaagtaatcccgggattaatggcattagtcatgttgagtctgcacttaatagtgcagggtgggctttttatgcaacatggtctgcgttcggtagctttgaaaaaggtgagttattcggattagctgatgtcgtttcaacaaccaatattaactctgtcaggaatttttatcatcataataattttcatttaaatgtggggccgttcacgcctgaacaaaaccaacagtctgatagcgatcgtgaggcatatcagcatcgtaaggtttatggtgaaaaaaccagaactgttagctacgtattgggttcgcatccacttaaaaaatggatcgacgaagttttaaatgctgtgtataaacaaaatcaggatcctcagcctaagaataaaccaccggttcaagttaaagatgttagtcctgcaagatattttataacagaaaagctttcactcgatccacaagcccggctcgttaaaacacgtattaaaaaacagtttgagatgaaatatccaggctatgataaggctcggggcttcataggtgaggtcattagcaagttccctcagaatgatcccgcagtaagaacgcttttggcagcattttcagaactctacccggatggtgagtaa

SEQ ID NO: 432218 - DNA, 2745 bp, Serratia marcescens
atgttaacacggtcgctgagtgaacatgcaacaggatgctttttcaccgacgagcgcctatcgcggcacttttcggcgatcctgttatcaccgccgaaggattttgagacgtggttgtcattgcaggaagagtgctaccgactgcttgttgagagtattgatagacgttacccccgtacttaccgattgaacgacgtgcgtcagctaatgggtaacttctgtgacaatggcttgttgactagcccggtactgccctggcttgatgtcattgcagaacagctgctgctgcgtaatggtgatttgatctattaccgtgaaaataaggtacaggactacgtgcggatagcggcagaactggacccggctctgcttgcaggctggcgtcttggcgactggctgcaacaaagtcctcctccgcgattgtcggacatcacccgggtggtgatggcgcagaatccgttttttgcgccgccagccagtgcaggcaagccttttgctgaggggcacgtccatctgggcggggtgacggcgggagataccatcttggatggctatctttttaacgagattgagctgccaaaaagcaataaaacatcgttgtgggcgtatggagagcacaatgatttaacgccgctgttaaatcgagcgaagtccttgcttgcatcgttactttcaggccctccacaaacggtttctgaacaatctcaaaatattgcggagcatcgtgaaacggtttccgataagtatgcgaccttaagtgacccgatgaagaaaagccagaatctcccggactggctaattctcgctaaaaagaatcgcggagcagataacgtcagtcccggttggctattaagccaactggcgcatgcctcagaccgaaaacatccttcacgctggttgtggcttcagctttatctttgccactcttatcaactgaaaggcacccatccgttggagcgcacggcaatactctgtttttggcttacggttaatgcgcttcggcgtcgcattattatggacgggcaggggcttacgcgttttaccgaatgctatttcggcggcgcgttacgctcgggtaagaaaactgaccgcagcaatatgcgttatctgtttgctggcaagggtgatatggccgaagtgaaggctaccccgaatgctttcagccatgaaatggtggcaggatttgcctcaacactgctcaatacccttggtgtaccgcccgtttctccgccgtatatttttggtgaacatgagattaagccagacgaacgcacgctgcgctacattgaagcgctggagcgctggcagttttgtgggcatttttcacgctctaaaacggcaggccgcggtaagcgaccaaaggctgatttgcaggccaactggaaggaggcagagcgattgctgcagaagctctacagccacaatggctggaatcatccgatatttttaggagggaaacgcaacccgcactttcattttcagccgtcgaactggtttaggggtttggatgttgcaggggatgaaaatgccctgaaaattgcgggttttgcgccgatgctacgatggctgcgcagtgggctgtatccggtgcctgacggcctacgcgccagtataggctttcatttcagcatccatgcaggagaggattatgcgcatcctgcgtcggggttgcgtcatattgatgaaacggtgcgcttctgcgagatgcgagagggggatcggttgggccatgcgctcgcgctaggaattgaacctgcgctctgggctaagcgacatggagaaatgatacttccgctagatgagcatttagataatcttgtttggcagtggcattatgccacggttttgtcgggttcattgccacttgcacaggcggtattaccgctgtttgaacgtagaatcgcacgttttatcgctcggtgcgaatggtgcaagagaagacctccgcaaatagataacagtattggaggaaaactgggcagtagtgatgataaacctctagaaaatataacacctgatacgctgtatcgggcctggctattgcggcgaaattgttcatatcgactccgacaactccacggtggttcacctttgacctcccaagaaaaatgtgcgttaccggattggactacgctgagcgataaaggcaatgtggcggtgcagctatataagcagaggcattccaacctccttgacgatcttccaccccaactggtggttgtgcgggttgcggacgaatggagcacgcaagagctgattggactgggaacccccggaaaactgagccagcaggtaagcggcggtaaggatatcctccaggatattgatacgccagtagaactggagtttatgcatgcattgcaggattatttgctcgatcgctacgatcgcaaaggattaattatcgaaaccaacccgacgtcaaacgtctatatcgcgcggttaaaaaaacatgtagaacatccaatttttcgctggaatccaccggatgaagaactcttaaaaccaggcgctgaatttaatcgccatggtttacgtagagggcctgtaagggttctggtcaatactgacgatcctgggattatgccaacgacattacggacggaatttttactgctacgagaggctgcgattgagcgtggcattagccgaacgatggctgaatattggctggaaaggctgcgcctgtacgggctagagcagtttcagcgcaatcatttaaatgtatttgaagtttttgactag

SEQ ID NO: 432219 - DNA, 738 bp, Serratia marcescens
ttggaacgtagattagcagtgttgtgctatgcatctgaggatagtttaaaatctaaactcgaaaaagagttggaatttgtgcggaaaaaagaatatttgtcgtactggccacgttttctgatccgtagaatttcactttatgctataccacctctgattttttttacttttttcttttgtttgagtttgactaagaaagtgggtatagaaaaagtaaacattatactcggaactcaaaacgtaccagctagaggttatctactcctggcagtaggttttttgactgctgtgttgcttgctcaatggtggctttttaacagagaatatactttgccgactgcgaataaaatggttaagattcctaaagaaacttataagttcattgctcatattgtactttttatctattccattcttttgtttttgtatatttataacactgaatataaggttttttatggtgttctcacatttctcgttctaacactttatccattacttattgatcgcacattaggattaacgcggcaaaatgaacgtttgaaactctataccagaagattagagcgtcttgatgaattgaatacttttcggggaaaaatgaatattaaattcgaagaatgtcatttgatcgagtatatgaagcttgttgatgaagctgatcgcagtaagaaccaagatacggttagcgatacatcttattttatggcgttggttgaaaataagctaaaagcgtaa

SEQ ID NO: 432220 - DNA, 342 bp, Serratia marcescens
atgtttgccccttcgacgcgattgcccaaactactggacgatttcgaagtgaaatacctggcaagttacacaccttgctcagacatgagcgaagaacagctgatagaagcgatcgcgataatccatgttgaactgatactcatacacccttttagagaagggaatggccgtttgtcacggctgttggccgatgtgatggcggttcagggtgggcataaaccgttggattatcaaagctgggaacaaaacagagcccaatatatctcggctattcactcgggtatgaacatgaactacgagccgatgaaacactgggtcaaccaagcactaagaaagtattag

SEQ ID NO: 432221 - DNA, 546 bp, Serratia marcescens
atgtacggcccgaaatatccgctgaattggttgtattcggacggctcgctgagtcacctggacaactgggggaaagtcctgcagggcgaatatcaagaacaggccatcttctggcacttatatgaccccgcgcgtaaaggcacctggacggggctaaaaattaaaagcgtcacgctgacggataatatcgctgatttactgtgtgacgtgccgtttgcgccgattgttatcgacgctgactttattgccgactgcctgaataaagggattagcctcgaaaataactcagccaccgtgcaaagcatcactatcgtcgatggcaatatcattcgtgtcgtatttgaccaggcaccggcggcaacggatgcactgctgatggggttcaccaacaccgcagaacattcaccagaaaacgactctgtttatccgttgacctgtttccgtgactcatcgccgcgcgtgtcgcggtgggtgacgcgcaacggttcaccattcccactctataactggatgtgcctcgaccgcatcccgctaacccaggagtaa

SEQ ID NO: 432222 - DNA, 921 bp, Serratia marcescens
atgaatcatgctgatataaagcctgatatgatattgattgaaaatgaaggttcagctaagttactacaatttgacgaaagtagtattgaaggggcatatatagcattatgtatccagcaatggattgctgaaggggtaaatgaaagagatatatgtatactgctaagaaacccggctaaacaatatacagacgatatcatttcagcattgcaaaatttgaaaatacaatgtcgccttgagaacgagtatcaggatcttttaaatgaagctgtagtacagttacttttacaaatgctaatgtttgtctgtaatagaaaatccatagaaagctgggccactacaatggagcttctatgtaatataagaggagtaagtaaaagaggtgatgttacacggttagaaaaagaacttagccagtttattaaatctcatcgggtaattaaagaagaaattgtcgattatttatattcattattaagtatatttggtgtcgataaaataaagtcttactttccgcagtatatgagtgggaatggtttagaatatagcatagaattactttctcgccacctcgataagttagatgtaaaagaaaaaacatcagaagccattgatttattacttggcaataaaacaatacctcttatgaccatccataaaagtaaagggttagagttcaggaaggtcatcgttgtgggtcttgaacctggtgcctattttggtaaagaagaagagcaaatagaaaatcaaaaaacagtctttgtggcattttcaagagccattgaagaagtattaatgactcgttgtaaaataagaaacaatagttatggcaggtctttcaagcagaattgtaatgatataccgttaataacaaacatgataacttattgtggtatcgaggctgaagattatcaaggttga

SEQ ID NO: 432223 - DNA, 267 bp, Serratia marcescens; identical to SEQ ID NO: 11114

SEQ ID NO: 432224 - DNA, 1698 bp, Serratia marcescens
atgcacaggatagttaaagctcaccttgaaagtttcgtaaaaagttttggtattgaaaacctcgaagaagatgttcagttcgagttattctgtaacaaagcaatcttagcctcgcgcattagtatggacttcgaaattgatgatgtcacaagcggttctggtgatgatggcatggacggtgttgccatcattattgatgaagagctttgtatttcacctgaagatgcagcatctgaattctcctcgcagcgtaaaaatcatgatgttgatatagtcttcattcaatcaaaaagaagtgaatccttcgatcttggtgactttttaaagtttaaagaatcgatatccagatttgttgaagaaactccttactcatgcgccgacgacattcaaaaaaatgcgcgagacatatttgatgtaataattaaaaacgtaccaaaaataagaggaggaagaccaacattcacagcaagatatatagccacagggatatacaaaaaacctaaagaacttgaattggcacgaagacaattcataaatgaaattgatgacctaggatacttctgcgatattagcgttgaatttatagatcgagatgaattaactcgaacctggatagatacgtattctgttgtaaatgcagagcttccattatttagtaatgcaccgttacctaaaataaatggtattgaagaagcttaccttgctgttgttaaagccaaagactttgtagataacttacttataacagacgagggttcgcttcgaaaccatgtttttgtagagaacgtgagagcatttttaggaatagaaaatccagtaaacgcttcaatagccgatacaataaaagataaagatgctgcttcaagattccccgttttaaataacggtatcactattgttagcccagatgtaaaacttcaaggaaatattttacatttagagaactttcagatagttaatggttgccaaacttcgaacgtcctgtatgagtgtagaaactccttagatgattcaatgatggtaaatcttaaagttgtcgaaaccttaaatgaggacgttttctctgagttggttcgagcaacaaacagtcaaacaaaagtggatgaaacacagttttactctctacggccaattattaaaaaggttgaggcttattttgatacatatgaaggtcaagatggtcgactatttttagaaaggcgtgaaagacagtttataggtagagatatacccgcagtaagggttttctctgtacatatggcagccaaatgtgttgcggctatgtttttcagacgtccagatctttcatatcgttaccccaaaagaatgtacgaacttcttgcagagaagattttctcgaatgattctaaagaggtcgttttttatgctgcttgtcttactctatacaggttacatctgttgacatctaatgctgatataccacagaacatacggaaatataaatggcatttaatggctgtagttggagcgctaattgctggtaaagaaattccaaaactaggctcaaagaaaatggacatctactgtggaaaaataataacagagatgacaaagcacggagataaggtaaaatcaacttttcaaaaggcggtagaaattgtactttcagttgaagatataacggatgacagaatgaaaaggcaggcaattcttgatgaaatgctaaacaaaatataa

SEQ ID NO: 432225 - DNA, 1188 bp, Serratia marcescens
atgatacattcttatgggctaaaaaattacttttcatttaaagatggggcggatgtatcgtttcgtctgaacaataaagtccctcgtgatatttcccagggtaagggggtcacaactgttctaggaataaaaggggctaatggatctggtaagacaaacttactgaaagcgctagatttcatgagcgaattttgtacaaaatcattttttctaaaagaagatgaaaatatagatgctgatagttattttagaagtaagaaaccatctgaattctatatagagtttacgaaagatgatgttttctatcgttatgagctcggcgttgttagtgagtttgttgtctatgagaaactgtacagaaaattaactaataaatcagacaatgaaaaaggcacaagaaccatattgattctcgaaagagaaatgaacgaagttaagtataggttagaggaactgtcatttttggatgtaattcttttaaagaaaaatgcatctattatcagtacggcttttaattacaaattatctggcgatccacgtgccatatatagtgtctattcattttttgattcaattactacaaatgtctgttatacaggccttaaagattatgcatcaactcctgataacattcataccgcatcgaaattttacaatagcaatgaagctgtttttgagtttgtaaaaaaaataataatagatagtgatctgggtatttcagatattgaaataagaaaaagaactacagaagatggtaaagaattattttaccctatatttcaacacgacgtacaaggcgaaaataaatggttgacgtcctacgatgaatctagtgggactaggtctctctttattaaattaggtttgtactggattgcgatacaagacggtggggtcttagcgctggatgaatttgatattaattgtcatgcatttatgttgcctagactaataaatttattcacgaatgaaagtattaatgtaaaaaatgctcaatttatattcacttcacataatactgaagtaattgatacattaggtaagtatcgtacttatttagttaataaagaaaaaaacgaaagttattgctatcgcttggatgaaataaaaggcgatatccttagacatggtcgcttgatatctcctgtatacaaagagggtaaaatcggcggggtaccaaaactatga

SEQ ID NO: 432226 - DNA, 1317 bp, Serratia marcescens
atggatgataaaaaatatcaagtatttgtgagttccacatataaagacttacataaggctagaaagaaagtaatcgaagctatattaagtatttatcattttccagttggaatggaaatgttcagtgctgacgattctgaacaatgggaaataataaaggaaactatagatgctagcgattattacgtggtaataattggacatcgctatggggttctaactaccgatgatattagctatacggagcgggaatacagatatgccaaggaaattggtgtgcctgtactggcttttataagatcaaggaatatagctttaactgatgatgaaagagaaggcgatcctgaagcacaaaaaaaactaaacaacttcatttcgttggcgcaagaaagcaaaatgtgtgatttttgggaaactccagatgagttagtcactaaagttgcaattgcattacctaaggtatttaaaagaacgcctagagttggatggataagaagtagcgaaggtgttactaagaaaatatcccaagaacttgctgagttgagtaacgaaaatagaaagcttagggataaggtagcagttttggaggcgtcagctaaaaaagaccttcctaagatagatgtaaatttatttagcatctcgcctatccatttaaaaatagtacatccttatgtaccgttggaacaacctgagccgttcagaaaatcggatatcccagaaagccttaaaatgtattcaaaaagtagtgatatagatgaatacaatgaaaaaataccagatgctaaggccattgctgtttttaatgctagagctaatttacaccaccagttaaataataaattagtgataaatccaaagattaaaaatactggggcaacggttgctactagcgtttatgttgagattgtttttcctgattttgtttgggttgtcaagaagtcagatgaaagctctattttaaaaccagacagtattgttcctgaatcgccgattgataaggctgacgatagaaggaaacatggtgtgttgactgatggtatgttgaggcgtaatttcgaccttatgagtgggttagcctcccgtagcaaatcgatacctatatttgagaacgctttgttggagagaagttcttatgtgaaagttaacgcaagattggttaatatatttgaaaataaacttcttcataccatggcagtaaatgtttccccattaactctaattcccatcagagttggctctggtatgattagcgtttccgtgatttgcgaagagtttaaagagaaagaatattacgagttccctataactgttagctaa

SEQ ID NO: 432227 - DNA, 630 bp, Serratia marcescens
atgaacaatcaacacgacattttgcgcctgctgcgcaacctgatccgtatcggcaccgtgagcgccgttgacctcgataacggcctgtgccgcgtcgaaaccggcggaaacctcacggactggctgaattggctaacctgtcgcgccgggcgtactcgcagctggtcggcgccttctgtcggtgagcaggtgctgatctttgcgctcggcggcgaactcgataccgcttttgtgctgtgcggcattttctccgacgacttcccggccccgtcggcgtcggcggatgcgctacatatcgcattccctgatggcgccgtgatcgagtacgaaccggaaaccggcgcgctgagcgtgtccggtattaaaactgccgatgtgcaggcgtcggagtcaatcaccgccagcaccaaagtggtgatcgttacggctgacaaaatcacgctcgatgcgccggaggtagtctgcaccaacaaactcaccaccggcacgctggaagtaaaaaaaggcggggcgatgcgcgggaacatcgagcacagcggcggctcgttctcgtcgaatggcgtagttgttgattcgcacacccacggcggcgtccagaccggcggcgggcaaacggggaaaccaacatga

SEQ ID NO: 432228 - DNA, 1455 bp, Serratia marcescens
atgatgtctaagtcactgaatgaagtagaaaagcaggttcacgttgccgaagttgttcaccacggcgaaaaactgactattcctgtcggtatgggcgttcaggatgcgatcgatttgctggagcgccgccgtgattacctgagcgagaaagtgatcatccgccgcgaatttaacgtgttcccgtgggacggcgcaaacgcattagcacaggcattaaccaaccgtttcggctgggcagcggccgagtcaactccgggcttttttggtagccaaccgccagcgatgatcaacattgaagtcgggccgaaccaaaccaaagaaattccgtggggacgcttcagcctgcctggcatcgatggtttcgttcagactgattccgatcgcaaagacggccgcatctgctttgtgacagctgcaaaaattcagcgtaaggacgaaagcgtcataaaagagctgtttgacgatattgccaacatcctgaagcgcggctccatctacgccggtaaggccatcaaaattcgcttccgtgatgacgacggcgacctgatcgaaatgccagaaccgaagttcttggacacgtcgtccattagccgcgacatgctggtttattctcgtgaagtgaccgaagcgatcgaaaccaacctcttcacgccgatcgagcgcattaccgactgcatcgcgaacgacattccggtaaaacgcggcgtgctgctgggcgggccatacggcaccggtaaaacgatggctgcaaccgtagcttcgcgtttggcaaccgacaacggcgtcacctatctatacgtgccgcgctccgacgagctggctgacgcgattgagttcgccaagcagtatcaggaaacggcctgcgtgattttctgcgaagacattgaccgtgctgtcagcggcgagcgttccgtcgctatggatgacattttgaacatcctcgacggcatcgacaccaaggccaacaacatcataaccgtgttgaccacgaaccacctggagaacatcaaccctgcgatgctccgcccgggccgactggatgccatcattaacgtgacgccgccggacgccgaggccgttgagcgcctgatccgcctgtatggcaaagacaccatttcggccgatgcagatctccgccctgctgccgacctgctggccggcaccatcccggcagtgatcgccgaagtagtgaagcgcgcgaagctggtgcagctccagctgcagcagccgggaaccaaagtcgagaacgtgtccggtactgccgttctgcgtgcagccgaaaccatgcagagccagattaagctgctggcggagcaatccaaaccgaaggccaaagagccaaccttcaatgaggtgatgggtcatgccctgtctcatgctctgaacggcaccaaggagcaattgggcaccatgagcaagcgagttgaagaactgcacgaccgcgttgtgaattaa

SEQ ID NO: 432229 - DNA, 1215 bp, Serratia marcescens
atgaatagtttaaaaactgttgtcgacctttacaggtcacactccaattctgattacaacggagaaactttctctggggaatcaaaatacactactgaactgaaagagttaataagagctattttgtccgatcaattctcctatggtcgctttcaagagctagaagtcgacggagaggaaatagaagattactctgaaatcccagaggacggaggggttttaaatttcaaatttttagtaagccaatctagcgcagaacggttctatgcctcatcaaaagatcttataaaaatcaataaattaatgagaggtgaaattccagaacaatactatatcgttgatttagattattactctaatgaaaatcaaaaaccagaatccataagcaaaattgaagcaatttgcagcctaataaaagcattatcaaaactatctcactttcatgacatgaaggagaatacaagcgctaacacatataggttggtttttgtccttcactctgagtctaaatcatcttcagctgtaattgaaacgttacttactgaggaaatcttaacttataatgaagtagatatctcactcattaattcattaacaaccattaaccctattagcgacctacattatgacgaaaaagtaaatacatttaggaatactctaatcgagtatataaattcaacaggctctaagtttaaagatatcatagagaactgggaattgatttgcaatatgtacagaaataaccttgcagtgtacatgtctgcattttcatttcaaaaatccagaaaggaaatagccgaaacggagattgaatacgcagataaaatatcaaaaataaccactgaaatttcgaacaaagctttagcaatcccaatatccctagtgggttcaatagctatttaccagttaaacggaaagatagaaacttacattacctttttgggattggtttttacaagccttataatatcgatcattttagcttcacaaaaaaaacaactaaatcgagttgaacatgccaagaacattgtcttcacctcgatagaaaaaagaataaaagatgacaagtccgatctaaaaacaagactgcttgaagcaaaatcagaattaaatgataatgtcattttttgtaggagggttttggattttttaatatcaatttcttgggtgcctgtatgcataggcaccttaagcttactaagaaaatttttataa

SEQ ID NO: 432230 - DNA, 1146 bp, Serratia marcescens
atgagcaaaatttcaatagcacacgtaattgttcatgagttaatcaaggaagcacaaaaagatttcgatcactcaaatcgatataaccttcggaattccgaactagataaatcaaacaaaattgttatgcaattagtcgatggagtggtcgatttatatggtactcgcggcaacttagcccaccatggagcttttaaaaccgatgcttcagtgagagggccggttccagatttattcgacaagtattactctacacaacagtccgactctagtgcatttgtcaatctaactcagcagatcatgaagcaaatgtatgaagaggctaaatctcagttgtggtcatcaggtgggtatgttgtatttaccgattatacatcacagggtttgcggtatttattagtcacaatgattaagaaaaaaaatggtgtaactataagtgagaatttgaaccccgaagaaatgattcacttagagcttaactatataaatcaagctgctagagttaactttaatcgttacaaggattatctttcagctgatgctgccgataaaaatgacttaaattatttgagtttcataagcaaaacgaacggccaatctgcagcagcatattttatagctgccttaggatgtgacaaagggttagcctcagcaggggccacaagaaaattaccgaatgaaacaagaaagttttttagacaacactctgaactatcccctcacgccgaagagtttagaaacgaagtaataaagtatcttgaaaagcaatttgaggctaaactccctgcaagcttgtcagatatcgaggcattggcttatactcatatgtctttgcttggagaagaaaagcgaagtgaattaataaagggaatgatgcagcatctaaatagtgaaggtgtaggaataccgtcagattttgttataaacagagcatctcttgataagttgcgtaaagttatttataaaacctctctgtatagttttaattttgataaagaactccttggagacagctcggatgcaagagtatactatgatgataaaactggaagtcttagtttcaacaaccttcctgaagaagctaagtctaaaataagaactgcgcttaaagagaaagcaaaacagtttaataatggcaaagaataa

SEQ ID NO: 432231 - DNA, 387 bp, Serratia marcescens
atgagcagctggctctcaaaactggccggcgggggaatgcttctcctgctggcggcgtcaatctgcctgggtggttacagctcgctgttgtcgcacaggttggagctggcacgccagcaggttgcagaacagcagaagacgctggcgcagcaggcaggactgatcaccacactgcgcgcggatgacgcccgcaatcgcgcaatgatggcagaacagcaacggagagagcagcagctgcgccagcagcacgacaccgcccaaaggaaataccgtgaagcgattaaaaacgatccctgcgctggtcagcctttgcctaccgctgtgcttgagctcttgcgcccggccattggcacaacccccggcgccgttaatcctccttccccctga

SEQ ID NO: 432232 - DNA, 1191 bp, Serratia marcescens
atgtatgaagacattatcgattcgatgctgccaaaaataacggcggcagggatgagcgcgcctgaattccagaccatcctcaccggctggcagacgatttttcgcggcatctatggcgatgacatctacatcgagccggacagcaaagacggcgtgctgttgtcgctgatcgcctacgcgatgcacggcggaaacaatgcggtgatcgccacctggaatgcgtttagcccggcgaccggaaccggcgcggggttggcgagtaacgtcaaaatcaacggcatcagccgcaaggaaccgtcaaattccacggttgacgtgaagctgatcgggcaggtggggacggtcatcagaaatgcctcagtacgcgacagcgctgggaacctctgggatttgccagcagaggtggagctcgatattcacggccaggcggtggtaaccgcgacggcgcagaaggcaggcgccatcactgcgctgcccggtgatgtttcgcaaatcgctacaccgacgcgcggctggcaatccgtcacgaaccctgaagcagccaccgccggcaaaccggttgaaactgacgccgaactgcggcagcggcaggcgctcagcgtcgcgctaccgtcccgaactgtcatggaggggctgataggtgccattgccaatatcaccggcgtgacgcgctataagggctacgacaacgacacttcggaaatcgacatcaacggcgtgccggcgcatgcggtttcaatggtggtagacggcggcgatgcagaagagatcgcccgcatcatcgcgataaaaaaatcaccaggcgcgccgacgttcggcactacgacggtgatcgtcaaggatgcctacgacacagacaagccgatccattttttccggccgaccaaagtcccggtttacgcggctatcaaaattaaggtgcttcctggctacaccagcgacatcggcgaagacataaaaaaagccgtgtccgactacatcaacacgctctacatcggcgacaccgtttatttttcccggctctatgttcccgccacgctgggaaatgccgccagcgggaaaacctatgacctgatgactgtgagcattggaaaagatgcagtcacgatgagcgaggccaacattccgatcctgtttaacgagtctgcgacctgttcgccggagaatatcgcaattatcacggtggcatga

SEQ ID NO: 432233 - DNA, 579 bp, Serratia marcescens
atgatgaccaacaaatacaccgcattaatacccgcttatcactgccaattccccaaccacttcgccaccgtcaatgcagttactgaggcgttcgcacgtcaacaggacagcacgcgcggcatcgtgccggcgtttgaccttgacagcgccattggcgctcagctcgatgtaatcggcctgtgggtggggcgcgggcgtcgcatacgcgcgccggcagtgagccattatttttcgttcgatgatcccgatctgggtttcgaccttgggacatggaagggacgctacgactacggcgacgagtatatcgatatggatgacgacacctatcgaacggtactgcgtgcaaaaatcggcgccaacaactgggacggtactgtagaaacgctgcccgccgttctggcggctatttatccgaaaggcggtatcacgatcactttttcggacaatctcgacatgagcatgacgatcacagctcgaggggtcgtaataccggcaatcacgaaagaaattattcggcaggggtatctctcgattaaaccgatggggatcgccgtaaattatgaagttgtggagggataa

SEQ ID NO: 432234 - DNA, 2397 bp, Serratia marcescens
atgtcaaataatggtttgccagtcactgacgtggtaggggtttctgttacccttggtcagcgccgcactgccggcgcatcagcaggtgatgcatatgcccaggcagcccaaggtagtgcaatttcagcggctaattccgccgcaaaagccactcaggctgaacttggtgcggcggaagccgccgaaggcgtagctgaaaatgcagtcattgcttcgggtgcagcagatcgcgccgaagctgcggcagaaatcgcgcaatctggtgctgatgcttatcctgatgtcgctgctgcacaagccgcgatcgacgctggcactgaaacgcggcgttatttctctgttcgctcgaccatttcaacgcaatgggttgatgaatatgaaaacgtcaacggtgtagcgacgccaacgggccgctatctgagtaacgggaaatacgttgatgagattgccgcctctgttatttcgctgctggcgagtctgattgaaactaacaggcgaactgcctcacttcggcaatatcaatctgagcaatggcagtggttagttgaaggtgccggcggtgcttctgagacagcaatggcgcttgataacgattttgggttgtggctggctgggttaaagtcttcaattcaagattatatcgaacagctcatgccgaagagcattgcaaatcgatacgttgatctgcaatacgctatcgtggcaaaaaacggcattgacggactgctaacaataaacaataacggcgatattcggatcgtcggcactgatgacgttttgcaagacagattgaacgcgatttgctcgaccacgttttctcgcagggttgctggattccagttcgttattttcacgtcggatatgaagtcggcaatattcgctattgatgacgatggcggtgtgtatattcccggcattgatggcccgcttcaagataatctcggcgagtctttggcatcaatcacgactgtcggcggcgttcctgcagctgcgtggcgcggtgatattgtgtggtctgagcgtcctgtgttaacggcgcaagaactgacatcaagcggctttgtattcagctatatgccaggtggtgatgctacttctggggctggcgtgatgtatgttccatctatacgagaaatgcctattgatgcaactgtgattcacggtgctggcgcctgcggccaatctcttaatctagcgttcgatactgctaattcgaacattgttaatattgataaatcattccgtggtcgcttattggcgggtataaacggaaatccagaaggtaagaatgtaaatgctgtaaataatgatgatgtatcaaaccttaacgatatgagttacccatcataccgccaaggtaatatcctcccaatgtacaatgaactcatgtccaagggtgttggaaatattatttatatccatgctggatttgcggctggtggtcgctcattcatacaaatcagcagggggactgtgccatatgaaaacggcctgaaatttgttcgaatggctaagagtgctgcggacggtgtcggtaagcaatatatatttaagtttctgtctcatgagcatggagaaactgattccgataatggtgattgccgaaatccgggagactatctcgcaaaagaaaacgtttattttcccggcattcaaatcgactttaaaggcattaccggccagacagacgatttcctgattgttatcgggcaggtcggcagtcgcagcaacaccaaagctggagccgttgatgaagagggtaacccgacgggcgaaagcatcgtggttcaaccgtattcagttccagcggttgaccaactcgcatacgtgcgccaaaaccccgacacggcgattatgtacggccctaaatacatgctgaactggctctataacgacaactcgctcagtcatctgaacgcaaaagggaaagtgctacagggggaatatactgcacaggccattcactggcatctgtacaacgcagagaaaaaaggcacgtggactgggctgaaagtaaaaagtctttccgtctcaggaaatattgttgatttgctctgtgatgtcccatatacgccgatcgtcattgataccaacttcatcgctgattgtttgaatcaaggaattagtctcgagaaaaactccgcatcagttcagagcgtcaccgtcgtcgacggtaacattattcgcgttgagtttgataaagctcccgcgcctgacgattacatgctgatcggctttactaataccgcgctaagttcaagcggctatgtttatccattgacgtgttttcgtgattcatccccaattaaatcacgatggatcacccgaaataacgaacctttccccctttacaactggatgtgcctcgatcgcctgcctatttccggagaattttaa

SEQ ID NO: 432235 - DNA, 909 bp, Serratia marcescens
atgacagcagctattaatactgggaaaagttattctggtttccgcccagccctggacttatcagcttccattcttgatccgtcggcgctatttagcgcctataaaactcgcgtggtggccgatggtggctctattccagacgagccgggttgtcttacgcggtttgagttccttgtgaataacgggatgtatagtcgagcgacgttctgtgcagcgccggcgtttggtttaaaagtcgatggtgctggaaatgtccaaaccgtttataacctgcttggctctgctggggatttgatcgcgggttcccaaggaactccaccgctacccatgacctacgatgccactgcgcgcgcggttatcattcaggtcacatcgggtgggggctggtatctcaaaagccgcacgaatcttgttatccagaaaagttcgacttatttgattgcaggccgcatgagcgacctcaatcgtgccgacaataacggaattactgccggatacaatctgacaggtttaccgatggcgtatcttcggacgatgataacgaacaacagcgcagttactgaggcgtggcgatatgggtcacgcgatagcgcatggcctgcgggtagtggtggcgcgctcaatgccgcaacgaatatctatgctgactacgtgccatctgcgggcctgttcaaagtggctcaaggggttattgaggggtacgagaaagggaagtttcttgcggcctccgcgccggcggcgacgggaaaactggctgatttgagcagctacactacgccgatgttgatcggtggtacacagttggcgaataacatcgtcagcgcgtgctacggggcattccaagacatgctttgtcttcacactgccgacgaatccgacgcgattcttgcttcacgcttgggtatgtaa

SEQ ID NO: 432236 - DNA, 291 bp, Serratia marcescens
atgaatttatatctctctccggcggtgcttatcgcgcatcgcctgggcatctttgagtttattgcactgcacccccgcaacctgaccgatatatgcgctcaggccaatgtggaaagacgcccggcggaaacgttgatcatggcgctattggcattgaaattgatcgccagagacggcgaaacatttcatcttacgccggaagcggaaccctttttgttaaaaaaaccgcattatttcggttatttctggaacttggtcagcagcctttggccgccgcgggatgcggcctaa

SEQ ID NO: 432237 - DNA, 879 bp, Serratia marcescens
atgaacgtattatcggaaatcatccatgaagcgctcaaccatcagggcgggtatgccagcgttgatggtaacggcgatgtaacacgttttatcgaagtagcaccagcaggtgtgcgctacctgtcactgaatgacgtgatgacgcctaaatcaggttcgcagttcaccctgagcggctctctggctattaattcactggttgtacgtgcaggcgcagaggttatccgcattcaaccagtggagcaaagcccggcgggggcaagcattacacttaaacaactagaaggtaagtttgttacggttgaatcggctaacttcagcgctgtgccagatggagtcgaagttaccgattctatcgccccttacttagtagccgcttacgatagcactaccgctccatgctacggcgtagctttcaacctgtcccgaaagcaactcaaacatgaatttgttgacgacaccataatgcgtgctgttaacaccgcaattgaacttggtatttccaacctggctgacttcgttctgctgaaccatctggaagctgaagcccaaactatgaatgacataaccttcaaaggtttggcaaaagtcgctgctgcacgcggcctgcgttgggacgagcttcgcgttctggctggtggtgaatgcactggccttgaagtcgacggtacaggcatcctgcgtgcgttcggcgttcgcgctgagctatctaagaacaccagcaaaaccattattggtgcatttagccgtacagctatcggcatagacgatgaaatccgcatcatagctaagcgtgagaagaatggttcagttcaggttgtcgtatgggtgaatgctcaagccctagtgcctgataacaccgcattttggaaagcataa

SEQ ID NO: 432238 - DNA, 129 bp, Serratia marcescens
atgagcgatatccaaaagaagatactaataagtcagtttaaggccaaatttcttaagaacgaatcccaaaaaaatcctagttcgttattgttaagtcaaatttaccagaaaaatcaaagagctgaatga

SEQ ID NO: 432239 - DNA, 1302 bp, Serratia marcescens
atgacagcagaaatagcagtttttaacaaaagtgcagtagccttagccgctgactcagcggttactatcactggtgatggaactcataaaatatataatggcgcagaaaagcttttcactttatcaaagtttcatcctgtaggtgttatgatctatggcaatggtgatatttgtggtgctccgtgggaattggcaataaaaagttatcgctctgagaatgggactagatcttttaattcattaaaggaatgggcggataatttcttaagttttatttccgaaaatgattcaattgtaaccgaaggaatgcgtgagaagtatctttttaattttcactcgtccattattctccctgcattgattaatgatgtggaaaaaaaagcagaggcgctttctactgagcgcggtgagataattaaaactgctgagttttatgatttatttataaaatattgtactgaatttgttactacacttgaaggtgcgccatattttgacggttttgatgaggatgatcttcctgaggcagcagggatttctgaccaatacgtcgattttctttgtacagaacaattacgttttgatgacgaagtcattcctttcgagataatcgaattaataaaaaccattttcacttatacaacttgcaaaaaagcgcctataggaagcagaagtgggattgtttttgctggttatggtgatggtgaatattacccggtggtcttgtcatacgatatattaggttttcttgggcgtaaggtgagaacaatatttaatacatcaaaaagttcgcttgcctcagaagcgaatatacttccttatgcccaagaccaagaggttcaactgtttctacaaggatgttatgatgaatttctagagcataatagcgaagtccatgaatcctgccgtcaagatattaagaataacttcaaggagattttaattaaatatatatctccagacgatgctgaaaaggaattggctgttcttgatggtttaattaatgattgtgttgagtcaactaatactaagataaatagttttataaatacaaattatattcagaaagtaataagcatgctaggttttcttcccaaacaggaacttgcttatatggcagaatctttggtcaacctcacagcttttaaacgaaaggtatcaaatgagcatgaaacggttggcgggcctattgacgttgctataatatctaaagcagatggttttatctgggtaaagcggaaacattatttttctcgcgagcttaatcaccatttttttgttaaacatcaacgagatagctga

SEQ ID NO: 432240 - DNA, 1455 bp, Serratia marcescens; identical to SEQ ID NO: 427885

SEQ ID NO: 432241 - DNA, 225 bp, Serratia marcescens
atgctggtgggcgatccgatcagcggcgaaattcgccgtttcatggtggggccgaagtcctgcgaactgactggcatcaccttcaccccggactacaagacgatgttcgtcaacgtgcagcatccgggagaagagggcgattcgcacttcccaaacaacagcccgcgcccgcgttcatcggtgttgatgatcacgcgtgaagatggcggggtgattggggcgtaa

SEQ ID NO: 432242 - DNA, 819 bp, Serratia marcescens
atgaataacagagtccaccaagggcactttgcccgcaaacgctttggacaaaactttttaaccgatcagtttgtcatcgatagcattgtctccgccattcacccgcagccgggcgaagcggtggtcgagatcggccccggcctcggcgccttgaccgagccggtcggcgcgcgcatggaccgcatgacggtgatcgaactggaccgcgatctggccacccggctggaaaaccacccgcggctgaaagacaagctgaccatccaccagcaggacgccatgacggtgaatttcgccgaactggccgaggaagctggccaaccgctgcgcgtatttggtaacctgccgtacaatatttcgacgccgctgatgttccaccttttcagctatactcaggcaatccgcgacatgcactttatgttgcaaaaagaggtggtcaaccgtctggtggccggcccgaacagcaaggcctacgggcgtttgaccgtgatggcgcagtactactgcaacgtcattccggtgctggaagtgccgccgaccgcgttcgcgccgccgccgaaggtcgattccgccgtggtgcgtctggtgccgcacagcgtgctgccgaatccggtgggcgacgtgcgcatgctgagccgcatcaccacgcaggcgttcaaccagcggcggaaaaccatccgcaacagcctgggcgacctgttcacgccggagcagctgacggagctgggcgtcgatccttcgctcagagcagaaaatatttctgtggcgcagtactgcaagctggcgaactggctgtcagccaatccggcgccgcagcaataa

SEQ ID NO: 432243 - DNA, 1440 bp, Serratia marcescens
atgcggatttctaaaaaattttctttaggcaaaagccagtttgaactggattttattgatattgatgtcaataaggacacccctttatttattgatccttattttttatctattagaaaagacaaatggtcaattgatgcatctagaactcttaaaagtttttttgaaacttttatacaactcattcgaaggggtaaagacgatgatgctagaatgctattttcatttctccatgaaccaaatgaaactaggttaggtctatctcgaggaaaacccagaggcaatgggatgggtgacggcgacgctgacaagctttttaatagtataaaaacaagtaaggctgtcaattctggtttagttgaagatcttgaagattttaagttttttattcctggaattggaaaggataagatatctgacatgtccaccaatataattcgccggcatcttttagattatacaaaacaacaatgtatattgtggaatataccattagaaaagaatattaacgttgggcattggtgggacaggaaaacgagaaagtgggtagtggattatgatgaatcattagtcgttgatggcaaactcacactgctagtccctaaaggaatagcatccttttgcaaacataccacttctgaaaaatattttaatagctttgttttggaattcctccaaaatgagcacttgagaatgaactcagtatttgttaagcatagggaggatggttcgccttatgtaacaaaaagggatcttaaagaaaaagcagtaacctattctaaagaatatttacttgagttttctgaaaaacaccctgaagttttcagagactataaagattggataaaaaaacgcactatctcaattaacaatgaagagatagatgaaagtcttaatcgtgtacaaattgttgattatctgctagaaaaattattaaataccccgtcagggcctgaaaaagcttcagaataccacagacttacagtggggattcttgaacttctcctttaccccaatatttctgctccaagtgtagagcatgaagtcaattcaggcagaaaaagaattgatatcctcttcgagaactcagcagaaaatggctttttctataaccttcatattatccataagctcgcatgctcttacatatttgttgaatgtaaaaactataagaaggatgttaaaaaccctgaattagatcagctttcagggagattttctcctaataaaggtaaatttggcatactcctttgtagagaaattaataataatgagctattccttaatcgttgtgcagatactcttaaagacgatcgtggactgatcatacctattactgatgatgatttaatcgtttcactaaaaaaatataaatctagtaaccaaaagcatcttgaagacatactttcaaaaaaaatgaagcaaatcacatttaaataa

SEQ ID NO: 432244 - DNA, 549 bp, Serratia marcescens
atggaagcttatgatatcaaaaagatgaaagatcttgaggacgaaaatcgtcgtatcaaacagatgtttgccgacctcagccatgaatgtcatgcactaaaagacgttatcgaaaaaagctttaaaaccagcgataaaacgggaactcgtcagctatctgagggcacaatttgccatgagtatccgccaggcgtgcagaacggtatcgttgagcaggacagtgtattttatcagcccgatacccggcgtgacgaaacggtgatcatggcgttgactgaactggcagaacgctatccaaggatagaaatcggcctgaatatctcagcccaacgggtggacaggattgtcgcaaaccgtggatatccgttgaagatgcggctgaataatggttcggtacttgtgtctctgacgattgcgcaatgtgctgaagagcatggtgtggcgctggaatttatcaagccgggtgaacaacacagaatgcgtttatcgaacggtttaaccggacgtaccgggcagaaatcctggatttttacctgttcaagacactga

SEQ ID NO: 432245 - DNA, 858 bp, Serratia marcescens
atgccacctttctctcccaaaatcaccccactgtctaccgatgatttagatgaatgctattttttcatcgattatttagagcgaaaggatattataaagacacgcaaagccaggcattttgatggcccagcagatatctgcaactatatcaataattcgctggcggcgtatttcagagataaccctgataaaatcaatggggtaatttccgatatgctttattcactcaaaagaaaaactccgcctgaaggtgaggtggcctggattaagagtgataagcgcgcttgcttttggttgtggacggagatctattgtcttaatcatgatgacacaccacgtgaggaagttaaaggatttattgcacacagtcatcaagaacggcatcgtgaggttatgcaaaaatataaagaattccacctgaattatgagagtcggcgctggaataagatgatcaataaatggagtaaaataaaagaatatgattcactgttggggtgtcttccgccagatgatgagaatgttattttttatacctggaaatatttatgctctcacggccattatattgatcggatatatactccattagacgatgaggagcgatacctatccattcttaattacatagacttttaccttactcatcctttggaaaaagaattgcttgtcagaaaaataaagccagcaattaatcagcgtggccatagattgaagaagcaaaaaaccagcatcagcaagcaattttatctgaaaaaagaaaacattaataagctaaaaaaattgctcaatgaaaacagaatgaccatggatgaatactttaatgcgctcattgagcaggagtctgacaggctgatgtaa

SEQ ID NO: 432246 - DNA, 7185 bp, Serratia marcescens
atgccacgcggcgccgcgttgccgctgtcgtttgctcagcagcgtttgtggttcctgacgcagttggaaggcctgagtgaaacttaccatattcccctggcactgagcctgcgcggcgagctggatctgcccgcctggcggcagagcctggatgcgctctatgcccgccacgaagcgttgcgcagccggtttgtcaccgtcgaggggcagccgcaggcgcacattctgccggcagacgcgctgccgttgacggtgcacgatctgcgtgggcggcaggatgctcagagccaggcgcggcaactggcgcagcgcctgacggaggcgccttttgatttgacgcaggggccgctggtgcgcgccgcgctgatccgcctggcggatgaggagcatctgttcctgctcacctgtcatcacatcatttccgacggttggtcgaccggcattctgctgcgtgaactgggggcgttgtacggcgctttgcgtcgcggcgatgccgatccgctgccgccgctgccgctgcaatacgcagattacgccgcctggcagcgtcgctatctgacgccggagcggctggcggcgcaggcgcaatactggcgcgaaacgctgagcgatgcgccggcgctgctgacgctgccgaccgaccggccgcgtccgacggtgcagtctttcagcggcggggaggtgccgatcgcgatcgacgccgagctgacgcaggcgctgcggcagttcagccggcagcatggcggcacgttgttcatgacggtgctggcggcctggagcctggtgctggcgcgcatggccgggcagcaggagctggtgatcggtacgccggaggccaaccgtggccggctggaaaccgaatcgctggtcggcttcttcgtcagcacgctggcgctgcgcatcgatcttcgcgacgatccggatctgccgacgctgatcgcgcggatccgccacgcggtgctggcggcacgggaaaatcgcgatctgccgttcgagcaggtggtggagctggtcaatccgccgcgccacctgggttataccccgctgttccaggtgatgttggcctggcaggacggctcggtgcgcgatatctcgctgcctgggctgcaggccgagagtgccgagttgggctatcagatcgccaagtatgatttgacgctcgatctggcggagcgcgacgagcaaatcagcgggacgctgaacttcgccacggcgctgttcgaccgcgctaccgccgaacgttacggcgtttacctggtgcaggtgctgcgggcgatggcgacaaatgctacgcagcctgcgtcgcatctcgatctgctgccggctgccgagcgcgaactgttgttgtacggctggaaccgaaccgcggaagtttatccggcgcagagctgtgcccacgtcctgtttgaacagtgggtgcagcgcacgccggacgccgttgcggtggtgaacgatcgggacagcctgagctacgcccaattgaacgcccacgccaaccaactggcgcaccaactcatcgcgcagggcgtgcgcccgggcgatcgcgtggccacgtcgcttgaacgcagcgtttctctggtcatcgcccagctggcgatcctcaaggcgggggccgcttatgtgccgctcgatccgcacctgcccgttgcgcggcaggcgtggatcatcggcgacagcggggcgtcgttgatcctgtgcgatcgcgatatcgaccgcgagatagccggcgagatcgcctgcctgcgtatcgatcggctgcggcagaatccgacccacaatccggcggtgcctcgcgccggcggcgcgccggcctacatcatgtatacctcgggctcgaccggtacgcctaaaggcgtcatggtgacgcaccaaggcatcctccggctggcgatcaacaatcgttttgcgtcgtttgaacgcggcgatcgcttcgctttcgccgccaatccggcgtttgacgccagcacgctggaaatgtggggagccctgttgaatggcgccagtctggcgatcattgcgccggaagtgttgacggaagccgaggcgttggcggcggcgctggtgcggcaagggattaacgtcttgttcctgaccacctcgttgtttaaccaatatgcccatagcatcgccgcgacgctggcgcagttgaaatatctgctgagcggcggtgaagcggcggatccgcacgcctttgcccgcatgctgaaagaggctgggccggtacggttgatcaacgcttatgggccgaccgagtgtacggtgttcgccacgacggccacgatcgagcgagtggatccatggcagcgtttgcctatcgggcggccgatcggcaatacccggatttatctgctggatgagcacgggcaaccggtgccgctcggcgcgaccggcgagatctacatcgccggccccggggtggcgctgggttatctcaaccgcgcagagttaacggcagagcgattcctggcagatccgtttaacccaggcgagcggatgtatcgcaccggcgatctggcgcgctatctggcggacggcaatatcgactacctgggacgcaacgatcggcaggtgaaaattcgcggcttccgcatcgaatgcggtgagatcgaggcgcgagtggccggtcatccggcggtgcgcgaagcggtggtggatgtcctcggcgaagcggacaataagcgactggtagcctgggtggtgccggaggctgacgcggatcgccagacgttggcggtgacgctgcgacagtatctggcggggatgttgccggagtttatgctgccggcggcctgggtggcgctggatacgctaccgctgacgccgaacggcaaactggatcggcgcgcgctgcctgagccgcaggaggacgcctacgtgcgtgaggtttacgccgaacctgaaggcgaacttgaaacgctgctggcggggatctggcgcgagctgctgggcattgagcgggtcgggcgccacgataacttcttcgaattgggcggccactcgctgctggcggtgaagttgatggcgcagctgcgccgtgtcgggctgagcgccggggtgcaaacgctgttcaccgcgccgacgctgtcaacgctggcgcagacgttggtcacgcagcaggaagtgagcgtgccggccaacggtatcctgccgggctgcgtagtcattacgccggagatgttgccgctggcgacgctgagccagccggagatcgacgcggtggtggcgcaggtgccgggcggcgtggccaacgtacaggatatctacgccttgtcgccgctgcaggaggggattttgttccaccatctgctggcggaacggggcgacccgtaccagctgtccgcggtgttgcgtttcgacagccgtgcgcgcctggacgcctggctggcggcgatgcagcaggtgatcgatcgccatgacattctgcgtactgcgttcatcacgcagggcgtgtcatcaccggtgcaggtggtgtggcgcaaggccgagttgtcgctgcgagaactgcggctcaatccggcagagggcgagatcggttcgcggctgacggcgttgtttgatccgcgctgcgtgcggcctgatctgacgcgcgcaccgttgctgagctttgtcgccgcacagggggaagaaggcagttggtgcgtgctccagcaatggcatcacctgatcggcgaccactcgaccctggcggtgatgcaggaggagatcaacctgatcctggccgggcgtggggacgaactggccaaggcaccgccgttccgcaacgcggtggcgcaggcaaggctcggcgtcagcaaggcagaacacgaacggttcttccgcactatgctggcggatatcgatgaaccgtcgctgccgttcggcctgagcgacgtgcatggcgaagggcgggatatctcgacggcacacctggccttaccgcctgcgctcaaccaacagctgcggcggcaggcgcggcggctgggcgtcagcctggccagcctgtgccacctggcctgggcgcaggtgttagcgcgcgctaccggccgcgatgaggtggtattcggcaccgtattgttgggccgcatgcaggccggagacggggcggaacgggcgctcggattgtttatcaatacgttgccgctgcggctggatgtcaatgaggtcggcgcggaatcggcggtgttgcaggcgcacatccggctgagcgggctgctggcccatgagcatgcgccgctggcgttggcgcagcgctgcagcggcgtcgccgcgggcacgccgctgttcagtgccctgctgaactaccggcataacagcggcgaggataccgcattgccgaccggcgtgacgctgctcgatagccaggaacgcaccaactatccgttcgtgctgtcggtcgaggacggcggtgattcgctgggcctgacggcgcaggtcaggcagccgattgaagcgcagcgcgtgtgcggctatatggcgcaggcgttgagcgcattggcgcaggcattggagcaggcgcctcagacaccggtctgtgaactggaggtgatgccggatgaagagtatgcgctgcagctgtgccgctggaatcatacggcggaagcttacccggcggatacctgcgtgcacgaactgtttgaacagcaggcgcggctgacgccgcaggccatcgctttgatccaggatgcgcaacggctcagctacgcacagttgaatgcgcgcgccaaccggttggcgcatcggctgattgagcgcggcgtacaaccgggcgaccgggtcgcggtgcggctggcgcgcagcatcgaactggtctgcgcccaattggcggtaatcaaggccggagcggcgtatgtgcccatcgatccgcaactgccggccgcgcgtcaggcgtggatcgccgatgacagcggcgcctgcctgatgctgacggacgccatcggcgacgaggagatcccgcagctgacggtcgaggatcgcgaagctgaagatcataacggtaaccctgcgttgcgcgtgtcgagcggcgcgacggcctacatcatgtatacctccggctcgaccggtacgccgaaaggcgtcatgacgccgcaccaggggatcacgcgtctggtgcgcaacaaccgctacgccgcctttgacgccgacgaccgcatcgcctttgccgccaatccggcatttgatgccagcacgatggaggtttgggccgccctgttaaatggcggtgcgctggtggtgatcgcgccggaggtgatgatggaggccgagcgtctggcggccgaactgcaacgccatcgcatcaccacgctgttcttgaccactgcgctgttcaatcagtatgtgcacagcatcagcggcgcactggcgcagttgaaatatctgattagcggaggggagaaagaggatccgggcgcttatgcgcggttgttgcaagagcgggggccggtgcacctgatccatgcctatgggccgacggagaccaccacctttgcgacaacggcacgtatcgagcgggctgaaggggaggcgcgcttgccgattgggaaaccgatcggcaatacccgcgcttacttgctggacgcccgcgggcgcccggtgccgatgggggcggtgggggaattgcatatcggcggcgtgggggtggcgttgggctacctgaaccgaccggaactgacggcacagcgcttcctgagcgatccgttcaatccggtcggcggcggccgcatgtatcgcaccggcgatctggcgcgttatttaccggacggcagtcttgaataccaggggcgatgcgatcagcagatcaagctgcgcgggttccgcatcgaaccgggcgagattgaggtgcaactggcggcgagcccgtgggtgcgggaagcggtggtgcaggtttgttcgacggaacatcatccgcgcctggtcgcctggatcgtaccgacggccgacgttgaccgcagcgcgttgcagggacagctacgggcctatctgagcgaacgtttgccggagtacatggtgccgtcggcttatgtctggctggatgcgctgccgttgaccgccaacggcaagctggatcggcgtgccttgccggagccggagcgcgcggcagtcggcactcgggagtatgcggcgcctcagggggagaccgaaacgacgctggcgcgggtatggtgtgagctgctcgagattggccagatagggcgccacgacaatttcttcgagctcggtggccattcgctgctggcggtacgtctttccagccagctgcgtcagcaaggcatcaccttgccggtacaggcgatcttcaaccatccgatattggccgagctggccgagcggatagatcgtcgcaccgcagaggctccgctgcgcaaagcggtgccggctcgcagcagcggcagccggccgccgctgttcttcgttccgaccggctttggcgaccactcctacgtgtttgaattggccaaggagatcgacgagaccttcccggtctacgccgtgccgtggccggcggtggaggagaagccggccaccatgtccgatatggccgccagcgccgtggcgttgattcgcgaagtgcagccgcaggggccataccatctggcggggtactcttccggcggggtgttggcctatgccatcgccgagcagctgcaatcggccggggaaacggtcgccttcctggggttgatcgacacgttgcggccggtggaggcgatgcacagcccggtccagctgttgctgaactgggtggagtcaacgcaggaaaggccggatccgcagttctgtcagcagttggccgagctgccgttgccggaggcgatcgcggccgtgcaacgcgccgggatcaagactcagcgtgaggaagtggccgacgaggcggcgctctggcagcagcggcaccactacgccaaactggtggaagcgaccctggtgcagcccgcatcgctgaaaatccatctgttcaaggcgaagcaggagcaggtttccgtcaattcgcagaacgcacagttccaggcgtattggcagaggatcaagcaggcgggatattgccgcgaagacgcttccgcgttgggatgggataagctgctgccgccggcgaccgtccgcgtcagccaggtcaacggcgaccatgtgtcgatgatggaacatccggttcatcggcgtgagctggggcaacacttcaatctggcgttgcgcgagctcggacaggcgtaa

SEQ ID NO: 432247 - DNA, 1221 bp, Serratia marcescens
atggcagaaaacaaactaacagatgtgaagttgcgagccttgcttaaggcagagataaacaagccaacaacgttagctgatgggctgggactgtctattcgtgtgaccccatcgcaaaaaaaaacagccaaagacggtaagcgagaggccaataatctattgtggctatttcgttatcgcaatttacataaaagcccaaacccgctcacactggtgcttggtcgttatccagacttgaccttgttggcagcccgcgcacaacgtgagcagtgtcgacaatggttggtgaacaaccttgatccaaaagatcagtacaaattatcagccgcagatacgttaagaccaatcacagtaagggaggcgcttacatactggattgataattatgcgagggacaatcgtgccaatgttgataaacatatagcgcagctcgaaaagcatatctatccccgtattggttctatgccgctctcgctgtgccataaaggggaatggctagggtgttttgaccagataaaaaaaacatcgcctgtagcctctggatacattttccagatgtgtaagcaagctctcaagttttgtcggattcgtggttatgcggaaagtcatgcccttgatgacctgacgatcgcttatgttggcgaaaaacaaaaccgaaaagaccgggtgttaaacgatgatgagttatcgcagttatggtctgcgatatctggcgaggtgttcttgccctactactcgcggttattgctgttgttagtggtatttggctgtcgttctcaagaggtacggctctctgagtggtcggaatgggacttacagcgctgggtttggactgtaccgaaagagcatagcaagggagggataaagattgtacgcccggttcctgaaggagtgcgaccatttattgaatgcttgcataaacagtataaagagagtggttttctgctcggtgagtcgaaagactctagcgctgttagtcaaaccgggagattaatatggaagcgtttaaatcatgctgatccgtggactctccatgacatacggcgtacgttcgcgaccaaactcaatgaccaaggcgtggctccccatgttgtcgagcagcttttagggcatgcattacccggcattatggctgtgtataaccatagccaatatatgcctgaaaaactgactgcgttaaatgcatggtaccgcagcctgaattcattgcacaaaatttga

SEQ ID NO: 432248 - DNA, 2307 bp, Serratia marcescens
atgagccgttttgccgattatgtgatgatgcgatttcctgacccagcagctactttggtagaatttttctctcaaatgcaggaagctgcggctagtgtaggggccagtattgaggtcataccaattctagatggtggacgccattatttagcctccctgaacggccaacgggataagcgacattactatagggctgacttgcaccatgattccgatggcacagtgtggccctcagttacttttggtacgtttaaacacagtggtgcaacggcatatttcaaacctcgtgatttggcttggcaatgttgggaatccgatagtaaaggtattccaaaagatattgatgatacccaaaggcaagggtacaagcgtgctgccgacaagttaaaggcagatgccgaaattgctcggcaaaagcgcaatgctaatattgaggaagggcgtgatgctgctaccgtggctgcaattacagcatgggatgccgctgaacctgctaatactcacccctatctatctgataaggccgttagagcatatggtctgcgtatagccactgcttcgagttgtgcgcgactgtacagcgatgaacaagggaaatggttagataaggctactgttgtcactgcgggagacctgcttatccctgtgaccaatgttgctggcaaaataattaacttgcaacgtatcacctctactggtcagaagcgttttctgatcggtggccagaaaaaaggtggcttcttccgcattcccggagaagggatggcttttttagtggaaggttatgcaacgggtgcaactgtccatgaagcgacaggaaaggcaacaatcattgcgtttgatgctggtaatctcagcgaagttgcttcatccctgaacggccaaatttctgctgtggcagcggataacgatgctaataatgtaggccaatccggagcggaagccacagcgttgccatatgtgatacccccagaggttgggagtgactggaatgactatgcagctcaatacggccttgatactgtctgtaattaccttaattctattgtaaaaagcggcgttccagccgtaattgtgccggatgcaaaaacagatgttgatattcacaatatgacacctgttctaatgacatcttggccccatgtaagccataacggtcaaccgttgaatacaattccaaatttgcaacggttactggaaaactatgaaataaccgtaaggtataatgtcatccgtaaggatattgattatgtttttccggggaaatgtgggacagccgataatcagaatcaagttgcactgaatacgataactagcctttgtgcattgaaccgcttacctaaagcagatgttccagcctatttactcagtgttgccgatagacatttggttaacccggttatggatttcattacggttcaaccttgggatgggcagtcacgtttttcagcattgctcaatactatcgaaacccgcaatggatttgatagggatctgtgtgcgctgcttgttcgccgttggttgatttctgcggttgcagcagctgctatgccgtcagggttttggtcaaaaggtgttcttgtttttcagggggagcaatcgctggggaaaacggcatggattcgttcactgttgccacctgaattacgcgatttagtgaagattgacgcacagatagaccctgacaacaaagatacgattatcagtgcagttagccattggctggtagaaatcggcgaattggatggaacattgcgtaaagcagatattgctaagttgaagggatttattagcaaagatcgtgaccagttccgccgcccatatggtagggcagaggaaaaatttcagcgtcgaacagtattctttgccagcgtgaaccctgagcgtttccttgccgatgatacaggtaatgtgcgctggtggacggtgccagtcacaggcgttaattatgagcatgatattgatacgcaacaattatgggccgaagtctatgaatggttcaaagtcggtgagcgttggtggctgaatcgcgaagaagagcgctgccttgaagcaatgaatgctgaccaccagcaggttgacccgatggaggaaatgattcttgcacactatgagtggggatgtgaccggattggtgcttacagggagaaaacagcgacggacgtgctcaaggagattggctacgacaaaccaaacaagtcgcagtccactcacgtcagtaatgttctgcgcaggctgacaggaggagagccaagaaaagcacggtcggggcggttttttaatctgcctccgaggattctattttga

SEQ ID NO: 432249 - DNA, 282 bp, Serratia marcescens
atggaaattaaaatcggcaatgagtttgttatcaccagcgataacctgcaattcattctcaatacggtgaaggttggtaaaacaggaaaaagcgaaggtcaagagcgttacgaggctctcggctattaccctacgattaaccagcttgtaaacggccttattcatcacagcgtccgcaattccagtgttaatagcattgcatcattgggcgctgaaattggtcgcattggcaacctgtgccaagaggcttttgctgcatgtgaggcggcgaaagttcaatga

SEQ ID NO: 432250 - DNA, 189 bp, Serratia marcescens
atgttagatagtgatatcgatgatgttaaatctttactttccggattaaatagaattctcgacaacattgagaaaccaattcaaaacagccctcacgctgaagagctgaaagaattgcatatagcacttggtgtcaagcttaatgaaaaaatacccgtaacccagaaagccattatcgaatttttctga

SEQ ID NO: 432251 - DNA, 573 bp, Serratia marcescens
atggagtttaatcagggtgcgaaagcagctatagagaggatggttgaggcctacggggtcaagacaaaacttgccttatgtgatgccctaggtgtgacagctagtgcgctgtctaaccgacaagtacgcgactcattccctgctgagtatgttttgaaatgtgcccttgatacaggtgcatcattgcggtggttaacatatggccaaggcgaaatgtttgagaggaacgttatcgcagctccatcagcactttccgtaccaagcaaaacactgttaaatcgtcagcttcatgacggcgaaacattgttactggataaaaattttctccccaaaggaatcaagaatccgctaattatcatcgatggtgaaattcagtacatcgcaactcaggcttatgatgaagtttatgatggtacttgggttattgatattgatgggaatatcagtatcagacaggttattcgcactcctggtaataatgtgagtgtttctgataatcgaaattcttttgattgtccagttaatgaattagttgttattgcaaaaatcgtagccatttgttcaccaacctaa

SEQ ID NO: 432252 - DNA, 993 bp, Serratia marcescens
atgaaaaaaaacatcatattaaaaaaatttgaattaaacgacagaaaactatcagagcaatggctgttttgggtttcaatattgttaccactgtttgtttcgatactattatgcattccaatatggacaaaaacgcaatgggacttatccgccacaggatatgaagtattcttaaacctttacaaactcccaatggggatattgtcactatcaataccttttgtggcaatcgttgcgcatatacacagaacaatccaaactgccgaacaaataaaaacaacaaaagttaaaaacatcgcagatggttttttctctcaccataagtatatcactgagaatatttctaaaataccaaaaaaagaaatacacctcgcctcatcacttattgagtataagatagatgacccttatcatatttatagctatatctttgaaggttcatcatacgaaaagggagtaaacacagaaaacatagaggataagacaaataaaatatatcatggcattaaccatttagaagaagatctaggagaattgaaaacccttgaagactttggacaaaaaatattcgcattggcaaaactggaagtatccataagaaatttagaggaaatactttcgctcagttacccacctcagcaaataaaaaagcgtgcaatgcacaagaacccatttggaatcaatatgatagtaaccgaattccattccgaaaatgagttaaaagatagaattagggagttgatattttttactacaaaaatactgcaattgataaacatgcctttatcaattagtgaaagcactagattctacatagggaaaagatttaaaaaccaatatttcctaagtgatgtatttaataacactatagacactaaatcaatgtcactttataacattgctcctgatggaaataaaagcctggatgatttttataaagaatattgttatcgattagaagaagagaaaaaaaatcaaagtggtgacttctag

SEQ ID NO: 432253 - DNA, 1035 bp, Serratia marcescens
atggcagttcgaaaacaaacatccggtaagtggttgtgtgagtgctaccctgctggccgtgacggccgcagggtacgtaagcagttcgcaaccaaaggcgaagccttggcgtttgaacgcttcaccatggagcaggtagataacaagccgtggttaggtgaagcagtggatcgccgtaaactgagtgagatcgccaagctttggtataacctgcatggccaatccctcactgctggtgaacgtacctacaaaaaactatgccttgtgatcaaagccctagacgatccccccgctactaccttcacagctaaagacttcgcgcattatcgtgataaacgcttgtccggtgaaatctacttttccgagaaatggaagaacggcgcagaaccagtcaccgttaatcttgaacaaagctacctaagcggtatgttcagcgaactggcccggcttggcgaatggaaccagcccaatccgttggagaacatgcgcaagtttgctgtcgcagaaaaggaaatggcgtggctgacgcactcacaaatcacagagttgtttgcagcctgcaacaaaggcgattctgatttgccgcttgtagtagaggtatgtcttagcaccggcgcacgctggcgagaagcggaaaacctcacccggtcacagataacaccgcataaaatcacgttcatccgaaccaaaggcaaaaagaaccgcagtgttccgatcagtaaagcactgtacaagaggttgataacgcggggtgatgatcgtctattcagcgaatgctattttcgctttatggccgcgctcgaaaacaccagcattcaattgcccaaaggccagctaacccatgtgctacgccatacctttgcggcgcactttatgatgtctggcggcaacattctggtattgcaacgcatcctcggccatcatgatattaagatgacaatgcgctatgctcaccttgcgccggagcacctcgaaaccgccctgcaatttaatccgctggcgaccatgccaagtggcgacaaagtggcggcatag

SEQ ID NO: 432254 - DNA, 684 bp, Serratia marcescens
atggtgctgccgaacggcgcccgcctgatgttcctcggcaccaacgtgcgcaccgcgcagagctacaccggcaatctgtatcttgatgagtatttctggataccgaagtttcaggagctgcgcaaagtcgccagcgggatgtcgctgcacaagcggtggcgcactacctacttttccacaccgtcgagtctggcgcactccgcttatccgttctggtcgggagaactgttcaacaagggccgcagcagcaaagccgatcacgttcagctcgacctcggccacagccacctgtcaaaaggagtgctgtgcggtgatgggcaatggcgacagattgtcacggttgaggatgcgctgaccggcggctgtaacctgttcgacctcgatcaactgtcgctcgaatacagcccggcagagtatcagaacctgctgatgtgtgaatttgtggatgataccgcgtcggtattcccgttcgccgagctgcaaggctgcatggtcgatacgctggaagagtgggaagacttcaacccttacgccgtgcggccgttcggctatcgcccggtgtggatcggctacgccccaccggaagccaacggcggcgacagcgccgggtgcgcggtgatcgcgccgccaatggtggccggggcaagttccgcgtgctcgagcgccaccagtggcagggcatga

SEQ ID NO: 432255 - DNA, 423 bp, Serratia marcescens
atgaactttgccgctcaggcccagaagattaaagacctgaccgaaaaatattgcgtggagtacatcggcatcgatgcgaccaccgtcggccaaggtgttttccagttggtgcgcgagttcttcccagccgcgcgggagatcaaatacaccccagaaatcaaaaccgccatggtgctgaagacaaaagacaccatcgggcgcggctgtctggaatacgacaccagccacaccgacatcaccgccgcctttatggcgatccgcaaaaccatgaccgccagcggcgcgcgttccacctacaccgccagccgcagcgaagaagccagccacgccgatgtcgcgtgggcaatcatgcacgccctcttgaacgaaccgctgaccgcaggcagcggccacagcagcccgaacattttggagttttactga

SEQ ID NO: 432256 - DNA, 909 bp, Serratia marcescens
atgagcaagcgcaaaggccgcaaggcatttacccccccggcgccagccccgacagcagagcagaagcaggattttgaggcgtttacctttggcgagccgtccgctgtgctggataagcgggaaattctggattacatcgaatgcacgaccaatggcaagtggtacgagccgccgatctcattcgatgggctggcacatagcgtgcatgccgccgtgcatcacagctcgccgatgtacgttaagcgcaacattttgacgtctacgttcattccacatccactattaagccagcaggaatttagccgctatgcgctggattatctggtatttggtaacgcttttttagaggtcaggaaaaatcgactcggagaaccactgcgcctgcagtgttcaccggcaaaatacacccgccggggtgttgaacctgatacgtattggtttgtgcatggctggaaagaggctcatcgcttcaagaccggcagcatttttcacctgattgaaccggacatcaatcaggaactgtacggcctgccggagtacctcggcgcgcttaactccgcctggctgaacgaggcagcgacttttttccgccgtaagtattaccagaatggggcgcacgccggttacatcctgtatatgaccgatgccgcgcaaagtaccagcgacgttgacagaatgcgccaagcgatgcgagacacaaagggactggggaacttccggaatctatttatgtacacgccgaacggcaagccggacggcataaaaatactgcctctgagtgaagtcgctaccaaagatgatttctttaatattaagaatgcaacgagggacgatctgctgagcgcacatcgtgcgccaccgcagatgatggggatcattccgaataatacaggggattttgggatgtag

SEQ ID NO: 432257 - DNA, 1050 bp, Serratia marcescens
atgagcagcctcggctttaatattaaaaatgattactttgagaagacgaaattatttatctcaagtcaaaatgtggaggctggggaatccaagccgtgggttcaagtatttgtcgagtcggatgatgataaacgattatggttgagcatttttgaaaagtataaagaaaattataaattccgttatttatcggccttagaacatgaatctgatgatgggaaatgttctaatgggtgcagtcgactttctgccttgtataaaaatggcaaggtacaactaggtaagcacacgatattatgtctcgatagtgattatggttttgtttcaggaaattatggctgtaaacaaaaagatgtattggaggaaaaattcgtttatcagacatttgttcactctaaagaaagtgtttatattaaccctgttggaattgatatcattttatcgagggcgatcggtgaagacatagaaagcgaaggcatttcattgttgggtattcactctgttatttcgcgcgttttgcatccatattggattaaaattataactatttacaagcatggaatggaagaggagttcgatcgttatcatggcgagtttgtccacattatgtcagaatgctttaattataaaaatgtaaaagacattctttcaactaactggatagatgaagcaaatagaaatttctcgtcttttgatgaaaggcttgatcgatttattgaggaacaaattggcaaggataaagtagatgatatggctaaaagattgcgagagttgaatataaatgattcggattgtttgttctttgtccgcggtcacaatatatatgccataatgaagaaagtctatgaagatatagaggcactgttttttttgaaaaaaatcgaatcaatagataggcttaatataaccagtgagcaaaaatcagaacaaaaaagagcaatagctaataaaagggttcaggttatgaatgtgattcttgcaagaggtgatgtctgtaatacccctttctttaaagatacgatttccgaactggacacgcattacacttag

SEQ ID NO: 432258 - DNA, 1176 bp, Serratia marcescens
atgttaaaattgaagaaatttagctttgtaaatatttggatggataataaaaaacatgacatcccgctagataaaaattttacagttctcactggttataatggttctggaaagacaactatattagaattgctacatgattcaattagtttagtacacgatggcgaattccttacagatttaactaactggtctacgcaagcgatatttagcaacgatgccgctttaagaacatttaattatttagatgttgacaatagtaaagaaaaagatgaaagaatccagggcttggagttaactaatcttaatgaagatttcttggatagccatattagatttaataatgcaatactagatttgggagaggagtttagttcaaacaaaaaaagtaaagaactatcaacgcctaaagatacagggcgtcgaagaacaaggtcctattgtttgacctgtttgattaatgcggaagaatctaagtatccgaactctattttttataaaaatgagcaattttattataatactgaccatgacgaagatgcaataagtgaacttgatatattttctggtggtaatagtatagataaaactctttatttgttgctaaatgagtatgtgacaaaaagcgctcagcatgaaccaaaaataaaaagtaaagaagagttttttgagtttatgaccaagttggcattggaatatgaggataagaatgaagactctgattccttagctgacttcaacgttaagatctcgtcggcaataaatgatctttatgaaaagtataaagatcactctaaaacaaaatggagtgctaagctgcatgatttattatcaaagttctttaagttaacaaataggaagttggttttagataagaacggttatttttctttggcgctgaagaatggcaagaaggttaggtggtataacttttcgagaggagagaagactctgctgagtctctttttaattgtatttcttaatagagataaaaatgtaatctttatatttgatgagccagacctatctcttcacattgagtggcaagatctgcttttacctgcatttaaagaattagctccaaatagaaaattcataatatcgactcactcgccagctttgattggaaatgttggagagcgctttgttaatgtgacagacttgatggggtcataa

SEQ ID NO: 432259 - DNA, 231 bp, Serratia marcescens
atgagacgagatataaacttagctggggcgtttatggaggcgctgaacttcaacgagaacggcaaggaccgccgcataaagaccgctgatttcattcacgccgcaaaccggctcggcacacacctaacgcctgaagaggcgaattactacatcaagcgccagtctgaccacgtgttcaggctgattgatgagggacgttatcagcacaacacatacttgtttctctgctga

SEQ ID NO: 432260 - DNA, 225 bp, Serratia marcescens
atgcatacaaaaattaagcatcgtagggaaagggggcaagcagtggatgaagtggttgttttagaaagaattgaactcatcgcccgtctgggggtttgttatgagagccaagcgaaagacaaagacattgcactgatatggatttcagaacaggcgggggagatgaaaaacagcattgtccctgaaaaggccaaagtgatcaggcagcttgccacgatctcttaa

SEQ ID NO: 432261 - DNA, 732 bp, Serratia marcescens
ttgttaagtatcgtttgtgacgccatctctttgaacagcggcgccgccaaaaaccggtttgactgcaagcacctgaacaaaggcggtgcggcgggctatatcgccaaatacattgcaaaaaacatcgacggctacgcgctggacggcgagcgcgatcatgaaaccggcgagctgttgactgatacggcggccgccgtcaccgcgtgggcttcaacgtggcgtatccctcaattccactttatcggtctgccgtcgcgcggcgcatggcgtgagtgccgcaagatacgctctgtcagtctggccgatgagtttgacgaaaccgttgaggcggtgcgcgctgctgctgatgccggtgactttgccgcttacattctggcccagggcggccctaacgttgcccgtgacgatcagactgtgcgtgtagcccgccgggttgccgacgagcgcaacgcctatgacgaagaagtgcagaaaatcgcggggatttttgccccgcacatcggcgccgatcgcgtttatgaaacccgcaccacgcaatggcgcatcgtcgctaaagccgttgccgttgagcctttgactttgaaaagcgcctccggcgcgcctcggagtcctgtcaataactgtgggttggtcggcagcggtggcgccgaaaatacgcaggatggcgagcctgtagaggctgtggcggtgatggaacaccatccagacaccccattgactgggatgacatga

SEQ ID NO: 432262 - DNA, 339 bp, Serratia marcescens
atgcgaggcccccataaaaacttcaaaaccggcacggaactcgttaaacatatcatcaccaaggcgctgcccccactgatgatcaaacagcagcccctctttaatattgttcttatgggtttcagccccatccaatataccgaaatagtaaccagacatattgcgctgggtcgcttttaccaaattatcttgaatactacccttccagccgacatcaacaacatgaacccattcatcatgtttttctgccatcaacgagtcacagtagtcattgagatagatattctgttctttgcgctcgcgttcatagatagccttaaagaattcatcatctattaa

SEQ ID NO: 432263 - DNA, 840 bp, Serratia marcescens
atgagactaataatcaccctcgctttattcatgttcgttcgtgaggggggcgccgtaccatggcctgtcctcatggaccctaaaatcgtcagttgcgatgaccagtataagaatccatgctcagccaacgttcagtactactcagctggggtaatgatgatcgatgtactcgcagtagggcagcccaacgccgcaagtacaggcacgttagtacacccggtcggggttcattgcaatacagggaacgcgctcgtcgggaacttgccatttaaaaactgtaaatggctttccgatgatactcaccggccgccgctagtgggcaagtgcgaactcaagtcgccgaactcatggacgctcacgtctgattccgactgctctgtgcggtcgaccttgctgtgggggcactatggggcgggtcctggaggcgaatgcgttgtattcacgaataccatatatccccaggcgcagggggtcgtgaatactccatggggggcaatcactgcaacacaagctgctaacagcgggaatcgtttttgttctaaacccctgccaccgaacgtgacgtgcgaactggacctaccgaacattattgaccatggtgaggtacgtgcgggtgactcgtccaaacgggtcgatgagggacagattaagtgtggtcttacaccgaaaatcgacgtgcttgtgaacggggatcgggacacagagggggttcggatatccacaaccccgctcatcgtgaatccaacaaccgttcggatcaccaccgagatcaccgtgagtaatagtgctgtggcgggagaacacagcgccacctacgtgttcgtagcgagtccgtactag

SEQ ID NO: 432264 - DNA, 1287 bp, Serratia marcescens
atgtacaacctgttagtcactgcaaacataggtgcttgggaagtgggattttatgagtttgatagaagcagatttttggagtatacaacagaatctatttcgggagtttttaaataccttgatcataatttgatcgaaacgctgaaggggtatccttgcttattcgcatatgaaggtaagcaagaggatctcagaattgggaagtttaaatcaattaaagaaagaggaggaaaactgcatgtagagttcgagcttgatcagaatattcccccaatatcattcaaagatattgaaccgatagcaccattacttgatattcgtcattgggaaatgaatagaacacactgggctgtaaaagatgagaacctatttgagcgtcttgaggcggctgggatattaaatcaaggtcaatggcgggaaagtggtaagttagataaaccatcagcaaaaaaatcaaacaaccctaaggtcactactgtgcaaggtttcattgctaaagtactttcttctgaaatgaaatctagttcagaggttttttatagaggtcattcaaataaaaacaaatacaaattagaaccctcgcttttcagaaaggatgacgatggtaattatttatatctagataacgaacacgtactatataaagagttaataatatcaaattcagaggattttcattccgatcaaaatacattagatacattagttagaatgcaacactattcattgccaactaggttattagatataacttcaaatccattgatagcactttactttgcttgtaaatcaactccaaatgaggagggagaagtaataattttttcaatggataagagtaaggttaaatactttgactccgatgttgctagctgtattgcaaatttagttagactgcctaaatcggaaaaggataatatcaattttgatataaatggttttaatgagcaattatcaataaagcggttggttcactttataagggaagaaaaagcatattttgaaacgaatatcattcctgatgacttgaggagaatcatctgcgtaaaaggaaagaagagcaatgcgcgtatatcatctcagtccggtgcatttatgttatatggactagattcggttatgaatgaagaaggtacgacagaaataaatgttgccagaataacagttactaataagtcatcaatactcaaagagcttgatattcttaacattaatgaaagtaccgtttttccatatatagagaactcggctaaatatattgctgataaatacaagtttgaaaagtag

SEQ ID NO: 432265 - DNA, 1146 bp, Serratia marcescens
atgccgatcgccgatgctgatgctcgtccccttcaggatggcctgcaccacgctgcgtccctgcggatcgttcaccgccgtgctgcccaccagcgacgcatactcgctctggcggcccggcccgttccactggtggcagccgctgcagtcgttggcgaacacccgccgcccgagcgactgctcttgcccacccggcaggatcggcgtggaagcccccgcgcccttcggctgcaggttcaccgccgccgcgccgtcgccggcgatcggttcgatatcgcgcaagtatttcaccagcgccagattatcttccggcgtcaggaactgcaggctgttttccaccacttccgccatcgggccggcggcgctgctgcgtcccggtgcatggccggtggccagatattgcgacagctgttggtcgctccagccgccgatgccggtctgcttatccggcgtgatgttggcggcgaaccagccctgcaccacttcgccactcagatgcttgctctggttgaggccgaacccaagattgcgcggcgtatggcactcgccgcagtggcccagcgcggtcgccagataggcgccgcggttccactgctcgtccttgttgagatccggcgcaaagcgttgctcatggaagaacgccaggttccagaatttcatgccccaacgctggttgaacgggaacgacagctcgttttgcgggttggcctgcttcaccggcggcaggctgaacagataatccttgatcgccagtacgtcgtcgcggctcagcccggtgtaggaggtataaggcatcgccggatacaggttgccctgcgggccgatgccctcacgcaccgcgcgcacgaactgatcgtcgctccagttgccgatgccggtctccttgtcggcggtgatgttggtgccgtaaatggtgccgaacggcagcttgaaggcgaagccgcccgcatacggcgtgccgcccggcgcggtgtggcacgccacgcagtcggcggcgcgcgccaggtactcgccgcgcgccagtttatcggtgatgccggccggcgccccggcgatcggcgccgcaggctcttcgccggtgggccgcagcagcgtgtacaacacgtatcctcccgccaacaccaccacggcgataatcagccataa

SEQ ID NO: 432266 - DNA, 276 bp, Serratia marcescens
atggcgctgtacggcaacatcacgctgaaagacggcgtggtcgaacagtccaacttcaataacttccgcccgctgcgcatcgatgagatgccggagatcgaagtgatcatcgtgccctcgagcgagaaaccgaccggcgtgggcgagctgggggtgccgaccatcgccccggcggtcggcaatgcgctggcgctgctcgggcggccgcgcacctcgctgagcctgccgctgcataatcccaccgcgaacccggcgtctgacaaggagagaacctga

SEQ ID NO: 432267 - DNA, 1470 bp, Serratia marcescens
atgcttaaggatgtcgctgaggaacagcggaaagcagaagaagcccgcaaggccgaagaagctcgtaaggccgaagaggccggcaaagccgaagaagctcgtaaggctgaagaggcccgcaaagctgaagaagctcgcaaggctgaagaggctcgcaaagcagaagaagcccgcaaggctgaagaggcccgcaaggtggaagccgcaagaaaagcgttgttcgccaaagcggggattctggatgcaccggcatactccccggaaaagctaaaagcggccaatgcggcactggctgccgcaggcgccatggtgcttaaccgcgcgcccgcgatgctgcagacgtcgatggtcgggcaaggtgtgatgacgaccacgagcgaactggctggctgggcagcgagcgcgtcgtggcgggcggcctacgaagttggcagtatacgcgccggcaccgcagtcgccgccggatcggtgctgggggcttttgccctcggcttctacccgacggaggtcggtgcagggagcgatcgggtgccagggcgggatgtcaatctgtttgccctccaggcgagcctggcggcggcgggcagggcgaccatccagcccggcatgacctcggtcgatttgccggtgcgcggatttatcaccactgacgatgacgggagacagagcgtcaacttcgtcagaacgggcgtcggcggcgtatcgccgagcgtgccggtattcagacccgttcgcgatgagctgacggggctggacaaaatcacgctgcccgcaatggcgggggtgccggcgaggacgatactgattaacccggtgccgaccgggccggccgcgccgccgcataccggcaacggctcaccgggacccaaatcgccagtgcataccggtaccggcatcaggcaggcggacagcatcgtggtcaccaccttcccggcggatgtggtgcaggatctgcaagactttatcctgtggcagccggatgcgacggagattggtgtagaggccatctatgtgatggtgagcaagccctatggtgaaaccaacgccaggggcaaatacagcggtcgtgaatacaacaccaataaagctggaggccccatccagaatctggattggaaaggggccagcatcgaccgtgctggcgtggataaggtgaagttgcatactgggcgttttacagagtcggacgctaacaaagtgatgatcggccgcctggaaaagatcttgaagggagaactgccccccaccgatactgacaggcgattttatacacatgagatcagggaattggagcgttatcgcaatttgggtattagagatggctctgtgccagataatcaaggggaagtgtggaataatacgcatactgcgacgttggaagattatcaattaggcaacagcgaggctttgctctatacgcaggaggctttagacgctgctgaacaacaagagttgaggatgctaaaatga

SEQ ID NO: 432268 - DNA, 834 bp, Serratia marcescens
gtgaactatcaatatgagaaagggggggacgtgagtaacgcagtgatgtccgacgcgcccgtttattatgcattggctcaggccaaattcaatcccattgccgctatcgcaaaatatgtcggcgatattcaagatattttcaggaagaagggatttaccgttttcgaaatccatgaagggacacaacttcattttgactttgctcctggtgaggaggctccgaaacctaggatagccaatataattaactggcaaataataaagtctgatagaacatgtggttatatactaaatgactcatcaattaccttccatacaacccattatgtaacgcacaatgagtttcttaagggtttgactgaaggtatagaggtggtaaacgaagttgttggtcttgagcatttgagtcgattgggtttaagatacctagacgcagttctaccaaatgatcaggaaacaccaaacgactatcttgtaaatgagttgcatggcgtgagtttaggtgaaaggcaactacaaacggtcaatgaatctgtgtatgagacagccgttacaccaatcatccgacacggaatgcttgtgactagaatacataaggtctatgccgagctcggtttcccgccagatttatcactggcaggacttgttatgaaagaacgttttaaaacccaaaaaacagttcaacatgcaattattgatactgatcattatgttgaaggtaatataaaaatcaatatagaagctatttcggaacaactggaaagcttgtataaagaaataaagaaatcattccatgcaatggttacagaccacgcaaaaaaagcgtggcagtga

SEQ ID NO: 432269 - DNA, 639 bp, Serratia marcescens
atgtatcacacagcattagcaacaactcaaatcatgagatcatgttccgcagagctcaaaagcgctgctgtcttaggggccgcccttttcttatccggcacaggtggtaattttaataccggaaactcagatcactgggttggatatatcaagccgaaggtctccttcgtcattgatgaaccgactagatctagcccaaaagcagatgtgcgctcaaccgcggtgcatctgaccaacatcaggaatgtactttctccaaccatgtcagagttggctgtaatttttggtgtttcaagacaggctgtctacaaatggttgtctgaggagtccacacctgatgatcaggataaaatgtcattaatcagaaacttaagtttgattgctgacaagttaagtgattcaggagtttcaaagccaggcacgttgatcaagatgagggcatttgaaggtagttccctgattgacatcattcgagagaaaggtgactgggaaaccgctgttgaaacccttatttctgaagatcaggcaatgagtgaggcttatgcaaaatctaaaattgcagagtctaaaacagcgaaaaataacgactggctctcttctgagtcaatacttggttcagtagaaaagaaagagagttag

SEQ ID NO: 432270 - DNA, 852 bp, Serratia marcescens
atgcttggaagggctactgagtggagacaaggccatttactaaccgatgattcagctttagctctaggactggtccctatattggggaccagtgctaaagttattgtcatcactcatgactgcgatataccgaacgacaaagaacaaaatattgaagtcataattggcgtactagtagataagttggacgggaatttttgcaacgccaaaaacccaaggaaacttcatctaaagtttatcaacaatacctcagggctagaggaagccgtatgtgttgaacataagcaaaaagtcaacgtcgcatatgaagtttttggcgaacttgcggtaatcgacaaggactttgaacttgctgcagagcaaaaaagagcattaaaacaatggcttgcagcaagatatgggcgcccagcgtttcctgatgaatttgaaaaaagaataagaaagcacaatatcaaaaaattctcatttgaaaaagaaatatacaagattgttagccccaagggcgaaaatgtggttggtattttctttgatcttcataataatcgaagcgtagacctccctgaaaatgaaccatacgagttgtctatttatattgtctacgactcagagattggtgctgcagctgcaagagaggctgccgagctaatcgcgcaagagatgagagacttaatatactccgtatttggagaaggtgaaaaggctaatgatatcgatctgcagtactgtagtgctgtgtcagacacgacgttatcactggcagatattcgacgactggatcaatggagggtcgaatatattagtctgcaagacgatttagccggcgattttcttgcaccagccgcacctttgtag

SEQ ID NO: 432271 - DNA, 1485 bp, Serratia marcescens
gtgactccttcagatgccataccggcgccgcaagcgcgccatgccattccccccggtgcgggggcgctgttcttcatccagatcttcgccacgctgggcttcgccgtgctctactccacgctggtgctgtacgccaccaagcgattgggcttcaacgaaagcagcgccaacgccatgatgggcgtgttcggcgccttcaactatggcctgcacatgttcggcggttacctcggcggccgattcctcagcaaccgcaatctgttcgtgctcggcatggtgctgcaggtgatcggctgtgcgctgatcgccgtcgcgggcgtgtgggggttgtactgggggctggcgatgttcctgaccggcagcggtctcaacgtcacctgcatcaatatgatgctcacccagcgtttcaagccggacgatgatcggcgtgaatcggcgtttctgtggaactacgccggtatgaacctcgggttcttcgtcggctttaccgtcgccgggtatttccaactgacggaaaactaccgcgcgctgttcctgttcgccacgctgggcaacgcggcggcgatcatcgtcgccgtctgccgctggcgcattctggcggatctcaataccccgctgcacgacgccacccgcagccaataccgttggcgcatgctggtcgggctggcggtgctggtggcgctggtgccgatcatccgtgtgatgctgactcacgccgagttcagcggccacttcgtgatcgtgctcggcgcgctgatcttcctgatgctgtgcgtggtgacgctgcgccaccatccgcgcgatgagcgtcgcagaatggcggcctatctgatcctggcgctgggctcgctggtgttttgggcgctgtatcagctggcgccgatggggctgatgctgttctccgagcacaacatcaacctgaacgtttacggcattcaggtggcgccgcagtggatccagaacatcaacacgctggtgatcgtagtaggcggcccgctgctggcctggtggttcaaccgcctgcgcgctcgcggttgcaacatcgacattccgctgcagttctccggatcgctgttctgcatcggcttgggcatgctggtgctgccgctgggtatcagcatggcgggcggcgacgggctggtggcgtttaaatggatcgttatcagctatgtgctgcaaagcgtcggtgaattgatgatctcgccgatcggttacgccatgatcggcaagttggcgccgccgcgctatcagggcgtgatgatgggctgctggatgatggtgaccggcgtcgcctcggtgctggcgggctacgtctccggcctgatgccggaaaacagcggcagcacgccgctgcagaccaaccccggctacagcgaaatcttcagcgcgctgggctggggggcgacgggcgtcggcgtggcgatgctgattctcattccgctgctgcggcgccttatccggcgcgacggcccgtctgccgcctga

SEQ ID NO: 432272 - DNA, 147 bp, Serratia marcescens
atggtgctgtacattcactctgtagccatggtgatatcaaagaacggcttgaaaatgcttatgttttcaacatatctcatatccgtgatcagaatgacttaccagagccactacatgaaaaattcaaggaccttgtttcctcgctga

SEQ ID NO: 432273 - DNA, 909 bp, Serratia marcescens
atggtagcagtaaaccaaactgggaaagcctactacggctttcgcacagctttagacctatcagcctctattcttgacccacaggcgctatttaatgcctataaagcgcgggtactggcagacggaggcacaatcccagatgaagctggttgtctggcccggttttcatttctgctgaataacggcatgtatgagaaaaccacgttctgcgcagcgcccgcttttggattgaaagttgacagtgctggcaatgtccaaacagtttataacctgtttggcgccgctggcgatttgatcgcgggttcgcaagggactccgccgctacccatgacttacgacgccacagcgcgcgcggttatcattcagatcacatcgggtgggggatggtatctcaaaagtcgcacgaacctcgtcattcataaaggttcgacttatctgctcgctggtcgcatgagcgatctaaatcgcgctgacaacaacggcattactgcaggatacaatctgacaggtttgccgatggcatatcttcgtacaatgataacgaatggccaaaaagagacggaagcctggcggtatggtacgcgagatagcggatggcctgcgggtagtggtggcgcgctcaatgccgcaaccaatatctatgctgactatgtgccatctgcgggcctgttcaaagtggctgaaggggttattgaggggtacgagaaagggaagttgcttgcgacctccgcgctggcggcgacgggaaaactggctgatttgagcagctacactacgccgatgttgatcggtggtacgcagttggcgaataacatcgtcagcgcgtgctacggggcattccaagacatgctttgtcttcacactgccgacgaatccgacgcgattcttgcttcacgcttgggtatgtaa

SEQ ID NO: 432274 - DNA, 2442 bp, Serratia marcescens
atggttagccggttaaagcaaaaggtggtaggtgaccctatcagtgtcgataaggaaatgaaaatatcggaacttccctcagcagaaaattcgttaattgatgatctcctggttatttctcaaaatgacggcgatggtttgttgcgaaccaaaaaaatattaatgtctttgttaataaaatcactcatttcagaaagagatggtaatcttgtaaatctagttgatgggtttaagttatttgctgataagggtgtccttgatgctgctgttatccgagccgaagctgcagcagaagtcgcacagtcaggcgctgatgcttatcctgatgccgctgctgcacaagctgcgatcgacgctggcactgaaacgcggcgttatttctctgttcgctctaccatttcaacgcaatgggttgatgaatatgagaatgtcagcggtgtagctaagcctacaggccgctatctgagcaatgggaaatacgttgatgagattgccgcctctgttatttcgctgctggcgagtcttatggagacgaataagagaactgccgcattgcgacaatatcaatcagagcagtggcagtggacagtagaaagtgcgctcggcccttctcagacggcaatggcgttagataatgattttgggctgtggcttgccggtttaaagtcatccatccaagattacgtcgaacagttaattccgaaaaacattgcaaatcgttatcaaaatatgcagttcgtcctcgttgccaaaaacggagtggatggactattaactattaacgataacggcgatgtaagagttatcggcatggatgacgttctgcaagacagattagaatccatatgctcgacaaatttctctcgccgcatcgttggcttccagtatgtgattttcgctaaagacctcaagtcagctttgttcgcaattgatgacgatggcggggtgcatataccaggaattgatggcccaattcaagataatctcggcgaatccctagcatcgatcaagactgtcggcggtgttccagcagccgcgtggcgcggagatgtggtttggtctgagcggccggtattaacagcacaaaaattaacagcatctggattcgtattcagttacatgccgggcggtgaggcggcagcaggggctggggtgatgtatgtcccatcaatacgagaaatgcccattgatgctgaagaaattcaaggtggcggttcaagtggccaatcattaaacctcgagtctgatttcgcgggttcaaatatcgtgaataaagacccagcataccgagggcgattactggccggatataacgggcgtcctgaagggaaaaatattacgccagtaaatgagagcgacgtttcaacgatgaacgatatgagttatccgccatatcgtcagggaaacatcctgccaatgtataacgcattaatggatatggaggtggggaatgttgtgtttatccattcagcatttgccgccggtggccgctcgtttatacaaatcagcagaggaacagtgccgtatgaaaacggcatgaaatttgttcaaatggctaagaatgccgcggacggtgtcggaaaaaattatgctttcaaatttctgacgtttgagcacggagaatccgattctgataatggagacaatccaaatccaggggattatctggccagggaaaatgattatttttccggtattcaaagcgactttaaatccattaccagccagcaagatgacttcctgattgttatcggccaggtcggaagccgcattgacacaaagaccggcgcagttgatgaagagggcaacccaacaggcgaaagcgtcgtggttcaaccgtattcagttccggcggttgaccaactggcatatgtgcgtcaaaaccccggcacagcgattatgtatggccctaagtacatgctgaactggctctataacgacaactcgctgagccacctgaacgcaaaaggtaaagtgcttcagggggaatatacagcccaggcgatacactggcatctgtacaacgcagagaaaaaaggcacatggacggggttgaaagtaaaaagccttaccgtatcaggaaatattgccgatctgctctgcgacgtcccttacgcgccgatcgtcattgatacgacgttcatcgcagattgtttgaatcagggcattagcctggaaaaaaactcggcatcggttcagagcgtcaccgtcgttgacggtaacattattcgcgttgagtttgataaagcccccgcatcagacgactacatgctgatcggctttactaataccgcgcttagttcaagcggccacatttatccgcttacatgcatccgtgattcatccccaattaaatcacgatggatcacccgaaataacgaacctttccccctttataactggctgtgcctcgatcgcctgccaatgaccggagaattttaa

SEQ ID NO: 432275 - DNA, 1128 bp, Serratia marcescens
atggaaaacgtgcagagagaagagtatcggcctgagttcagcctcacggcggaagggcgggatattactacgatgatgcgtgagaacctggtggaaatcaggctgacggataatggcggcgccacggcaaaggccgacgaactgcagatcaccatcctgtcggaaaccatggcgctccctaacaagggtgcccgactgcggctggggctggggtttaatggggtattgcaggacaagggatggtttgtggttagtggtatttctagcagcggcccgccgcgcaaaatcgttatttatgctacggcggcgccgatgaacgcccagcgccaacccggtgatgtgctgaaccagaaaagccgcagctgggacgacgtgagcctgggcgacattgtgaagactgtcgccagtgataacgggttaatccccaaagtggccggtgcactggcaaacatcgcggtcggtcatctcgaccaggtgaatgaatcggatgcagctttaatgacccggcttgccagtcgttttaatgcgatcagtaaaccatcaggcggctattggctttttctacagcaaggggagtcattaagtgtcggtggaaagccactggccagcgtaacgattttaaaggaagaggtttcggagtggagttataccgatggccagcagcgtggcgcaacgaccggccccggtaaaaagggggagggcgggaagaaagggaaaatcagtgtcgcgtactttgacccggaagatgggcgaacgaaaacgcagtcactcgaacatgatggtccgtcacaatcccaccccttcacccagccaaccaaaaccgccgccaaccacagcgcacagtccagaaaaacgcaggtaagccgcaatgaacggcgtatgacgctaagcggaccgtgtcggccggcacatatcccactgacagcagagagtcgtgttattacccagggattcggtacggttgaggataggagctggttgattgaatcattggtgttttctctcacctctcagggaatgtcgttcgcattcaatttggcgacggatattaagccgccaaagggactgagtgggaaaaaatcgggaaaaaagaaagatgatggtattggctattttgatgaaacataa

SEQ ID NO: 432276 - DNA, 216 bp, Serratia marcescens
atgccgacgacatacataacccatgaaggcgatgtgctggatgccatctgtgccaggcattacggtctggtaaacctctctcagacgctgacggaagtgctcgacgccaacagggagttggccgcgctgggggcgatatacccttccggcctgatcattacgctgcctgatatcgaaacgcaggttgcagagtcaacgattcaactgtgggactga

SEQ ID NO: 432277 - DNA, 477 bp, Serratia marcescens
atgagcgatatcgacatcatcggaacgataaccggcgcgtacagttacaacgcgccgaatggacgcccggcagaaaatgccaagatcatgatgatgctgggtgactttgaattctccatcgacacggcagcgtataaccaactgacgagggaggcacgctggcgctggcaggagcaggagcggatcggtaaacaggacctgctgcagtacacgggcaaggaagcccgcagcgtcaagttggatggcgaagcccacgcctttttccgcaacggggtaacgtccatcgatgcgctttacgatctcgccgacaaggcacagccccagcaactggttagtggtgccggggatgtgctgggctggtgggtgattacggattttactgataccacgccggcgtttctgcctggcggatctccgcgaaagaaaacctactcgatcacgataaaacactatgccgacgacatacataacccatga

SEQ ID NO: 432278 - DNA, 1629 bp, Serratia marcescens
atgagcagcataagtcaaaaactgaaagccgtcataacgtttggcggcaacatcgacggcagctggggccgttcgacggacgggcttaacaaagggcttaaaaccgtcgagaaacaatccgaacacctcgccaagcagcaaaaggcgctggcggatcggatgaagcaaaccaagctggccggcaaggatgtcagcgccctgaagcgcgattacgacaccgtgacgcgttctatcaaacggacggagcaggagcaggaatcgctgaaccgcagcctgcagcgcgctgaacgttttcgtcgtgcaggtgcgatggggcgtggctttattggtcgggcaggacgaacgcttggcgccgggctggggattgctgccgctggcgggttaatcggtgcggggatcggcgcggtcatgtctcccgttcgttccaatgcagaaaccgccgagtcatacggcattgcacgcagctacggtgtgaacatcgatacgtttaatgcctggcagagcctcggtaagcagatgggactgaacggggagaactttggcgacctgtttgaagaatatcgcaataaggtctcggattttaagaaggacccgacgaaaggcgccatcgcagagaacttcccattgctgggattcaaggccggcgatatgtacggcaaaagcaatgaagaacaggtgtcgagcatttttgaacgtctgctgaagctggataacgaacagctggctgccggttatgcggactccatttttggtggtgaagccaacaaaatcctgacctacatgcgcctgaccggcaaaagttatcgcgatctgatggacgaacagaagcggtacaacctggtgacacgtgacggtgccgaaggggcgatgcgcagcaacatcgcgttcagcaacttgcggacggtctggggcagtgctgtggaccagatcgccggtaagctgggcggcgacctggcccccatggtcacgaagttggctgatgagctgtcagactggttcaagaacggcggtatagaggtgatttctacgaccattcgtaattcctggataccggcgctgattgagttcggcaacgggctgatcactttcagcaaagtggccgtaaacattgctaagtggcttggacagtttgtgcctgatgaggccgacaacaagaaaaccgtgctgcgctctttggcttataacggctccacggaattagccaggcagacggccgatcgttatgggttgggggagtggtttgatcagcaggttgccgctaacccgaacctgactaaacaagccattgctgcaaatacagaaagcacgagcttcttcggcatgtttaaggacggtaaggctttcgataagcgtattgatgccttgtatgaaaacaccgttgggaatgaatcaggcgatccggtcatcaataagttctcagaaatgatggcgaatgttggtctcaccgataagaaaacccctcccaatgtcaccgacaaccgccggaataatatctatatgaccgtcaacggatcgccggggcaggataccaagagtattgctgataacgcggtaacgcaaatcggcaagctggacgtattcaacgggaacaatgcgatgtatgacgcgcctggaggctggagcggatga

SEQ ID NO: 432279 - DNA, 300 bp, Serratia marcescens
atgaattacccaggcagcaacgtagaaatcaaactgtattccccgctgacgctggccgatggcagcaagcttgaaaaagtcacgatgcgcgaaccgctggtgcgtgaccgcatcgagtatgtcaaacgcccggggagcgatgcagaaaaggaaattggcatgctggccgatctgtgcggcatgaatgttgaggatgtctatcagctgaccgctgctgactactaccagcttgaggcggcctggaacaattttttgctgcctccaggggagcgtcagaagaagacatcagacaagccttga

SEQ ID NO: 432280 - DNA, 507 bp, Serratia marcescens
atgagcgcaaaaaatacgttacgggcatggaccatttttgccggaggcttccgtgtagccggcgcgcatgagtttacgccgccggagctgtccattgtcaccacccagctgcgcaccggcgcccaggatgcaccgacgccgctggatgacggtatggaggcgctgacgtgctctatcaagttctggggcatcgataccgatgtgctgagccgctttggctttatttccggtcagcgtccgcgctttatggcgtatcagggatacctgagcaacggccgggcgatcggtacgatcgaagagatagaagggtttgtctcaaagatcacaccggatgcgcggggcaatgaaaacatgggggaaacggcggtcacagttgagattgcgatgagctattacaagcagacgcgcgatggtatagagctgtttgaaatcgacaccgagcgttttatccgccgtgttaacggcgtggatcagctgggcggtctgcgcagtaaaatccgtatctaa

SEQ ID NO: 432281 - DNA, 1527 bp, Serratia marcescens
atggccgaattgcacggcgtagaaacaattgaactgacaaatgggacggttgccgttaccacgatccagactgcggttatcggcctggtcggcacagcccccgacgcatcaccgggaaccaaggcacaggccgtcacagggactgcgctgctgaataatgaactgacgttctcggcctcgcagccggggcgggcgggtaatcagctccgcgttacagctgttgcggcgcccgccggcggtaaaacaagcgccacctatgcagggggcgtgctggaaattcagctggccagcgatgccgacggcaaaatcaccgccaccgcacaagaggtgtccgacgcggttctggcactgactgacagcctggtcaccgtattaccgggcgccgacaccggcaaggttagcccgtttagcgtggtgctgtcaggcgggcaggatgagcccttccccctcaatacaccagtagctattgtcggcagtacgcagatgcgggcgctgggcagtgcggggactatcccgccggccgtgcaagagattgccgaccagaccaatgcactgatcgtcattgtgcgcgttgaaaataacgaacaatcggtgacggtatctaccgaagataaagagcctatcaccggcgaagatgaacagcgcctgctgtctgaccagattttcaatgtcgatatccgcgcgaaaatcctggcgggtatcaacgcctggtcatccagcgaatcggtcaacggttatcgtcctcgcatcttgattgcgccggggttcagtgaagatgacggtataggcaaagggctggaaaccgcagctgaaaaactccgcgcggtggcgtatctggactgcgcctcgatggcaacgttaccggaagtggtgcagcgccggcagatgtacggtggtcgcgtcgaactgttgcggccacgcgtgcaaaaagtgaatgccagcggcgagttggagttccgaccgtattccgcctttgcggccggcctgcgggcgcgcatcgatctggagaaaggctggtggtggagcaagtctaatcaggatatcaacagcattctcggcctggagcaagttgacgagtttattctcggcgatccgaactgtgaagcgaacctgctgaacatgcagaacgtcagcaccatcatccgccgcacggggtataagcattggggcaaccgcctttgcatcgatcaccctcaatggcgtttcgagtcggtacgccgcactgcagacgttatcgaagacagtatccagaacacggtcatgatttataacgaccggccgctggataaagagacggctgatgacattctcggcacggtgaacgcatacctgcgccagcttgttggcctgggcgccatctttggcggaaccgcgtggctggacgaagaactgaacacagcagaatccctggccgctggtgtgctgtatatcaactatgacttcgggccgaagtcaccgaccgagcgcatcactatgcgtgtgcgcatcaataatgattatgccgttgaggagatgaccgcacaatga

SEQ ID NO: 432282 - DNA, 582 bp, Serratia marcescens
atgagcacggacttcgaattttctgccgcgccgcgctgggtgtggatttacaatttcgatgagaataacgtttttaccggcaccctgaatttttatgtcgcgccacacacagggctaccggccaattgtacgacaactaagtgcgcgccgaaaatcggtcaggctggtgtctggaatgatgggcaatggaaatacgttaatgattaccgaggatccccgtactgggatgcacaggcgaataaaaatatcatgtttgaagttggccctttgcctgaaggttgtacgtttacgccgccgaacacaccgtatgacacgtgggacggtgaaaaatgggtgacggatgaagccagggtgcagagtgagcaggttcaaattgcaaagaatgagctggcacaacgtagcagtgaagccgctgaagccattgcgccgctgcaggacgcagtagagtttggcgacgcgacagaggctgaaaaggcggctctgaccgagtggaaaaaataccggttggcgctaagccgcattgacgtcaatcaggcgccggatatctcctggccaactcgaccaaccccaattaaacgatga

SEQ ID NO: 432283 - DNA, 1338 bp, Serratia marcescens
atgagtggtcttattctgacgactgccggcgctgcggcgatcgaggccgcttaccaggcgggtaccgtcgttaaaattacgctggcggcattcggtgacggtggtggtaaaccgataataccaaacccggatgcgacggcattggtgaataagttcggcgatgcaccttttaccggcggggcatcaaaggaaggaatgattagcggtcaaaccgttatcgaagcgaggaaatatcctggcaaagttctacgagaagtggggctggtcagtgctgacggtgtgctggtggcctacggtgattatccggacacggttttaccggctgacggtgcgccggtgatgaaagagatcatcattaacttcgtgatggcgctgacgcatgctgaaagcgtggtgattgaggttgatcccaatgtttctgcgctgactatttccgaagctgataagcgttatgtcaaaaaagccggcgatacgatgatcggcccgctgactacgccatatgtagcgagcacccctaatgtaatgccagaaggcgcaggggcatacggtgatcaattaagcagcaaagcccctttttatcagcctaattggcaatgggatgtaacgagcggcggggtgtatgtgccgattgctaaaggtacgtccacgagaaaaggaaaaggttggccgacggcggtcagttttggctacctcatgcccggcacagatatgcacgcccatccagtaatccatgctgtcggcgatagcgggatggagtgcgtttgggagttcaatactcaaacgggccgcctgaacagcaaagcaggcatgtttgctattgaggcggaaaacacgcccccaggtgttcctctgccgtggccaacgaactcgccgccgcccggtttcgttctgatggtagggcaaggatttaatacaaatgcctatccacgtctggctggcgcatatccgtctggggtattgccagatatgcgaggtaacacgataaaggggcgcccggataatcgtgctcctttgagctttgagactgatggtaacaaatatcatgggcatggactggaaatcgataatacagatctgggaaccaaagaaacctcattagaccccggtcacgatcatgatggtggtatggcggggcctggtgcagcttgggacacaaattacatcgttggctcagacaatgattccaggcgttcccggaacaaaactagctggtctggccaacatttacacagcatcgctttaggggttcatggacataccggccgtgtaatcgcggatggtaatcctgaaacaacggtcaagaacattgcatttaattatattgtgaggcttgcataa

SEQ ID NO: 432284 - DNA, 537 bp, Serratia marcescens
atgtcgatgcataaaacattactgccgccaaatgcgctgcccgccgagcgggcgctggaagaggcaaccacgacagaggtgctgtcgatccccgacctcatccgcgccgtaaagaatcccgacacgtgcccggcggagctgcttccctggctggcatgggaattcagcgtcgatacctggttgcctgagtggagcgaggaacaaaagcgcgcagccatacggagtgctacctatattcaccggcaccggggcacgcgtggggcgatagaaacggcgctggagggattacccttcaactacaagttaatcgagtggtttgaacagaagccgcgtggagagccctacaccttttcgctgctggtggagcaagccggtaacccggtgaacgaacagcatattcaggatttcaagaacgcggtgatgcgcagtaaaaacctgcgttcgtggttcgatatgtcctttcaaaatgccacacaaggcaccgcatactcggcctcctacatggtggcgtctgagataaccagttacgggagttaa

SEQ ID NO: 432285 - DNA, 918 bp, Serratia marcescens
atggcgacgaattcagcaacaattaacctttccgagctgccggtgccggatgcggtgaaagtcccggatgccggcctgatttttgaaggatggttaaaccgtctgcgcgggctggacccggtatatgatgcgctgctgccctccgatccggtgtacaaacagggcgaagttctggcctatcattccacgctgttacgtgtggcgatgaatgactccatccgcgccgtactgctggccagcgcaaaaggcgctgaccttgaccagattggcgcaaactttgacgtggcgcggctactgataaacccgggcgatccgaatgcggtgccgccggttgaggcggtttatgaagatgatgacgcgttccggacgcgcatccagttggcctggtcacgactcagcaccgccggcgcagagaacgcctacaccttctttgccgcttctgcagacccctctgttttggatgttcgagcctatgggccgttggatcatggcaggcgcggcgatgtagatatttacgtgctttcccgtgataacgacggtatccccacggcggaggtgttggaaaaggtcaatcaggccgttaatgcgaaggacgtccggcccatgacagacttcgtcaccgtgaagccggcggcaatggtgaagttcgtggtaacggcagatatctacattccctccggcccggatatcgatacggtgatgagcgcatcacggcgagcgctggaaacctacctcgaaaagacgcaccggatcggaagccgcgtatcacgttcggggattgaccgagcgctgcatcagccgggtgtggtcacggttaagctggcctcaccggttgatgatctgctgatggatatcggccaggcgccgctttgcacggaaatcacgctgaaaaaggtgatcgtcaatgtcgatgcataa

SEQ ID NO: 432286 - DNA, 372 bp, Serratia marcescens
atgggggtaatcatgcacggtgttaatgctggcaacggcaagcggctctccggcactgagcatttacggcaatccgtcattgacatactcaccacgccaatcggctcccgtgtgctgcgccgtgactacgggagcgagctggttgatctggtcgataacccgcaggacgaaagcaaccgcgtccgtattattgcggcgacggccggcgccctggctcgctgggagccacgtattcgcgtttcgtcggtgcaggtggcgtttgttacccacggtcattttgacctcaccatcgttggcacggatatagagagcagccagccgatcacgttgacggagataagcattaatggcgacgaattcagcaacaattaa

SEQ ID NO: 432287 - DNA, 618 bp, Serratia marcescens
atgtcacaggatatgggggaccttgcccggcgcgtggccaacatgatccgccgtggcgtcgttcaggcggttaagcacggcccgcagccgcaatgccgggtagaaataggtgacattaccacgacctggttgccggtctgccagccgtcatccagcgccaacagggctgactctaacccgattgccgtgggggatgccgttaccgtcatcagcgaagccggcgacctgaataacggccgggtgtttcccggctggaacacggggaaaatgccggtcccggacgggagcgagaatgagcatgtcacccggtacagtgacggcacggaaatccgttatgaccgcgccgcccatgccctgaaaatcattattgccgagggcggcacatatgagatcgagggcaagggaacgctacgcggtccggtagaaatcacggacacgctgacggtaaaaggtaaaacggaactgcaggcagacactgccgttaccggcgacctgtccgccacgggggatatttccgatggcaaaagcacgctggcgcgggtcagagaaattttcaacattcacacccatcccgatccccacggtggggacaccgataaaccgaacaaccaaatgtaa

SEQ ID NO: 432288 - DNA, 540 bp, Serratia marcescens
gtggccaagcctattttaatgccgacctatcatgatgcggtcattgaggcgttgcggtcgctatcgtgggtaaataatgccgatgactacccggagcaggcaacgcagatcaccacgccggccgtgttcttttcgatcatgggctgggaacagtcgccgagcagtgacgggcagctcaatgttgaatttgagtgtgatttgtttgtggtgatcgacaaggccagcaacaccattgataaaccccaaatttatgcccgctcggcggcggcggatatcagccagtggatcaacggacaaaccttcgggcttgaagggctgcagccggctgcgttcatcagtgcggggccggatagcttcgatcctgcgatggatgattatatcgtctggcgcatcacctatagccagtctgccgccatgggggaagacccgttcgaatcggttgctggtccgctgcgtgaagtctggctgggggcggcgccggatattggtgctgcgcacattaatgattaccagcttatctacaagcgcaaggaggaatga

SEQ ID NO: 432289 - DNA, 672 bp, Serratia marcescens
atggccaggactacgcggttacgccgtgatctcccgatcgatatcgacaccatggttctgcgtgacattgccctggccgtcggggcaacgcacaagcagtacatgaccgcgtattcccgcgcgctgaagcgaaccgccgccaccatgcgcaaacgggccatggcggatatcaaggatgggctggcaccgcgcagcatggcgatggtgagaaagcgcctgctctcctttcgtgtttctcgcggatcgttgctggacgaagggcgcttatggttcggtttgaatgcgatcaaggtcaaggaccttaaggggcgtattaacggccgtatgcgtcctcatcatacccggcgtgacccgaaatccggacgctatgccccgtcgcgccggcgggcaaactctgtgggctttgaaccgcgcggcaacctgttgtcagccaaaacgtttgagaatggtgaggttgggcggagcaaacgtgaaggacgccggacggtgctgatccgtgacccggcgacgcggcgtacccgtgaagcagaagtcgatatttatgcgccgatgctggattacatcgaagacaacgcgtttgcggatgttgttgaaatattcctgcaccactttgaaaccgatattcggggcagggtaaaggcgcgggttaatgtgaacagctggaggaagtaa

SEQ ID NO: 432290 - DNA, 351 bp, Serratia marcescens
atggcaaagaatttacagcaggatggcaccacgctggattacgagaacacgtcggcaaaactgattgagtccggtcagccggtggctgtcggtggcattgtcggtgttgcacatgccgatatcccagcaggggcgtggggcgtgttgcataccgtcggggtatttgttctgcccaaagtggcggatgaaacctgggcggtgggtgacaaggtttatctggatgccactggcgcgctgacggcaaaagacaccgacggcgcagaaactgctgcagcgctccccctggccggctcggcatggagcgcgggcgaagccggacaggaagacgccccggtgcggctgggtttctaa

SEQ ID NO: 432291 - DNA, 2088 bp, Serratia marcescens
atgaaacaaaaaaatccggggttgatgaccccgaaagcaagtcttagcggtatcgacgcggtgaataccgaaacctggtatgaaatccgcgccgcgctgggccgcccgggacaggtagaaatctatctctatgaagagattggccgctggggtatttcggcgcaatcttttattaacgattgccgcgaagccggcgtgttcgaggcctcaaacgtcgagctgcacatccacagccccggcggggatgttatgcatgggttcgccatttacaacactctgcagcggctgaccgggcaggtcgatatctatatcgatggcctggcggcaagcatggcctcggttatcgcctgtctaccgaatgccacggtacatatgccctccaatgcctggatcatgatccacaagccgtggggcggcatggcaggggattctgacgaaatgcgcgattatgccaatttcctcgaccgtaacgaggagatgatgctggcggcgtatatgtcgaaaaccggtctgtcgcgggaggagatcgcagcgttattgaaggccgaaacctggatggatggtgcggaggcggttgctaaaggcttcgctgatgtgctggaagaaccacttgatgcagccgcatcgcttaatcaaaacaaactgaaggattatcacaatatgccacaagcagctaatcacctcttcggcgcacgtgcgcagacctcggcacctaacgcgcaaaatccacagaccccggcgcttgtatctcagccggctccttcaccatccacgccggccgcgcaggctccacaaatcgatgtggtggcactggcggcgcagctgcagcggacgctgcaggccaacaacactgcacgcatcacggatgtgaatgccgtctttgaaggttttcctcagttggccgcgttgcgcaccgagtgcatcaacgacatgagctgtgatgcgaacatggcgaaagatcgtctgctggctaagctggcggaaggcactacgccgagcattggcgccagtgccgcgcatatccatgccggcaacggtaacctggtcggtgattcggtccgcgcctcggtcatgagccgtgctggtcatgcgcaggcggaaaaagacaacccttaccaggggatgacgctgcgtgaactggcgcgcgcctcgctggttgatcgtggcattggcgtcgccggcatgtctggtcagggtgtggtcggcctggcatttacccattcaagttctgactttggcaatatcctgatggatgtggcccataaatctacgctgttaggatgggaagaggcgaatgaaacctttgaccgctggacgcgtaaaggcacgctgaccgactttaaaaccgcgcaccgcgttggtttgggcgcgttggacaagttgcgtgaagtgaagccgggtgcggaatacaaatacattactgttggtgacaaaggggagccgatcgctctggcaacctatggtgaactgttcagtattgatcgccagaccatcattaacgatgacatggacatgttgacgcgtattcctgcaatgatgggcggcgctgcacgttacaccgtcggcgagttggtctgggcggtgctgaccagcaaccagaagatgagtgacgggaaatccctgttcagtgcggatcacaataacctggtgaaccagccactgacgattgacgggctggataaagcccgccaggcgatgctgctgcagaccaacggcaagcgtaagcttaacattcgtccggcctatatgctgacgccggtggcgctggagtcgaaagccaatcagctgatccgctctgccagcgtgcccggcgccgatgccaacagcggcatcaacaacccgatccagaactttgtggaagttatctccgaagcgcgtctggatgataacagcgcggaagcatggtatctgacggcagcgcaaggcaaagacacgatcgaagtggcgtatcttgatggcattgatacaccatatctggaacagcagcagggcttcaccattgatggtgcggcattcaaggtacgcatcgacgccggcgttgctccgatggattggcgtggtctggtgaagtctaccggcaaagcctga

SEQ ID NO: 432292 - DNA, 1512 bp, Serratia marcescens
atgggattgatagaaaagacactcggcattgtggcgccagggtgggccttgtcacgtgcgaaaaaccgttaccagctgcgggcgtatgaagcagcaaacgtgtcacggctgcaaaaatccaagcgcgaggggcgttctgctgattctgccgtgttcgcggccggtgtgtcgttgcgtgagcaggcacgttggttggacgaaaaccacgacattgtgatcggcatactcgacaaactggaagaacgagtcgttggggcgcagggcattcaggtcgagcctcagccgttgcgaacggatggcacgctgcatgaggagtgcgcggagctgctggcaaagcactggtccgaatggtccgtccggccagaagtcaccggcatgtttacgcgtgccgaggttgaacggctgatcctgcgctctgcactgcgtgacggcgaagtgttctcgcaaattgtgcgggggccggtatcagggctgaagcatgccacaaacattcagctgtcgctggagtgccttgaggctgactttgtgccgatgaacctggggagccttggcagcgggaatgttcagcagggcattgaggttaattcctggggccggccggtggcttaccatgtctataaggcacatccagccagcacgctgcgtatgtctacggcgaccaagcgggtgcctgccgaaaacatgttgcatctggcgatgcgcaagcgactgcaccagctgcgcgggatcagtctgctacacggtgtgatcacccgcctggctgatatcaaggattacgaagagtcggaacgtgttgccgcgcgtatcgctgctgcgctgagcttctatatcaagcgtggcgatggtgcggcaggtgatgagggggagtattcggagccaggcactgcgcgtaactttgacattgcgccgggcatgatcttcgacgaactgcgtcccggtgaggatttggggatggttgagtcaaaccggcccaatgtgcacctttctgaataccgtaacggccagctccgcgccgttgccggcggtacacgcagtggttattccagtatttcccgtgactataacggcagttattccagccagcgtcaggaactggtggaagggttcgagggctacaacgtcctgcagaactggtttgtcggtcaatacagccgcccggtttaccgtgcctgggtagatatgctgcgcctgtcgaaaatccgccttcccgacgatgtggatatgtcctcgctgtacaacgcgctctatctggggccggtaatgccgtggattgatccggtgaaagaggctgaatcgtggaaaaccatcgtgcgcggtggggctggcaccgaggccgaatgggtacgcgcgcgcggcaagtctccgcaggaaattaaacgccagcgtgtgcgtgaagttgaatttaaccgcgatcacggtctggtgctggactctgacgcagccaacgactcaggagcgaaagcgaatgaaacaaaaaaatccggggttgatgaccccgaaagcaagtcttag

SEQ ID NO: 432293 - DNA, 216 bp, Serratia marcescens
atgacgaaacaggaaattcgggacatggtggtgcgtgtcagggggttctacacggactcactcgacggcaaatccgtatcctttaccggcgtcaacggccgcaccatcacaaaccacgatccggcagcgatgcgtgcagagctggaatattgggaaaatcggctgcgcaatgcgtcctgtcgtggcggtgggtataagctcgctaacttcgtgtag

SEQ ID NO: 432294 - DNA, 2118 bp, Serratia marcescens
atggtcgcacaggcatcagccgcagaaacccggcggaatatggccggtattattcaggctccgcgccgcatgccggttgccgaagctgttgaaaagtttatgcgggtgcctatgggcgcgggcaactctgttaagtgggacccgagcgtggcgccgtatgtgattgagccgatgaactgcctggcgtcacgtgaatacgatgcggtggtgtttgttggtccggcgcgtacaggtaaaacgatcggcctgatagatggctggattgtttacaacatcgtgtgcgatccctccgatatgctggtcgtgcaaatttcggaagagaaagcacgggaacactccaaaaagcgcctggcgcgaacgttccgcgtgagcccagacgtggctgagcgtctcagccctcggcgcaatgataacaacgttcacgaccggacctttctggcagggaactatctgaagctaggctggccatcggtcaatatcatgtcctcgtcggactacaaatgcaccgcgctgacagattatgaccgcatgccggaagatatcgacggcgagggcgacggattcacgctggcatcaaaacgtaccacaacgtttatgagtgctggcatgacgctggtagagagttcaccaggtcgcgatattctggattcaaagtggcgacgccgttcagagcatgaggccccgccaacaaccggcattctttccttgttcaaccgaggcgatcgccgcaaatggtattggcagtgcccggactgcggcgaatatttccagcccatcatggaggtgatgaccggataccgggaaattccagacccggtcaaggccagcgagtctgcgcatatgtcttgccctcactgcagcggcacgataacggcagatatgaaacgcaccttgaaccagtcaggtgtgtggttgcgtgaaggggagtcgatagacgccgaaggcaatcggacaggcgagcctcgtcgctcccgtattgcgtcgttctggatggaggggccggcggcggcatatcagacctggtcacagctcgtctacaagctgctgaccgctgagcaggattacgaaacgacgggatcagaggaaacgctcaaggcggtcatcaataccgactggggccggccgtatttgccgcgttcagcctctgaacagcgccgcagtgacgaactgctggcacgcgtggaggattacggtaaacgcctggttccgccaaaggtcagattcctgatcgctgcggtggatgtgcagggcggcaagaatcgccgctttgtggttcagattgtcggctatggcgaaaatggcgagcggtggctggtagaccggtacaacatcaagcagtcgatgcggtgtgatcccgatacgggtgaagcgttgccgatccatcctggggcgtacccggaggattggaacttgctgatctctgacgtgctcgacaaaacgtaccgactgcaaagcaaccaagacaagcgtatgccaatcctcgctatggccgtagacagcggcggcgaagatggtgtgaccgacaacgcgtataaattctggcgtcagtgccgccgcgatggcgtgcataagcgggtgtatctcatcaaaggggatagcgcccggcgtcagaaaaccattacaaaaattcacccggacaacacagaccgaagcgaccgccgggcagctgcgcgcggtgacgttcctgtctacctgctgcagaccgacacgctgaaagaccagctcagcaatgcgctgagtcgtgaagcgccaggggccgggtatattcacttcccgaattggttgggggaatggttttttgacgaactgacctacgaagagcgtggatcagacggtaagtggcgtaagccagggaagggcaataacgaagcctttgatcttttttgctatgtgcatgccgtcgtgatgttacgccgttacgaacgtatcaagtgggatgagccgccagcctgggctgagtcacaagatacgaaccccaatattttcaacgagaactcatcaagggaggtcgtgttgacgaagaaaaaaaccaaggcggaaccgaaacagaccacgcctcagcatacctctagcggatggatgaacggtggcggcatggggggagggggctggttatga

SEQ ID NO: 432295 - DNA, 495 bp, Serratia marcescens
atggataaagaattggagaacgtcaggctgaacctgaatcagctggcggcaattacgggatcacatcggcaaaccatcgctgcacgcctgaaaaacgtcgaacctgctcccggcagtaatgccaagctgaagctttacacgctgccggatgtgctggctgaactggtgaagaccgcgccagtggccgatgttgatcaaatgctacctcccgaccggaaagcatggttccagtcggaacgcgagcggcttaagtttgaacaggaaaccaatgaactgatcccagcagaagaggtcgcgcgcgaattttctgcgatggcaaaggcgatggttcaggtgttggaaacattaccggatatcttggagcgtgattgcgcgctgccaccgtctgccgtttctcgtgtgcagtctattatcgatgacctgcgcgatcagatagcgctgaaggttatgaacgctgatacagagattgaggaggaaatgcccgaggaggagtaa

SEQ ID NO: 432296 - DNA, 516 bp, Serratia marcescens
atgaatcttaagcatggtattttacttttaaccatgatcgcgtcttgttctgcgtttgcgtcgtcttggaaggtttcgtaccaaaacgatgagatgcgagggacttctcaaaagctggcttatgcaacttctgacaacttggtgaactttgagtttccatacaatggtgggtcacgtcttgggataatgattgcatctgcaaacaccaagttaggggaaggggaaaaacctgatagccttcctctcatcagagcaatgttatttatcgataaagggcagtttcaatgcaatccctataatgattgtcacatctcagttaagttcgataatggagaaatacaatcattcccgatggaagaggccagtgctggtcgagctgatgccatcttggtatcagattcagatgagtttataaataaccttaaaaaacataaaacgcttattattgaagctgaattttatcgtgcaggtaataagcaatttaaattcaatttagatgatttccctgaccgataa

SEQ ID NO: 432297 - DNA, 444 bp, Serratia marcescens
atgagctggcggtgggacgtaattatcaaggcgtggcctctgctggtggcgcttctggccgcagtgctggtgctctacacgctttctctgcgcgttgacctggataagtccaaaagggataacggcgcgttggtggaaaagctgggcaccaaagacgcggcgctggtggcgatgaaacaggcttccgacgctgacaggcaagcgagcgccgcgcagttggaaaaagagcggaaactgaggggaaaggctgatgcagaaaacaaagcgttgcgcgaggctctggacgcgagcggctgtagcaacaagcctctgcctggtgctgctctcaacatcctgcgcggacaggccaaagccgcagagcacgcagatgatttacgtcctgccgccagcggtgctgttgcaacagtgcgaggacgcgccgtttaccggcacaacgttcggtga

SEQ ID NO: 432298 - DNA, 441 bp, Serratia marcescens
atgaatatcagtaaaggcggtattgagctgatcaaacggttcgagggtttggagctggaagcgtatcaagactctgtaggcgtctggactatcggctacggctggacgcaagcggtagacggtaaaaagattgcgcccggcatgaggatcgatcaggccactgccgaccggttgttgaaatgcggcgttgtgcagtatgagcagggtgttaatcagctcgtgaaggttcgcatcactcaggggcagttcgacgcgctggtgagctttgcctacaacctcggcctgcgttcactgagcacatccacgctgcttcggaagttgaacaacggggatacgcaaggggctgctgacgaattcggacgatgggttaatgctggtggcaagcggctggatggtcttgtcacgcggcgagcggcagaacgtcggatgttcctatcatga

SEQ ID NO: 432299 - DNA, 312 bp, Serratia marcescens
atgccttggaagaacgagcccaacatcttatcaatgctgattgcgttcggtatgactttgctgggagccattgccagttactcattcaaggtgctgaacggagaggccttcagttggcgcacgctgtttctgcagcttttcgtttctatcttcgccggattaaccatggtgatgatcgccctgcattacgagtggccttcagaagttatggggggcgtgtgcggcatggctggttggtctggagcgtcgctgattaaagcgctggagcgtcgattcctgaataaagcgagcgatagcaatgaatatcagtaa

SEQ ID NO: 432300 - DNA, 810 bp, Serratia marcescens
gtggaaaagaaggatgaaggtaagaagcccatcatcacaacgagcttgggagctaaaggatatgagaataatgatatttataaaaggactggtataggatttacgagcaataacaactataagaatgaatcgaattttcaggggggggcgaatagccaaagtaagtatgatgcgacaaaaaacataagcattaagggtgtaaatactactgatgctggtttaaagtttgatgctccagagatttcaggaagtcctgaagggacgagtactgacttaaatttcgacatcattgattactataaagatcgagcaagaataaatagagagatagtaaagctatccaataaaagtgaacagctaattcatctaatagataaattggataatggaattaaagaaaaagagaagaaaactgcattaatgcaagttgcattggatgatattaaaggtgaatataataatttacttataaagagcgctaattatgaaaataaaattgatggttttaaagacgacttggagaactctcggaattcatttttaggtataatagcgctatttgcatctttcttctcatttatatcagtatctattaatatattctccaaagaaatgtcaataggtacttcgatatcaattgtagtaataatttgggtttgtttgattagttttgtttttgtttttatggcagctttaagtaaagggttctcctatttctctagtgctagcattataaggcatttcttggctgttattttttgcatagtgatggctctaattatacctggttttattataaagctattctga

SEQ ID NO: 432301 - DNA, 702 bp, Serratia marcescens
gtgaatactttaactaagatacattaccaacaagcgtttttattgaatggtgacatcagtaaggattatgatggtatttcttacttctttaaaaaagagtgcaggaagtatggcgtggatattaatgtagatcagagtttttctggtatgccagataatgcaccgaaagaaatcccaagattacaaatgattagcaaagatggccatgctcgtctcgttgtaagcccgatacgggcagactttaccattgactttcttggaatgaagaaagattttaataatgagatggttaaagatttgtcagttactctttttaatttaatgggagaggttggcattactgttacgaatgtaggtaatgtaatacagcatgcttactctgttggtgaaacggttggttttataaaaaagacgctgttaaataataataataaattgttcttgggggttaatgactatgttggtattagatatttagaagctggaagtttattaagtgatgtatcgctaagtgttataaccgaggtggagtcggcgataatttcacatgatttagagcatgtggtcatgataaaaagagatgtaaataacttcaatggtggtaaatttgatataaataatggctttttagcatatatcgattatgttcttatgaagaacgaagatgaagaaatttattcaatttttggtgatgaggtgtga

SEQ ID NO: 432302 - DNA, 384 bp, Serratia marcescens
atgattttgacattgccattcccgccaagcgtcaacggttactggcgctctcctaacaagggggcgtcgcgtggtcgtactttagttagtgagcgcggcagggcattccaggcagaggctatcgcacaggtaatcgagcaactgcgccgccggcctaagccgatcagcgccaatatctctgttcatgtggtgttctgcccaccgaacaaagcgcgccgggatctggataactacttcaaggcattgtttgatgcgatgacgcaggctggtgtttggcttgatgacagccagattaagcgcatcgaggcggagtgggggccgatcacaaagggcgggaaagttgagctgaagatcagcgagatgatgacatgtgctgcagattga

SEQ ID NO: 432303 - DNA, 432 bp, Serratia marcescens
gtgagtgacgaaacccaatacccagataacagcaccaaggttttggcgtttacaaagcgcttcgatgagaacgccgatatcaaggaaatgcgtaactttgtcgaggaagatgaacggctatcccgtcgttgcttccacggtgccttgtccgtatcggagcacgagcgcaaagtgacgtgccgccagtgcggtgccgtgctcgatgcctttgatcacctgctatcactggcaaagggcgaaacgaagctggactgggagctgcgcggcgagataaagcagcaccgagaaggtctggagaagctgaagcgggaagaggtgaactgcaagggccgcatcaagacggcgcaatttaggctggcagatgtgaaccgtgcgctggtggaggctggcgataagctgttggcgcaaaaaacaggggagttaaagccatga

SEQ ID NO: 432304 - DNA, 570 bp, Serratia marcescens
atgaaatattcactgatttacgcagatccaccttggacctacaacgataagtgcgctgatgggaagcgtggtgcaggtttcaaatacccaacgatgacagttgctgatatctgccgtctgccggtctgggagctggctgctgactcgtgccttttggctatgtggtgggtgccgacgcaaccggaagaggcgctgcaggtaatgcggtcatggggattcagactgatgacgatgaagggcttcacttggcacaaaacaaaccgagtgaagggaaacagtgcaatcggtatgggtcacatgacacgcgccaacagcgaggattgtctatttgccgtcagagggaaattgccaccacgaattgatgcttcgatctgccagcacgtcacggcgccaagaatggagcatagcgctaagcctgatgcttttcgcgaaaaacttgttcaattgcttggggatgtttcacgtatagaacttttcgcacgccagcaaggtgatgggtggcatacgtggggtaatcagtgtgatcagtcggtgatattgatgccagggaaagtcgaggtgatgtcgtga

SEQ ID NO: 432305 - DNA, 915 bp, Serratia marcescens
atgagcatgaacctgatggctcaagcaatgagcataaaggttggcaatcccctgcgtaagctggtgctgattaagatggctgataacgccaatgatgaaggcgaatgctggccgtcctatcagcacattgctgaccattgcgagtgcagcaagagcgccgtgaaggctcatatcactgcactgataaaaatggggctgctctcgaaagagaaccgcttgggcgttaataacggaaagggcaacacatcaaacatttaccaactgacacttggtagccctgtgtcgtcagaaaacacagcccctatgtcacgtaaaagcacagcccctgtgccgtcaaaaaacacaggtgggtcacgagaaagcacaggtgtgtcgtcagaaaacacagcccctgtgtcatctggtggcaccccctgtggcagcacgtggcaccagaaccagtcattagaacctaaagaccaaaacccttcttgtccggtcgctccgcaacccgacgaatcaggcgatgagaagtttttatctcggcaccctgaggcggtggtattcagtgccaagaaaaaaatctggggtagcgcggaagacctgaagtgcgcgaaatggatccgctctcgcattgtgaagctgtacgagcaagccgcagaaagcgatggggaagtcgccagaccgaaggagcctaactggactgactgggcaaatgaaattcgtctgatgtgttctcaggacggccgcacgcacaagcagatctgcgagctgttcgctaaggcaaaccgggatccattctggtgcaagaacatcctgagcccgtcaaagctgcgcgagaagtgggatgatctgacgctgaagcttagcgttaaccccgcatcaccggccgatggtcattggaacactgctgaagcatgggagaacaccctatga

SEQ ID NO: 432306 - DNA, 597 bp, Serratia marcescens
atgcgtgacgctgaagagtacacaatctctatcaggctcgagagcattgaaggtgaacgtatgtatgttgctcgggttgaagagcttccagatgtagaagagtatgctgatacttatgagtttgctcgcgaactgatacttgacacgatcaagacaacacaaaatatttttgagcgtaaaggattgacattcccagagcctaagattttttctctcgcagatgtgagcggaagagtaactctccgtttaccgaagtcagtacacgcaaaatgtatatctgattccgagcatgagggtgttagcctcaatacatatatattgacctgtataacctcgtacaaagctcagtcaacagaaagtatgacatcagccatagtagctagcattaacgcacacttcgctgatgtacatacaaaatccgggcgctcttttgtgggtgatagagtaaaatctatgtattccgtcataagacacagcgagattagcactagtaaatttcgtgtagcggacgatgatccattcatcgaaccatctattgaaagctccagaggattcacagcgccaatttcatttagtcataaggtattaccatgttaa

SEQ ID NO: 432307 - DNA, 264 bp, Serratia marcescens
atggctacccagatttctatgcaacaactgaagtcgatttatgagcatcacggtgctgacgtatctgaacgccagctgcgggatacgctggaacagtgcaatgaacaggccgacgttatttacaacgactacaacggcaacccgttgccttctcgcaatgccacggaatgggcgcactacttcgcaatgggtgaagccgaagaacagcgctgcgaaggtttggcggcggcggacttccagcgtgatgcatacggtatcgactaa

SEQ ID NO: 432308 - DNA, 786 bp, Serratia marcescens
atggccaagaattctactgaagcctacggggccagcggcaaaaccaacgtactcaattttgagccagaacggctgcacctggtaaccgacagatcgcacccgctctacgatgagcgcatccacttgccgctggatgagtcgatgatcttgaacatcatggatcagggcgtcctggagccaatcatagtttggaaagaccctgaaaccggcctgtcctgcgtggtagatggtcgccagcgtgttcgacacaccgtagaagctaacaagcgattggcagctgcaggcaaggatctgctgttcgttcctgccgtaacaaaacgcggctctgctgttcgcatggcgcaggcaatgatcagcgccaacgaaattcggcgtgccgataccccgctgggcagagccaagaagatggtcgatgcgttggaacgtggccacgatgaagaagatttgtcactgatgtttggcgttggtgtgcagacgatccgcgccacactcgccctactcgatgccactcaggcagttaaagatgcggtcgaatcaggcaccgtcactgtcagccaggcgcgccagttggcgaacctttcacccgaagaacagcgcgaaaaagtgaaagaggttgaggtggccacagccggcaccaaaggccacgaaaaagcgcgccggcagcgccaggtgatcggcaatgcaaaacctcgcatgaagtcccgaaaagaaatcatgaaagcccttgagggtgctagcggtgattacgcgcttgcactgcgctgggtactgggagacgataaatga

SEQ ID NO: 432309 - DNA, 471 bp, Serratia marcescens
atgacaaccataaagcgttttaaccctgactacatcatgcatgcggctcgctttgagccgttcgccagagaaactgaacacggtgaatttgttcggtttgaagaccaccagcaggtagtgagcgcgttggaggctgagcgcgatgcgctggctgtggagaatgcggcgctgaaggatgtgttcggccctggggaggcggttgttaacttcctatccattgctctacgctacaccaagtatgactgcattgaccttcctgatgaggccctggcattcaatatgtcactaccagaaaccccagccactgacacagcacttgcagctatccaggcgcagggagtggagaagtttgcagatgaccttcacaaaaccgccatggctacgtgctcagtcaagccggacaacaccaccccaggcgcttacgcgggaatggctcgctcattcgctaagaagctgcgggaggccaaatga

SEQ ID NO: 432310 - DNA, 1218 bp, Serratia marcescens
atgtcctctaatattgttatctctgcgcaaaatctgcgtaaagtttatcagatttattccagcccgatgcagcgcctgggagccttgctggggtatcggggggctaagggtagggagtttgtcgctctggattccgttaatttcgagattagaaaaggtgaaacagtcggtattattggtgtcaatggttccggtaaatcaactctgttgcaaatgatctgtggaactttggcgcctacaagcggcagcgtatttactaaagggcgtattgcaccgttgttagagcttggcgctgggtttaatccagagttcacagggcgtgaaaacgtttacctgaatgcatctcttctgggcttaacgcgtaaagaaattacggagcgtttcgataaaatagctagctttgccgatatcggtgaatttctcgagcggccggttaagactttttcgagtggtatgtttgcacgtttagcctttgccactgccattcatgtcgatcctgaagtattaatcgtagatgaaattcttgctgttggagattcacgctttcagcgaaaatgtgtaaagaagtttaatgaaatcagaaatgatggatgtacaatcctgttcgtttcgcacgatgattatcaggttcgaaatatctgtaatagtgcactataccttgaaaaaggtgtacagcgttattttggaaatgcagatgttgctgttcagcattacctttctgatatgcagaagagtgtgatggagactcaagatgccgaaaataaagctattgaaaatgaaataagtagcagattgataaaaatagctaatgtatctcttctcgatcggactgggaattcagtaaccgagctggctagcggtgacaatgttaaactgtctttcgattacaaatatgaaggaagtgacggggaattcgatgggctgacctttgtctttaatctttaccgtaaagatggggtatatatctgtgggacgactacagcaatgcgtggcttagaaccattttccctaagtcgggaaggacgagtgactattgattttcccgcattgaagttgttgtcaggtatttataactggcgagtcgctgtcaatgatcaagatggtatacagataattaacgaagctgtaccggtctgtgagttttctgtagccgataacttcagtgccgttggaatttatgatattgaacatagctggtctgtggtggccaaggggtaa

SEQ ID NO: 432311 - DNA, 636 bp, Serratia marcescens
atgacagcacaccatctgcttcttgggcgtaaacctgctgagccctgccggaagcgggtccataaggggcgcgtatcggtaggtgaaagtaaccggcgctggtgctcagatggctttgagttccgctgcgacaacggcgaaaagctacgggtaaccttcgcgcaggactgctgcgacagggagatcatagactgggcggcgagtacaggcggctatgacaaagagacggttcaggatgtcatgctgggtgcaatcgaaaaacgcttcggaaggcaactgccaacggagccgctggagtggctgacggataatggttcagcttacagagcgtatgaaacacgggcgttcgcccgtatgctagggcttgagccatgcacaacagcagtgaggagcccggaaagtaacggtatagcagaaagcttcgtgaagacgataaagcggaattacatcagcatcatgcccaaaccggacagcggcgatgaatctggcggtggcgttcagtcattacaacgaacatcatccacacagcgcgctgggatatcgctcaccacgggaatatatacgcagaaagttatcgcaaccgtaagagagaaaacgcgtctggatattaggggcaaatccactgcgtgcctgtaa

SEQ ID NO: 432312 - DNA, 135 bp, Serratia marcescens
atgtttaacaccagtcagaataataagatggttgaagtgttatcaggacctgaacggcgtcgccgtcgtacgccgcaggaaaaaattgccattattcagcagactatggagcccggcatgactgtgtctcactga

SEQ ID NO: 432313 - DNA, 330 bp, Serratia marcescens
atggaatttatgactagcgcaatcctttcaggaatcctttatgacggttttgtcaaaggtgctaggatctcgactggatttttaaaagaaaaattgcaggactggttattcgatgatgcattactcgaaggactagcaaataagttaaaagagcttaatctagatgagttaggacaacccgcaataaaaaaacgcattgaaacaaacccggacataataaaatacatgcagaatattaaacaagagcaatcaattaaccaagtcaatcaaaatcactatggcacgggcgataacgtcgcgggaaacaaaataatcaacaatggtaaataa

SEQ ID NO: 432314 - DNA, 3273 bp, Serratia marcescens
atggaaaagcaaattcacataggttctggagacaatgttggaaataataaaatcgtcaacattaccaacagtatagagccaaaagacatcaaaggattcattgctgattttatgcacgatattttgcacagaaaaatatccgatgcagagaaaaagattgattccatcacgaatattgacaggctagatagcgatgttaaatcaatattaaacacattaaagataaaaatagcactccttcgtggtgaaaaagggttgcaaaaacaagaaatgcaaaatcttctgaggaaaaaaacgttagattgtgacgtcttagatgttgttttctcaacactcttacatcttgagtccgaaatgcaactggagcctgcgagagagagatacctttctgcaaaggcgaagggaccgtactctaatgaagttttttttgaatacttatcaactgccagtgaagtggtttcagtattcaatagcacagataaatttaattttttagagcaagagattttaggattaatcagaggctcaataagaaatgacaatattaatattgcatacgaacttagtaagcatttacacataaattatccttcaacaagttcaacgtttttcttgctccactgtgaaaccctttcattcttaaaaaaaataaaaaacagacacattctttcatttaacaagaatgaaaaaatgcatgtggacactttaattaatagccttttgggtaacttctcatcagatagctctcgatttatattaccgctaataaatcaactttacatcaccacctttacaaacaccaaactaattgaacttgctaaagaaaacatcactgaaataaagagaatcagtagtgaatgcgcagagattattacgagaataaccaataaaactgctttaacacgttcacagttaaccctacctaaagaaataaaagaccttgagacgttctctatccttgaagaaatgctaacaagtggttcacttaataaaaaatcgcttgccgattggcaacatggtggaggaaaaatcagcactgacgattgctacattaattcgctcctggaacttcaaatatctgtttggttatgcacatctcaagataaaaaaaccattatggagctgacccaacaagctgaaagatttctgcttctggacataaataggtataaggaaatcaacccatctattttaatgtttttatgcgaaaaatttatgcacctaggcctttatttaatcgcagtaaagtatatcgaacctatattacctgacgaaccatggcagtcgccactacttgaaagtttattgcaagcactatttttaagcgaacaaaatgatctcttctttaaaaaattagctctgttttcagatgatgctaaaactgaactagtatggttgttagaagctcagatgcatgagcgcttacagcaaaatgatgaagccatttccgcagtccaggcagcaataaaaattgacaatacaaatgcctattcatgggatctgttactatttttacaccaaaagaaaaaaaccaataaagaagacttgattaagttagtggtggggattccagaagaagtttttcattcataccatgaagccaaaatccctttattaaatagcatagcaaaatatgttgatccaaatattgctgagagtgttctagtagattggtttgtggtaaaccctaaccaactagcaaaacacctaatagacattcatcataactctttaatgaaccgtaccgataaacaaggttctgtatatctgccaaagcattgcattaagggcattgattatagtgatggctttagaaaacacaagcgcattttaataagggatgtagaaactgaacaccctttattcctgaatattacttcaccattaggtaagatagttgaaaaattgacgattggcgaaactatcgaagatccttatctcggagaaatatcacttaccgatgagatccctgcatttgttgctgcgtatcaagctgcaataaaaataagagatcaaaataacgatggatcagactcatttaagctatttgaattaccgtctaatgaagataacttactaccatattttgagaaaatttttcgacgctactcaaataataaagcgtcacaaaaccctgttctacaaaatccaaacatcccactatgcatgagaggtaactttacacatcatggtgattatttccgggcagcctattatcatttaacctctacagacacgacacaatacataaagcttcatgatgaaggcataactgaaccagaaaaagttataatagatatatatacagctatttatctttcactattgggttttgtttctttaatagaaaaaaaaggaaccatccttgtattatcaacacatactaaagatatcttggatagttggataaaagatattacgagagaagattacctatcattagatgtgactgaatttgggatgcgacgaattacagcagaagatataaaaaagaactccgatgatttcatacaacaattaaagcttttaatcaatatttctaaagatgataaaatcaatgctattgatactcctgaagaacttttaaaaataaaagacgtaattgatcattcaattttttcaaccattcaactttcccatgcaaataacatcccatggttaagcattgaccatttactatgcatattagctcagaattcagattttccagttgtaaacatcaatagcttcttgaaggatttgataaacatatctaaccatgaagaaagaaagaaaagtataatagttaatcttacctgtgggcttcctgtacctattttctacaatgatataataatcctaagcagctcacatgaaaaaaatgacatttattttgtcgcgaaattcattgagaaatataaatgtcctaataacacgaccactgacaatctgaattacctttctcaaataatgagaagcgtgatcattaaagcatacctcgatagagatattttaaatggtggccgttcgtataatcctgtttatgatggctacgaggagtacgtgtttaatgtttgttgcaaaactgccgtgttattcattgaaggagcgacagcggaaaccagagtggcattgctaatttctgaaactttgaaaccattttaccatattagaaccttgagagaattaatttttgatttagcaacctcattctcaattggtcacttcttaagtatagaagctataaatatacaacttgaaagaataataaagtcagaaaaactccctgcttga

SEQ ID NO: 432315 - DNA, 1350 bp, Serratia marcescens
atgactcgcagattaagttttattgaaataaacaaagaacagttcgatatgtttttttatggccgctctccatatatgaaaacattctcaaatgaaatttcttggtttaagttcgaaaaggatggcataacacttttagcaaccatcgtcctttgtaatatagataaagatttcaatgcaataatattaggtagggatctcaataaaaaatttagagctataaatgttatagcatcctttacatctaaagaagatctaattgttgaagtaaactcatgcatacccaaaatgctttctcaacaccacaatgggttatttatgcaaggggatgagtctccagaaaccttctcattatttatgaggaaagttccagaagaaaaaagaaatatttacatgaaaatgctgttagaagatcctaagcattaccctgcctatattgtgttagaagagttagcatattggtttaaagatcctgacggtatttttatacgcgactttcaaagtgcatcattcaactctaggctttttgaactttatttaaatgctgttttctatgagcttgatttcacaatgaataggaatcacaaccaacctgacttcatgctttcaaaattcaatattgagatagcagtggaagcagcaagcattgccgaaattgaagatcctctagagaaaaaaattgttaaccaaaagcaatatgaagagattgattttcatgtgaaaaatgttatgccattcaaatttgctagaactttacttaaaaaagtaaaccaccgtccagaaccaaataaattatattattgggagctagagcatacaaagaataaaccattcattatagccatgcaagattattcaaaaagaatgtcaatgggattttcaaatgttgctcttcatagttatctttatggggtagatatggaaacggggaacaaaattgaagtacacagctacgaatctagaagtataaaatcaaattttttctcatccccaaaaaataaacatgtctctgctgtattcttaactacacaagccacactaccaaaatttaatcgtatgggggtactcgcagggattgagcaaaaagattgtaaaaccattgtaaatggtacgagaactgacgatgattttaatattgtaccttttgtagctgatataagtgatagcaaatatgaagaaccgtggtgcacagccgcgtatatgtatcacaacccaaatgcccataaccctgtcgattatagattattcccaaatgtagttcatgttttccaaaaagatgacgggtttgaagaacttgttcccaaaaactacatcttacagtcaacaactgtcgtattaagcacacattaa

SEQ ID NO: 432316 - DNA, 774 bp, Serratia marcescens
atgagcgggcgcatcctgcgcctgctgcgcgatccgctgccctggacgctggcgttgctgttggcgctggtgttcggcatggatcatctgcgcggcctgttcgccgcctggttccccgatctggagcggcccatttatcagcaggacagctttatcgcgctggtgggtgcgcatctgtcgctggtggcgatctccagcctgatcgcggtggctctcggcgtggcggccggcgtggcggtaacccggcgcagcggccgggagtttcgttcgctggtggaaacggtggtggcggtggggcagaccttcccgccggtagcggtgctggcggtagcggtgccggtgatgggcttcagcgaacagccggcgatcattgcgctggtattgtacggcctgctgccgatcctgcagggcacgctggcgggcatcgaatcggtgccgcccgccacgcgcgagattgcccgcggcgtggggatgagcgcctggcaaatcctgtggcgggtcgaattgccgctggcggcgccggtgatcgtcgccgggatccgcacgtcggtgatcatcaacattggcacggcggccatcgcttccaccgtcggtaccaagacgctcggctcgccgatcatcatcggtctgagcggctttaacaccgcctatgtgatccagggcgcggcggtggtggcattgttggctattatcaccgatatgctgttcgaacgttgggtgcgttatctcaccgcctggcgtcagcagacgctggcgactactccggcggggtaa

SEQ ID NO: 432317 - DNA, 582 bp, Serratia marcescens
atggccgttattggttatatccgcgtatcaacaatcgaccagaacagcgatttacagcgtaatgcactaacaagcgcaaactgtgaccgaatttttgaagaccgtatgagcggaaaagttgcctgtcgtcctggtcttaagcgcgctttaaagtgcgttaatagcggagacaccctggtagtgtggaaactggacaggctaggacgcagcgttaagaacctgatcgcactcatatcagagttacatgaacgcggtgcccacttccgctctttaacagacagtattgataccagcaccgccatggggcgcttctttttccacgtgatgtcggcattggcggagatggagcgcgagctaattgtagaacggacactggccgggctggcagcagccagagcacaagggcgcatcggtggaaggcccaacgcattaaagccgcatgagcgggaacagattgcgcggctattggttaaggggcatacccgccagcaactggccattatctacggtgtggggttatcgacgctgtaccggtactttccggtagatggtcagaggaagaatgacgcgataggattgtaa

SEQ ID NO: 432318 - DNA, 897 bp, Serratia marcescens
atggtagctgcaattaacacaggaaaagcctatacaggattccgtcccgcacttgacctttcagcatcgattcttgatccgcaagcattgtttgctagctacaagagccgcgtgctggcggacggtgggcatattcccgacgaagtaggctgtatcgaacggtttaacttccttttgctcaatgcaatgtttgagcgaactgttgtatctctgacaccggcctttggcatcaaaacggacagcgcaggtaacgttctgaccgtatataacttgctcggtgaggcaggcgatctgttggcagtatcaaaaggcacaccacctggccagatgctgtatgacgcatcgacccgttcgatcaatgttcaaattacgtctaacggtggtacctggctccaaagccggggcagtattgtgatgcagaaggccgcgacatatctcttggctggttgtatgagcgacagtaatagggctgacgctaatggtattacgttcggttacccaatctccggtctgcctatggcgtatatgcgaacgatgattacgaacaaccaagcgatcactgagtcttggcgttttggtactcgagattcaggctggccagcggctgttggtggcgcgttgatggttggagccacactgtatgaagactacgtgccagcggctggattattcgatgtgacatccggtgttatcaccggttatgaaaaaggtaagttcgcgatgaaaacgacctcgtcaacgggggcccttgcagacctgcgcgatcggacagcttccctagtagtcggtacacctggcagtactacaacgggctgctatggaacattcagggatatgttacacctacattcggcgtccgaagcggatgcggtgctcgcatctcgattgggtatttaa

SEQ ID NO: 432319 - DNA, 753 bp, Serratia marcescens
atgttccatattgataatgccagtgccgtggcagcgatgccgcccattcacccacaactctttacgcagcctcgatggtttactgaaggcggcgaaggcattgagccaacatatcctggtagcgattggttcaacatcattcaggctgaaatgctcaatgtgctgacattggcggggatcgcaccagacaagaccaaactggatcagttcgcccaggccattcgcctgatgtccaccgactacatgatgcccgtgggcattccctatccgtggccaggttcgtcggctccggtaggattcgcgttgatggtcggccagtcctttgatggtgcagcctatcccaaactggcggctgcgtaccctggtctgttcattccagatttacggggtaggacaatcaaagcactgcccgcatcgggacgcgctctgttgagctatgaagacgatgggaataaatatcacgcccacgggatggaaatcgacagcactgacctgggtgttaaggaaacctcaacagacccaggccatgaccatcaaggtggtgttgccgctcctggagcagtttacgcgccattttataccggtacggataacaccggcgactacagcaaaaacatgaccagttgggccggacagcatttgcacacaatcgttttaggctggcatggccataacggtcgcgtacttgccgacggcaacccggaaaccaccgtcaagaacatcgcatttaattacatcgtgaggctcgcgtaa

SEQ ID NO: 432320 - DNA, 585 bp, Serratia marcescens
atggctcacagcgtaacagaatggcaagacgtccttcagcaaaatatgccccgtggccgcgcctggccacgagatgaaactgccgatttaacggcacttataaagggtgttagccaccgtttaaatcgcctggaaatcaacgcggatttattgctggcggaaatgcgaccggaaaccaccgtgcagctccttcccgagtgggaaaactatttgggattgccggagtgcaatattcccaatgatgacttcctgactcgtagaaaggccgtggttgagaaataccaccggaaaggcggacttgctccttggcagatagaaaacgtcgctacggcgctgggattcactatagaggtgaagcaagtattgccgcatcactgcctgcgtaattgcatggcccggatttacccgaagcgctaccggtttttattggtcattacggtcaaggatacgccggtaaccagattcacggttattgaagatgtattgacgccgttaattgaatatcacacccaaatgctggaatgcgtattaacaaaatatcgcctggccggtacgggttacgaatatatatttgaggtggattaa

SEQ ID NO: 432321 - DNA, 1074 bp, Serratia marcescens
atgccctttaacgtgcaaacggttcgccaattaattaaaactggcgagcaagatattgaaattgaattagggacgaagctgccattggtaggtgttgaacgcgccatgaatatttcattcagcggtgcagtgcgtgacgtctacgattatcagtcatggatcgccgcgcaaatcgtcccctcacttgattctgatgaccagaccatcatcgatacagcgagccaggaaggcgtaatccgcaaagctgccacgtacaccaccggcaatgccattttcaaaggctccagcccgctaccgctcaacacggaaatgcagtcccgcacaggctacggctttcacgtcatcaagagtgtgagcacggtgaataacgtgcaaaccgtgacggtgcaagccgacgacgttggcgcagccagcaatcttgatgctgacacccaattaaccctggtttctcctattcctggggtggacagtactggcgttgttgacggcaatggccttaagggcggcactgatattgagccgatcagcgagctgctagaccgtctgttattccgcaaacgcaatccgcccgtaggtggtgctgtccacgattacgttatttggtcgcgggaaatggcaggtgttagccgcgcttgggcgtgggattcctggcacggcccggccaccgttggcctggcatgggtttacgatagccgccccgatatcacacccactgctgctgacagggctgcgatgaatgaatatctgttccgccatgcagacccggcgacgggtaattttgtgggtaagcctggtggcattgaggtgtggatcatctcgctgacgcttaagccaatcaccccagccattaagttggtaccggattcagcagagacgcgcagcgccacgctggctaacctcaacgcactgcaaagaacgctgtcaccgggttcgacgttgctgttatcaagcctgcgcacggctattggtacggccaccggcgtgacggattacaccctggatattaacagcgacatcaccagcgccagcggtgagctgattaccattggggatgtcacatggctcacagcgtaa

SEQ ID NO: 432322 - DNA, 450 bp, Serratia marcescens
atgaccatcaaagtaaattggcatttgcccgccggtggcgatattgagatagaacacaatggcctttcgcttgacgagggccttgtttctttagtgctgatttgcttgttcaccgattcccgcgcagatattagcgacgagttgcccgacggtaccgatgaccgtcgcggctggcccggcgattcgttcagtgatttcacctggggttcaaaactctggttaattgaccgtgaaaagctcaccgaagaaattcgcctacgcgccgaaaattacgccaccttatcgctgcaaccgctattacgttccggctatgcccgtagcgctcaggttattgccaccattccccgcatgaattggctggcgttgagcattgtgctcacccgccccgataagaccgcactcaccgtagaaataaagaaacgctgggaggcgatggaaaatgccctttaa

SEQ ID NO: 432323 - DNA, 540 bp, Serratia marcescens
atgggactgaaagaaggcaatgtcgcacgctctatcggcgccatcggtcgccgcctgcgtttgatggtagaccgtgctgtggtgcgtatagtgaccgatagcctggggcggcagaacctccaggtacaaagtctggctgatgagaccaacgatgacgtggagcgcttccagaactatggtcattcgtccgtaccacctgtaggttctgaagccatcgtggtcgctgtgggtggtcgccgctccggcctggtagccatcgctgtcgaagataagaaatcccggcccaaagggttagaccctggtgacaattgcttgtatcaccaagatgggcatatgattatcctcaagaaagacggtgtaatagaaataagggggaagacggttaatctggtcgctgaagaatcctgtgacattgtgagtaaactcattaatttcaccggccccaccaacttcagtgaagatattcaggttcagggaaaaagtttcctcgaccacattcacgaggatggcgacggtgctaatacaacgaaaccgttatga

SEQ ID NO: 432324 - DNA, 1086 bp, Serratia marcescens
atgagtgaagagttaaccctgaatgttgccggtaaaatctggggcggttggacagatatgaccattaaccgctccctggaaagcgtcgccggtgagtttgatctcaccatcaccgcccgctggtctactgcagcgccacgcgctatcaagcccggtatgccctgtgtggtcaacatcggcagtgaccgtgtgctgaccggatacattgatgattttattcccagctatgacgcggagaacgtggcaatgcgtgtgttgggtcgcgacaagaccggcgacctggtggacagctccgtggtggataaatccggccagtggcgcggccaaaagctggagtccctcgccgcgaccctctgcaagccctacggtatcgaagtcatcaacgaaaccgataccggcgacacctttagtggcatcaccctggagcaaggtgaaaccgtgttcgagttactggacaggttggccaaacagcgtggtgtgctggtgacttccgacgcctgggggcggctagtgatcacccgagcatcaacccagcgcgccggtgtagcgctggtactgggtgacaatatcctggccgcacgcggccgcttcagttggcagggtcgcgccagccagtacatcgtcaaaggctcggccgctgcgggtggcaccacctgggacgaccagccgacaaaagtggttggcggccgtcaggtggttgtgaccgatagcgagatcacacgttaccggccgaaaatcttggttaacgaagataatctgacggtaggcggtgccagtgcgcgtggcgaatggtacaaggccaggatgcaaggcgaagccaacaccactgagatcaccgtggccggttggcgcgagaacggcgagactggccctttatggcagctcaatcgcctggtcgttgtgaaggatgccatccagcaactggatgtgacctggctgattaaaactgtgtcattcatggagggtgattccggccgcgtcaccgtactgtcgttggtacccccggagtctatggatatcccggcagaaaaagcgaagggtaagaaaggcaagaaaaaggcaaccgtgggggcaacatgggactga

SEQ ID NO: 432325 - DNA, 1260 bp, Serratia marcescens
atggccacaatcaagtgggaagatctgcgtgatgcctctttccggggcgtacccttttatttcgtcgatgtagaaggcactggcggccgtcgcgcgatcccccatgcctaccccaaaaaagaggtgggctggacggaagaccacggtgccgttcttactcagcagcagattaacggtatcctgcttgggaacgattaccaagcacagttcaatcgcctgctggcggcactgaacacaccagggccaggtgagctggtgcatccctggttcggcgtgcagcaggtgcaggcagggaaagttacgcataagctcagcacggaagaaggcggcattgcctatgtttccttcgaggtattcgaggcgggtgagcagcttttcccaacccagcaggaagacacgacagccaccacgctcagcgcagcggatagcgtcaaagcggcgctggccaacggcgactactttgccgcgctggacggcgtcggcagcatggtggataccttgctggatgatttgcagggttttgtaaccaacctaccgaccttgccggatgcgttgaatgagtggatggataggctcaaccgcttcaaagacctggcgggcatcattgtagccacgcctggtgagttgatccgggatgtgaccaaccttatcagtgatgtgaaagacctggtgactgaggctccctgggcactgcaagtctatgaccagttacgtgctaaatgggacggtgatcgggcggcgcagtccgcaaccaaatccctggcggacaatgtcgcggtgaatgccaccaccggattcgccagtagcgtcacgcccacggcgttggtcgatattaccgacgcgatgagcgccaacatcgatgatttcaaactggtagtcgtgactgcggccctggtagcaaaggcagaaacagtggccaccgcgacgttccagaccagccaggaagcccaaagcaccggcgacgagttggctgaacgcctgggcgaacaggccattgatgcggtggagtccggccagcgagacctgtggcgctcgctgcgggatctgcgctttgctgtggtcaatgacgtgcgtattcgcagcgtccagttgccagagttgcgccgcgtatcgacccgtcagaccacgccggtgatgttgctggcctggcgcgagaccggtgatgcagaacagcgtgatgtgctggtgacccgcaatcggcttcggtatccgtcgtttatccttccttcccaggtgattgaggtggttggcgatgagtga

SEQ ID NO: 432326 - DNA, 1773 bp, Serratia marcescens
atggcaaagcgccttgataccgaaatcatcatcaacctggcaggcaacctgacggccaaggcccgccagtacggtgccaacatgtcagagttcgcccagcggaatcaacgcgccatgtctgtcgtcaaagccaccagtgaagccgctggacgtgggcttgaccggttgggaaaccgctatacggcggctgttgctggttttgccggtggtgccatgttgcgtgaatttactcaggttgatcgtcgcatgacgatgatgggaattgccgcagagaaaactcgcgcagaaatggccgcaatgctaagcgggatgcaagatgcatcaatcaaattcagggtagacgacagtgaagtggtaagtgccgttgaaaaagtcggcaccgtcacaggtgatatcgactttgggtataagaaccgcaatgcaatttcagcttctatcgcgggttctggcggctcgggcgaatccattggggggctgtttgccaactttacaaagttccagatacagagtgagcttgaagccataaaggcgatggatacgttgaatcgactgggtaaggaaggcgcttttgaactgaaggatattgccgaaaaaggggttagagccttctcaatgtacgcggccgcaggtggtcgcggagtttctggggtaaaagatgttggcgtagtgctggagtcagccattgatgcgactggtgatagggataccgccgccacagcgactgaaaacctcatccgtgacctgcaaaatcccaaggttgctaaagcattaaaaacaaatggcatcgacgtatttggtaaagatgggcgaatgcgagaattgccgacgctgctaagtgaggttgccaaaaaatccggcagcaaaggggctgaaaaacaaagcgcacgcttattaggtgcagggtttaaccaagacagtatccttcttatcagtagtgtcacgtcaggtaaaggcgcagagaacctcaagcgttatcaagctgttgtgggcgatgggaaaggcatcatggatgatgcggcttatgcagctaaagattttacctcagcaatgcaaagcctcaacaacgtctggaacaagttctccaccaaccaactggctaagccggtgcaagagctggctgacgcgcttaactccgttgaccaggataccgtccagaactggctggagatcggcaagaacgtggccatcgccacgggtggtctgttggtggctcgcaaggcattccagattggcaaaggtacctatgactttttgcgccctggcaagaaaggtatcccgtccggtatcgctgatgtgtttggctcaggggtcatgccggtgtatgtcactaacatgcctgggggcggaatgggtggcggcgatctcccaggtcttcctggaagctcggataagcccaagagcaatacgggcggcttgttgggtttggcaatgaataccgcaactgaagtggcctcgttggtgccgttccctaaaaatgatgaagagcgtgctgcattgctcaagcgtgccaaagaaaacgctgaccgttcaaccatgtgggacgatgttaaaaactggttttcgtcggctcctacctatcaagatccatcgccctgggcgtcgcttcagccgcaaaatcaaatgggcagttacccgatgatacctccccagctccagggcaagattgaggtatccgttaaggatgaccgggtgcaggtgaccagcgtcaaaatcaatacgccgggcgtgacgatgagcgcacaaaccggcatcagtaatgtggagcaggattaa

SEQ ID NO: 432327 - DNA, 384 bp, Serratia marcescens
atggccaagatgacagtgacattaattcacggcctggtcaccggcaaaggctcaccggatgaggcgacccacatggaagtggatctgcgtgaactgacgacccaggatgtggtggaatctcagttggcctctgagcgggtcgttctggctgataacggcaaggccgtcgcctactgttccgaagtcatgatggggctggagatgctgcgccgccaaatcgccgcgatcggtagcatccctggtccgctgagtctgaagcagatttaccagcttcatcctgaagacctgaagctgctgaccgctcgtgcgaacgagatggacagcctactgacggaggttagtcagcgggggcgagctgatgccgctggcgacggcgctcagtaa

SEQ ID NO: 432328 - DNA, 351 bp, Serratia marcescens
atgattttaggcatggcagccattcgcgtgaatggccgggaaatcaagaccaagggtacctcaacgttaaaccctggcggttttgcccgtacgatgcacagtggcggcggcaaaaactggggttactcgcgcaagatggcaaatccgtcgatccagatgaccattgcggccgcagaggatgtggacgtgattgagatcggcagttgggaaggcgttaccgtgatgttcgaaggcgacaatggtctgagctacatgatgaccggcgcagccgcagaaaacccagccacgctggcggaagacaacggccagattgaggtgacgttcatcggcaccaagtgcgtgaaggtataa

SEQ ID NO: 432329 - DNA, 1479 bp, Serratia marcescens
atgtcattaggctcaatccccaatgatgtacgggtgccgctggtgtacatcgagatcgacaactcgatggcgctggacagtgcgccggcacaacaacataaaatcctggtcattggccagcagttggccaacggtagcgccacacccctgacgcagaaccgcatcaccagcgacagtaccgccgataacctgtatggccgtggctccatgttggcggagatgctcaagaccctgcgtaaaggcaacagctacaccgagacctgggccatggggatcgacgccattgctgaaggaaaatcggccagtagcgcgttggttgtgacagggccagcaacggctgccggtacgttggccctgctggtgtgtggtgtaaccgttcaggttgacgttaacgcggaggcgactgctgccaccgttgccaccgcaattattgccgctgtcaatgcggtggtcaccttgcctgtcacggcagcggtgaaagcggacgcgcccggtactgtggtgttcaccgcgaaagggaacggcctgaccaccaacgacctggatgtgcgcgtcaactacaatgtcggcgaacagaccccggccgggctgggggtgacaacctcagcattcacgggtggtattggcacaccggatatggcagcggtcattgctgctttgggcgatgagtggttcaaccatatcgtgtgcccgttcaacgatgtggccagcctgaataccctgcgggatgaactgcttaaccgttgggggccgatgcgtatggttgaggcgattgcctataccgccgtccggggtacccatgcgcagaccggcacctggggcaacaaccgcaatgacttcctgatcacctcgatgggcactaacctggccccgcaaccggcttacctgtgggcagcagcttatgcaggccgtgcggcttattacctggccattgacccggcgcgtccgctccagaccctgacgttgcccggcatcttgccgcctgccaaagaggtgcgctgggatatggtcgagcgcaatctccatttgttcgacggtgtggccacccataacgtcgatgccggtggcaacgtctgcattgagcgggagatcaccacctatcgggtgaatagctttggggatgcagatacgtcctacctggatatcacctcaccggcgaccttgggccacatccgctacgtcattaaaaaccggttcaccaaccgttatccgcgccacaagctggctgacgattcggcgctggacaatctggagccggggcaacccgtcatgacaccgaagctttgcacccaggagttgctggatatcttcatcaccgagctggagccagccggactggtggaagattttgacgactacaaggccacgctcgacgtcaagcgtgacaccagtgaccgcaatcggctgaactttatgattcacccgaacatcattaaccagctccgcgttctggcgggtctgatccagttcaagctctaa

SEQ ID NO: 432330 - DNA, 219 bp, Serratia marcescens
atgatgaaaaccaagaaccttaagcccaaaggtgacgtgcgcgtacgcaagccggacggcacttaccttgccaccgagggagaaggccttttgctgtctgcctactggttgcgccgtattgccgagggtgacgtggccgtgagcgacctcgacaccccaaaaaccgaggtggctcctgtcgagtcagccgcgcctaaatccaccaagacggagaagtaa

SEQ ID NO: 432331 - DNA, 621 bp, Serratia marcescens
gtgagtgaagaacgcccaagcctggtaacccttggcagcacagtcgccgccgctgagcggattgtcacctggctgcaacaagacctggaaggagacaaccctgaccaggtgcgcaaagttgaacggcatataggccagttcaacacccccgatgaggttaagcggcacctgtctgatcgtaacggctccatccgcgtggcggcgttgcgggtgcgtgatatccggcatgaaggcggtggcaccgtggggttggtcacttgggtagcctacgtgatggccaccaattcctggggctacggccgtgacctgcgtgctgaggtaataaccggcaaggtgtgccgccgcctggctcaccccactgcggctaaaggtatgggcgcggagcgcaaggcgtctgacatttccgccgacaacatctatagcggcagcctggatgacctgggcgtgaccatgtgggcggtgatgtggcatcaggaatttaagctcgacgaagaaacggatatcagcgtgttacctgatttcctccgtctggggatgactgctacgccacaaggcggcgtccctgttattgaagccgttatccccgtgagaggacaggatgatgaaaaccaagaaccttaa

SEQ ID NO: 432332 - DNA, 543 bp, Serratia marcescens
atggggattcaggttgaagtcctgggcgctgcaaagctcaacgatatcaagcgagccatggagaagttggcggacagcagtctgcgcagcgagttgctggagagtatcggcgcggtggcggagtctcagacccgccgccgcattagcgatgagaagcaatcgccgacgggccaggcctgggacaagtggtctgacagttacgccaagactcgccagggaaaccagagcctgttgcaaggtaatggtgacctgctcgatagcgtgacctatgtcaccgaacgtaatcaggtgcgcgtaggaacgcctctggcgtatgggcgcacgcaccaggatggcttcagcggcagtgtgtctattaatgcgcaccagcgattgatcaagcaagcctttggccgggcgctcaagcaccctgtttggcagtccgtgaaggctcacacccggatgatggatattccacagcgtgaatggctgggcctgtcagcccagaacagtgacgagctgatgcatgtcatcggcgacttttggaaagaggtattgccgtga

SEQ ID NO: 432333 - DNA, 435 bp, Serratia marcescens
atgggatacgccacccgtgacgatttgatggttgcagacggtgattacgtttggaataacgccatcaaaaaaggaactgaccagctcgacgaagccgctatagcacaggcactggaggacaccgacgaggagatcaactcgttactgtcacgccggtacaagctgccgctggagactgccgttccccgcattctgatccgggtggctgtatccattgctttttattggctggctgaccgcgataaccaagcgaccgagctggtacgcaaacgctatgaagatgccatcaagacgctgaaagagatcgccagtggccagcgtgacctgggcttaccgacgttggaacaaccgactgaaggcaacagcggcaaggtcatcatgaccggagagaacacgcgcctgtttacccgcaacagcctgaaaggcgtgctctga

SEQ ID NO: 432334 - DNA, 534 bp, Serratia marcescens
gtgagtgaacaatcaaacaaagtgcagtcgcagcaagacggcaaggttgataagaaaaagggcaaagctgctgaagcgccggttattgcgccagctcttacgggacactatcagtcacttgtccagcccagtgcgccaccgcaaccggatgcggcagcacctgtgctgagtggcagtgatgccatcgtgaccctaaatgtttccgggacgcaactggataccgagcagctcaatcaagaccaggtcacgctgtctgccgttctgacactggaagacgctgacaaacctgctggcgttgaggtgttgttggttcaggccgtatcacccaacggcttttaccgtgccgggcagttctggccacacgaaggcgtccatgcgttcgtttgcgatgacccggacaatgataacgccgagaacgcggccaacatcggtgcgccattcatcagcgcagcgacagccgaacgcctgaaggctgagccgaacctccgtgtcacggtagtagaaaccgtcgtcactgacgccgagggggaataa

SEQ ID NO: 432335 - DNA, 918 bp, Serratia marcescens
atgccaacccctaatgcagaaattttgcacgcccttaccacttcgttgagcgcagcatttaccaccgggctgacgggtgttacgccgcaatacctgcgtattgccactgaagtgccaagcggttcggcgtccaacacctatggctggctgtcagatttgccaggcattaaagagtgggtcagtgaccgtcagctcgctgtactgagccagcagggttacaccatcagcaataagacctgggaaagctccatccgcgtgaagcgggaaaacattgaagacgatcagattggtcaatacagcgttattgcccgagcgttcggccgccaggtcagcgagttcccggacacgctcagcttcccgttgttggttgcaggcttcaatacgctgtgctttgacggccagaacttttttgacactgaccacccgatggcaggcggtacctatagcaacatcgtaggcacgggggccgagactggcgagccgtggttcctgattgatgagtctcaggtgctgaaacccatcctgtaccagaaccgccgtccgtttaaattcgtctcactggatgacctcaacagcgagcatacgttcctgaataacgagtttctgtatggcgttgatggtcgttgcaacgttgggtttggtttctggcaaaccgctgtgggttcgcgtgcaccgctgacagtcgctaactacgagaaagccgtggaagccctccaggggatgcagcgttcagatggaacaccactggggatccgtccaaccacgctggttgtaggccgaaaaaaccgcgctccggcgaagaaaattatcgacgccatgctggtcgatggtggtgattccaacatctattaccaggatgttgagattctaaacagcccgttcatcgtgacgcctgctgctccaccgtccggcggttaa

SEQ ID NO: 432336 - DNA, 957 bp, Serratia marcescens
atgcctgtaaataccctggcgctctgtttcgagctgccgtttgattcagttgataacaaactgccagagtggatacccatactgccgattggtgtgtttacggggcgcgatggtcgttcctgggtgaacaactcacccgaagcagtgattgccaagtcactgacaggcacgtttatccctttcgacattgagcacgcgacagaagtcaaaggcccgaaaggcgaaccggccccggcgcttgcctggattgaagacctcaagattgacggtgcctggatcatggcaaaagttagctggaatgctgacggtgccaagttggttcaggggcgttcataccgttattacagccccgcatttcatttcaatagcgaaggtcaggtaaccaagctgtccagctctggcctgaccaacaaacccaatttagatgtacccgcccttaactcggagaacaccaacatgaaactgcctgaactgattgcggtagcgttgggcctgggcgcagatgccaccgttgacagcggtgtcactgccatccagggcctgaagaacgcagaacaagtggcgcttaatcgcgcgaaagagcctgacctgaccgcatttgtgccgaaggatacttaccagttagcgctgaaccgcgccgagaccgctgaaggcaagctgaatgaccaggcggttaaagacgctgaagccctggttgatgctgccattgcctctggcaaggtggctccagccaaccgcgagatgtacctagccacctgccgcagtgaagaaggccgcaagcagtttggcgagttcgcccaggcagcaccggtgattgttaatgccgacccagccaaaaaggtgctgggtaaaaaagacaagcaggaactgaccgagaccgaagtggccatgtgccgctccatgggcctcaccgaagagcagttcctggccgccaaacctaaagccaccgaggaataa

SEQ ID NO: 432337 - DNA, 846 bp, Serratia marcescens
atggctgataaagtcctcgacattatccccaaagaggcgctggcctggttcaaggccaagacgctcaagcctggctttgactaccgtgatgtttggcgggaggaacacggcgcggcctttaccgtcgccaagatgacccagctcgacctgctcagtgacgtaaaggcgttggtgacccaggccctggccgatggccagaccttccgggattttcagaaggcgctggagccgatgctggtcaaacgcggttggtggggtgcgcgtgagatggatgacccgctgaccggcgaaacccgcaccgtgcagctcggtagcgagggccgcttgcgtaccatatacaataccaatatgcgcacggctcgaagcgcgggccagtggcagcgcatcgagcgcaccaaacgggcaatgccctatttgctttatacgctggggccgtcacgagagcaccgcgttgatcatcttcagtgggccaacatttgtttgcccgtcgatcacccgttctggctcacgcacatggggccgaacggctgggggtgtaaatgcggcgctcggcaggtcagtaaatacgagtatgaccagatggtgcaggacggtgtaacagccaccgatccggtatatgacaccaacggccagccgactggccaagtgacccgctcgaaggtaccgttaaaaacccaggcaccaccggtcaaaaatgtgaagtggctcaacaagcgcaccggcgaagaagagcttgtccctgaaggtattgaccctggctggaactacaatcccggcatcagtcgcaccgcttcgctggagcgccagctccaggctaagcagcaggcattcgacacccaaccgtag

SEQ ID NO: 432338 - DNA, 1578 bp, Serratia marcescens
atgttaaataagcttaccggtaccatccgtaatctgttcaatccagctaccggcgagaaagtcgcagtaaaagcggaagcgcttcaggaagaacagacccgcgcccgcgctactggtacccgccgagccaatgccggtatcagtgtggccagcaccgtcacgccgaagcggctggcgggcgtgctgcgtaatgcggctgacggtaacgcgctggattatttcatcctggccgaagagatggaggagcgagacctccattactccagcgtgctgcgcacccgcaaactcaccgtggcgggtatcgttccgacggtagaagccgccagcgacgatgcgcgtgatgttgagctggcagatgccgttcgggtgatgatcgagcggccgcaaatccctgagctactgtttgatctgcttgatggcctgggtaaaggtatcggggtggtggaaatcctgtgggatacctcgacggtgccgtggatgccacgtgactattcttgggtagatccacgcttcctcaagatggacgccgataccttgcggcaggtacatgtgctgaccgaggcggagccattcaacggggaaccgctgtccgcgtacaagtaccttatccatcagcctcgcctgaaatccggcctgccgctgcgcaacggtttggcgcgcctggtggccgtgatgtacatgctgaaatccttcacagtgcgggactggtgggcgttcggtgagaaatttggtttgccgatcaccatcggcaaatacggcaataacgccagcgccgaagatatccagaccctgatagatgccatcgcgtctctggcctccgatgcgggatgtgccattccttccaccatgcaggtggatatggttgagacggccagtcgccagggcggcggtgacctgttcaaaggcatggccgaatggtgtgacgcccagaccagcaaggcggtgctgggtcagacgatgaccaccgacaacggcagcagtcagagtcaggccaacgtgcatgaccgggtgcgaatggatattgccaagtgggatgcacgccaactggagaacacgctcaatgagttcctggtgcgtccattcatcatgctgaactacggcccccaggcgaactacccgaaagtctgcctgcgcatcaatgagccggaagacctgaaggccatggtggatgcgattatccctctgattgaccggggtatgaaaatccaggcgtcggcactgcgcgataaatttggcctggacgaaccggaagccggttccgatatccttcaaccagcgggaaaccagagtggttacgccatgctacccgccctcaaccgtgagcgcctggcgctaaatcgccagtccgcgccggatgatattgaccagcttaccgccgaggggatcggcgactggcagcgtgttggctcggccttcaccaatccggtgctggcgctggtcaatgaggtgagcagctacgaagaattcttggctcgcttgccggagttacaggccagcctggatgccagtgagtttatcgacggcctgacccagctttgtttccaggcacggggtttgggggatgcaagtgatggctga

SEQ ID NO: 432339 - DNA, 1569 bp, Serratia marcescens
atgttaactgccagtttaaacaccattacagcgagcattaccggtggggaggacttcgatgaaaatgaagtcctccttggttatcagcggcgttggatcgccgatgactcaccgttaaaaattgcggagaaatcgcgccgtactggtatcacctgggcggaagccgctgacggtgcgcttaccgcagccaaagcaaaatcgtccggtggcaccaaccacttctatgttggctccaataaagagatggcgcgtgagtttatcgacgcggcggcgatgtgggccaaggcctatgacctggcagcggctgacgtttgcgaagaagttcttgcggatgatgacaaggacattctgacctttgtcatttactttgccagcgggttcaaggttcaggctttatccagcaaccccagcaacttgcgcggtatgcaaggtaacgtgaccattgacgaggcggcattccatgagcgtcttgccgaagtgctcaaggcagcgctggcgcttaccatgtggggcgcgaaagtccgccttatcagtacccataacggtacggacaacctcttcaatgagttgatccaggacagccgtgccgggaaaaaacgttactccgttcacaccatcacgcttgacgatgcctgccgcgatggtctgtacaagcgtatctgccaggtgaaaaagcgggagtggagccaggcagccgaagaccagtggaaagccgacctgctccgcgatactgcaacgcaagatgatgcgctggaggaatattattgcgtaccaaagaacggcagcggcacctacctggcccgctctattcgagaacgtgcagcccgtggtacaggccccgttctgcgttttctcggttcggcggagttcaacgccttgccggaaggtatgcgcgcactggatatgcaggaatggttggaaaaaaccgtgttgccggtactaaaccaactccccaacaagcgccactcgctcggggaagactttgcgcgatccggtcacttgacagtatttgccccaatcaccgttaacgatgacaccacccgcacggtgccgttcctggtcgaactggctaacatgccctacaaacagcaggaacaggcactgtattttatttgtgaccggttaccgcgccgtgacgggatcaagttagatggccggggcaatggtaactacctggcggagcaagccgccgaacgctacggcgatgaagtggaagtcgttatgccatccgtcgcccactaccgtgaaaacatgccacgattcaaggctgcatttgaagatgatgaactggtggtgccaaagcacgaggatgtcgttaacgacctgggtcaaattgtcgtcttgcgcggcgtaccgggtatcgatgaccgggagaataccggcagtgatggccacaagcgccacggtgacagtgcctatgcgattttcctggcatttcttgccagcaaagaggactgccgccgctacgaacttcaccgcctcaataaacccgagcgtcccagtgagcgagaagaacgccgccaaatgcgcatcacccgtgggctgaagaaccaacgagggctactgtaa

SEQ ID NO: 432340 - DNA, 576 bp, Serratia marcescens
atggccgatgaaaagccgacccgtggccgtccgtcaaagattgacctgttgccggaaggcatacgcgatgcccttcacgggatgttgcgtgacaagcgtcacacccaggaacaaatacgcgaggccatcaacgagctgattgaccagcatgaactgccggacgatatgcagctcagccgcacgggcctgaaccgctacgccagccggatggaggccatcggctctaaaatccgtgcctcccgcgagatggcggaaatatgggccgctaagctgggtaccgcgccgaagtctgacgtcggcaagttgttgatggagtttgtgaaaaccctggcgtttgaaacctcaatgtcactggcagaagaagaaggcacagtggagccgaaggcgctgggccagcttgcccttgtggcgcaacggatcgaggccgctcagatggtcagccataagcgcgagaaagaaattcgccaggcatttgccgaagaaatcgcagccacgacggaaaaaatagtttcacaggcaggattgtccgcagataaagcggcggacatcaaacgccagatactggggattgcgtga

SEQ ID NO: 432341 - DNA, 285 bp, Serratia marcescens
atggccaagactaaaccctacaccgcctctgtgcggacattcctggaagaactggcgacgttttttgtcgcgtctgaaatcgaacgtgatgtgctcaagcccttcttagaaaaggaaatgggtaaaccttacagtgagattgtggagcaaggttacctggcgcaggtgctgagggataacccggaatccgaccgtgcctggaagacattgcagcgtgtcatcatcaaacgccgcaaaggcatgcttgcggcgcttgagcgcgaaaggagccagcatggccgatga

SEQ ID NO: 432342 - DNA, 288 bp, Serratia marcescens
atgcgagaaattcttgatagcgatcagcggctggtcatcctgcgttccttgctggaatgcggtgacagcgcgaacgaatccgtattgcaaacatgccttgaggcgtatggccacagcgcatcccgcgatgtggtgcgcacgcacctggcctggctggcggagcagcgacttgtcagcctgcgcgatgtggccggttgttatgtcgcgacggtcaccggtcgcggcgacgatgtggccaacggccgggccgtcgtacccggcgtcaaaaagccacgggcacgggggtaa

SEQ ID NO: 432343 - DNA, 606 bp, Serratia marcescens
ttggatccgataacaatttcaaccctcgcaggggtgttgatgaaggctgggccgtccgttctgcgctctgtcggtagctggttcggcggtgacgcggcaaaagcggcggattccgtggccgggattgtcgagactgtcaacaacgccgtcaatccgcaagaccagcagcgggtgttggagcaaaagctggcgcagttgccaccggaacaactcgtcaagttagaggggctgaaggtgcagttggaacagttccagcttgagcgagacaaagcgcacctggcagaccaacaggcagcacatcacgagcaacaggaaaccatccgcaacggtgatgattcagtggacgaatacgtccgccgtacccgcccgctgatggcgcgactgtcgctctacagttccgttatctatgtcctgctgatggccatcggtcagcaagcggccgccatcgctactgcgacgggtcacgccatgacaatgccggagccggattgggatattgccctgatgctagccacaccggcactcggctatctcggtttccgcacactggacgggttcgcccgctacagcaaatccagtaaacacaagctcccggtggtcaagtaa

SEQ ID NO: 432344 - DNA, 348 bp, Serratia marcescens
atgttaaaaatcattaattcgccctggtcagtgttggcgctgctggccctttcaatggggttatgcgcttccctggataaactcgcctttgggctgtggtggtgggtcttcgccggtgtcgtcatttgggttttggcggtcatgcaaaatgtggggcactacttcttctctctctttctgtcgtgtctctttggcggcatcggcgggatgttgattggcctgggggcagcttcagcctatggctgtctcggctgggtggggcttcctttgtcgttactgtcggttgttaccgcatttctggggctgtatcagcttaatcaacggggagcgctcatttggatccgataa

SEQ ID NO: 432345 - DNA, 228 bp, Serratia marcescens
atgggtaaaggctgggatgagtcattccgccatggtcagcgtgatcgccttaaaaaagaggtgcttcaccgcatggccaatggccccaagcctaccccggtggattaccgaggctgtgacggaactcatgccagcttttacaaaagaggctgggagtcggtcggccccagggatatcgcctgggaatgccagatttacaaggaaaaacaccatgttaaaaatcattaa

SEQ ID NO: 432346 - DNA, 582 bp, Serratia marcescens
gtgagccaattcaaccctaccccagcgtttaatcacgcgattgcttttgtccttggcaaagaaggcggttatgtcaatgaccccacggacaaaggcggtgaaaccaaatacggtatttccgataagcgtgacggcattgccgatggcatgaccgacgtcgatggcgacggtaagccagatacccgtattaaagagttaacccttggacaagccagccagatttatttccgcgattactggtatccctcatattgccctgattggccggatggcatttctctgatcgtcttcgattctgcggttcagcacggcgtcaaaaaagccatctcccttttgcaggatgcagcaggtgtagcggcggacggtatcgtaggtgccaaaactagggcggctgtattagctgccgatccggaatggctcctcactcgctacctgttgcggcgtgctcgctactacgccgaaattatcaagtccaatccctcccaggctaaatacctcaacggctggtttaaccgcctggacagcgtgaccaatgccgcctgggaagttgtcggcggttcggcctctgtggcgcggagctaa

SEQ ID NO: 432347 - DNA, 528 bp, Serratia marcescens
atgaaaattgcccgttgtccagtgtgtcactccgatctgcatcttgacgcattgctggaagatgacgctggccgtgaactgctggccgttctgaccaaactacccggcgcggctgcgaaggctatggtggcgtatatcggcctttttcgcccggagaaatcaaacctgtcgaactcccgtgcggtaaagctggttaaagaagtgctggaacagcatcatcccagccgcgttctgacccatgcattgagtgagaccgtcgagcgcatccgggccaagcgccttaacggcgataaaaagccgctaaacaaccaccgttatttgcttgaggtgtaccgaacctcagaacagatatttgcacaggccagcaatgtcgcggcccgtgaacgggatgaaagcagtcgtgtaaccgatcatgaccgcaaccgtgatgactacctggcccaaatgcagcgtatgggccaggacgtatctaaattacctggcggcccggaatggcttgagcgtactcaagggggtaaaaatggatga

SEQ ID NO: 432348 - DNA, 555 bp, Serratia marcescens
atggataaaccgcaacttataaggctgattcatgtggccaaaggaaagttgaaaatggacgatgatacttatcgcgtgttgttgggtaatactgccaatgggaaaaccagttgcagcaaaatgtcccacgccgaattagtgaacgtttattccgaatttcagcaacgcgggtttaagcgctcgtttaagaagactccaccacgcgttaaacccaattcaaaaggcaacccacgcgttgaggaaatttctaaaattcgtgccatctggttcgtcatgttccgccatggctttgttggtagcgacagcgagctggcattgaatgcttatgtgaagcgcatgacctcccagctcaataagggcgtgggtgttgatgaagtgggctggcttgatggctggttggcattcaaggtgctcgagtgcatcaagcagtggcacatccgcttaatgctggaatccatgctggcccggcataagccttatccagcaaacccgcgaacgggtttcgagtcacgggaatatgacgttattgttgatgcctatgaggacagcttatga

SEQ ID NO: 432349 - DNA, 213 bp, Serratia marcescens
atgactaaatcgaagtttatggaaatgaaagtatctttttttgtgaccgatgcaggccaaattaagcaagaaattgatgtgagctatgcacagggaacgaatacaaaagaattccaggatgcttacatggctggttttccagaaagccaaagaaaacttgttgatgccgtggttaaaaaacttggcggaaataaattaaaacgtattcactga

SEQ ID NO: 432350 - DNA, 1983 bp, Serratia marcescens
atgtcagaacaatggatctctccttcacagtgtatcggtttgttggggatgccaggcacattgcaaggcattcacaaaatggctaagcgtgaaggatggagttggagaaaacgtcaaggggttcaagggaatgctattgagttctcgattaatgctctccctccagcagccagagtacagttgttaaaacagatggggaatgttgttcttgctggccgtagctacaaattacaaaaccagcatgacacgtactgtcgcgaggctctttggcatcattgggaatcagctactgaaaagcagcgcttggcagcacagaaaaagaccgaagcaattcaggccgttgccacactggttgataccggtattgatgtagttaccgcgtttgatgccgtggccgagactcacgacacttcagtcgcatccgttcgtcgctggtactacaccgcccgtaagtttgcccgtgaagactggatggtggctctgttagggcaatacggcaaaagcattgaaacccgccgtaaaaaagaagctgattgcgatcaggaggcatgggatttcttcctggctgatttcctgcgccctgagcgcccggcactgcgcacagcctatgggcgcttggttgagactgcccaggctcgtgaatgggctatcccaagcctgtcttccatccgtcgcaagctggaacgcgaggttcctgttgagcagcgcgtactgctgcgcgaaggggaacatgccgccatgcgtctgttcccttcccaggagcgtaccgttgccgacttgacggccatggagtgggtgaacggcgatggttatcaacacaacgtattcgtgcgctggttcaatggtgaagtgatccgccctaagacctggatttggcaggatgttaaaacccgcaaaatcctggcatggcgtaccgacgtcagcgagaacagcgactcaatacgcttgtccctttccgacatgattgagcgttttggtatccctcgcaatctgactatcgataacacgatggcagcagcgaacaaatggactacgggcggtgttcctaaccgctaccgctttaaaatcaaagaggatgacccaaaagggattattcctctgctgggtatcgatctgcattggacaagcgtgttatttgggcgtggtcatggccaggcaaaaccggtggaacgtgcgttctctcatggtggcctcggtgaaactgtcgataaacacccagcactggccggtgctcataccggccccagcccgatggataaaccggacaattacggtgaccgggtcattgaggcagaggattttctgaaggtactggccgaggggatcgcgttttggaaccgtcagcctaaccgtaataccgaaatgtgccggggcattctgtcgtttgatcaggcattcgaggaaaactaccaacaggccactatccgcaaggcaacaccggagcagcgccgtttactgctattaccagccgaagccgttcgcatcagcgaatccggcacctttgtgatggaagctggagggaaggttcaggcccgcaaaaaccgttacttcagcgagcgcctgttgggtgtcaaaccaaacaaggttgtggtgcgtttcgacccgcagaacctgcatcagagcgtcctgtgttacacgctggatggccgctttatctgcgaggcaacctgtatcgagaaaaccggctttggcgatactcaggcggctcgtgagcacaaccgcaaccgcacccagtttgttaaacgcaccaaagaagctgccgcagccgccaagcgcatgtcagcactggaagccgccgagcttatgccagaaaccgtaccgccagccccgccagaatccagggtggtcgaaatcttgcgccctgtaggtaacaccatgcggcggcagattgtggaggaagagattgaagacgacgaaaccgaagacgcctttagcagtgcagtgagccagctatataacgcatttcagaataaacagatttaa

SEQ ID NO: 432351 - DNA, 273 bp, Serratia marcescens
atgcatggcaccgtcgacagcgtggcggcggcggtgaacaacagcagcagcacggtgaacaacaaaggattagcctcgatcgacagcaacctggagtgggtgcgcctggcgcagcgcgtgccggtgaagatcctgctggacgccaaggaccaacagcatccgtacccggccggcaccaccgccaccgtggtgatcgtcggcaagaacgatcgcaatgccgacagcggctcgccttttgtgcgcctgatgcaccggctgcgtgagttcggctaa

SEQ ID NO: 432352 - DNA, 363 bp, Serratia marcescens
atggatgatggcatcgagaaagccattgattggcgtggctcatcgctagaggatttgctggccttcccaatcgatgcgcgaaaagcggcaggatttgaactgagtaaagtgcaaagaggtctggaacccggtaattggaaaccgatggccaactgcggaagcggcgttatcgaaatccgtttatatgccatcggtggggcattcagggtggtctatgtggcaaagttcagcgaagcgatctatgtcttgcacagctttcagaagaaggcggagaaaaccagccgccacgatattcagataatcaaagcgcgttatgacgcggtcattaatgagcggagtaaaggtcatgaccaagccgattga

SEQ ID NO: 432353 - DNA, 1194 bp, Serratia marcescens
atgggtaacagtaccagaaatcagtacttgtacagacacgaatccggtatttggatgtttcaaatagcagtgcctcagcatatgcggcatttaacaaatggccggaggctgtttaggaaaagcactggtcagcgtgacgtccagaaagcccgaacagtgcgcgaccgcttagttgttgaatggaaccaagtaaaagaaaaacacgctgttgataccgaaactataacgttaaatcgcgccatcaatgcagtacagcgactaggacaagtatcagcagtgatctccggcaaccgggtaatgcttcaagccgttatttccgaatacctggctgaatacaagaaaacacgcagccctagcaccatcagtaagcacgctctagcagtgcgactcttgctcgaacatttaaccgttgctgataccgagataaccggcatcacccgcacatcggtaacacagttcatccgcacgctaaaatccaagaaatccgcccagacaatccagaactacctgtccggcctgaattcggtatacgagtacgcccgccgctgttatgacggcatccccgccgcttcaccattcacaggacatcgtcttgaggcgaagcggactgttagcagttatcagccctttactcaggcagagattacaatccttctcggtcatgccgaggaagaacttcatgacgttatttttattggcctgtactcaggaatgcgtttgaatgaaattgcctctctcagtgttgatgatgtgccggaaatcaacggtgtacagtgcttccgtattcaggcagccaaaacaaaagcaggcgttcgattggtgccaattcattcttctttggcaaacatcatcgagaagtacaaacgtttgaatgctcaggggcagcacgggcggtacttgttgccaaaagcaaacgccatcaagagagcagatgccaagcgcgggccgtggttcagtcagcaatttacccgcctacggaataaggtactgccgaacgccacagatcggcagtgcttccacagcctacggggaatgttcatcaccagtttggacaggcacaacatagacgacagccggatagccgcgcttgtaggtcacacacagcgaaccatggcgaaacaggtttatagccaaggggttgagattgaagagttaagtaagatcatagagttagtgaattatcagggcttgtag

SEQ ID NO: 432354 - DNA, 207 bp, Serratia marcescens
atgcagcgccggtgtcacagggcgctgcccctgcccagcctgtacgatagcggtgagcagttgaatctctcttttcaattcaagttgttcccgcaccaattcagcgggcacgtactggagttctcgctcagcggtgtacccaaatcccaaatcggtaacgtcacgccaaccggtatgaatatgaacctcatagttcattggctgtag

SEQ ID NO: 432355 - DNA, 579 bp, Serratia marcescens
atgaactccaatcttaaccctttaccgaacggcaagcaccctagcaatcgcgaactccagctaatgcggctggggtacgccgagtaccagccccgcctgagaagcatccagaagaataatcctgagcgatatgcagccgtgatggatggccgtaaacgcttttaccagcatgggtggatgtgtcctacctgtggccatagtgagcgttacacgcggaatctagcctgcgctttctgtgccgggcaacgcatcccgttgtgtttcacgcttatcaatggcgtcggctcggtgtacacgccactgtctgaggagcgttcagcagagtatcaagcccgtaggcaggcgctgatgtatcaacgtgacctaagagacagaatccgcaagctcggggaaatccgttgtggggactgggtatttcgtgacggtgacttcctcggggagaacctggctggtgtggctgtggttatttctgtgcatgaatctgacgccttcaccgttcgaaacctatgtaaacaagaccctgcctttaacgctatctgggggcacgtacacgccgagctgcggctccccctaccttag

SEQ ID NO: 432356 - DNA, 942 bp, Serratia marcescens
atgaaaacatcaaacaaaacccagcgcgtcaccgttctgaatgtccccggtgttttgtccccggcggaagcagcaaaggatcagagtgaggcaccaccgaagcggggcatgcccaccgatgcccatgaggcgctctcaatggatcgtggtgcggttacagctgttcttgggtacgctggtaccgtgcaggctgcggagacgatccaggatcttcctgagccgttacaggcggtacggtaccctgacgatgaattatccttccagtaccgaacaagcgcccgttcacgagttgcgctagacgtccgagatattacccgaggttggcatgttcaatcgttggcggatatcgattctctacttgggattatcggtgctgagctggtgaacaagatgtgccgtgagaagcgtgaccgcattcttgaggctgagcgtgcagcccgtgccgctgcctcagagaagctggctgctgattataagtctgtggctgatggattcatgcacctgcacgccctgcgtaagcgtttcagtgaagctgaggtgcagtcgctgctggatatgctagctgatgggaagccgaacatggcggctcagatggccggtaccgacttaacctgtgtactccctgccgtgggggctgactatcgtaccgccgctggtgcatgggctgagcaaactcaagtcccggctggttgtacctttaacttaccagtccgggcagaccagacttcgtatgatgggactagctttaatatggctgtgcagccgggcggtaagtggattctgagcgtgtggacggactcgggctggtatccgattcaggcatccacagcggcccgtacaatcgctctggagcagcgtgagcagattaaccgggtgcgtaacattcaggcgcgcggcaagccaattctgggggaggtgttcgctgatgaactccaatcttaa

SEQ ID NO: 432357 - DNA, 387 bp, Serratia marcescens
atgtccggcaatttcaattcaatgtttaaaccgagaagcaacgtatcaaccagcttcaaccagcactaccaaaaggggccacaatcggtttcccgctccagtggttcgggggtatctcgatctagcggcggtagcagcagctttaatcatcaggagcgtcagatgttgcatgaccttggccggcggatgcgtggcgcgaacacgaaccagcacggtgtgtaccaacaggccgttgatgagttgataggtgaccgtgaattaaccgcggcggatgcccgcatgatagccctgtacgccaagactggctcagccgatgggcgcacgggtagcaccgaggagggcgcgaagtggggcgaagtattggaagccctgcgtgacgttgagtaa

SEQ ID NO: 432358 - DNA, 786 bp, Serratia marcescens
atgttcgaagaaatggatttacatgaccagttcggcagcgacaacacaccgccagacctgaataaaatggactctatgaactggcgcatgtttcaaagtggctgggtgccgtcggctaacgacctgcaagcaccggcaattaagcaattgtacgagcgctaccgtacaacacattcgagttctgatatgaaagcggctgtggcggacaagctacgcgcagaggctactatccgtaagttagcaatgcagaacccgaaccgcgttggcctgaaacagtcacaagtgacctctgccgttaaagagtcgctggatgcctaccacacgggcgcgcctcgccccagcatcgatattgttcgtagcctattacccggaaaggatgttaagccagtgatgagccgaccacagcaacgcagacgtttaaagaaagggttacgcgccaattcagaccaccccgcagttgttaccgctcaaaagcaagggaaccctattcgtatggatgccgacactatcagttccggtctacagagcctccagaatgctgctatggttgttcgtaagctgaatgaccatgaacagcgtatgcaggacatggaagcgcgcctaaaagagctggaagcgttcaaggatagcaccgagaaacggcatgctatcgaggatgcagggcagacgccagaacagcgcgtcgtcgagttacgcaagcaaggacttggctacaaagctattcagtcggcaacgggcatttcacagagcacagtccgaaactgggtgaaagcccacggcctgtaa

SEQ ID NO: 432359 - DNA, 555 bp, Serratia marcescens
atgagctctaaaatcttcgggtatgcacgtgtatcaacaagagatcagaatcccgaccgccaaacactagcgctggttgactgtgatgaggttctactggacaaggtaagcggaaagaacaccgaccggccagagctgactaaacttcgtggaatggttcgtgccggggacactgtacgggtgaagtctgtagaccgattggcacgtaatacaaaggatttactggatctgctggaagagttcaccgcgaaaggcgtcagtgtgtcattcatcgataacagtatgacatttgataatagtccgaccagtaagtttatgattactatgctgggtgctgtgggcgaactggagcgcagttttattcgacagcggcagagtgaaggcattgcagcagccaaggagcgtggagctttcaaggggcgccagaaggatgatgaactgcgggagaaaatacacagatatatccggctaggcacccatagtaatgatgacattatcaagctggttggttgtggtcgggcgaccttttaccgtatcaaaaaggaatttagttag

SEQ ID NO: 432360 - DNA, 834 bp, Serratia marcescens
atggatattcctttcccatttgtttacaagttttcagcgttaaatataaactctttgtcagctttatctgaggggaaagcatggttctctaaactctctgattttaatgatccttttgaagggcaatttattgtaactccaccagacttaaagagagagcgtgaaaaattttttgagcacatgactaagaatataccaagccaccccttaacaatatcgccagctgaggttgtacggaaaaggtactttgattcgccagatgaattcgaaagttttgtgaataaattagtagttgaaacccatcataaattctatgaaagctatttaaatataggggcttattgtctagcaagtgatatacctggggttgatgcatcccatgttagtaatgttatgatgtggtcgcactatgctgatggtatgaaagggttttgtataaaatacaatccaaacaaacttatagcatcgttaaatgaaagtaacgacgaaaagttttactgggcaaagattgaataccaagatgacaaacacatcgtggactattacgatttagtagacacatcaaagcacgcgacaattagagctactcaaacaaaacatacgggctgggagtatgagtatgaatgtcggttgcttgttaataaccccgggctttataaatactcacatgatgctattgagtgtatttacatcggcagtaaaatgcctgttccgcaccaaaaaatattacttgatatatgttcggttaacctgccggatgtggacgtatttaatgtaagaacacatggtaaagcttacgctgttgagttgggacgatatcaaaaatataattaa

SEQ ID NO: 432361 - DNA, 2115 bp, Serratia marcescens
atgacgattccaacgccaaaggtggcactttctgatggttttctgggggcttttgcgcggattcctaaagcgcagcaaaaaaaggtccaggaattcatctccaagttccgccaggatccgacgagtaatgggctgaactacgaaaagatccacgatgcacgcagcaataatgtgcattctgtgcgtattgaccaaacctaccgggggatcgtcctgaaacctgagcagggtgctctgtatatgctgatgtgggtggataagcacgacgaagcctacgactgggcgcggcgacacgaatgtgcgattcacccggtaaccggtgcgattcaggtgattgataccagctatatcaaacctacccccgagccgaccgttgttgataaacccaaactctttgctgcttatacggcagagcagatcctcgcgctgggcattcctcctgtgtttattgagcaagtgatggctcttgtagatactgcagggctgaatcagctggaaagtgtgatgcctgcggaagcctgggaacccctacactggctggcagaaggtctggattaccaggaagtgctggaggagtttaacgatcaccatgatgagcctgttgataccaacgactttattgaggcaattgagagaagtaaacgtcgtttccatgtcgttgaaaatgaacaggagctactgcaaatgctcaatgcgccactggaaaaatggcgtgtattcctgcacccgagccagcgaaaactggtggagtcttcggcaaatggtccggtgcgagtattaggtggtgcaggtacgggtaaaacagttgttgcgatgcatcgtgcacgttggttgtcccaacgcctggccgataaacccggtaaaaaagttctgttcacaaccttcacccgtaacctggcggcggatattcgcgccaacctccagcgtttgtgtagccgtgaggagatggcgcgtattgaagttgttaacattgatgcctggatgagcgagcagcttaaacgccatggatatgatttccgcgtggtctatgacagcgatgaagggcgacgtaaatgctggaactatgccttgcagcaagtccctgctgaattgggattaccggataacttttattctgaggagtggcaacgtgttgttcagccgaatgcggtttacagccgtgaagaatatctgaaggtgagccgtgttggtcgtggcacggcgttatcccgtattcagcgtgcgaaaatctggcctgtgttcgaagagttccgggcacaaatggcgcgagccaaactgcgagagatgggtgatgccatgcatgaggctatcattctgtttaaagaaaaacaggtgcaattgccttatagcagtatcgtagtcgatgaagctcaggatataggcgcaccggcctttaccctgattcgtagcctggttccagagtctcctaacgatctctttatcgtgggtgatggacatcagcgtatttaccgcaataaagtcgttctgggtcagtgtgggattaacgttcgaggtcgccgtagtaaaaaactgaaaattaactaccggactacagaagagacgcgacagtttgctgtcgggttgttaaccggagttaaggttgacaacctggatggtgaaactgatgccagcaacgattatttatcattgcttcatggtgaaaaacccatgattactcatgcttcagattttaaggaagaggctgagacgattatcaagcaaattcaggcgttgttagccaatgatgtccgttcccaggatatctgcattaccgctcgtacgaagcatgcttacgagcgttatgcttctgctctgaatgatgctggaatcgagacctataatttaggtcaggatagtggtgatagtgatcaacgccttggtgtgcgtatggcaacaatgcaccgcattaaagggttagagttccagtatgtgttccttgcgggtatcaacgatggcgttgtgccggaagtgaaagccatatcatctgacgatcctgttgaacaacgtgatgcattatttaatgaacgtgcgctactccatgttgcagcaacccgtgcggtaaaagggctgtttgtttcttcatacggtgtatctagttcattattaaatttataa

SEQ ID NO: 432362 - DNA, 6342 bp, Serratia marcescens
atgctgccttccgttgttagtcggcaggttgccgacagcgttgcttcctttttacgggctgcctttccgcttaacagcccgctgtttaacggtgaagaaaacaataacgtctcgatgctggaacaatttctgtcccagccggaaacgttgctgaaaggaccgtatctttccgctcagctgccgtttcgtaaaagtgatttacccctgaacttcttccctaacctgacgctgccattcccaccacatgcgcatcaggcgcaggcgttccagcgcctgggtatcgagatgcctcagccgacgctggtggcgaccgggacgggttccggtaaaacggaatgttttatgttcccgctgcttaaccattgtgcgggggcatcagtggccggtgttaaagcgatcatcatttatccgatgaacgccctggcaaccgaccaggccagccgtttcgccaaaaccatcgccagcgatccgcaactgcatggcaaagtgaccgtcggtctgtttgtcggcgacagtgaaatcgagcccagcaaaaagatgtcttcggataaagtcatcacctgcaaacataccctgcgtgagaacccgccggatatcctgctgaccaactataagatgctggattacctgctgatgcgtcccggcgatcagaagctctggcgctataaccagccagggtcactgcgttatctggtggtggatgaactgcatacgtttgatggtgcgcaggggtcggatctggcctgtctggtgcgccgcttaaagcatcatatcggtgtcgatgacaagcgttttgcctgtgtgggaacgtcggctaccgtaggtgacgaactggggcaactactcgattacgcaaaaacgatctttgatcagccgtttagcgatgacgcggttattcgcgaagatcgctacacggcggcagagtatctgcaaggttataccatcgagtacagtcagtatccgggacaggatgtcagcgcagcgctggatccgcaaacgtacgccagcccggtagattatctgaacggacaaattccgctgtggttcccggatagttcactgcaattacctgccgatctggacagcgatctcggacgtgaaaagcgtattgagttgggctcattgttacgtcgccacagcatcctgcacgtactccttgaggatttgcaggggggaattttgtcggaacagcagtgcctggaaaatctccaggtgatgctggcggaaagcgccgggtatgcgacccgcatgctgcaaagcattctggcgctgattgcccaagcgcgcctggacgttccagaaaaacaggaagatcgggaaaaacgcctacaggcgaataaagcacgctccgttctgccctttgtgcagctacgttctcagctgtggttgcgcgagatgcgccgcctggtcgccagcgtgtcaaaaacacctgagcttgtttttgctgatgatgtcgcggtggaagatcgcgaacattatcttcccgttattcactgtcgtgactgccatgctaccgggtgggcgagcctgcgccatggtcagagcgttcaactcgaaactgatctggacggtatttatcgtcagttcttcgaaaaaggccgttctattgtactggccttcccggataacaacgataaacctgtcagcggtgttcaccagaagctgtgcccttcctgtttaaagctcaataagcaatctaacgtgcagtgcgggcattgtggccatactggtctgctacaagtacttatcccggatatgctcaaagagcgtaaggatgagctggaatttgccaacgaatgcccgtactgcaacagcaaacagggtatttcgattcttgggtcacaggcagccagcctgtcggcggtgatgatccatcagctttatggcagccagttcaacgaacataaaaagctgattacgttttctgactcggtacaggatgccgcacaccgcgccagtttctttaccgcccgaacctggccgttgatggtacgcggacaaatcgccagcgtgttgggtgaaaaagaaacgttaccgttggatacctttgcggcacgcgtctgccggcagacgcgtgagcgttcaccggatgatgctcattttgccgcgagcttcatcgcgcccaacatgcagtggatgaacgattaccagacgctgaagaacgaaggcctgctggcagagagttccgatttaccggagctggtttctcttcgtctcgactgggaggtatacagcgaatttaccctacgcgcacgaattggacgtacgcttgaggccacgggttacgcagctgcaggaattgatattgtgcgtttcaattcagcgataacggtgcttcaccaacagcttgtcgaagagctgggtgatgaaatggctggggtcagcgttgagcaggtggcacacctggtgattggcgttctttggcatcagcggcaggcgggagctgttctgcatccggcgttcgaaagttatcggcgtgagggtaagacctttatgatgacgcagaaggagcgaacttcacgctatatgccgtctattggcccgaaaacgcgtaaacctgcctatgcatcatttgaaaaaataaatggcttccatcgactgattggtgcgaaatccaaccccagctggtatcagcattggatcaaccgcacactcagcaacggcaataatctgtttatcagcagcctggcagagacggttttacgacgtctgtttgcgacactgaaaatggcggggttggtaaaagtctttgacacaaaaggcaaagaagcttgggggctagtaccttcagcgctggtagtgagccgagatgttgttcagctaaactgctcttgctgtcgtgaggttgttcgggcaccggccgatcaggggtggcactggcgaaacgcgccatgcctttctctgcgctgcgaaggccgctatcaagaagctgaaaatacagtgacctggcactgggataatatggacatcgctcgtgttcagggggcagagcataccggattactgagccgtgaagatcgtgaggctacggaacaatcgttctaccgcggtaatcagccatggaatatcaacctgctttcggcaacaccgacgctggagatgggtatcgatgtgggtgacctttctacggtattactctgttctgttccacccgcacaggctaattacttacagcgtattggtcgtgccgggcgtaaagacggcaatgcacttaacatcacggtggctgaggggaacccgcacgatcagttcttctttgaagagcctctggagatgatgcaagggcaggtacaggcccctggtgtgttcctgaacgcaacggctatcctggagcgtcagctggccgcattctgcatggacaactgggtgaaaaccggcgtcccggcatctgctatcagcaaaaacgtgaagcagatgctggacgagctggagtttggacacaagtctgggttcccttataacttcctgcgttatattgatcagcatcatgtgtatattgctcagcagttctcatccatcttccctgatcttacggaagacactcgtctacagttactgtcatatttgcaaggggcaccagggcagcgttctctggttcaacgtatcgaacaagcattaaaactgctggtggaggatcgcaaatcgttgcgttcccgaattgataaactcaagcgcagtatcgacaagctggatagcgacccgcacgatcaaaactttgacagcgatatgcgcgagttgacttcggaacgtcaggcgctaatgacgctggtgaaccagatcaataacaagcaaacgcttaatttcctcaccgatgaaggattacttcccaactatgccttcccggaggccggtattacgctgcgttctgtgctgtggcggcgcaaggacggtggggaaacgcgtgagtatcagaacacgacctacgaatacgaacgtccggcttcaacggcgctggctgagcttgccccgttgaataacttctatgcgggtgggcataaagttgaaatcgaacagattgatctgaaagtgtctgagcctgaaaactggcgtatttgcagccactgtaactacagcgagaatatcgatcagactggcgatcagcataaatactgtccaaaatgcggcacaccaggttgggctgatgccgggcaaaaaacgacgttactgaagcttcgtcaggtttatgcccgctcaagcgcgcgtgacagccagatcagtgatgagagcgatagtcgcgaaccggcattcttccagcgacagctactggtcagcttcgaaaaagaggatgtatcggccgcttatgctattgatgaaggagaaatcccgtttggctttgagtttttgagcaaagtgactctgcgagatatcaactttggcaaaatggcggatgatgccaatgagctgatgatcgcaggagaggcaaagaaacgcaccgggtttaaagtttgcctcggctgcggcatggtgcagcgccctcgagatcatgaaccacgtcatgacctgagctgtaaatatcgcgctgaacccgaaaaagcgaagtttgaagattatctctacctttatcgccaactggaatctgaggcattgcgtatcctgctgccagtgaccagctacagcaacgatcgcgtggtggaagcctccctaggggcagccattcagcttgggcttaaacattacttcaaaggtaacgtggatcatctgaaaggcgtggtgtatcgcgagccggaaaatgagggcgaatcctggcgtcagtatctggtgatttacgacaccgtaccagggggaaccggctcactcaaagaattgatgcgtacacctgacaacctgctgaaattacttgatctggcctacaaggcgctagtggaatgcagctgcaaccatgatacgcataaagacggctgctatcgctgtgtttacgcttaccgtgaccgcgggcgtatgaagtatgtatcaagagatcaggcgcgtctcttactggcgaaaatcctgaaggccagtgctgctatacgcgttattgattccatcaaaaacatttcgcttgatgccatgatggggagtgaactggaaaaactgttcattcactgcctgcaggataacaaaaatcttctcgtgagccggagttatgcccatcagaatgcaggctggattattaatacccgtacagaaccggcgatgagctggcatctcaaagcacaggttgatttaggggttaaagaaggagtaggcatccttagccgaccagattatgtgctctatcctctgatgcagtcagaaaagataaaaccggtagcacttttcctggatggttttgcttttcataaagatagcgtgtcggatgatgtccaaaaacggcaggcgattaaagacagcggtaatttttgggtatggacagtgacctgggcagaccttcaagaacaaggtattaaacatgtacagaatgttatggggcttggtcataacccggatatgaaacagcctaagttttataacccgttccatgatacaaactttgctacgcttgaaggttcattcagggagagaaacagttttgcactgctactcgattatctctctgatcccggtaataaaactctgctatggcagaaaatggctgctgcctttgcttgggtgtggctggatcctaaaaagtcgcaggataccggagccaaacaaaagtatgcctatgaaatgcaggagaacgctcccgcttatcggttgaatgcacttttgcctgatgaaccatttgtatttggcggtttactggatagctgtagttcatcacaacagttcattgagctggcagctgttgtaccgcaacaagccattaaatcaacgacaagcattgaacaaatgcgaaattggttgaggctgcatatttgctttgacgatcgttatccccaggataatggctatgaagccggatttaatggtttctggtggatggtgaatttactgcagttcctgccagatatgacattcaccagccgtaaagcggtccatttaccgcagaagcctgaagcggtaaaaatgcagacttcggtggtagtggatattcagcctgacgagagctgggcggatatacttgagtttggtttattgagcgcagaagaaatcgctttgcttcagtcgttatcgcttccggcaccgacagtcggatatgaattacaggatgacgatggcgaaattattgcggaagccgatctcgcctggccattacaaaagcaagccctgattatcgataatcagagctttactgctttattcgaaagtaagggttggcacgttgctttcgggccaattgacgaaaatacattgcagcatctgtccggaggtgacaaatga

SEQ ID NO: 432363 - DNA, 4920 bp, Serratia marcescens
atggcgctggtcggtattaataacgaaaacgagttttactctaaccactatctgggcgaagtctttaccagtgacattcgcgatgtactggaaccctggattaaccaggaaaatgccgctcgcgaagctgaacgtgctgcccgtgaaaagggcaaagaggttgaggcgggctaccgcgcaccgtggaaccagctttacagcctggcgacagagtttttccgcaaactcactgaacatgagaaacagcgccagatcccacagcgtcttgccgatcagcgcagtcgctggcagccgctgttaaaggcattgggttatgaactcaatccgcatattcagatgctggatgacgatacgcctttgccggtactggctcgttacaacagcaccgacggcagtccgtggctgtggattgttgaagcgcatgatcaggaagaaggaacgctggatccgctggcgctgtcgttactgaccgcgcagttcccggcagataccgataaacataagcgcgacagcctgcgtaaaaaagccaacggtgaatatcgcagctggcaggatctgctctccacggttgtcttcacacaaaatgaaccgccgcgttttgtgctgctgcttggcaaccgccagctgctattgctggatcgtactaagtgggcgcaaaaccgcctgctgcgctttgattttgaagaaattttaagccgtcgtgaaacggatacgttgaaagccacgtcggtattgctacacaaagattcgctgttgccaggcagcggtgcgccgtacctcgattcgctggatgacaattcgcacaagcatgcgtttggcgtgtcggaagatctgaaatatgccctgcgtgagagcattgagctgttgggcaatgaagcgatgcgttatctcatcgacaacgagctggcttattataccgggaaacgtgctattaacccggatgagttgagccgcgaatgcctgcggtatatgtatcgtctgttgttcctgttctatatcgaagcgcgcccggaactgggctatgcgccgatgaccgccaaaacctatctacagggctacagcctggaaacgctgcgcgatctggagatgatcccgctgaccagcgaagaagatcgcaacgggcgctacttccacgatagcctgaatatgctgttcaaactggtgcgtgacggctacagcggcggtgtgaaaatgcagagcgacctggagagcggcgaccagatcactattcacagccatcagttcagcgtgccgcgtctggaaagccatctgtttgaagcgaataacacccgtattcttaaccgtgtggtgttccgcaacgaaaccctgcaacaaattattcaggcgatgtcgttaagccgcccgggtaaaggacgttttaatcgccgggggcgtatctcctatcgccaattgggtatcaaccagttaggtgcagtgtatgaagcgctgctctcttaccgaggattctttgccagtgatgacctctacgaggtgaaaaaagccggagaagagtttaacgaactggaaacgggctacttcgtcagcaaagacgagatcggcaaataccacgacgacgagaaggtctacgaaaaagacggcagcctgcgtattcaccgtaaaggcagctttatctatcgcatggccgggcgcgaccgcgaaaaatccgcctcttactacacaccggaagtactgacccgctcgttagtcaagtatgcactgaaagagctgtttaaagagcagattgatccgattaccgatcctcatgccaaagctgatgccatcttaaacctcaccgtatgcgaaccggcgatgggcagcgcagcgttccttaacgaagccatcaaccagctggcggaagcgtatctgttccacaaacagcaggcggaaggtcgccgcattcctcaggatcgctacacccaggagctgcaacgggtaaaaatgtacattgccgacaacaacgtattcggcgtggacttgaacccggtggcggtggaactggcggaagtgtcgctgtggctgaatgccatcagcggcgatgcatttgtaccgtggtttggctaccagctgcactgcggtaactcgctggttggcgcgcgccgtcagatgttcaacaagagcgagctgacctacaaaaaagcgaaagatccgagctggcttaacagcgaaccggttgaactggcgatgaatacgccgcgcgaagagaagcagattttccacttcctgctgccggatagcggtatggccaactacagcgacaaaaccgttaagcagcgctatccggatgatttcagagcgctggacagctggcgcaaagagtttaccaaaagctttgcactgcatgagattgccgatgtgcagcgcatcagcggcaaagtggaaacgctctggaacacgttccgtcagcagctgaaagctgagcgccagaaaaccgccgacaattatccggtttggcctgcggaaaatacgacccaagcccgctcttctttaagcagtaaagatgaaaccttcagcggccgcctcgaagataacagtacctatcagaaactgcgctgggtgatggactactggtgtgcgctgtggttctggccaatcgacaaagcggatgaactgccagatcgcggtatgtggctgatggagatggagacgctgatcgacggtattgtcgtcacggaaagagtgatagaaagtgcagaacaggctaccggcgatctgtttgctgacgagggcgttgtgcgtgaagagtcttcgctgttttctggcgtcggtcgcctgaaaactgatgtgctgttccgccatttgccgcgtctggcgattgttgatgcgctgaagaagcagcaccgtttcttccattgggatctggaattctgcgatctgttcgccgaacgcggcggctttgacctgatgctcggaaacccgccgtggttgaaagtagaatggcaggaagctggcgtgctgggcgactacgagccggagtttgttctaggtcgattaagtgcttcgaagatggcgacattgcgtcatgaaaccttcaatcgaattccgctgctcgaaaatgcctggcgcaacgagtatgagggttgcgaaggtatgcaaaacttcctgaatgcgcagcagaactaccctgtactacgcggtgtgcagactaatctgtataaatgctttctgccgcaggcatggcgcttaggggcgcagaaaggtgtggctggattcctgcacccggaagggatttatgaggatccaaaaggtagtcagttacgatctgttgtttaccatagactgcgggctcattttcagtttgttaatgtaaaaaaactctttgctgaaattcttcactgggttacatattcaataaatatatacggttcaacaaagagtgaatgccaattctattccatggctaatttatatcatcctagcactgttgaatcatcatttggaaatgattttaatagtgatactaaagtccctgggttaaaggatgataatgataattgggatgtgtctggtcatccacaaagaattattcagataaataaatcttatttggaattatttgctaaactatatgatggtgattcaactccatttaatgaagctcgacttccagctttgcactcagaacagttggttacagttcttaataaatttgctcatcaaaagaataaattaaaacatttcaatgatatgtatttatcaactgtaatgttcgatgaaacatatgcacagcgagatggaataataaaacgtcagacttgttttccgacaagcaattcagaatgggttttatccggccctcatttttatgttgggaatattttttataaaacaccaaataaaatatgtgagaaacatcatgactatactaatattgacttaagtgctgtcacaaaatcatatgtaccaagaacgaattatgtgcttgcatgtcataaagatgagtatattaactctatacctcaggttcactggcttgatgctggggagtccgcccacaagaaaataacagagtattaccgacttgttattagggcaatgttatcccagtctggtgaaagaacattaataagcgccatttcgccaaaaggagttggacatgtaaatggtgttcgtagctatacttataaatgtcaacaaatgcttgttgaccacgcatctatgtgtttttcattgccttatgattttatatgtaaatctacaggcaagactaacctacaccagatgctggatggtttttcgtatcttacttttaccgaaaaacagagagcattattatcgagcagggtattaactttaagttctatgaatgacagttttgcttccctttggcataattgctttgcgcccgattttatcgaacacaggtggagtaggattaatgtattgttacaacaagatttctttaaaaagttaacacctatttggcagcctaactgcagtttacgctccgactttatgagacgccaagcgttggtagaaattgatgttctaatttcacaagtgctaggactaacgttggatgagttactcactatatatcgtgttcaattccctgtgatgcggcaaaacgaagccgatacctggtacgatcaaaacggccgcattatctttaccccaagtaaaggcttggtgggcgttggcctacctcgcaccgcgcgtaaagccgacctgaaaaacggttttgtctttgatatcgacagccctgaatggaccggaggcgactgcaccgatcaagccatcggctgggatgatgtcaagcatctgcaaaccggcactgtcagcgtcacttttgatgactatacccgcagcgacgaaggcgagcgccgtactgtcacctggcaggctccgtttatcaaacccgaccgtgaagacgactataaagtcgcttgggcattctttgcacaagataaggagagcgcctga

SEQ ID NO: 432364 - DNA, 2832 bp, Serratia marcescens
atgcgggtggttattcgtgatgcagagtggcgcattcgccgggcggatgacagcggagatggtggttacctgctgacctgtgatggcatttcggagctggtacgcggtaaagaagggctgtttctaacaaagctggagcaaaaagtcgagattcttgatccagcaaaaacaaatctggtggaagatgagtcagccaattaccaggcggctcaattgtacatagagagccagctacgccaacgcgtcccgactgacagcaaagtccattttggacatcaggctgcgatggactccatgccctttcagctcgatcccacacgcatggcactggcacagccacgccagcggatattaattgctgatgcggtagggctgggtaaaacgctggaagccggtatcctggtttcagaactgattcgccgtggacgtggcaaacgcattctggtgctggcggttaaatccatgctcacgcaattccagaaagagttctggagccgttttgctattccattgacgcggcttgactccgctggtttacaaaaggtgcgtaaccgcatcccaaccaaccacaacccgttccattatttcgataagaccattatctccatcgataccctgaaacaggacatcgaatatcgccatcacctggaaaacgcctggtgggatattattgttatcgatgaagcgcataatgtcgctgaacgtgggaccagctctttgcgcagcaaactggcaaaattgctcgccgggcgcagcgatacgctgattatgctttcagctacgccgcatgacggtaaggctgaaagttttgccagcctgatgaatatgctcgacccgacggccattgccaatccgaaagagtatgaatacgccgattttgccgataaaaatctggttgtgcgtcgcttcaaaaaagacgtgaaagatcagatggctggcgagtttccggaacgtaatatcgtcaaactcacgcacccggcaaccggggccgaagaagaagcttatcgtcggctggttgagagccagttccgtgacgatgatgatgaagactcgcggtcaaataaaagccgcctgttcaaaattacgctcgaaaaagcgttgttctccagtccaatggcatgtgccagcgtggtggctaaccgcctgaagcggcttgagaaccgcaaagaaataaacagtcagagccagattaacgaattagagtcactgctgctggcgctcaataatattgatgccagccagttcagcaagtatcagttgttgctggagaccatccgtaacgatctccgctggaaagcgaataacacggaagatcgtctggtgatctttaccgagagtatcaaaacgctcgagttccttgagcagcaactgcgttccgatctcaagctgaaagacgatcaaattgatacgttgcgaggcgatcagggcgatacagttctcatggaaaccgtcgaagcgtttggcaaatcccagtctccgttacgcctgctcatctgctcggatgtcgcgtctgaaggtatcaacctgcatcacctcagccataaaatgattcacttcgatattccgtggtcgctgatggtattccagcagcgtaacggacgtattgaccgctacggacaaaaacaccagccacagatccgttacttgctgactgaagccagtgaaccgcagatcaacggtgatatgcgtgtgctggaagtgctgatcaataaagacgaacaggcgcagaagaatatcggtgacagctccgaatttactggcaaatttacccaggaagaggaagaagagcaggttgctgaattcatgatgcaggacgatggtgccagcctgttcgacgacctgttgaatagcaatgtcactgaaaattctgaacacgacctgtttggcgaaatctgcagcgcagtgtccagcgatgcttcgatcgtgaccgaaagcgacattagtctgtttgataatgagcaggcatactgcgaaaaagcgctaggctatctgaaggcctgcggccagaccgtgcaatacgataccttgcctgataacaccttatcgctggtcgcaccggaggaattacgccgtcgctttaaccagttaccgctggaaattgcgccggaaaactggcagctttatctaagccaggacaaaactgttattacggaagccatttcgcgtgcgcgcggtgagcaacatgcctggcccgatgtgcagtatctctggcaaattaacccggtcgtgcagtggttagacgacaaaattcagtccgcctttggtcgccaccaggctccggtgatgcgcctgccgcacctgtttgaacctgatgaggatcatttcatcctttccgggttgttcccgaaccgtaagtcgcacccgatggtgaacccgtggctggtggtgagctttaaccgcgaaacgttaagcggtagcctgccttttgctgagttcctgaaacgacatccgcaactgagtagcaagctgactaacagtggcggcaaagatcgtaaccatcaacgccagcaggatctgctggaagcggcaatcgcccatgcgcgggatgtgtttgttcacgatcgaaatgcttttgaagagcgtatcaatcagcagctcaatgagcatctacagaagctagacgttctgcgtgggcgtcagctgaatcaactggagctggattttgccgataataaacagcagctttcagtgaaacagagccgcaaagaacaacgtcagcgcgaaatcgaacacaattttgacagctacatccaatggattgaggacaccatgaccaccgaaaaagagccctacatccaggttattgctgtaatcaccggagcggagggctaa

SEQ ID NO: 432365 - DNA, 2232 bp, Serratia marcescens
atgatccctaatttgaatgaactgacggatactccgattgcccgaaccaatttgatcaagcttgaagaagatcagctgacgaccatccagcgtctattggcccctgtatctaatatctatacgatagactttatggttcagcgctttactaaagagcgaaaagaaaaatccgctgattactatgcgcgaattcatcaggaggtaaaatcttgcgtgcggcagaagcttggtctggaggccgggcaggaggtaaaatatgaactgcattgcttaccaaattaccatcacgtcttttttttcctggcgcctgcaactaacccgaacagtcaggctcataggacgttggcagaacgtattgaaacgctttgtcagcaactcaccgctgaaaatcatgacctatctcgcctgattcagggattatttagcctgcatttgaaaatggtaatgctggaaaaagccagtgagcgcttttcggtatcgccgacttacttcaactcaacgctttaccttaacgctcgcctgagtcagcccgtcacacaaaaaaaaggcaccggggtgatggaagcctttgagctcgacatttatgcctcagaatataatgaactcgcttttaccctgcacaaacgaaaattcctggtcgaaccggcggatgagatgcacctatccctggacgataccagcgtgtggtttagcatcgataatcgtcggcttaaagctcggcgcaaacttgatgcccgtgatagcaaactggatttttttcgtgagcgcagcggttatggcgaatgccaggcctatacctataacgtagtcatgaatgctgcctgtgagcggctcagtgaactagagatcccccatcaacctatcccatttcaggctacacacgaggtcaatcagtttgctaccgaccttgatcaacagctggctaatacgctgttggtggttaataacggcgtcgaattcagcgtcacgcaagaagcttatttctttgatgcattagccaaccagttccccgggtatcaactctggtctctggcatcgcttaaacattcccgacaaaccggatttgctgagctgcctgctaatacatctattctggtactcaatgcggtagaggaagaacgaagcaacagcatccggcagcaaaataataaatctgttgagtacaatgatttctatgcagcctttgccgacgcccgaaaacaacctgaactcaactgggatatttatacccagcttaagttagatcgtttgcaagggtggctaaatcaacaaccactgcctgtggttttacaaggaatgaacattgatcgtaagttgctggatgcgattgattttattaatgaacaattgataagcaaccctgctcaatacgaaatcgaacttacgaaaccacacagtcgtctcaagtcagcagttgccttattgaaaagtaaggtacgccgaacgaaaactgaactatggttcaaagagagcttactcaatcaacatcacattccactgccagacttggcgaacgggcactataccgcctatgcggtacgcaaaacgaaaagtaatatccacctgcttggatatgttgaactaaaaatagagcgcggccaacttagggtggttgataccgggatcgctgaaggtgaattcgagtatctatctgttgaacatccatctctgggacgactaaagaaattattcgataaaagcttctatctctacgaccacacagcagatgtgctgcttaccacctataacagttcccgcgtgccgcgcctgattggcccggcgcaatttaatatcgtcgattcatatgcttatcaggaacgagaaaaaacgctggcggagcgtcaaggtgataaatttaacgggtataccatcacccgctcagcaaaattggagcaaaacgtactgccctatctgatatcaccgggccgctcgaaatacgactcgttgaccaaaactcaaaagatgaagcatcaccatatttacctgcaaccgcatgagaatggagtgtttgttctggtaagcgatgctcagcctacaaatcctactattgcacggcctaacctggtagaaaatctgctgatatgggatgcccaaggtaaggccgtagatgtatttaaccacccattaactggtgcttacctcaatagcttcaccctggatatgctcaggagcggcgaaagtagtaagagttcgatttttgccaaactttcccgattgatggttgagaactaa

SEQ ID NO: 432366 - DNA, 4710 bp, Serratia marcescens
atgagaaaaagctgggctgttgaggaagattgtaagctgctaagtctggtgcgtcagcatttttccactctggtcagccataaccggctgaatgccacaatgccatttagccagcagctccacgatgcatttgactcacctgaccgcgatgccgcagcattgctatatcgcctcgaacaggcaaaaatcctgggatttgccagccgtcctggaggcgatcccactaaacagctgtttcgctgtctgataaacaatgatttggcgctatacgattacagcctcacctttcccactctcagaaaagcattgcatccagataccgttgcagcagcactaaaccacttcacgattagcaatccacacgaaactctatccaatactatcaatgaaattgcaacagccttgcatcttgcccccatgcaagtggaaaagattctgctcgaaagcgggaaaataatcatcaatagttaccgtaagtgtgagcgtgttggagagaaaactatcaataataatctgcaaaatctcatctccagacaaattcctgacataacgctggtcgaagatattaacgcttgccgcgcccaagtctctcaactttaccacgtgcatgaacgtgatggtgctgaggtcatattcagttccgatggtacgggattcggcaaaagctatggcgtaattcaaggatatgtcgaatatctggagtgtttcgccaaaaaccaaaagtcagatgatctgtttcccgaaggtggctttaccaacctgctgttcatgtcgccgcaaaaatcacaaatcgacctggatagcagccagaaagacaaaattcttgcctctggcggcgaattcatttgcgttctctctcgtaaggatattgccgatctcgactttatggactgggccacgggcctgaaaaatcgcgaccgctatattcagtggtacgaaggggcgaaaggtagcaaatatattggcagcgcaatgcgttcgctcaattaccatgtctcacaaattgatcgctgtgaagagcagttaaaaaagttgacaacatacggttctcaggataccaactacgaaagagaaattcttgaagagcagctaaaaaactgtcgtcacagtatccgcaatacgattgagtcagcctgtaaattactatttggaccagatagtgaaaaagcttccattaaagagtacattcgtcgcgggctccaggcgcgccaagagcgaatgcaacacgcggagacagcacgaaaaccaagcaagtctgaactaagcgtacacgaagtctacttcgagcttatcaaacaggtattgcctttcgaagtttgccagtaccgcccgtcggtgctattaatgaccacaaataagttcgacacatcaacttaccgattggcgcctcgtcagcgaggtgaaggcgtgcgttttgagtccgtaggtttcgacttgctgattggcggcaagctgactctcaaagatccacagatcagcaccgttgcggcagctggccataccgggcaggttgcttatcttcgtgatgaacacttcagacgtaatccagactgcccttttcgccagaaaaatattcgctttacggtaatcattgatgaactacatgaagcctacacccgtcttgaagaaacatgccatgtaaagctaatcacacaggaaaataatctggcgcatgttatctctgtcgcgggacgtattcacaatgcggtactcagcctggagcgccggaaaaagcccaaagaagcgcaaacgacctttgagcaagagatggtcaaattcatcaccatccttcgagacctactggcgaaaaagtgcgaattatcacccggtacgacgctgggctcgatcctggagatgtttcgcgaccagttaggagcattcgaagttaacggcgacgccgccgaacgcatcatttccattacccggaatgtgttcagctttaaccccaaaatgtacgttaatgaagaggggctgaaacgcattcgtatgcgcaacagcgaaggcgacataacgcgcaccgagctatattacgaagtcgaaaatgatgccagcgacaccaatcccaccctgcacgatctgttccaattggtctccgtcatcctagccgcctgttctgatatcaccaaccgacactttaagcgctgggtaaaaaatggtggccaggataactcgagcagccagaatacacctttgggccaatttgttgacgcagccaataatgtagctggagtggtgcgacatatcttcgatcgcaccaccgataaaaacttgttgattgatcatttctacacttatctgcaacccaaaaccgtattcacgatgacgccgatagttgaactcaattacgtgaacagtggagccgagcgtacaattattctggcgtttgagatggatctggtacaagagttgcctgaagccatgctgctacgtttattaacgggcacgcacaataaagtgattggacttagcgccaccagtggttttagccacaccaaaaacggtaacttcaatcgtcacttcctggagcgctatagccgtgaccttggctatcgagtcattgaacgtaaaaaaacagatatcgatacgcttagagcactacgcgcgttgagagccagtatccgcaacgtcgacttcagggtgttcgatgataagcagttaaaattgaccgatatctaccaaaattgtgagatctatcgcaggacgtatgacaactttttcgacgcgctgaagaaaccgctggagtacgacctgaaaaatacctataaacggcgtcagtaccagcgggaacttgaagcgttattgcttgccgcctacgagggtaaaaacagcctgattttgtccctttcagggacatttaagcgggcctttatcagcgcctggcgcactcatcaatcagcctggcgtcagcagtacggtatgcactcccggtgcgatgaaaaaacggataacgataagaaacatgaccagatcctgacctttaccccattcaaggggcgtcacacagtccatttggtctttttcgattcaccactggctaatgtcgaagatattaggcaagaaacctatctccagaacagcaataccgtactggtatttatgagcagctacaaaagtgcaggcaccggcctcaactactttgtgaaataccatgacggcgatattaatgatatcaatgcaccacgtctggatgtcgattttgagcgcttagtgctcatcaactcctcgttttacagcgaagtaaaggacaacagcggcaaccttaatacattacctaactacgttaccgtgcttaaacactacgctgatgacgatattaccgtccacaagctggccgatttcaacgttaatttcgcccacggcgaaaactatcgcctgttaatggccgaacatgatatgagcttattcaaagtcgtcgtgcaggccgtagggcgaatcgagcgtcgcgacactctattgaaaacagaaatctttttaccccgcgatgtgttccgtaatgttgcattccagttcgccgctctcagtgaagatagcggtaacgaggtagtatcagaaagcatgtccttgcttaaccaccgcctaatggaggagtgcgaaaagctgagtcagaaccagtcatttagtgatgcagaacagcggtatgcgtttgaacaggctatcgtagaaaatggtcgccgcatcgatgctgttcataagcgagtcctgaaaaccgactggataaatcaggtacgcgccggcaaccttgaatatctcgaattgtgtaatttattccgcgattctgactcctttaccgatcccatgcgttggctggaaaaacttcaggctaattccttgtatgccgccaatcggcaaatgcaatcaatccaccacgccctgtttatcgaccgctatcagggcaaccaaactattttactttgccacaaacgcggcccggatggacttgtccacagagattattccgccctgtcggatttcgctggcggcgcaagagagtaccggcctgagctcaccctctttccgcagtatagaaacgatgtcgattttacccccggcaacctggtcggcgagttgattcgtgaatgtgacaacatccaggaaacggcattcaaaaaatgggtacccaaccccaggctagttccgttgctcaaaggcaatgtcggtgaatatctcttcgataaagtgctaaaaagctatggcgttaccccactttctgatcaacaggtgtttgaacgccttgaaccgctagtatatgagttttttgaccgctttattgaagtgggtaacgacctgctctgcatcgacgttaaacgctgggcgacgcagttggatgatttaatgcgggcagaagaaacgcttgagaaaagcaacaacaagattcgccagatccgtaatatcaccagccaaaaggcggatacagaggggcagaaacagcttcaggctgtgctgtcaggccgttacgaacgcattcgatttgtctatctgaacgtcgcctacagccagaaccccaataatctgatgtggcaagataacgtggatcacacgatccactaccttaacctgttgcaaaccgactaccagtactatcagcccaaaaatcgagagagcggacgagctcaggaaaactcgaaactgagcatgacattggacattaacccaatgttactaaccctgctgggtgtagaaaagttgccgactaaaggaaaagtctcatga

SEQ ID NO: 432367 - DNA, 162 bp, Serratia marcescens
atgttttatacctggcgcaagaagtatggcaggattttgtattcaaaactgaagaacatgtggcagctcgaagaggaaaatcttcgcctgactaagttggttgtagatcagagcctcgacaagaccatcatgctgcaggacgccctggcaaaaaagggctga

SEQ ID NO: 432368 - DNA, 651 bp, Serratia marcescens
gtgtggaacctggttaaaagattaccgtggcgcggcatggtgctgacgcttgttctggtggctgttctttatggactgaaccgctggggctatcacgacggttctgaagacgccagacgcgacggcgatgcggcgctaagtcagctgcagtcagcgtttgatacctacaaaaccgaacagaccacgcttgagaacgctgcgctgcgggcctgggcaaaacggtatcaggagcaggttgctgccgggcatcaggccgaagccagttaccttgagcagattgctcagcttgagagccagaacaaactactacaggggcaaattaacgatgtcacacagcgctggattgatgaaaaaggcaagagccatcccattgagtgcgtgtttactcgcggcttcgtgcgccagtacaacgccgcgctcggatatgacaacgcatccgtcaacaccggtcattcagacacaactgccgccgctggcaccggcactcgcgcagcgtccgggcaacctgaagccgctgacgcctggctacgcgactcaggcgtctcccagcgtgacgtcctcgccaacatcatcgacaacgcgaagcagtgccgcatctggcgcggccagataaacgggctgctggacgaacgggaaggattacagaaatga

SEQ ID NO: 432369 - DNA, 909 bp, Serratia marcescens
atgggacgcacaaaatcacaaccagttgaactagtggaagatgtaccgctgaccgatggtctcagcgtcaatcttaatgccatgaccgaacatcgccttgaaatcatgcaacagtttggtgatggcctgccatatgaacgtgaccgcatcgttcacgagacacgcttctacatggctcagagtgctgaagccatgctggaggctggtaagcggctgattatccttaaagagaatgagccgcatggcgagtttgttgagattgtcagggagcatctcggcatcgaacctcgcattgcgcaaaaaatggcgcaggccgcactcaaatttctatctccagaactggagtcaaaagcgaaaacgttttcgcttttagggcgttcaaagttatacgaactaatgctggaagatgatgaagaactggctcaattagcagatggcggcacagtggcaggcctgacgctagatgatgttgatcgcatgtcggtacgtgagttgcgccagtctcttcgcgaagcccgcgaaaccaacgcagcacaacagcgcgtgctggccgacaaaaacgaaaaaatcgactcgctttccacaaaactggagaagaaatcccgtatccagccacctaagcctgacgaagaagtgaagaagttacgcgcggaagtgacggcgttagcggttgaggcggaatctgccatcgcggttcgactgtccagcgcctttgagaccctgtgcgcatactgcgctgaaaacatgattgatacccccagagactttatgaccggtctggtctgccagctggaaagcaccgcgcgtagcctgcgttccacatttgacctgccggatgagccgacaggtaacgccgccccttcatggctgactgacccgacgccacagattaacgggcaggaggcataa

SEQ ID NO: 432370 - DNA, 1239 bp, Serratia marcescens
atgcgcacgatcacgctttgtttttttcttgtttcaccagtgagttatgcggccaccgccgcattgcccaacgacgctgccgccaccgcggcaccggtaaaaaaaagccgtccggcattgccgcatattcattggcaaagcgaggataataaaaagaatattgatatcggcggcgcgctgcgtgccaattatcgctatgaagactggcacagcagcaattatcggaatccgccgcatttacgctttgacgcctttcgcatcgatgccgccggccagataaacgacgcgtttttcgatagcggattctggtttcaggatcggcgcaaatacgccatcgaccgcgcctatgtcggttaccacctgtctgaacgttccgccgtgcagcttggcgcgccgttcaaaccgttcggcctgatgccctacccgcagttcggctggtcgtacggcattccgttttacctcggctttggcgtcaacaccgggctgggcgccaaataccaatatcagcatgacgattgggccttcgacgccgcctactacccgcgcatgatgccgaccggcgtgcgttacgcccccgacgtcgccagctacgacgatctgaaaaacaccaactatgcgtcacagcacctgcagcgcaacgaaaaacgcgatcaggtaaacctgcggctgacgcgcgctttccatcagggcggctgggacaatgagcttggcggttcactggcggcctcgcggctctataaccaggcgaccggcgataacggcagcttctgggcggcgggcctgcatacgctggtgaattacgatccctggcatctgtccggccaggtgatccgctacggttacgacgccaaaggcccggccggggccaacaattcggtgatcctgatggggggcaacggcctgacgccggcctatctgatcccgtcgcaggccaccactgccgccatcaacctggcgcgcgacgtcgacgtgccctgggggccggtgaaaaagctgcggttctacaacgactacagcgtgctctggaaagacaggcacggcggctcagattccaaaatgaacacgctgggggttcaggtgttcgccatgccggtgatgctgtgggtggatctgacctgggcgaagaacgccaatccgtggggcggcgtggaaaacgccaccggctggaccggcacccaatcctccggcagcaataaatggtattttcgcaccaacgtaaacatcggttactacttctga

SEQ ID NO: 432371 - DNA, 1041 bp, Serratia marcescens
atggctgagaaaattcgtgtcgggctggtcggttacggttacgccggcaaaacctttcatgcgccgcttgtcgccggtacgccggggctggagctggctgccgtctccagcagcgatgccggcaatgtgcacgccgactggccgtcgatggcggtggtgggcgatgcgcaggcgctgttcgccgatccggccctcgatctgatcgtgattcccactcccaacgacacccacttcccgctggcgcagcaggcgctggccgccggcaagcacgtggtggtggataaaccgtttaccgtgacattgtcacaagcgcaggcgctgcaacagcaggcgcagcagagcggtttactgctgtcggtgttccacaaccgccgctgggacagcgatttcctcaccttgaaagcgctgctgaatgagggcgcgctgggcgaggtggtgtatttcgagtcgcatttcgatcgctaccggccgcaggtgcgccagcgctggcgtgaacagggcggcgtcggcagcggtatctggtacgatttagggccgcatttgctcgatcaggcgctgcagttattcggcaagcccgaccggctgttcgtcgatctgggggaattgcggccgggggcgcaggcggtggactatttccacgccttgctgagctatggcgatcgccgcgtggtgctgcacgccagcatgctggcggcggcggagagcccgcgttacgtggtgcacggcacccgcggcagctatatcaaatacggcctggacccgcaggaagaccggctgaaggccggcgagcgcctgccgcaggccgattggggctatgacatgcgcgacggcgtagtgacgctgtcacgtggagatctgctggcggagcaaccgctgctcaacattcccggcaactacccggcttattacgccgcggtgcgcgacgcgatcgccggcatcggcgaaaacccggtgccggccgccgacgccatcgcggtgatggcattgatcgaactggggctggaatcggcccggctgcagcaggcgctgccggtggtctga

SEQ ID NO: 432372 - DNA, 1332 bp, Serratia marcescens
atggttgcgcgccttgtcgtgctcctgcccacggctgaaccagtacagctgctgcggcagcagcccggcagggcaagcgtctacgcacaggccgcagcggatgcaggactgctccggctcctgcggtgtcatttcatcgaccgtcggcgccagaatgcagttgctgatcttgacgatcggcacgttcagcgcaggcagggtgaagcccatcagcgggccgcccatgaccaccatctgctgcgcctgcgggcggaaaccggcgaagtcaagcaggtgctgcaccggcgtgccgatgcgcgcccacaggttgcccgggcgctcgatcgcgtcgccggtcagggtcactacgcgctcaatcagcggttcaccgtcgacgatcgctcgcttgatggcgaaggcggtgccgacgttttgcatcaatacgccgatggcggaggagtgcttgccgtgcggcacttccttgccggtcaggatcttggtcagctgtttggcgccgccggacgggtatttggtggggataacgcgcagcgcaatgccggactggccgcgcagcgcctgcttcagcgccgcgatcgcctccggtttgttgtcttcgatgccgatcagcgtgaccttgggttgcagaatatgctgcaggatctgcgtgccttcaacgatctgatcggcatgttcctgcatcaggcgatcgtcggcggtgatgtaaggttcgcactcggcggcgttgaggatcagcgtttccacgccgctcatgccgccctgcagcttgctggcggttgggaaaccggcgccgcccagaccggcgatgccggcctgatgaatacgttgaatcagatccgcggcgggcgcttggcgatagtcaaccaccggatcgcgctcgcaccagcggtcttcgccgtccgcctcgataatcacgcacagctccgtcagcccggaagggtgcgcggtgatgtgcggcgtgatggcgctgacggtgcccgaggtcggggcgtgaaccggcacggtgcggccgcggccgacggtcagcggctggcctttcaacacccgatcgccggcattgacgcacagctcgccttccggccccagatgctgctgcagcggaatgataaaggtcttgggcaggggagcgacacgcagcggcgcaccgctggactgcgttttcatttccggcggatggatcccgccgttgaaatcccagatccggtcttttttaaaggcggcgaacagattaagcatgttgctccacgtggatcacttgcaccgggatcgtcttcatgtcccacttccagttggcggtggtggtggcgaccggtctcatttcaatacagtcggtag

SEQ ID NO: 432373 - DNA, 4074 bp, Serratia marcescens
atgactaaaatcagtagcgccatgctcaaatcgttgagtttggatgagttgaaaaaaattgccagggagaagaaaacgcaagtggtgttggcttccggtaaaatcatcagaaaacaagctgactcggccaggcggcacttccctgtgaccggttcacaacgcagtatttgggtattggatcagtaccttgacgacggtaaggcgtacaacaatccttatgccgtcacttgccgcgtcgagcatgacatcgacatggaggtagtgaaaaaggcgctgacctttctgacgaaaaagcatggcattcttcgcaccacattcaacgtggtggagggcgaactctgccagtgcgtgagtgatgaagtcctgttcaatttccactatgacgatattttgtctcttcctgagtacgagcgtgacgaatgggtagaaaacgttgcgcgtcaggaaggacagcgttctttcgatttgacttgtgggccactttcctattggcgcatgattaaaaccaatcgacatgaatatgtattgttgctgacgtttcaccatattatctcagatggctggacggtcagcttgttctttaaagagttcatggagatgtatttccaaatcctccatggcgagacaccgcgtacaaacgattttctgcaattctccgactatgcattggcagaagaacagtggtatgccacggcagaatatcaaaagggtttggcgtattgggctaaaaagtttgatgacgcgcaaggcctgcttgagataacgaccgatcgcccacggccagctaaaatgagcaccaaaggcagtatggcaagccacacttttgatcgggatttcacccagcgtttgcagatgcaggctgcacagctgggcgcgacgcctttccacatgattctttcggcctatatgctcttgttgcacaaatacagcaaccagcagcaaatcattatcggttgtccttttgccaatcgtaaccaacccgagactcagaatatgctggggttgtttatgaataccttacccctgaaactggatatcgttccagaggcgacgttacgagaaattattggcgacgttcgctcagagagtgagcaagctcagctgcaccaggctattcccctcaatgatattcttgatgaaattggccatatccgaaatccgcaggttaatccgctttttcaggcggcgctgacgtatcaggtatttcctcattttcataacaacacgttgtttacctataaaccgcttaaaatcgattatggcgtatccaaactggatctaaacctgtgggttgaagaaagccgcggtagtttactgtttaccttaaactacaatcccgatttgtttaaccgcagtacgataacgcgtatgttgagcgatctgcgcacggtgttggaaacgctcatcgaacggcctcaaataaccgtgcgcgatctttcattggtgactcgcgaggaacatcgccacttgctgagcgggtgtagacgcttgcttgacgccgttcccatggcggttcatcggcagtttgagcgtcaggccgatgctttgggtgccgattcggtggctgtacgttgcgatggccgtcttttgagctatcgacaactgaacgagcaggctaaccgtctcgcgcactgtttgctggaacatggcctgttgccggggcagtcagtggcgctgtttatggccaaaagcgaacgctgtgtcgtggctctgctggcaatattgaaagcagggggatgctatgtgcctgtcgatatcactttgccgatggaacaggtcgactttattctgcgggacgcacaggcgcgcttcgttgtggtggatgccggatcgccggcggtttcacagccgacaatctcgattgaccagtgccacggcgccgcgctgagcacgaatccccaattactgacaatgccgacagacgctcccgcttacatcatttatacctcaggcagcaccggtaggccaaaaggcgtcagggtcaatcatgttcagctaagccgatattgccaggtcatcgcctctgtcctggatcaacctgccggggcgcgatatggcatgttttccgccttcactaccgacttggcgcataccatgctgttcccggcgctgatctaccagggacaactggaggtgataagcactcagcagcttaatgatccgcaggcattgttctcctatctggagaggcatcccttggactgcatgaagatcacgccaacgcacctgaccgcattgctcatgtcaccccatgcgggtgcgctattgccacgtcgtcttttagtcttgggcggagaaagagtcccgacggcgttagtcaaacgcatacgtcaactgcagactgactgccgtgtggtcaatcactacggccctacggagtgtaccgtcggtgtggcgacctataccttgccggacggtttgccggatgagatgggcgactatttgccggtcggcaagcccttggccgacagccacgtgttggtattggatccttatcaacagttagtctctatcggccttcctggtgagatttatcttggcggcgagcatgtggctgcaggctatatcggcttagaggagcagaatcgggcgaatttcatcccgcatccttatttggcgggtgaacgcctttaccgcactggcgacaaagggcgctggctgccggacggaaacctcgagtttttagggcgtttggatcgccaggtgaaagtgcggggctatcgtgtggaactggcggaaatcgagcacgtattgcagcagcaaccggcgatcgctcaagccgcggtaaaacagtggctgaacggtgcgggcgagagctggctggtggcgtattgttgcggcgaaggaaaggctcgcagcgcggaagtgcgtgcgtttttgcaaagcaaggtccctcattacatgcagccggatcagtgggtttggctggacagcttgccgttaacggccggtggcaaggtggactatggtgctttgccgcgcatgaacgatgccatacctcaatcggtgcgagagccggaaggggacgtcgaacaacgcttatatgccatttattgccgcgtgctgcaacgcgagcgattggatacgcgggatgactttttcgcgctggggggaaattcgattaccgcattgaagttggtgatcgaaataaatcagcattttggcacaaccctgtctttggggcagttgtttgagcacggcagtgtcggcgagttggcggcctttctgacgcaggctgaacggcaagtattatcgccgttggtgatgctgaataccggggtcgaggaagataaaccgacgctcttgatgattcatccggcaggcggaaacatcttgtgttattacccattagcgcgtgagttgggggccgactatccgatctatggcctgcaggtggcgaacttcggtgaagatcaggcctacaaccacgatatagaggtgctggccgcatgctatctgcagcaggcgcaggatattgcgcaacggcgaaatctggtgctgggcggatggtccctgggggcgacaatcgcgttcgaaatggcgcgccaactgcagcatgccgacgggcgaacgccaacggtgctgatactcgatcaacctgctcctcagatacagattgatcgcgccgcacagatgaatgaatttgaacggcttgcatatttcgcccgcaaggtggagcgttttaccggtgcgtcatttgcaatcgccgcacctgcgctggcagagatgtccgaagcgcagcgttcattgttgttcctgcaggaattcaagcgcgcaaaattggttcctgacaatattagcgcaacgcagttccagcattttctgacgattctacaggcgcatatcgctgcgacagatagctatcagggcaaagaatatgacggcaggatcgtggttgcggaggcggaggagattctgccggaccgcattgcacaagagatacccggactgggttgggctcgtctggctcgcggggggatgacgataataagcgcgcctggcaatcacatctcgatgatgaatccgcctcagataagccatacggccagccagctgcggaagatattgtcatga

SEQ ID NO: 432374 - DNA, 264 bp, Serratia marcescens
atgaacaccctggccgaccactactaccgcgatacccattaccctatcccgcatgccgattttctgcgtcttcagcatgcgcacgccaccggcgtgctgttcctcgacctgctggacactctcgacctcggcgggcagcgccccgatgccgtgcaacaggcatcgtttgcctcggtcattgccttgctgaccgaccagctcggccatgtcgtcaacacctgtgaaaccctaatccttgcccgcatggaggctaccgccgcatga

SEQ ID NO: 432375 - DNA, 468 bp, Serratia marcescens
atgaaaagatttcttttagcactcaactcgctacttttcttgttatttttttcattcagcatgagtgcggcggagccattcaaatgcacatcgcattacaaaacccatattgaaaaagacaataatttcacactgttcgatgggcgaatcaccctatttttgaaaaatgaacacgaaggatttttttccctactgggaaaagtaaaaactgataacaacagttatttactttccagaaccgcctatttcacattggttccacaaaagatcaaccacgtcaatcaagccaatattgttaaagtgactaagcaccctagcgacctcacccccgacgatatttggttggcggatattttgccggaactaccaggtatcgattttcaaattgaaatatggcgattgaaagacaacctgatactggtgaaatcccttaataccggctatctcatctgcgccgctgagcactag

SEQ ID NO: 432376 - DNA, 804 bp, Serratia marcescens
atgaaatacatagtcaacaaaaccgttgtttttgattcaaatgaaatgacactttacctgtatgaaaatacgcagatagtgaccaggctgactaaacctgccactcgtttactgctgacactaatacaaaacagtggagtaaacgttaaccgagatacgttattggaaaatgtatggcttacctatggatttacagcatcaaatgcgggattaaataattacatcagtgaattacgcaaggcattttcatcgttaggttacaaacatgaattgatcataaccattccaaaactgggcttcagatttgaatctaagattgacattatggatccggctgttatttcatcagaatcagtagaagaggaaaaggtatcagaaattagtgaagatgcagccccgaaaacggttctggtaaagctgggcgatcgagaaataacatcatttcctcatcgcaaagtgtattccgttttgacaggaattactttagttatcctatgcatattttttttaaaaaatatcagcaatgatagccatgcctatcataaaatagcaaaaattgataactgtaacgtttatatcataggccaggtgtttcagaaaaatgatgttctatctgaagtgaatgccgtgttaaagagggaagaggtggattgtacaagctttccgagtgatgttttctaccttgaggataggataggtaaacgcaccgtccgagccgatctaatttctgtttgtagcaaatcagataacgaccgttacaatacttgcttcaacatcaaaagccagagaaatacatcaaaatga

SEQ ID NO: 432377 - DNA, 525 bp, Serratia marcescens
atgaaactgaacaaaatcatgctggctgcagtaatgactctgggtactatttctatggctaacgcggctaaccagggtggcggttctgtgaccttcaaaggttccatcattgatgcgccatgctctatcgagccaggctctctggatcaaaccgttaaactgggtgatatcgcttccgcacagctgaaaaacggcggcaagtctaccccgcaggatatcctgatcaagctggtcggttgtgatgtgcaaacggctaaaaccgtaaccaccaccttcagcggcactgagtctgaagcggctcctggcctgctggcgatgaaaggctccgcacgcggcgccagcatcgccatcaacgacatcgacggtaaactgctgccgctgaccaccgccagcaaggcacaaaaaattgaagacggtcaggccaccctgcgtttcagcgcccacctgcagggcgacggtgcctctgctgccatcgtcccgggtgagttcaactctgtcgccgactttaccctggcgtaccagtaa

SEQ ID NO: 432378 - DNA, 546 bp, Serratia marcescens
atgcactcacagcgtggcaaaaggatattgcacagcgcggtgctcgttaatctgttgctgtgttcctccctggcgcaagccgccaatcaggggcgtggcgaagtgaccgtgaatggcaggattatcgcctcggcctgcgccattgataccgaaagtcttgaccagaccatcaccctggcgacattgcctgtcagccagattattcgcgatggtcagagcaaacggcatgagttcaatattaagctggtgaactgcacattagaaagatttaatcctgcgctggatgactggcgctattttgccgtgacgtttgacggcaaagacgatgccggattatttggcatagacggtaatgcaaaaggtattgccctgcaaattaccgataagaaggggaatgtcgccatgccgggagtacccatggcaaaaaatgacattcaacccggtacgatggaatttaattatggtctgcggctgatgggcaataaccaggtagtgaaagccgggagttattactccaccgtgcgctttaaaatggattactactga

SEQ ID NO: 432379 - DNA, 2547 bp, Serratia marcescens
atgtcaattactccgtcatatggctgtatagggaaaatacgaccgcggatcttggggctgttgatcgcctttattctggcggggaacgctgtttgcgctgtagcggctgatattgaattcaataccgacgtattggatgtgacggatcgcgccaatattgacctggagcagttttcccgcggcaactttattatgcccggtgattatttgtttaccgtgcatatcaataaacaaaccctgcccgaccagccggtggtgtattacccgccggatgacgatgccaaaggcagtgaagcctgcattaccccgcagctggttgaacagctggggctgaaagagagtgctctgcaaaaagtcacctggtggcaccaaaaccagtgcatgaaccctgagagcctggagggcatggaggtgcggggcgatttgggcgcggcggccttatacctgagtattccgcaggcgtacctggagtacaccgccgagaactgggacccgccgtcgcgctgggacgaaggcatccccggcctcctgtttgactacaacctgaacgggcaggctcagcgtcagcaaaagcagggcacgcagagttataacctcagcggcaacggcacgctgggcggcaacctgggggcctggcggctgcgggccgactggcagtcgcgactggaccgccagagtggcgccgtaaaatcgacccgctccagctgggactggagccgttactacgcctaccgcgcactgccgaaactgggcgcccggctgacgatgggggaggactatttaaactccgatatctttgacagtttccgcttcgccggcgccagcctggtgaccgacgacaacatgctgccgcccaacctgcgcggctatgcgccggaggtgaccggtgtggcgcgtaccaacgccaaggtggttatccgccagcaggggcgcgtgttgtatgagacccaggtggcggcggggccatttcgtatccaggacatcaacgacgcggtcagcggccagctggacgtgcgggtggaggagcaggacggcagcgtgcaggagttcaagatggacaccgccagcatcccgtacctgacccgtcccgggtcggtgcgttacaagctggcggccggccgccccgcagactgggagcaccacagcaacgggccgatgttcggcaccggcgagttttcctggggcgtgagcaacggctggtcgctgtatggcggcggcgtagcgggcggtgattacaacgcgctggcgctgggggtggggcgcgacctgatgatgttcggcgcgctctccttcgacgtcactcagtcgcgtgccagcctgccgcaggacggcacgttgcgcggcggttcataccggttgagttattccaagcgctttgacgattacgacagtcaggtgaccttcgccggctaccgcttctcggagcgtaattacatgtcgatgagcgagtacctggatgcacgtacgtacggtacgcgccacaacagcagcaaggagatgtacaccatcacctttaaccagcagttccgggacctggggttgagtgcctatctcaactacaaccaccagacctactgggaccggccggcgaacgaccgttacaacctgacgctgtcgcgctatttcgacctggggcgttttcggaatatcagcctgtcgctgaccggttaccgcaacaagtacaacggcaccaacgacgatggcatgtacctgtcgctgtcgctgccgtggggccgcaacggctcgctgagctacagcggcagctacaaccgcaacgataccacccagcaggtggggtactacgaccggctcaatgaacgcgacacctatcaggtgagtgccggcagcgcgcgcagcggcgccaccgccagcggctactacagccacagtggtgacatcagccagatgaatgccagcgccagctatcaggccggccaatacagttcgttcgggttatcgctgcagggcggtgcgaccgccaccctgaaaggggcggccctgcaccgcagcagcatcagtggcggtactcgcatgctgctggataccgacggcgtgccgggcattcctgtgcgcggctacagcacgccgaccctgagcaacgtgttcggcaaggcggtggtggtggatgtgggcagctattaccgcaaccagttcagcatcgacctgaacacgctgccggagaacgccgaggtcagccagagcgtggcgcaggccacgctgaccgaaggtgccatcggctaccgccgctttgaggtgattgccggtgagaaggcgatggcggtgatacgcctggcggacggcagtgcgccgccgttcggcgccacggtgcgcaacggcaagggacaagaagtgggcatcgtcaacgacaacggcgaggtgtacctgagcggcatcaatgccggtgaagggatgcgcgtgagctggggcggtaccgagcagtgcggcattaccctgccgcagacactggcgccgggccagttggccaatctgttactgccttgtggcccggtggccgacggcaaggcgttaaacacgagtgaagagtag

SEQ ID NO: 432380 - DNA, 750 bp, Serratia marcescens
atgaaaaccaaacatgcagtgacattaattgccggcggcctggcgggcctgctggttgcccagcagacgagcgcggccatcgcgctggatcgtacccgtgtgattttcaatggcgacgacaagtcggtgagcatgagcatcagcaacgagaacaagcaactgccttacctggcgcagggctggattgaagatgccgacggtaaaaaaatcagcagtccgttgacggtgctgccgccggtgcagcggctggagccgggtgccaaaagccaggtgaaggtgcaggggttgccggcggccaatacgttgccgcaggaccgggaaaccctgttctacttcaacctgcgtgaaattccgccgaagagtgacaagcccaacacgctgcagctggcgctgcaaacgcgcatcaagctgttctaccggccgaaggcgattgcggtaaccaacccggaatcggtcgcaccttggcaggaaaagctgacgctgaccaagcagggcgatggctatcaggtgaataacccgacgccgtattacgtgacgctggttgacgccagcagcaaaaaaggcggcgccagcgcgccgggcttcgagccgctgatggtgccccccaagggcagtgcgtcgctgaaggtagccgcgtctgcgctgggcaacgcaccggtgctgacctatgtcaacgactacggcggtcgcccgcaactgacgtttagctgtaacggcgcgagctgccaggcggtggcaggcagcaaataa

SEQ ID NO: 432381 - DNA, 654 bp, Serratia marcescens
atgcgaacaagaacccggcgatggaacggcggttattaccgtcatgagtggttgtatgccctggtgattacgctggcggcgctgatggtgccgctgtgcctgacggtgatgctgtggctgctgccctcgacgcgggcggcggacaactggcaggtggacggcgcccatggcgtactgcatgtgcgcggtgagctgaccgaaagcgcttgccggctggagatggcctccgcgtaccaggcggtctcactggggaataccgccacggcgcagctggcgcaggccggtgaccgcggcgtgccggtgaacgtgcaactgcacctgcgcgactgcctgcgcaccgcgtcgaacaaccgcgatgtgcgtaccggcaaccgggtgtggagtgcccagcagccggcggtgtcggtcagttttatcgccccggcggatgctgacaacccggcactggtgaaggtgcgcggcgctgccgggctggggctgcgcatcgctgacgaacgcggcaaagacgttcgcctcggcagccgcggtgcgccgctagcgctggcggtggggcaacaggcgctgaactataccgtgacgccggaacgcacccgtgcgcccttgctgcctggcgcctatgcggcggtggtggattttcagctcagctatgactag

SEQ ID NO: 432382 - DNA, 495 bp, Serratia marcescens
atgacggcaacgttcagacggtactggctcggctgcggagtggcggcgttactgttgcctggcctgctggtgcaggcggcgacgaccatcaaagtgacggtgaccatcgtcgcccaaccgccctgcgtgattaacaacaacaacctgattgaagtgaatttcggcaatgacgtcatgaccacccgtatcgacggcagctacaagaaacagccggtggtgtattcggtggagtgcaaaaatgcgccgaacaacgcgatgaaactgcaaatccagggcaacagcgccggctttgacagtgaggtgctgaaaaccaacaaggacggcctgggggtggccctgctgcgcaatggcaatcggcagcccatcaacagttggattaactttacctacccgacgaagccgacgctggaagcggtgccggtgaaacgggccggggcgaccctgcgcggcggcaagttttctgccggggcaaccatgaaggtggaataccagtga

SEQ ID NO: 432383 - DNA, 477 bp, Serratia marcescens
atggcgcgctatggctgcattttgctgctgatggccctcggtggcccggcgacggcggcggacaacatgcggttctccggcgtccttatcgaaccgccgccgtgcaccatcaacgacggcggtgaggtggatgtcgacttcggcaaccgtgtgggggtcagcaaggtggacggcgttaactaccagcaaccggtgaactaccggattagctgcaccccgggagccggggcctggaacatgacgctggaagtggtcggtacggcggcggattacgatacggcggccgtggcgagcaacatggatgacctggcggttcgcctgctgcaaaacggcaagcggttcatcctcaatcagccaattcctgtcaggctgaacgcgccgccgacgcttaaggcggtgccggtgaaacggccgggtgccacgctgaaggaaggggcgtttgaagcgacggcgaccctgctggcggtgtaccaatga

SEQ ID NO: 432384 - DNA, 528 bp, Serratia marcescens
atgatgaacaagaagggctggtgtgcagcggcgctgttactgctgtgcagtgtgccggccggcgcggcggagaatatgcggctgcacggtgcgctggtcgcggaaccctgtgtgataccgccgggagacgagacggtggtgctggattttgacacggtgattgacaagtacctgtacctgaacacccgtactcccgggcagacgtttgagctgcgcctggcgcagtgcgacctgagcctgggcaaaacggtgagggtgaccttcagcggcgcggaaagtgcgggactgccgggactgctggcactgaacggcgccagccaggcgagtggcatcgccatcgggatggaaaccccgcagggcgagccgttgccgattaaccagcagggtaaggcacagacgctggtgagcggtgccaacacactgacggcgcgggcctatgtgcagggtgagccggaagcgctgaagcacaaatccatcgagcgcgggccgttcagtgcggtggcaacgtttagcctggagtatgaataa

SEQ ID NO: 432385 - DNA, 972 bp, Serratia marcescens
atgattcataccatgtccacagcgtttcggctttttgcttgtcgctgcttattaccatgtgcatttttaattattctgggagttacgactccgtcacacgctatgatgtgtatcaaagatggaggggggagcaactgggaagcggaagatatcggggtgttagctatcccagcagatttgccggtaggcacggtcctgtggacttctagtacccgaacccgatcggtaacatgtgatcctgagctcagtccggttggagagtttgttcatttttatggtaacccccgagataagaacataatgaacggcgttggtatggggattatttataatggaagggacttgggggttgtttcgtctggacataagatagcgacggatgtgtgggtggctccaagacaaccaaagcgtgcgacgtataaatttcaagtgtatttaaaaaaaacaggaaatatttcagggagtagtgctagtgaaattgctgtatttcagcttgatggcaagcaagggctgaatggaggtgaggggagtaattatcggtatatcttgacagggcttaataatatcaaggtaacccattgttcagtatcgattgttgctcctatggagctggattttggcagtatttcccctttgaatactggtgtggttgcgagccgggactttagtgtgacagcgactaaaaattcggcatgtactgcaaatgataaactgggggttaagttggttctttcaccagtgtcgggtgacttatttgataatgatactactttgggtttagggggggaggtttattttggtttaagtgaaggcggtcgtaaagtgaaatttaacgagccaatttcattttgggataacatccagagtgggaggcaaaaaactgttgttttcaagggtgatatctcggtgaaagataaattcaaacttggtcgtgttagtacgtcaatagttttgaatgtaaattatatataa

SEQ ID NO: 432386 - DNA, 396 bp, Serratia marcescens
ttgacgtttgcgttggcggcgtttgtgctgccgtgcttccatctctctgcgctgaggggggaacgctggcgacgtcgtgcttcggcggtggtactgatgctgctgccgatggtgttggtgtggttacaattacgcaccggttggctggctggcgttttggtgttaggcgtagttcttctgtactttacccgtcgtcatccgcgggatgtaacgattgcttcagtactgattgtaggcggtgtcatcgccgctgtcatgttgctgtggttgggtagcgatatgtgctacgccagccacggcggctccaatcaggcacgctactcgatgctgagttctacgttggcgatgatagccgagaaaccgctgcttggttgggggaacggtggcttcgaataa

SEQ ID NO: 432387 - DNA, 2307 bp, Serratia marcescens
atggacgtaatatatttcgaaaatgacaatgcagaaagtgaattaatatcattatttaaatcatctcaactaatccctttttttgggagtggattcaccaaagatgtaagagctaaaaaagggaaaatacctgacgctaaagacttaactaattacataataaaacttgcatcagcgaaagaaggagcatctgaaaacgatattaaagagattgaagatataaaagatttaaaaagtgcatttggattattcaaaatgcctgattacattccagaggcaaaagcaaaaaccttattagggaatatattctccgaggctaaaataacagataaaaacaaaacggagctattgaaacttgactggccacatatattcacattcaatattgacgatgcaatagagaatgaaaccagaaagtttaaagtactacacccaaatcgtggcgtacagagagagtatatctcagcaaacaaatgcctatttaaaattcacggtgacatatcagacttcattaaatatgaggatcaaaatttgatattcacgtggagagattatgcacatagcatagattcaaatgaatctatgctttcttttctttcggaagaatcaaaaaagtccgcattcattttcataggttgcagccttgacggtgaactagatttgatgtacctatcaaaaaacactccttttagaaaatcattttaccttaaaaaaggagcgcctactttagctgataaaattgcagttagtcagtatggaattcaaaagataatttattttgacacttatgaacaaatttacaaatggttaacaaaaatattaagaggtattgagagaaaatcaccaacaagaagttttgagtttgatgatcgcaagttaaataaagatgaagcaatatctatcattgcaaatggaggccctgtatcttatctaaataaagatatcagagtgttaagatcttcggaatcatttgccccaaggacatgtcttaatgaagcaataatggaaattagaaagcgggagtgcttattaataaccggcagacgttttagcggaaaaaccgtattcctgtttcaactaatagaggcacataatgagtacaacactatttatttttcctcaacagatacatttgatccaataataaaagaatcattaaaatcattgaataatcacctgttcatttttgattcaaactatttaaatgtaaaaatactagacgaaatcttaaacattaaaatcaacactagcaacaaaatagtaatctgctctagcaatggtgatgccgagatatttagatttaatttaagggatagggatattaactattacgaactaaaacttgataacactctagacgcaaacgaagcaaatttgtttaataaaactctttcagcggaaggattgccgctttataagagaagcggtaatttattaagctttgcttttagatattataaagaatacgatagaagattagatggttcgaagttgtttaacaaagagtttgatgagaatactatcccagttcttattctaatatcagctttaggaaaagccagttttagccatcttcaaatttataatcaatttttcaacacggacaaatttatcttacaaaatgacagggtgttagaggtggaaaaaactgtcaacggtgaggagtttatagtctgtaattcaacatcttggctattgaaaataatcagcgattttataaaaaacaaccctaacgcttcaaggataactgctaatttaatagtttcattagctagaaaaggtttcctaagcacatcgaagaatttaatcagttttgataaattaaatgaattgggaaatggtaatgatgttcatgaattcattagagatgtatataaggatatcgtctcaacctatagcggggatatgcattattggttgcaaagagcaaaatcagaattaatttcagctagaaacattgatgaaataaaagccgggatggattatgctagcaaagttaggcttgatagtgaagggactaaaaaccaaacctactatagtgcaacattggtaatggcacaattgtgtgctcgagcattgaaaatgacaaatgaaaagaaatatgcagtaactttctttaagttttgtttagagtcgataagaaactacagtaataacataaggcatatagacaaaatgactgaaaaaaaatacagtgatgttttttatgctgtgactttcattaagaaagaaactatcattgagttattaccctataaaaaagaaatgattgaattaataaacttctttgattccataaaggattga

SEQ ID NO: 432388 - DNA, 600 bp, Serratia marcescens
atggttaaggccgaattgaacaaggatatgatcgccacgatggccggtaatattaccgtctataactacgatagtgaaactcgcgagtacctctcgtcttctgtggaatatctggctgtcggggttggaatccctgcgaactcctgtgttgatgcaccaggtgaaatcaaagtcggttttaccatttgccgcacaactgacctatccagatgggaatacattgttgatcaccgcggtaacacgatatatagcactgaaaccggagaagctctcattgtttctgtaattggtaattacccggaagataccaccacactaccacccactacctcatacgatttttgggacggtagcaagtgggtcacggatactaaagctcagcacgtggcagacgtcacgatagcggaacagaagaaaacagcattactggccgaggcgacaacgattatcgccccgctagtggatgctcaggcagggggttacattgatgatgctgatgtgccacggctgacagaatggcagcggtaccggtacaaactgactaaagtcgataccagtaccgcaccaatcattaactggcctgcccagccggaggtgtag

SEQ ID NO: 432389 - DNA, 2943 bp, Serratia marcescens
atgaacgaacgtcaacgttacagcgcctggagtgacagtgagcgtgaacactatcgacaaaatggctattgggtcgatcaacctctgggcgaacagttacgccagtgggcaattcggcaacccaccagcatcgcactggtggcaggaaagcagcatctgagttacgccgggctggataatctggccgacagacttgctgcgggattagccgcgcgtgggattcgctctcaagataatgtgttgctgcagttgccaaactgtattggcctcgtggcaacactgttcgctctgttccgtctcggcgcacgcccgattcttgccatgcctggccagaaagcggcagacattgatgccttgagccaactggcagaacccaaagcctggttttatcctcatcactatcttgggcatgactatcaaacactggcatcggatatggcggttaaacatcccggtatgcaacgctggccggtgaatatccatgacgatgcagactcactgatgacagcgttccagtctgagccccagcctttgcctgcaccgcatgctgaagatatcgccctcctccttctttctggtggcagcaccggtacgcccaaattgataccacgcacgcacgccgattacttttacaacgcacgccgcatggcggaaatctgccagctttccagccaaagtgtgtatctggcgacattagctgtggcacacaacttcaccctctcctgtccgggagtgctgggcacgctattctcaggcggcaaagtggtgctagcgcaaacctcaggctgtgatgaagtgttccctcttattgagcaggagaaagtcacttttactgcattggtaccaccgcttgtcaccctgtggctggagtgtcgggcatgggatgaaagcgacctctccagtttgcaatttattcaggtagggggagcacggctggatagtcaactggcagcaaaagtcaaacccacctttgactgtcagctccagcaagttttcggtatggctgagggactgatttgctgcacacggcttgatgatagcgatgacgtgattttacacactcagggtcgtccgatttcagatgcggaccaaataagagtggtgaatcaggatggacttcccgtaggaatcgaagtctccggtgaacttcttacccacggcccctatactatcggcggctattatcgcgctgaagcgcaaaacctgcaggcgttcacaccggatcatttttaccgttctggtgacctggtgcgcctgaccgatgcgggcaacttcgtcgtggaaggtcggctcaaagagcaaattaatcgtgccggggaaaaggtgggttgcgcagaggttgagtcgtttatcgctaatcaccctgatgtggcaagctgcgtcgtaattggtgttgaggatgcacgcctaggtgaacgtatctgtgcctgtttaccgggtgatacccacctgacactggctgatttacgtggctacctgcagcgacaaggtgtcagcaataataaactgcctgaccagttattacctgttaagcgttggccattaaccgccgttggcaagatcgataagcgtcagctggcggatattgccatgcttgccctggacagcagtgagtccagccataccctcatcctgcaggctgacccgctcgatgtcatttatcacttgctgaagaacgaatctgattgtcacattgcctatgagcgcgacgaatgctgggatattggaataggcagtcaggtaaaaatctcactgtatggtaatcgtgctgaacttaccctgcccaacgcggtggaaaagagctggcaaggtggtaactggcagacaaatctgcaacaggcgctggatgcgattccctttagcgactggcaggcttatggtgtgagccatttcgagttctcacacctgatacacgatgtgcagccaaaacacttacctgaggcaacgcccctgctgaccctctttatcccgcatgtgcaaatcaaattaaagccgggggaagcacaactgatcgcgtcttctgatcaggatttatcgcaactggtgaagcgtgttcaggcggcggatcgtgttgcagtgtttccagaacctgatgctcaatggcaagcttcaatcgccaaacagattcgcgaacaggatgcgcgcgactactgccagcgcgttgccctggcagttgaagaaattcagcgcggtgaatatcagaaaattattctttctcgtcgaataacccttgccgctccagtcgatttattagctagctatcacgttggccgccggttcaataccccggcacgttcgtttattgcccgattgaacgacgatcacttcattgggtttagccctgagacggtggttgaagtctctgattctggcgctgtcagcactcaaccactggccggcacgcgagcacttaccgctgacgaggccgaaaatcggcgattgcgcgaagtgctcagtaacgatacgaaagaaattgctgagcatgcggtgtccgtcaagctcgccattgaagaactgatccccctatgtgagaaccattcaacccacgtcagtgattttatgcatgtctcactgcgtggcagtgtgcagcatctggcctcccggataaaaggacaacttcgcaaagaattcaatgcctgggatgcctttggcgcactgtttcccgcagtcactgcttcggggatacctaagcgctcggcgatagaggcgattcagcggctggagccggtctcacgcggtgcctatagcggcagcgtgttcatggtcaatagccagggtgaaaaggatgcggcgctggtgctccgctcgctttataagcatggtcgtggagtggcgttacaagctggtgcggggattattgaccaatcgttgcctgagagggagctggaagagaccatcgaaaaattacagtcggtaagccgttttattattccagataaatga

SEQ ID NO: 432390 - DNA, 2187 bp, Serratia marcescens
atggaacgcaccgcttcgtatttggcaggaaaacaaatcacacaacgcgcagtaacgggcctttcactttctttactcaccctcgcgttgcaaagtgcctgggcgcagccgcagcagaacagttcaacaataacggtcatcgcacaagatgaggaatcacatagcggccggctttcggcaaaagaaagcagcagcgcaactaaaaccacgacaccgctggtggaaacaccgcaatcgatctcggtaattccccgacagcagatggatgatcagaacacgcgtagtcttaatgaagcgctacggtatacgccaggtgtggcttccgagcaatggggcggagtaaccgcatttgatcagttcactattcgcgggtttaattacagcgacactggctattccgatgtgtttcaggatggtttacgcaataccaatggcctgctctttggtgtgcagcagatcgaccctttccttctggaacagatcgatgtcttacgcggacccgcttccgtgctgtatgggttatcaaatcccggcggtatcattgcactcaccagcaaattgccgacgagtgaaacgattcgtcatgtagaagttgaaggtggtacgaagaattacggacgggtcggcctggactttggtggggcagtgaatgacagcggaagcgtactctatcgcttcgtcgctaccggccatctcgccgacggcatgcagcagggcacgaaactcaaaggctatgcgctggccccctccatcacctttaatcctgatgacaacaacagtctgacgctctactcacgttttcagtacgacccggatttaggggtgatcacttctttgcctgcctatggcacggtgttcaccaacccaaatggcaaactgccgcgggatgcttaccctggtgagccaaatcacaacacctttagtcgtaagcaatcaacggtgggctacagctacatccataatttcagcgaagactggtccacggtcttaaaaggtcgctatttcggcgaaacgtccaattatgatgcagtgatcatgtcaggtctgaacgacgatatgcgcaccattagccgcaataccgcagtctctgacgagcattacaacacactcaattttgataatcagatccacggttttttcgataccggtgcattgagtcatgagttactgacaggtgtgggcgttgaccatatgcgcggccatactgactacggtagtggcagcgtgtcatctcttgatatttatcatcctgactatggtgtcgccgaatttggcccaaccgcgctatggcaggatagccgcgtttcatccacgcaaacgggcgtctatctgcaggaccagattgcctggcagcaatggcgtaccacagtgggtatccgccacgactggagcaaaatcatcaataaagattttctctacggccagaattacgagcaacacgatcaggccaccacgggacgtgttggcctgaattatctgtttaacaatggcatctcgccttatttcacctgggcgcaatctttccagccggttgccggtctttctcgcgatcaacaaccctttaaacccagtcgcggcgaactctatgagtttggtgtgaagtatcagccaccgggtaccacgaccctgctttctgccgctgtgtacaacctgacacaggacaagagcctgagcactgatccggcgaattccgctttccagactcagggcggaaaaattcgtgcacgtgggctggagctggaggcacggggtgccttaaccgaacagttcagtgtgatcggtagctacacactacagcaggtgaagtacacccaggacactcaaggccgcgaaggcaaaaccccactgcgcgtaccacggacatttggtgcgctatggctggactggcaggcgccagcaggcacagaggttgagggcttaggcgtcgctgtgggggggcgcttcagcggcggcaccaaaggaggaaccatggacaatcagtttaacaccgggggttatggcctgatggatgcttcaattcgttatgagcttggcaaactcgatccttctttacgcggtggcaaagtgcaactgacagcacaaaacctgctggaccgcaaagttgtcgcgggttgctattccaccgacacaggctgtttctggggggcaggccgtcaggtgattgccaaatttagctgggacttttga

SEQ ID NO: 432391 - DNA, 1545 bp, Serratia marcescens
atgaaccagggtttaaccagacgaacgctgataaaaacaatgggtattggcgcgggcatcgtgctcagtaatggatttttaccgctggcatgggcggatgaacccaagccgcagcgagggggaacactgcgtgctgcgttcgcaggttccagcagtgattctaccgatgtgttgcgatccaccaacagtaatatcgactatgtacgttcacgcttagtgtgggattcattagcggaagtagacaaccaacgtatcgtatggcgcctgatggaatcagcagatcctaatcacgatgcgacacgctggaccgtaaaacttcggcagggcgtcacattcagtgatggtcgtcaactcaccagcaaagatgtgatgttcagcctgcgtacctggatgagccagccgggtagccaaagtggctggctgaagccactcgacctgacggcatcacgtcttgaggatgatcacacactgacattgcagttgcacaaaccggtgggttcatttgatttattactggcgcagtcaatctttatttttccagaaaatacgcaggactttactgcggcagtggggagtgggccttacacactcaaatcttggtcacaggataaaagtgtgctgcaggcgcgttcagactattgggatgcggcaaacggtggtccgtggttggatgagattcacctctacagcgtaggtgacaccactgcacgcctcaacggtttgaaagcggggcagtttgattatgtgggggggatggcgctactcaccgcgcgatcagagcaagctaatccggcagtgaaactgtggcactctccgaaatcggagatgagcaatctggcatttagtatgaatctcagtaaggtgccctttaatcacgccgcggttgtcgaagcgctgaaatatgcgattgaccgggaaacgatggtacgcgcagtgaccatgggattaggcgaagtcgcgaatgatgccctgggcgcggggcaaccgtggttcaatggggaattgcctacccgccattacgatcctgaacgtgcccgtgcgctgttgcagaaggcaggcatagcctctgttgccgcaaagatacgcaccagcgactacgaatacggtacggccgaaagcgctacattactgttacgccaggtaaaagggacgggatttgatctgcaactggaccgcgttcccgctgccgattactacagcgattttaacctgctgctgaatacaccattacaaaccaatctttatcgcccgatgccgctgcccgttgcgttgccattctattatggccatgcggctccctggtcattcaccggcccggctacgccgcaacttgacgatctgatgaatgcgatgcaggcagcacgcggtgatgcgttgcgccagcgtgttgctgatgtccagcactacctgtggcagcagggcggtgacgcgatctttgcgcgaattccgtctattgccgcttctgcaccaggtgtgtttggcgtcaaagcggctggcttctttgactatccgctgctgcgtgatgcctggctgcgttcagcatga

SEQ ID NO: 432392 - DNA, 972 bp, Serratia marcescens
atgaagtgtcaggttttaattaaacgcctgctatggcgtgcatcgcaggcggttttcactttgtggcttctttcggtgatgatcttttgtgccatgtcgctggttaaaggtgatgctgccagccagcgtctggcagggacggggagccgcgagcaggtgacggcgttacgcgcgcagctgggtcttgatcagcctttagctgcacgctatctgcagtgggccaagggtgtcatgcacggtgactgggggaccagctacttaaacgggcgatccgtaagtacgcttattcgcgagcgtgggggggcctcactggcattaggggccagcgccagcgtgttgctggtggtgatcgccctgggcttaggcatctattgtgggctgcacccaggcagtgtcgtcgacaggggcatcagtcttctttccctgggattcgtggcgttaccggaatttgtgacgggcacactgttggtgatggtgttttcgttaacgcttcactggttgcctgcgctttcgcttctctccccgggccaatcgttgtggtcacagtggccactgtttattttgccaataatgacactgctcagtgtcgcgttagcgcagaacatcaaattggtccgccttggtgttatgcgtgcttctcagtctccagcctgtgaatgcgcccggttgaatggaattgcggaataccgcgtggtattgcactggatcctgcccgaagcattaggccactgtttaccggtcctggcacgttacatcacttatctgtttgctggcgcactggttgcagaaacactgtttggctggccaggcctggcagcggcacttcttaatgccacgctatcgcgcgatacgccggtggtgatgggcatctcgatggtgatgtgtacactgacggtgctactgaatctcctcgcggatagtttgaccgcgttgcttaaccccgctgctttccggggagggcgcgatgcgtaa

SEQ ID NO: 432393 - DNA, 2397 bp, Serratia marcescens
atgcgtaaatggccatatgcaggattcgttttcttcagcctgatggcattcataggtcttatcggcccctggctggcaccttatgcgatcgatgagatacgtgatatgccctttgctgcgccaaattcaacggcgtggatggggacagattatctcggcgcagacgtcttcagccgcctgctcagcggtggtcaacaactcttattgctggcctgcctgagcgtattactggcctggctgcttggcgggctgttggggatgcttgcggcgctgaaaggacgctggattgaacggatgttgttggcgctggctgacatcctgctcagtattccggggctgctgttactgacactggtggttaccgttagcgggcgcggttatacggccgcagtggtggcggcgatattggtgatggtgcccgatattttccgtctggttcgtgccgcgacgttgcaacaattacagcaagattacgtcgacatggcgcgctgtcggggagagtcactggcagcgattctctgtcgggagatcatgcctaacctgttacccctgctcagtgcagatattggccttcgcctgctggcagccatttttattttggccaccgccagttttcttgggctggcggcgcaacaacccctggctgactgggggctgatgatcatggagaaccgtcaggggttatcgtttcaaccctgggcaaccctcgcgccgatctttgccatcctgttgctgcttattcctctgaacctgagtctggatggattgtttgtttctgcgcgtagaagatatgcgcctccggtggcctcgttttcgcacgcacaaagcattgccgatagcaggctaaatattcaacagcttagcgtggaacttcctgaacagacgttgatcaacaccgtttcgctgcagataaaaaggggtgaaattgcggcgctggtcggtacttcaggcagtggtaaaagcactttactgcgtgcggcactggggctctttcccgacaccacaactgccattcgcggtgaggtatggctcgcagggcagtcgctcttttcaatcaatgcccgagcattgcgaaagcttcgtgcccggcacgttggctttgtgccgcaagatccccgtctgagtatggtaccttcgcaaacgctgggcgcgtatttacgttggatggccgcccgtcgcggactcacagatgctcaacgcgatcagcaggtgacgtctcatttccgtcaactggggctgcccgatgatgcggcttttttgcggcgctatccacatcaaatctctggcggacaactgcaacgcgtgatggcagtggccgccatgcttggctatcctggcttgctactgatggatgagccgaccagcgcgctggatggattgagtacccaggcggtgatgcactggatcgcctcaactgcgcgcgcacatcagatgagcgtgctgtttgtcgcacacgatttaccacaggcgagtcagatagccgaccggattctggtgatgtcagagggggaagtggttgaacaacaatccactcaggcatttttgcgcacgcctgatacccaggccggtcagcgcctgctcaatgcctggttgccttgtccctctcctgagcaggaaacctcctctgctcaggtcgtcctgcgtgctgaggccgtagaggccgcttatggcggacgcaccgcactgacctcacttcagttctctctgagacgcggtgagacactgaccattgcgggccgatccggcggcggtaaaaccactcttctgcgcattctggcaggtttacaacctgatgccagcggcaccttaagcctgcataacatgccgctgcctctcagtatccatcaacgcagcccgtcgcaaaaatggcaactgcaatatgtcgcgcagaatcccgccagctccctgaatgctttctatagcgtgcgtgcgctgctgcgccgtcctctgcgtcttagcgatcccacattaagcgctgaacagtgtgaacagagggtcatcagcgtgatggcgcaggtcgggcttgaggcccatttgcttactcgaaaaccgtcgcaactctccggcggtcagcagcagcgtgtggcactggcaagagcattaattacccgccctgacgtgttgttgtgtgatgaagtgaccagtgctttagatgggccgacgcgtatggggctggtcctgctgttgcaacagttgcaacagcagcagggtatcgctctgttaatggtgactcatgatttaacccttcctgtacagttgggcggtttgctcatggtgatcgagcacgggcgggttgtcgaacaggggcgcgtttccgaattgcttacacggcccacgcattcagtgacgtcccggctcatttcagcagcgcaactcatagaggagactacgcgttga

SEQ ID NO: 432394 - DNA, 750 bp, Serratia marcescens
ttgacttccccctggatacgaacattaagcggatacattaagcctgagttacaactgttttgtctgccgcatgcgggcggcaacgctgggctctatcgcggctggcgtgaacatcttccgccggaaattgaattgaatgtgatctgctatcccggtcgtctggagcgttggcagcatcccatccccgcgacgatgccggagctggtgggggaagtctcgcgggctattgctccgcatcttggcgagaactgggctattttcggccacagtatgggagccgttgtcgcgcatgaaacgattctggcattaaaatgcgatgatttacctccaccgcaactgttggcggtctccgcccgtgaggcgccgcagtttcatcagcccggccttttacatcaacaggatgatgaagcactgtgccaagagctactgcgcctggacggcaccgatcccgtgttgttgaccctacccgagatgcgcgaactcatgctgcccacgatgcgggcggattatgcgttgattgagcagtggcagctgagttccagacagctgctgtcatgccccatcgctgccttcatgggcagcgaagatccggaacttgatcagatgcaggcggaaggatgggcaagctggacaacagccagtttcaccctggactgtttttgcggtggacatttttacttcagggaacacccacagccacttctttcacgattactggcacgcttaagtgcgattcaggcactgtcctga

SEQ ID NO: 432395 - DNA, 1533 bp, Serratia marcescens
atgttgatgaatgaagaacaggcaaaaaatcgtagatggaccacactggtggccgcattgagtgctgctatcatgacgctggacatcacggtcgtgaatattgcgctaccaaaaataggtgaaggtttccttaccaatctcgcacagttacagtgggtaattaatggatataccctgagcttcgccgccttgttattgctggctggcgccatctccgaccggttgggtcggcgcccgatttttttgtgtggtaatggattatttgttttggcttcattgggctgcgcaatggcgcctaccatcaatgcgttgatcgttgcccgtgtactccagggcgctggcggtgccatggtcttggggactgcgctggcactgattgccagtgcctgtgagggtgaatcacccaaggttcgcaccagcgcggtggggttatttgccgcagggggagccgtgtcagcagcaactggtcccctgattggcggcatactcatccaatgggccagttggccatggctgtttgccatcaacatccccgtcggactactgatcatttttctcaccctgcgccatgttgatgaaaaacccgtacccgcaccgcgttatcctgtcgatgtcgctggcgcggttttcgtcactctcagcctgtttagcctcaactacgccgcactgaacttttcatctgatgccactccctttgtccgcctcgcactgctcatcgggatcgcttcggctttattgtttttatggattgaggctcagcggggcgatcacgccctgctgcatttacgtttgtttcgcatccctacgttcctggcggcaatcctgctcagctttgcaggccgcattttcagttttggcttgctgccgtttattacgctttggctgagcggcctgttgcactattcggcgtggcacaccggtttgattcttttgagtcagtcactggcgatggtggtcgccgccggattaagtggtccgctttcaagactgattccagtccgcatagtgctggcaattggcatgttcattgtggctctcggtctgaccctcagtagccatgtgcaaatccacagcgactggctggtgatccttccgctgctgttgatgctgggtatcggtgcaggattaaccatgccgcatctgatggatctcgctgttagtgttgttcctgcgcgtcaggctggcgctgcatcgggcactgcaaatacgttcttcccgctcggtactgccgtgggtatcgcgttgtttggactgttactcaaccatgtgatccagcaagctttgccgctctccctgttaagtgcctctggtatcagtcagcctgcatcagcccttcaggccatcagcagcgcgcagtttgatgtgctgaatgccgtgcccgaactgcagcaacgggccttgcaggcatgggtagatggattaaacctcttattccgcgttgccgccgttgcaagtgccctcgccggtctggcggcactgtggttgattcgtccggtacaaccacagccggaacagactcaggacagtgcctga

SEQ ID NO: 432396 - DNA, 7449 bp, Serratia marcescens
atggcaagcacccttcagcataaaatatgcacagatatggccccctttctccccggcatattgccggatcgactcgctaatgactgcgacctgatcggcctcgggctcgactcgctggcgatgatgaaactggccgctatgtggcgtcggcaaggttacgatgtgtcgtttgcccgcttgattgaacagccacgcctggatgcctggttggctttgatgacgcaacaaacgccatccgcggagcaggaaaaaaaggccgtgttgccaggcacacatgaaaacgaacctttccctctggcgctcatgcagcatgcatattgggtgggacgcgacagtgctcagcatctggggggtgttgctgcgcatttctaccatgagttcgatctaccgcaactggatgttgcacgcctggaaaatgcggtacatcagttgcttgcccgtcacggtatgctaagggtggccattctggaggaggggcagcagcaggttcttgaacacgcgcagtggcccgggcttagggaatatgatttacgccaggagacagcagatatcgccaccctgcgaatggaggcgattcgcgccgcgctgtcacatcgccagttaaatattgcacaaggcgaggtgtttgatgtgcgtgtgacgcataagcccgccgccctcggtggtggctgccgcctgcattttaatctcgatatgatcgcggcggatgccatgagcctgcgcgttctgttggacgatctggcgaggctctatctggagccgcaacagccgctgcctgtgctggatctctcctattgccagtatcaacaactgcgccacgcctggctgcaggaaccgcagcagcaggcgcgctacgcacaagacaagcagtggtggctggagcgtttagccgatttgcctggcgcaccgatgttgcccagcgttgggttaaacccggacagtgcgcagcagacggtggtccgtcgccatcgctggtttgatgccagggcccgtcaacagctggaggccagtgcgcgtgaacatcaactgaccttgccgatgatgattgccgctgcgtttgccgaagtgctgacccagttcagtgacgacgaagatttcattcttaacctgccgttgttcaaccgtgaaccgctgcacaccagcgtacctgcgctggtgggagatttcacttcgtcagtgttgctggcgtggcggggcagcaaccccggcagtttccttgaacgcgcgcagcgcctgcaacagcagttccgtcaggatgcggcacatgcctgtttttccggcgtagaagtgctgcgtgaagcggcacgcgtgcgcggtcagcagcagtttgctcccgtggtatttaccagcgctttgggactgggagagctgttcagcgaacgcgtccagcaggcctttgggcagcccggctggattgtttcacaggggccacaggtgtggctggatgcacaaattaccgagttaaatcaaggtgttctggtgaattgggatgcacgtgagtcccgttttccagcgggtatgcttgatttgatgttcaatcaatttacagggctgattgaggcactcatcgccagtgagcaggcgtggcaacagccggtgcagagtgcgttaccctcagcacaacaggtcgtacgccagcgggcgaatgccaccgatgcccctttacctgagagcgatttgcacagcgctttctttcgtctggcacagctgcagccggaagcgcccgcgttgtttggaccccatcaggtgctcagttatggtgagttggctaaacgtgcacgccgcctggcgacccatctgctcaatcagggcgtgcagccaggggaactggtggcgatcgctttgcccaaaggaccggagcagatcattgcggtgttgggggtacttgccagcggtgctgcgtggctaccgctcaaccacctgcaaccggagcagcgcattaaagccatcctgcaaaatgccggggtgaaacaggttattgaccaactaccggatgaagattcgcggctccctctggcggaagtcactcacagcgatccgcagcatctggcttacgttatttacacctctggctcaaccggcacgccgaaaggggtggagatcagccatctggcagctaaaaacaccatcgacgatcttaaccgccgctatccactgggcgatcgcatgcgcactctggcggtgtcggcgctgagctttgacctggcggtgtacgatatcttcgcgccgctgtcagtgggtggggcggtggtatgcattgaggatgagagctggcgcgacgcgcagcgctgggtgacgttgatacggcagcatcaggtcagcgtactgaactgtgtgcccgccattgcggagatgacgttcaccagtgccgctgcggataacctgacgttaccactcaggattgtgctgctgggcggcgactgggtcccgcttgatctgccgaagaagttacgcatagtcgctgagcagtgtcgctgtattgcgctgggcggcacgactgaaacggcgatccactcgacggttcaggagatcaccactgtgccagctgaatggcgctcggtgccctacggatatccgcttaacaacgttcgttgccgtgtcgtggacagcctgggccgggatcgctgtgactgggtcagcggtgaactgtggattggcggcgcaggcgttgcgctgggctatcgccacgatcccgagcgtaccgccgaccgttttgtcgtagagaacggtgaacgctggtatcgcaccggcgacttagcacgctatcaccccagtggctctctggagtttctggggcggcgcgatcatcaggtgaaagtgcggggctaccgtattgagctgggcgaaattgaatccgcgctgatttcccaccctggcgtggcacgcggcattgttctgctcgatgatgaacaacatctggtggcggcctataccagccagcagccggtggagagtgcggcgctgcgtcagcatctgcaacgttatctgccgcaggaaatggtaccggaacgactggtggcactgtctgaacttccgctcagccacaacggcaaaattgatcgcaatttactgcgacagttactggccgaccttacaccggaaacggcccatacctacgaggctgccttgccaggtgtagaacaacaggtggctgcgatctggcataaaacactcggtatattaccgggtcgtcaggataatttcttcatggcaggcggtgattcactgctggctacccgtgccgtggcagaacttcgtcgccagggatttagcgatgttaccctttcaaaactctttgctcatccggtattggcagatttctgccagacattgcgcggcaatcaaccgacaaccgccacgcctgccatcgttcatgatgctaacgggcgttacgataccttcccgctgacggatgtgcagcaggcttacctgtttggccgggaaagtgagtttgcgctgggcggcattggctgtacgttctatcgtgaatttgaggttaatcatctggatctcgcacaactggagcgcgcggtgaaccagttgattgtgcgccatgacatgctgcgggcggtattcagtaacggccagcagcaggttcaaaaagaggtgccgcactatcagatcccgctgttcaaccagccgggtgaagataacattggtctgcaacgcgcagaatatgcctcacacagcttcgatccacagcactggccgctctttagcgtcagcgtggcgcagtggggtgaagcgcatcgagtggcaattgctatcgacaacctgatccttgatgcgctcagtatcctgttgttctatcaggaactggacgcgctctatcatcagcgttcgttgccgaccgtccccgctgttcagttccgtgatgcgctactggcacgcctgccacagcaggcgcaacgtgaggctgcctgggactggtggcggccacgtctcgaccacctgccgctggctccgcagttgccgctggcccggcaacctgaagcgatatcggtaccgaagtttacccgccgtgagtactggctgggttcggatcgctggcagcagctgatgcgaaaagcccgccaacacggtgtaacaccttcagcggtgatgctcaacgcatttgcgacagtactgcggcgctggagccatcagccggactttaccctcaatttgaccctgtttgatcgtcctgaaggccacgatgatatgacccgagtgatgggggatttcacttcgctggttttggtgccgtgtcgtcatgccgacggcggctggctggatgaaatttgccaggtacaacgcgatatgtggggcgcgctggatcaccgttcgctctcagccgttgaggtactccgtgaactggctcgtctgcatcaggcgcctgaactggtgatgccggtggtgtttaccagcgctttgggaattagcgcagaaccggagcagggcatcttcagtcaacccgtttatggcctgtcacaaacgccgcaggtctggctggatcaccagttaaccgagctggcaggcggtgtctcgctggtctgggatgcggtagaggctctgttcccggcgggtatgctggatgcgatgttcaccgcctatcagcagctcatccatcatttatgtgaccataactggctgcagtcacttcccgacctcttgcctgtgccccaacgtcaggtgcgagaggcaatcactgccgccgcacatcacccctatgtagcggaaacattgcatcacgcttttttccagcaagccagtcagacaccgcagctggtggcgttgatttggatgcaagagcagcaaacctgtcagctttcttatgctgagctggcacagcaggcgctgaaactggcgcactggttgcaactgcaggggacgctggcgggcgatagggtggcgatttcactcccgaaaggcccgcagcaggtgatcgcggtgctgggggtgttggctgcgggggccagttgggtaccgattggtatcgatcagccacaggcacgcaaacaggcgattttgcaaagggctgacgtacggctgatgctcgatcagaacacgcccttgaccggcgatcaggccgtgcagacggaagtcgcggcgttggctcatccggtagcaatctccccccaacagctggcgtatgtcatcttcacatctggctcgaccggagaacctaaaggcgttgagatgtgccacgccgccagccataacacggtgcacgatttgcgccagcgactggcgatacagccgcaagaccgcattctggcgctctcggcactcgattttgatctttcggtatttgatctgtttgcgccgttaggctgcggggccgcgctggtgatggtggatgaggagtaccgtcgcgatgcagctcactggatacacttaatacaaactcatcgggtcaccctgtggaattcagtgccagcgctgctggaaatgctgctgacagccgcgcaaaacgtcacgttgcctgcgctgcgggcgtcgttgatttccggtgactgggtccccctgtcgctgccagagagattacaaatgagcgccccgggatgtcgtttactggcgttggggggcgccaccgaagccgctatctggtcaaacattttcccggtgaccacgatcaaacctgactggcgttcgatcccatatggctacccgctacataatcagcgctggcgtgtgcttaatgcggtcaatgccgattgtcctgactgggtggagggcgaactgctcatcggcggtgcgggtctggctcgcggctatctcggcgatccagcgctgactgaggctcgtttccctgtgcttgatggcgagcgctggtatcgtaccggcgaccgcggccgctactggccagacggtacgctggagttcctgggtcgactggatacgcagatgaagctgcgcggccatcgcattgaggccggtgaggttgaacaggcattgcagacgcttaaaggcatcgaccaggcggtggtctcattgtggcacgatggcatcacacagcgacttgtagctgccgtcgccccccacactcctacctgtgtcgagcaggatgaggtattccatcctgacagtactcaacgcggtctgctgcagtatgaatcggcggtggccgaacacattctgacggagctcctgcaactgcctgcgcaagtcggtgcagtctggcaagtgaacgcgcttcagcccgatgaaaagggcgagcaggtgctgcagctgtggctgaaatggctggtgtcgcgtggtgtggttcagccacaggatacacactacattgccaccggaactgctgccgtgatcgccagacctgaaacggcgcagatcgttgcggcacgcacccgttatgccagctggcgcgccatgttgcgaggtgagcaagaccatgtcgcactgctgaccgacagtgtattcagccctgccagcctgtcggccgcggatgatgagacacggcaatggttgtcacagctggcgctgcatgttaacagcctgcaccaccagagcggcaagccgatcaacatcgtggaactcaacggggccagcggtcagcacagtgctgcgctgctggcgcgcctgccgcagggcagcgtgcattacaccttgcttgaatcctccccattggcgctggagcaagcgcggactcaactcgcaaacagcggtcatcagatcgatttcttgttgctgaatgaactgtatgtgccggaagaactgcaaaactcggctgacatcgtgctggcggcgaatgcgttgcaccgctacgtccaacccttacatgggttgaaggcagcttctcagttgctgaggcctacaggagagctgtggatgatggaacgccagtgcctgacaccggttgccatgatcagcgccgggctgctggcgggaggatatggcaatagcaaaaaagatccgctgcgtactggcgcggtgtggcagcaacgagctcaggccagtggttttacatcctgtgagtgtaacctcagcggtctcgccgccaccttaactctacgcccttcacatcatcatacgctgcccgatgactggtcgagtcagctggcggaaaaactgcccaaagccatggtgccggagcggttggttctgctgacacatctgccattgaccgcaaacggtaaggttgatcgtaagcgcctgcagtcactgtatgacaatctgcccaggtcacaacaacagcaggaaacactcagtgaaactgaagaaaaactcgctcagctatggggaacattacttggcattacgccgcacatcggccgccagcagggcttttttgaattagggggggatagtttgctggccacacgtctgattaaccttatccgtgatgaatttgccgtcgatatcgcgctgcgaaaagtctttagcgcacctggcctgcaggcaatggctgccgagattgaggcacagcaggctcaggttgccaccatggaaggaggtgttctgtga

SEQ ID NO: 432397 - DNA, 1041 bp, Serratia marcescens
gtgattggtattttgggaggatttggtgccgtaggcagcgaggtcgcacgtatcctgcatcagtggggggaaacttcgctgcgcgtgggagggcgtcacccgcaacctgtcgcctgggcacaaagctgctatgtggatgtgagtgacgaagaaagtctcatggctttcgccaccgactgtcggttgatcgtgaactgtgctgcgccttcggcacgactgtcacaacaggtggcgaaccgactgcacgccgcaggtattccgctggttgacgcgggcggaattgattgcccggcagcgttaacacctccggttggccggcatccgggcagcgcgttgttcgcagcaggcgcattgccaggtttgtccggcattcttcctgtgtggctggcgcgtaagctgggccgcgtcgatgcgttgcactgctggtttggcgtgtttgatcgtttcaccccaggcggagcagaagactatcttgagggtgtgctgcgcacgccagcctctcagcataccctgccgcggcgacagtccaacgtcatcctgcctttctttccacgcccggtgctgctgcagccgtatgacgatgaggagtcgctccgggtcaccgaacaactggcgcttcgttacagtcgatggtatctcgcgcttgatggtgaacacctggcccgcgcgttagaaacagcgcgtgtattaccacgagaggcagcaatacaggcggtggtggagggggcgacactggatgtggcgggtcgacatgcatgggttaactttttgatccaggtagatggcgtgcgtcagggcactagcaccacgttaaccttattgctgagagcgccgggcattgctcagttaaccgccgcctgcgcggcggcatgcgctaaatggctgctgaagtcacctgagccagtcctggggctggcagccgaatgcatcgatattgaagcgttcatgctgctgttctgccaggagcaaaccggtattgatattgagttgtttgaccgcgggattgagcatttaaacgaaatgagcggaggtgcgctatga

SEQ ID NO: 432398 - DNA, 2223 bp, Serratia marcescens
atgaacgcggtaccgttaaaggtgctggtatgtggctccacttttggccagttctggttggcagcactgcagcgttatccactgcgctttaaagtggtggggctactggcgagcggcagcgcacgtagccgtgattgcgcgcaacgctatgacattccgctctacaccgatatcgcctcattacctgaagacattgacctggcctgcgtggtgttgcgtgctaccgtgatgggcggtgcaggcagcgttctggcacagcaactgatggccaggcgcattcatatcattcaggagcagcccgtacatcatgatgaggtggtggcgaacctgcgctcagcgcgtgaattcggtgtgcagtatcgggtcggcaacctctatccacatctgccggcggtgcagcagttcattcagtctgcccaccgcctactgcggcggcaaaagcttcagtttattgatgctgcgtgtgccagccaggtggcgttcccactgatcgcgatactggtggaagcccttggtgcacctcgcccgtggcagtttcatgcccaggagcaattaccagaggcacctttccaggtggtgcagggacagttggcaggaatccccttaacgttgagtgtacataacgaagtcgatccgcaggaccctgacaaccatttccagctgttgcaacagatcacgctgggcttgcccgcgggacggttatcgttgatcgatacacatggacccgtgatgtggttcccgcgtttgcatatccctgaggcggtaaaacgcgaccgcgattttagcagcccgcaatcagcacatctgatggaagataccagcgccattatcggcgaggtccagcgtgccagctggcgcaccacattggcggaacactggccagaagccattgcccaggatttactggcgctggcggagagcatcttatctcctgaggccccccgctggagtccgcaatccctgttagctcaatgtcagatgtggcaggcgctgaccaaaacactcggctatccgcgcctaaatccggaccagcggtttgaacctctggcgcgtaccttgctgcctgtcaccaccgggctggaacctaaagccaccccacagtgggattttacccagcgggcagagctgctggtgagtggcattactgctcagcaggtgacggattttgtcgcgcggatggatgaagcttgcctgaacgccatgctgtttagcctgcaacagggaggcgcgttgacgcatcccgatcagggtcacgacctgccagggattttgcaacaactccaggtggccgaagcgcatcacgccctgattggacgctggctgatgctgctggccgatgccggtctggtgatgcaacgaggcgcgcactactttagccgacgaacgatcggctataccgagctgcatcacagctggcaggcggtgcacagggtgtgggacaaccgcctgggctctgccacttttatcgattatctgtggcaaaacgcggaaaagctgggtgagctgatgtgcggcgaacagaaggcggcactgttgctgttcccggaaggccgtaacgatattgccgatgcggtctatcgccataccatcaccgcccgttatctcaacaccctgattgccgactgggtcctgaagcagctcagccagcgaacggcaccgctaaaagtactggagattggcgcaggcaccggtgccaccaccgaacgggtacgggaacggctgcatgaggtgtatggggaaacgccgccgctcaactggctgtttagcgatgtctcacgctttttcttggtgaatgcgcaacagcgctatagccatctctcctggctctcgactgcactgatcgatattgaccgccccctgaccgaacaaggcatcgctgcagattcccaggatctgctggtaatggcgggggtactgaacaatgcacggaacagcgagcaaaccattcgttggctagcggaggtgttacaaccgggcggtgccatgttaatcaccgaaccgacgcgggaacatctggaaattctcacctcacaggcctttatgatgccgccaccacaggatgaccgacagcgcagtgaacagcgttttctttcaccagagcagtggcaggatctgctacagcgcgccgggttgatttgtgaggcttgcctgcccgacgaggggcatgtgctcgcaccgctcggacagcgcctgtttatcgcacggaggcccggcaatgcttag

SEQ ID NO: 432399 - DNA, 711 bp, Serratia marcescens
atgcttaggtgcagccatattctctgcaaagtcgataacattcgtgactgcgtagcccagcttgaacaggctgggttcagcgtgcagtgggggggcgatccggctcgggcacacaatgcgctggtgtggtttgaagagggaccgtttctggagttctttgaactgccgcgttggttccgctggctgagctatccctttggctggcgcttcggttccagcgccggtcaacgtcttagggggtgggcgcaggctggcgagggctggtgtgatgtggcgctggaacctgaacagtatcagcccgaagcgccacttagcctggataacgtcagtcagcatttgcgtcagcaggcgctggcaggttcgcgcgtcgtaaatggcagccgtaaatcggtacagggtgaaagggtgaactatcgctttatgatgccgcgcggtaaccatctgccgtttatcgtctctcattaccacccgctgcagcggccggtttgcgtccggcatgccaatggcgcacgcgccgtgacccgggtggattttcatatcccgctgcccagccaccgccagttgcaacgcctgttgcctacggaccgctggctcaagagtcagcacggtgagcggcgctatgtcagcagcgtggttttacaggggtggcaggcactgccgcagacatccgaatttattcagtcgttatttaacccgtcgcaggaggcgtaa

SEQ ID NO: 432400 - DNA, 1401 bp, Serratia marcescens
atgcgcgagctattttctgccttacagcaggtgctggaaggggatttactgttgccgcagcatgcggaatacgaagttgcacgccgggtacgcaacgcccgtattgactgccggcccaccgcgattgtgcgctgtgtcagcgtgcaggatattcaacagtcacttcaactggcggagattcagcaactgccggttgcgctgcgaggtggtggcgcccacgtggccggttacggcacctgccaggatgggctggtgcttgatctgtcccgcatgaagcagatcgctattgacccggataaacgcctggcgcacgtcgcccctgggaccacctggggcgaactggatgcggcaacgcaggcgtatggtctggcggtacccggcccgcgtaatcccacgatcggtatcgccgggcacaccctgggcggcggcgttggtgacctgtcgcgccagtttggcctgaccagcgataacctggtgagctgcgagctggttacgttgtccggtgacgtgctggaagtgaacccacagcacgatgctgaactgttctggggtttgcgcggcgcgggcgccaattttggcgtggtatcgcgttttacgtttcaattgcatcccgttgagggcgtcgtggccggcgtgctcgcgtggcccgcacgggacattcctgttgtgttgcgccgggcacgtaactggctggcgcaggcaccggatcaggcctcgttgattgcccttgtctggacggcaccgccgctgccatttttgccagaatcactgcattttgagcgcagtatcatgctcattcccacctggtttggtgcgccagagcaggcggaacaagtacttgcgccccttaaggtgggcgcgttgtgcgacacgctgcaaccgatgcgttacgtcgattatcagcgccttctgccctcggcgcccaactacctacagcagcatgtttacaaccgtggcgaattgctgcgtgaactggatgatgacacgctcgaacgactgctggcgctgttccagcgtgctggcccgaatttctcgctggtgtttggtgcacttggcggtgccattgcccgcgccccggcgggcgcaactgcgtttgctcatcgagatgccaactggtttgttgaagtctgcgcccagtggtacggcgagcccgataacccagcgatgcttgcaccggccattgaggcctggcaacagctgcaagcggtgagctgcggtccttacgccaacctgctgcctgaccatgagccgcgttgggcgcaggccacgtatggcagcggctgggcacgcctggcggcactcaaacagagatttgacccgactaatcgcctgtgttttaacgtcaatattccgccccggtcatcccgcgcgatggctccgggcaaggaggatttagcatga

SEQ ID NO: 432401 - DNA, 5412 bp, Serratia marcescens
atgactgaccactccatcgcctttgagctgcttcaacgcctgcgcaaccgtggcgcacaactgtgggaggagcagggcaagctaaactaccgcgcgccgcagggcgtgatttcagcggatgatttacacacgctgagggcccataaagccaatgtgttagccattctcgcaggagaacagcagcagaccacgctcatagccgatgagactgcgcgcttcgcaccgtttcctctaagccaggtgcaggcggcgtatctggtcgggcgtaatgatgcctttggctatggcggtgtggcctgccatgtttatctggaggtgaattatccactgctgcaacatgccagagtcagcgctatctggaatgagctggtcgcgcgacacgacatgctacgtgcggtatttgatcgcagtggcagccagcgcgttttacccgatgtgccggaactgatcattgactgcgcgagtagcggagcggagcagggcgaagcgctgctggacagcgtgaagcagcagatggggcatcgactctatcagcccgagcagtggccgctgttcagcctgagtctgtcgcagttgccggcacgcagcgtgctgcatttgtcgatggacttcctgattgccgactgggccagtatctggctattgttgggcgagtttgaagcgcgttaccagcatcctgaccagccgctgcctccgctaaagattcagttccgcgattatctgctggcggagcgcggcatggatgagtcaccggcggcccaacgcgatcgtgcctggtggcagcagcgtattcctcagttgcccgcctcgccgcagctcccgttgcttgatacacaggaacgacagcccgcacgctttacacgacgttttttgcaactgccggaggaacgctgggcggcactcaaacagcaggcggcacagtgcggtattacccctacagcggcggtgttaaccgcctatgccagcgtgctgcagcgttggtctgccagcgaacacttctgcctcaatctgacggtacttaaccgccagccgctgcatgagcaggtggatcgtctggtgggcgatttcacctcggtcagcctgctggaggtcgatcaacgccgtccaatgagttgggcggagcgcgccagcgccatcagccagcaattgtatgatgacctggatcatcgcctttgttccggcgtcgaggtgatccgtgaactggctcgcgccaaagggcgcgattacgctttgatgccttatgtttttaccagtgccatcggcctggtacctgccgatgcagaaaacgcgttgcagggcaaactggatggacgtggcattacccagacgccgcaggtgtttatcgactgtcaggcgatggacagtgctgccggtttacaggtcaactgggatgtgcgcgacggggtattcccgtcggggatgatcgacgatctgtttgcgagctttgaatcactgctgaatgccatggcgcaagaagatgcgatttggcagcagaccgcgcaggttgcactccccgaatggcaacgtgaacaacggttgcaggtcaatgatacccacgcaccgctacccgaaggcgggctgcaccagccattcttcgcacaggctcacctgaccccggatgcgctggcggtgatcgatccccagcagcagatgacttaccgtcaactggcggacgcagccttgcgcattgccggccatctgcaacggcatggcgttgccatcggcgaaccggtcgcgatcacgttggaaaaaggcgtaatgcaggccgcggcggtgttgggtgccatggctgtgggggcggtctgggtgccagtcgatgtctcacagccggcggaacgtcgccggcaaattctggcaaacgcgggtatccaacgggtactgacccagcaacaggtagtagagtgcggcgtcagtggagagtggcgtattgatgtggatgcactgaacggcagcgagcctctgctggacccacacgcgtcgcgcagtagcgatgcggcctatatcatctacacctctggttccaccggccagcccaaaggggtggttatgggacatcaggcggcacggaatacagttgaagatatcaaccgacgtttcgccgtgcgggccaccgaccgcgtgctggcgctggcgcaactcggctttgatttggcgatttatgatctgttcgggccgctgagcgtgggtggcgcggtaatctatcctgaaccggcacgcgccaccgatccctcgcactggattgaatgcatcgaatcacaacaagtgaccctctggaatagcgtacctgcgctgatgcagatgctggagagtgcgctccagcaccagcaactggcgagtttgcgactggcattactctcaggtgactggatccctttaacgctgccggaatcactggcgacgcgtctgccacagcttcagctggtagcgctcggtggtgcgactgaagcagccatctggtctaactatcactgctggcagggccgtgatgccacgtggcgcagcatcccttacggtctgccgctcagcaatcagggtttccgcgtgctggatgacaacatggcggattgccctgtgtggttgcctggcaatctttacatcagcggtgcgggactggcgcaaggctatcttaaagatgctgagaaaactgcgcgccactttatctatcatccgcatgatcaacagcgactgtactggaccggcgatcgcgcccgctatctgccgaacggtgaactggaatttcttggccgcgcggacaatcagctcaaaatcaaagggcaccgcatcgaacccggggaaatcgaagcggcgcttagcgctttaccaggcgtggagagtgcttgcgtggtgccccatggcgaaggtagccagcggcaacttctggcattagtcagcgcgcagcgtcaaccagcgaaccccgtggattacgaccgcctgacagatggtattgatactgcaaccgcaggtcttgtgcagaacatcaccgctacgcagttacaacaggcgatgacagccctggatgctgtggtattacaacagatgcgcgacacgctgcaagcttatggtcttaatgatgaattcagtgaagctcagctacgagaaacacccgtgaatgctcgcttcttctggctggtgcgccgctggcaagcgatgcttgcgcaggctggcgctttgcctgattacagctggcagcaggttgacgcgctgtggcagcctctgctcgatggcccggcatttctggcttacatccgcagcaacctggagaatctcgccgggctgctcgaagggcgtgttgatgctcagaagctgctgttcccgcaggggcaactgaccaacgtgcaagcgctgtatcgtgaaaatctgatggcgaagtacctgaaccaggcagtcagtgccctgacgagcctgattgcacagcagcgcgtccagcggcctttacgtatcctcgaagttggcgcaggcactggcggcacgacggcggatgtgctggcagcgttgagcgagcagacgattgaataccactttactgatgtggcggccttcttcctgcctgaagcgcgtgcccgctacggccaacgagcgggcatgcattttggcctgctgaatattgacgatgatattcgctcgcagggctattgcccggagagctttgatattgtgctggccgccggggtactggaaaacgcccgtgaccaacgccgggcactggaaaatatccagttactgaccgcgccacaaggctgggtgatcctgacggagccgacgcgtgaatgtccgtggatcatggcttctcaggcattcatgatgacgccaccggaagacagcgaacgtcagcaggagagctatcttgatcagcatggctggcaggcgctgatgcaatcggtcagcggtgatccggtgctgtgcctgccgcgaccaggtcacgtgctgcattatcagggcttccatttgctggcacaacaaatcaaacgcgatcgtctgccgctgtatccgcaagtgctgcttgatgcgctgcaacagaaattaccgcgctatatgatcccggcgcagattcagtcggttgcagcactgccgctaacggcaaacggaaaagtggatcgtaatacagtcgtcaactggtgggtggaggaggctgcagagcatgatacgccgccaggcctgcaaccgcagggggatgcgcttgagcagttgctgtgccagcattgggctgaaacgctcggaattaaacagatcgcgctcgaccaggatgtgtataacctgggggctgactcgctgatcatggcacgcatggcaggcaagttgcgacaggtgctggccgctgacccctggcagatgggagatataccctttgacactttgctgcgtcatatgctgaatggcccaacggtgcgcgcgctggcgcaggccatccgttcgcagcatgcacctgatgcggctgccgcagcgcctcaagccggagagaaactgcagccagaaatcgagggacgggctgagggcagcaacggtattctgctgccgatggggggcgggagtgaaggcccgctgcgtgtggtgttccatgccggcctgggtaccatggattgcttccgcccgatgctggcggagctggagaaagatccacgcgggccggtcatcggcattgtgattgccgataccgcacaatattgcgccttgtccccacaacaggcggttgagcgcatggcagatgattacgcacaacgcctgctggccaccggacatagccgcttccagctgattggctactgtctgggcgggttgtttgcggtagaagtggcgcgtcgcctcagcgagcagggcgcagaaatcgctgacctggtgctgatcagcagccatccggtgttgttcgaggtgcaggatgatctgatgatcgaatcgctgtttatccccaatctgcacattacgctggcgcaggccggtttcggtgaggttgatggcgatgcattagtgaagggctttatgcaggtgattgagcaacatcatggtcgcattccgcagggtgcgctggcgcagttacccggcgcagcaggcttgtttttccaacagatgcagtcattaccgattgaagagcgttttgcgcgttatgtcgcgggtgttgaacagttcaccggtcagcagatgccagccgaaatggcactgggcctgttccgcgtattccgccagagtttccatgccgcacacttcacccccagcacttatgtcggcgatatccgcttcctgttgcccaatcagggctctggattcgcaccgggtatggatgacaatacgctgaacttctggcgtaacgtctgcctgggcgatctgcaggttacttcgattgcgggtaatcacttcagttgcatcgatacgcccaacgcacaagccgtggcgcagcgggtgaatgaggggctgaaatga

SEQ ID NO: 432402 - DNA, 1767 bp, Serratia marcescens
atgaagttactgggacagcctggcaggctagtggcaagcgtgccgaaggtggcgcgctcacttaacctggcacttctttttggcagcgtggcgggcttgctaaacgtcagcggcatagcgctgctggcatgggcggtgacgccattactgtctgtcccgatgttaccaccgccgtcatttatcgccctcaccggcagtgtgctgctgttggtgctggcattctggttgcgcttacaggcagaagcacgggcccacgaagccagttatcaattagaggaagtgctgcgcgggcgtcttgtggagcacctcagttgtttgccgcttggagtggtacagcaatggggcagtgggcggttacgtaaaatcctccaggaggatgttaaagcgctgcatattgcggtggcggatgcggtgccgtttatcggtgccagtctgagtcaaccgctggccgcgctgctggtgctggcgctggtgcagtggcggctggcgctggtggcgttgctgtttttgccgataaatctcgtgtgtatggcaatgatggcgcgtgaaaatccccagcaacgcaaccgatacaatgaggccagtgagtcagtcaatgccggggtgattgaactggtgcagggtatggcggttatgcgtacctttgataatggcgccgcgggttggcggcgctttaacgcgcggctgcaacagtttacgtcggcggtggaaacctggatggcaggcagcaaagtgccctggaaaatcaatcgtctggcaggtgccgcgttaccgacggctgcggtgctgatgatagcaggttttgtgctgtatcaagccgggcaggttaccctggcgcagtggctgctggcgttgatgttgggtacgttacccatcaaagcgctcgaaccgttagtgcacctggctaactatctgaatgacgctggcgcggcctcaggccgcattgaagaggtgctgcggcaggacgtgctgccagagccactacatccgcagcaaccgcaaggacacgcactcagcctgaacaaggtcagttttcactacccggatcagccgcagcctgcactcagcgacgtgtcattaacgctcgcagcgggaacacgctgtgccattgtcggggcttccggttcgggaaaatcgacgctggcgcgcctgatcccgcgtttttatgacgtgacagagggtagcattacgctgggggggagcgatatccgccagatgcgcagtgatgtgttgttgaagcagatggcgctggtattacaggagccgtttcttatcagtggcacgctggaggaaaatttacgactggctgcgcccgaagccagtgatgcagcgttgcagcaagttatggccgcgacgggggtgagcgagatcgtttcggcactgccacaaggattaaacacgcagatcggtgagcgagggagctcgttatcgggcggccagcgtcagcgtgtgaccctggcccgcgcactgctgagcaatgcgcccgtgctggtgatggatgaagcaacttcttatctcgatgcacacaacgaaaggcatattcagcaggcactggcgcaactcgcgccggatcgcattgtgatcactattgctcatcgtttgcagacggtcattgacgcggatgtgattgtggtgatgcacgaaggcagagtggctgagcaaggccgtcatgctgacttgctgaagcagggcggttattacgcgcgtctgtggcagcactatcagcttgccagtcagtggacgttaaagcgcgagggagaagtatga

SEQ ID NO: 432403 - DNA, 1734 bp, Serratia marcescens
atgatgcgcatttatcacaacatgattgcggtggcaggggagttcgctgcgccatttcgccgaacgttagcgtgtgcggtggtggcggcgatgttgcaagccgcgggctggattatcacactgccgctgttttcgctcgtattaacaccgggcgcactgcccgtgcgtgacatcctgagctggctagtggtgctcattgttttgctgctgcttgaaggcatggtgcgctggcgtgaaatggcttttgtctatgactactggcatcgcgtgacggaggccatgcgtcagcggctggcacatcgcttgcgtgccatgccgctggagcagttggcacggcgaaaaagcggcgatctggcaacgattcttggcaataacgtcacctttgcggcaacggcgctctcttcactggctacgctggcgattcaactggtggtggtacctgcggtggtgctggtgttgatcttcacgctggactggcgtctgggggcgctgctgctggcgggaacagggctcatcgtgccgctgatacggcgggcacaacgtgatgccaatcaggattttctgcgcattgatgaagtggatgcggcagccagcgcagccattgttgagtatgtgcaggctcaggcgatgttacgtgccagcggccgatctggcctgaacgcgccttgtttacgcggggtttttgctcaccagcatcaggtgcagcatcaaagcggcaatactgcacggctgattgccaaagcacaactgatcatacagctcactctggtggctaccgtcgcgttggggatggggttatgcgcaacgcaacagttgccgctggcatcactgctctgcctgacggtgctggtagcgcaaatggtagagcctctgacattgggactttccatggtgcgcctgtttgaactagcggacgcggcgttgcagcgggtgaatgcggtgctcaatgaagcggatctggtcactgaactgccactccatcaaccacagcactttgcgattacgctcaacaatgtcagttttcactatcagcagcaggaaaaacctgcactccaggatgtgacgctacacattgcagaaaaatccctgacggcgttggtcggtccttcgggcggggggaaaaccacgctaacccgattgatgagtcgctttgccgatccacagcagggcactatcacgttgggaggcgcggaattaaagcatatcccccccgatcagcttttagcacaggtttcggtggtgtttcaggatgtgtggctgatggacgatacgctggcgaataacatcgcgttaggtaaaccgcacgccacgcaggaggagatcatcaacgctgcacgtaaagcgcatattcaccacgtcattgaaagtctgccgcagggttatgagacacgggcgggtgaagcggggggggcgttgtcgggtggagaacgccagagggtggcgattgcgcgcgctattcttaaagatgctccggtcgtgttactggacgagcctacgtcatcgctggacagcgaatcggaatatcatgtgcagcaagcgatagacgcactggtggcggataaaacggtggtgattgtggcgcatcgtttatccaccattcgcgcagctgaccaaattgcctttattgagcaaggccgttgcgttgagtgtggcgaccacgccagcttaatggccataaaggagggacgttatcgggcattaattgaggctcagcatcacgccctcgacaggtaa

SEQ ID NO: 432404 - DNA, 2157 bp, Serratia marcescens
atgcaaaacagggcacagaaatggccatcgctgaaaccactcagcttggccttgatggcaatcatggtggcatcgcaggccagtgcagaagagacgataaatgtcgtcgccgaatctgccgacagcagtggattggtcgcaacacacagtcagagcgcaaccaaaagtgatacgccattactggaaacgccgcagtcgatctcagtgattactcgtcaacagatggatatgcagaacgttcgctctttaaatgaagcgctgcgttacacaccaggcgtggcggcggagcaatggggtggggtgagtgcgtttgaccagttctcaattcgcggattcaattacggctccaccggatttaacgatcagtttctcgacggattgcgcatgaacaacgggatagtttatggctatcaacaggttgatcccttcctgctggaggatattaccgtggtgcgtggcccggcttctgtgctgtatggcctggccagtccgggtggaattatcgcgatgcagagtaaactgcccactgcgaagaccattcgccatgttgagctggaaggaggaaatcatcagtatcagcgcggctctttcgattttggcggaaaagtcaatgatgacggcacgatactttaccgcgtggtcgggacggcaactaccaaagaaggtcaggagcggggcaccgaaatgcggcgctgggcgttagcgccttccattacttttcagcctgactactataacaagctcacgatttatgcgcgtgcgcaaaatgatcctaaaatggcagcccagacttccctgcctgttgccggtacggccaaatacaatcctaacggtaaattaccgacagacgcttatccaggcgagccggatcacaataccttttcgcgtaagcaggccgctgttggctatagcgcagaacactactttaatgatgactgggatgtcaccctgaatggtcgctacagtcagatgacatcaaaatataacgcggtgatttttgccggattgcaggacgatatgcgtaccatcaaccgatcaatcgccgcatctgacgagcatttcaataccatcaatctcgacaatcagctgcacggacatttcactacggcggatattgatcatcaacttctggttggcatgagctgggatcgctttaccgggcacggcaattacgccgcttcttatgatgtccccacgctggatatctacaacccggtttatggccaggccacctacggcacgcctgagaactatcaggatacgcggctgatgaatacacagaccggtttgtatgctcaggatcaactgagctatgaaaaatggcgcgccacggtgggggtgcgtcatgactggtcaagcgtgcgtaccactgacttaatgggttacagcgcggataccaaacagcgtgatgaagccacaacctggcgtgccggcgtcaattatctgtttgatagcggtattgctccgtatttcacatacgctcaatcattccagccgatcaactctgtggacagcagcgggaacgcgtttgatccctcgcacggcgagttgtatgaggcaggtattaagtatcagcccaaatatttgccagcgttattctctattgccgcctttaatcttacccaggacaaagtcctgaccactgatcccaacaacatcaactactcggtacagggcgggaagattcgttcccgcggcattgagttagaagcgcgtggccaactgactgaccagttcagcatcatcggatccatgacctggcagaatgtggaatatacccaggacagcaatcgcgatgtcgttgggcgcaccccactgcgtatacctacccgtttcggttcgttgtgggtcaactgggaagcgccggagtccagctttgcttccgggtttggtgcaggtgtggggggacgtttcagcaatggtaccaaaggcggcaccatggagaaccagttcagcaccgctggctatggcgtgatggatgccgaagtgcatttcgatctgggacatctgacttccaacctaaaaggtggaaaggtgcaggtcaccgcgcaaaaccttaccgatcgtaagtacatcaccagctgctttaccgaatctcagggctgtttctatggggctgagcgtgccgtgatagcgaagctgagttgggatttttaa

SEQ ID NO: 432405 - DNA, 948 bp, Serratia marcescens
atgtcccttaccgatgcgaaaattcgcactctcaaaccttctgataaaccctttaaagtctccgattcccacggtctgtatcttctggtcaaacccggaggttcacgtcactggtatctcaaatatcgcataaacggtaaagaatcccgcattgcattgggtgcctatcctgccgtctccctctctgatgcccgccatcagcgcgaaggtatccgtaaaatgctggcgctgaacatcaacccgacacagcaacgcgctgctgaacgcggaccctccacaccggataaagtgtttaaaaccgtggcgctggcatggcataaaagcaataagaaatggtcgcagaacaccgccgaccgtttgctcgccagcatgaacaggcatatctttccagtcatcgggcatctgtcagttttagagcttaaaccccgacatttcattgagctgctgaaaggggttgcgggaaagggcctgctggaagtcgcgtcccgcacgcggcagcacctcagtaacatcatgcgtcatgctatacatcaggggttaatcgacagcaacccggcggcaaaccttgacggcgtgacgacacctcccgtcagacgccactatcccgccctgccgctggaacggcttcctgagttgctcgaaagggttgaaggttatcatcggggccgcgaacttacccggcttgccgtcctgctgacgctgcatctgttcattcgctccagtgaattacgtttcacccgctggtgggagattgatttcagaaaccgggtctggacaattcctgccactcgcgagaccattgctggtgtgttattccgggcgcggtgccaaaatgcgcaccccacatattgtgccactacaggaatccggtttatggtcgcaggatgcggtggagcgtcagatgagccatcaggagcgcaacaccgtacgcctggcttacattcataa

SEQ ID NO: 432406 - DNA, 1152 bp, Serratia marcescens
atgttgaattatgtcctggaagggcccgaaaacgccccggtcattctgttcagcaactcgctggggacgtcattggcaatgtggcaaccgcagcgcgacgcgctcatctcccactatcgcattctgcgctacgacgttgccggccacggcgcatcgccgcccggtgaacaacccggatcgctggcgctgctgggcagacaggtgctgtcattgctggacgctctggcgattgagcgcgtccatttttgcggtatctccatgggggggttaacgggattatggctggcgcgttttcatcccgagcgcttgctgacgttgaccatcgccaatagcgcagcaaaaattggaacggcggcgaattggcgacaacgcgccgcgcaagtgcgtcagtcggggatgtccgccgtcagcgatggcgcagcatcacgctggttcacgccggcattttgccaatccgcccccgccagggtgcaagcattattgaaacagcttaccgcctgcgatcccaacagctatgccgcttgctgcgaagcattggcgaacgccgatttacgcgccgagttggaagggatcctcgtgccgacgctgattatcgccggacatgacgacgcggtaaccaccgtcgatgatgccaaagcgttagtggcgggcattcccggcgctcaatgcgtcatcttgcccgcctctcacctttccagcgtcgaggcctggcgggcattcaatcgcactttccgggcctttttggatgaacagctcacgcagcggcaacgctatcagcaaggcatgacggtgcgcagagccgtattgggcgatgaacatgtcgataataccctcgcggcgctgtcgccgttcaacgaggaatttcaacatttcatcactcgctacgcctggggggaaatgtggacgcgtccgggtctgtcgcgccatacccgcagcctgatcaccatcgcaatgttgatcgccttgaatcgcgaagctgaactgaaaatgcatatacgagccgccttcaacaacggcgtcacgcgcgaagagctcaaagaagtcctgatgcatgcggcgctttactgcgggctgcccgcctcgaacgccgcctttcatttggcgcaatccgtctttgccgaacacgatgccgggcagccgccggtcgaatag

SEQ ID NO: 432407 - DNA, 453 bp, Serratia marcescens
atggctatcgacaccgataccctgctggcaccggtcgacgcggacaatccctgcggcgacaacctggaatacgacgccgactttctggcaatggaacaagccgccaccggcaaggccgaacaacagttcggcagcaccatcatcccggaagaagcgccggattgggtgcaggtcgaacgcctcgcgacctcgctgctggcgcgcaccaaagacctgcgcgtcatgctgtatctcacccgcgcctggacccagctgcgcgggttgccgggctacgccgacgggctgacgctgatccaccagtcgatggcccgttactgggacgccctgcagccgccgctggagttcgacggcgaggccgacccgctgtttcgcatcaacgcgctggccgaccttggcgacaaagccgcgctggccgccagcgtgcgcgccgctgctgaaaagcgccgccggtga

SEQ ID NO: 432408 - DNA, 1887 bp, Serratia marcescens
atgatgaatacctgccctgatatcgctacgttgcgaaacactcttcctggcgcggtcggcgaattgatcgccgtgaccgcatactacggcgattggaatgtcagcaatcgtcagcccatcggcggcggtatcttcgtcgccaaagcacaatctacaccgatggatgacggcgggatgttcatccgccctaacgccgcttggttgtgggtgcgcgttctggacgtggccggcacagtgtcgccttatatgttcggcgcgaaaggtgacggtatttcagaggatgccactgccattcaggctgctcacgattatgccagttcacaggctgtctccagcggttctcgcatattgaaaaacggcaatctgcagttcgggagcggacaatttaaatgtacgaaaacgctgaagctggatttgaaaaccgttgattacgatttttccggcgccttgttggattttagcgccatgacacaaggcaacagcatcgaccgcaacgtcgcgattcaatggcaaaacaacgccggttatacccagggcaatctcagcgtgaaaaatttgcgtatgattggacctggggccaattcatttgtcgatggcatgacgttttctacttcgctctcggcaagctatggtcgcaattcgctgacctttatcggcggcgggatcgaaggttttgcctatggcataacaggcaccaccgatttttacttcctgcgcatgtacggctttagtttcaatcactgcgacatttgctattacttccccgacaatacttccaattccggtgaagagatgaatttccatagctgcattttcgctcagagtaattgcggggtgaaattacagggagggtacagctatttcttaaactgttccttcgattacatttacggtaaaaacggaccgcaaacctcctccagccatgtcggaaagtatatgcatatcgagggtgggcaacatattttccgcgattgtcacgttgaaggctatggcccacaaaattacatcctgaacataccggatgctaaacgttgcaaggtcaatattatcggcggtctgtttaccttcaaagccggcggtagcccaacggcctatccgacaacctctaacccattctatgtgggggatttggcgcgagtggtgtttgataaagtcaatatcggtcagatgcaacaaggtggtgacaccaacgtcagtggttggattgatggcacgggttctgtctctttgcgtaatacgcaattgcctatcgcctggccttatctgttaactcaggtgcgaaccgataccgccgtagaggacaattggctggatggcacgacgtatagcaacggtagcgacaaatggactgaggaagtttgggttctgccgccgggaggtgttaatacggtacgcaaatctcgctacgggtggggtacggctaacagcaccaattttagccttattcgccaggccgatttcgtttcattggggcgcaacgcggccgctggtgatggtgtgttccaagcggtgctgggaaccctcagcctgaaaggttacggcagcgttattcaccatgttcgcgccaacacttacgcgggtgatgggcaacgctgccaggtcaaaatcttatgggcgaaactgcgcgaatatggtccgcaccaggacgttgaaccccaaattctcaagcagcaaaccggtcacgtttatacctatcaatttagcggcaatgaatctgatctgaagagcgttatcatcccaggccaaatgcagggctatcctacgcagcctcccgccttcgagcgagcgccggactgggctacgcacgctttcttgcttattgacgtcaccgaaatgaaaagcaactttgacctgcgcattacggatgtttatctgcgacaggtctga

SEQ ID NO: 432409 - DNA, 1230 bp, Serratia marcescens
ttggttgaacaggttgtcagcatcgaccgcccagcgcccggccttgaccttggcctgctgcgcatccacatttcccttcgtgctcacggccagctcaccgctgtctacggtggactggcgcaaggccacgccgccctcgcgggccgccagcgcggtgcggccggccgcaacctgcgcgccgctgatatccacccggcgcccggacgcgttgacgttctttttaccgagcagactgccactggcgcggatatcgccctggctatcaagctgcagattggcatcatggaccagcgcgctttcgacattactgcccgccagcaggtggccgctgctttggatgccgcgcgcggcgttcaggtgcacattcccggccgccgccagcgtaccggactgcgtcaacattccctcgcgactctgcacggccagttggccaccgctatacactttgccgtgcgtctcgatgtcgccttttgccgccaattgaatatcgccgccggcctgggtggccgcatccggcgcatcagagcgccaactgagcttgccttcgctgctcacggtgagcgttttgcccgcccggacctgtccgccctggttacgcacgccgacgccggcttcggtgccgatcatgcggatactgccgctgtacatgccgcccatctgccccatgtcgatggcaagctcaggcctggcactgccgtcgtccgaaagcggcgcggcggttttaccgtccgcgctcacgcggttacgaccggccaccagcgtcacgccttctttagcccagacgccggcgttgacctccaccgcgcgcgccagaatgtcgacgtactcggtatcatgacgggtatcgccgttgagcccaccgccctcgatgcgcaacacgccgcgctcgacctggtagcccgccacgctgccatcggcgttcagttgcggtttgccggtggtcagcgtcatgcgcccagcgttgatggtgccgcagccgttgcagacaatgccggcggggttggccacaatcacctgcgccttgccgccggccacttccataaaaccgcgcagctggctgggattgttgctgttgacttcgttgaggatgacgcgagccggcgcggaattgggattgagattagggttaccctggatcatcccggccatctgggtcgcggtcatcaccgccgagttgttgaggatggcgcctttggcgtcgacgtcgaactgctgatactgattatgtga

SEQ ID NO: 432410 - DNA, 423 bp, Serratia marcescens
gtgcacattcagcgccttgccggcgccaatcaggccgcgttggttatccaggcggccggccgtcatttcgagatttccctggccgatgacctgcccctgcgcgttatccagccgttgtaccgccagacgcacgtcatcgccgctcagggtgccggactggttattcagatcgctacctgcctcaagcgccaggccgttccccgccagcaggttgccgccggcattattcaccgcgccatcagcatggagcgtgagccccgcctgggtttttatcgtgccgcgctggttatcgaggcggccggcgtcgaggcgaagagctccgttgctgcccatcgtgccaccgccattgtcgagcaggccacccactcgccagtgctgcgccgtttcccccaacgccaccaggcgaccgcgctgattgactaa

SEQ ID NO: 432411 - DNA, 1197 bp, Serratia marcescens
ttgcccgccattgctgcgcactgcaccgccggtattttccagcaaaccaagaatgcgcagcgccacgcgttgctggccgtctatcgtcccgccggcattattcagcgcctgcgcatcaagcgccagcgcatcgccgccctgtattttcccgccgcggttgtccagcccgccgttcaaattgagccgcagctgcttctggctgtagagttgccccgcctggacgttatcaaggctgcgggcggcgatagtcagcgcctggcccgccagccattcgccgccggtgttattgatggcgccggcgtgctcgccgtcagcggccccttgtacggtcagttgcccctgcgccgagaccttaccgctgcggttatcgatatcctgtttgatgcgcagcgccaggttttgcgccgattgcatcacgccccgggcgttatccaaccagtcagccgtaagctgtgtttcctgccggctctgtacgctgccctgcgtattgtcaaaaccgccgctgatggcccgccagctccccaggctgcccatccagccctgcgtgttgacgatatcctgtgcctgcaacacctgagacgattgactgaaaacacgcccctggcggttatccagtatgccggtgaactgcatgtccaggctatccagcgcgttgatggcgccctgagcattgagcagactggcggcgcgcacctgcgtgcggccattgccggtcaaggtgccgttttggttatcccagccccccgccagattcagagaaagcgcctggccgcccagcaccacccctgcggcgcggttggtcaactggcctccctgcagagacagatcgccgccgctctgcagggagccgccgtcattatcgaacaggctgcctgctccgccgttaacggcaagggcctgctgcgcggtcagtttgccggaacggttgaggatattgccagtcgcatccagcgtcaggcctccgccggactgcagccgcccgccggtattgtcgagcgactgcgcgttggcggtgacctgccggccaccttgtgcggtgccgccctgattgtcccaatcgccatcggtgttgacggcgagtgcgctgccgccttcaagccagccggcggcgttgctcaacccttgcttcgccgtcaggttcgcatcctgcctggcgaccaccttgccctgagcgttatcgaggcgctgcgccgttag

SEQ ID NO: 432412 - DNA, 1134 bp, Serratia marcescens
atgtcgacgttacggccggcctgcaggttcacgtcctggtcggcggcaatggccgagccggtgaccgtcagatcgttgccggcgctgacgctgacgctgttgccgctgagcagactgcctttctcgcgtgtggtggcgtcatgcgccatgctgtggctactgctttttttcaggaaaccttttttctgtgaccgctcttcactgagggccgactcgcgttcggtggcggtattgagggtcacatcctgcttcgcctgcagggcgatggcgccctggtcactgtgcagggcgctgccggtaaccgtgacgtcgccttcacgcccgatcacggtcacaccctcgcgcccgctgaaggtgctgccggtgctgatttcgcgctcggtttgctcttcgcgatggctcttggttttgccttcgcgcttgttttcgctgtccagatcttgcgtgcgggtacgcgcgtctttaatggtcacgtcccgcgcgctgacgccaatacgcccctctttactgtcaatctgcgcgccttcggccaacaggcggttgcccgccaccagggtgacgccctggtctccgccgagtgcgcttactgtcaggcgctcttcctggcggtcgttgctgactgatgaagtacggctgttggcgtccaggtgcgtggtgttggtggtgctttcggccctgatgttgatatcgccgccggcctgcacgcgggtgctgccggcggcgctggcctggctgcccgtgaacgtgacgtctcgcccggcattgagcgtgaggttgccgccggcgttaagctcactccccagagcctgctgccattcgccgctgacgtgcgccatccgggagcctgccgcttccgtgccgccgcgggtgcggttacccattgaaccggagataacctcaagatcggcggtatggctgcttttcgcggcggtgatggtcagatcgttacgcgcgctcaggctgagcgtatcggtcgcatccagtttcgctccggtgagcgtgatatcggtgccgcgcaggcgaatgtcgccggcgctcatggtcgcctggcgcagcgcgtcctgcaggttagtgctcatggccagactgtctgcctgcacgtcaatgctgcctgccctgacgtcgccgccctga

SEQ ID NO: 432413 - DNA, 492 bp, Serratia marcescens
gtgaaatctccgctcgaggcactgccggcccaactgggtgagctgatgctccgcgatcaacaacgcctgcgtcgtcgcctgcagggcgcacgaaaaatcaaaaatcccgatgcccagctggcggttgccgccgaagtagaaagcgacatcgcggcggcgcggcaaaaagtgcaggcgcgcgccgcgtcttgcccgcgcattacctatccggaaagcctgccggtcagccaaaaaaagcaggacatattaaacgccatccgcgatcaccaagtggtgattgtcgccggggagactggctcggggaaaaccacccagctgccgaagatctgcctggaactggggcgcggggtgaaagggctgatcggccatacccagccgcgccgcctggcggcgcgcaccgtcgccaaccgcatcgccgacgagctggaaacagcgtcggctacaaggtgcgcttcaacgatcaggtgggagaaaataccctggtcaagctga

SEQ ID NO: 432414 - DNA, 126 bp, Serratia marcescens
atgcgttcacgcgggatgtattccatgctggcgggccgatttttagccgcgcccgctggctattcccattttaattggcaagactatattgaaagaagctctgccctggagcgagaatatgggtaa

SEQ ID NO: 432415 - DNA, 555 bp, Serratia marcescens
atgtctagagtaaaaaagtatctaaaggcaggtttgataattttgaaatatccatccataaacattgataaatcatttaatattacggcatctaacatgattgattttaacgctaggattgtgtctggtgtttctatagggaatgtcgttataaatgaaaatatttcattatatattaatgaaatgcactccagatttagcgttaagattaaaagctacttcctacctgacgggagtgagcgaaagtcatatacagtcgacaataccttgaccgtcgtaactgataaaaacggtgtcattttgtcacttggatgtaatgctcattatcaaggaagctacaatggaatcatattcccaggaatgaaaataatagatataatcaagctgacgacatcacagaaaatatacaatggttcaatcattattaatgatgactttggtgtttcgtttatcctcccacctccatatgatgagatcgccgatgcgataaactatattcctgttggggtgataataaacgaaattttcatatctgatttttcattctggcgttag

SEQ ID NO: 432416 - DNA, 333 bp, Serratia marcescens
atgatgaagtttaaacaggtggctgttgatttttcagaaataaatacggatgatgaatttcatgatgaaatgaataggatttttggttttcccgatttttatgggaataacttcaacgcttttgttgactgtttaaatagccttagatttcctgatgatgggatgactagcatacacttagataaggatgagtatttgctgatgaaaatcaatggaatacattcattgtctgacgacattagatataattttttattggcggtagaggctgtcaataagggggctatctcgtttggtgacgaagcattgattctattacttttggttaaataa

SEQ ID NO: 432417 - DNA, 1515 bp, Serratia marcescens
gtgtcaacagcaaacaaccaacatccggagagcgtgagccttaacgcgttcaaacaaccgaaagcgttctatctgatcttctcaatcgaactgtgggagcgtttcggctactacggcctgcagggcatcatggcggtttatctggtcaagatgctcggcatgagcgaagccgactccatcaccctgttctcttccttcagcgccctggtatacggtttcgtcgccatcggcggctggctgggcgacaaagtgctgggcgccaaacgcgtgatcgtgctcggcgcgctggtgctggccgccggttacgccatggtggcttactccggccacgacatcttctgggtctacatgggcatggcgaccatcgccgtgggcagcggtctgttcaaggccaacccgtcctccctgttgtccacctgctatgagaaagacgatccgcgtctcgacggtgccttcaccatgtattacatgtcggtgaacatcggttccttcttctctatgctggccactccgtggctggcggcgaaatacggctggagcgtggcgttctcgctgagcgtggtcggcatgctgatcaccctggtcaactttatgatgtgccgcaagtgggtgaaggaaaacggttccaagcctgacttcaagccgctgcatctgccgaaactgctgatggtgctggtcggcatcgtggcgttgatcgccgtgtccagctggctgctgcacaaccaggtgatcgcgcgctgggcgctggccctggtttccgccggcatcgttctggtgttcgccaaggaaaccttcgccctgcacggcgctgctcgccgcaagatgatcgtcgccttcctgctgatgctggaagcggtggtgttcttcgtgctgtacagccagatgccaacctcgctgaacttcttcgccatccacaacgtggaacacagcatcttcggcgtcgccttcgagccggagcagtatcaggcgttgaacccgttctggatcatgctcgccagcccgattctggcggcgctgtataacaaaatgggcgatcgcctgccgatgccgcacaagttcgcgttcggcatgatcctctgctcctgcgccttcctggtgctgccgtggggcgccagcttcgccaacgaacagggcatcgtgtcggtcaactggctgatcctgagctacgcgctgcagagcatcggcgagctgatgatttccggcctgggcctggcgatggtggcgcagctggtgccgcagcgtctgatgggcttcatcatgggctcctggttcctgactaccgccgccgccgcgctgatcgccggtaaggttgccggtctgaccgccgtcccgagcgacatcaacgacgcgcacgcttcgctggccatctacagccatgtgtttatgcagatcggtatcgtcaccgccgtcatcgctatcctgatgatgctgaccgcgccgaagctgtaccgcatgacgctggacaccaccgaagacgccaatcagaaagcgcaggaagccaccgcggctcgctga

SEQ ID NO: 432418 - DNA, 879 bp, Serratia marcescens
atgcacggtatacagcgaatcctgcgtgctgcgctggttgtcgaacagctggtactccgccttctctttagcctgttcgccacgatcccaaccgtccggtacgtcgaaactgacgccgccgctgaacagcgttgtcaacgagcccatctccacccgcatgccctgcgccgacatgtcaaacgccacgccgctgtctttccagaagcgcacgttggtagtgaccaactgatcgtaaggcgcggtgatgaacagctgatagcgcatggcgcgcgctttcggatcgaagtagctggtttccaccgacccgacgcggtagccgcggaacagcaccggatcgcctgcgttgagctggcccgatttttcactgtccagcacgatgcgcagccctttggcgtccggggaggccagcggcggcgcatcgagcagctgatagtggtctttgccgtctttgcccttgctgcccggctgcagttcgatatagacgccggagagcagcgtgcccagcccggagacgccttcgcggccgatctgcggtttcaccacccagaaggcggagtcctgacgcagcaatttctccatgctggcgttgaggcgcgcctgcaccaccaccttgctgaggtcctcgctcagcgtgacggtttccaccacgccgacgtcaacgctgcggcttttgattttggttttacccgcttccagcccttccgccgtcgtggtgaccagcgtcaccaccggcccctgatggctgaagtggtaaaacaggatccaggcgccgatcagcgcggtcacgatgggaatgatccacaccggcgaccagcgtttgatcttctcgacgtccgcgacgctatgattattttccgtcaccttgcggctccttgttga

SEQ ID NO: 432419 - DNA, 1305 bp, Serratia marcescens
atgttgccatccgtcaatcggccagcgccaccgcacatcgacgcgtcgtcacagaataagacgctctgcccgcagtgtgacatgctggtggcgctgccgccgctggcctatggcagcaaagcggtctgcccgcgctgcaaaaccacgctcactacccgctgggacgagccgcgcaagcggccgatcggttacgcgctcagcgccttgttcatgctggtgctggccaacattttcccgtttatcaacatgcgcgtcgccggcctcggcaacgaaatccggctgatccaaatcccggaagtcatggtggcggaagactacgccagcatggccaccttgtttatggtgttcgtgcagctgatcccggcgttttgcatggtggcgatcatcctgctgtgcgccaggttgcgcttgccgctgggcctcaaagagtggatggcccgggtgctgttccagttcaagacctggtgcatggtggagatttttctcgccggggtgctggtcagcttcgtcaagctgatggcctacggcgatatcggcatcggcagcagcttcgtgccttattgcctgttctgcctgctgcaggtgcgcgctttccagtgcgtggacaggcgttggctgtggcaggacatcgaaccggcgccacgcctcgaccgcccgctgacggcggggcgtaccggcatgcgccagggcgtgcgctcttgcgcttgctgcacggcgatcctgccggccaaccaggtgcgctgcccgcgctgtcacacccccggctatgtgcgccgccgccacagcctgcagtggacgctggcgctgctggtgacctccgtcatgctgtatatcccggccaacctgatgccgatcatggtgaccgaggcactgggcaacaagatgaattccaccatcatggcaggggtgatcctgctgtggggaagtggctcttacccggtggcgatggtgattttcatcgccagcatcatggtgccgtcgctgaaaatgctggcgatcggttggctgtgctgggacgccaacggcaggaagaaaccgcgtgccgacagcgagtgcatgcatctgatttatgaaggggtcgaattcgttggccgttggtcaatgatcgacgtgttcgtgatcgccgtgttgtcggcgttggtgcgaatggggcagttgatgagcatttatcccgcgacgggcgccgtgctgttcgcgctggtggtgatcctcaccatgttcgccgccatgacatttgatccccggctgacctgggatcgcgcaagtgaaacaatcaacaaggagccgcaaggtgacggaaaataa

SEQ ID NO: 432420 - DNA, 1161 bp, Serratia marcescens
atggccctcaaacaacgttacggaaattggtactgcgattttgtcgagccgggcagtggtaaaagaattagacgctgccttaacacgacggacaagctccaagcgcaagagctctacgatcagctaagggctgaggcttggcgggtaaacaagcttggggagatagcggagcatacttttgaagaggcgtgtctccgctggttaacggagaaagaagagaaaaggtcattggacgacgaccgaacgaagatagagtttttccttcagcacttcgccggcaaaactctctcatctatcacggaagataggattatggctgctgtcgccaaaatgcccaacaggaaacatcgtcaacgatgggagctcaaaaaggccgcagcagagaggaagggtaaaccggtgccggcatacgagcctaaaccagtatcagcggctactcgaagccagcatctctcttttatgagggggctgatgaagatggcggccgacgaatggaagtggctgcgcaaagcgccggtgataaaggtaaggaagcctgcaagcaagcgcgtcaggtggctgacaaaggaagaagcggccaccttgatcaaatgcatgcctgaacagtttaggcccgttgtcgtttttgccctggcaactggcctacgccgttcaaatatcatcgatctcgagtggtcacaggttgacatgcaaagaaaggtggcatggatccacccagagaacgccaaagcgggtaaggctattggcgttgctctgaacgataccgcgtgccggacattgcgtgatcagattgggaagcactcacggtacgtctttgtgcatacaacagcacggaaacgacctggcggcggagtgaccccggcagttaggaaaatgcgagttgatgataactcagcatggaacaccgggaaacggagagcgggaataactgatttccgctttcacgatctacggcatacgtgggcgagttggttggttcaggcaggtgtgccactttcggcactgcaagaaatgggcggctgggagagcatagaaatggttcagcgctatgctcacctatccccagcccatctaaccgaacatgcgagaaaaattgacgaagtcttggcgggcaatgtcactaatctggcacttttggaaaatcttgcagtgggggaatga

SEQ ID NO: 432421 - DNA, 657 bp, Serratia marcescens
atgacacggacactaacgctcgaacgccagcagtttgaaaaatggtgggaaaccgctatgcataatggctatccgccaagattcggctgggagcactggagagacggcgacggataccgcgatgatgatggtgagtttcaagggctatggcaagcgtggcaagcaagccgcgggttcctggctaaccgggaggcgcagccggtggctctggacgtcattgcgcgattcaaggactggaacaccgggttcccggttgaaaagttcaaatctgactacgttattggctgggtgctagcaaactattacgccccgccagcgccagcagttccagattttgaggcgtggtttgttgaaaaatataagcagccagagcgcctggttaaaaatgaagatggcacctacaagttctctggcgttcagatggctttttctgcgtggaacgcctgccgcgccgcaatgctggctcaacctgtaagtagcggttacacgttcaactctccggtaattccggatggttggaagctggttccggtcgaaccgacagaagatatgttacgcgctgcatatcgtgagtctggggtttatagcgcgaaagcgtatcgcgcaatgctggcagcagcgccggagggtgggaatgatcacgataccggacgataa

SEQ ID NO: 432422 - DNA, 477 bp, Serratia marcescens
atggacaataagctgagcgaactgaaacgtcgggctgagaaatgccccatcaggcgatttaaggcattcatcggcaaagccaatacgcaagcaactctgtgcgccgatacaggcatcgaaattattggctggagtgggttcgatgcatctgatctgaatgccaaaagccaccgagtggaattggcccgttttattgcagcggctgacccagaaactattctcgccctgctggcagagctggaagcgaaggataagcgcatcgccgagctggaaggtagcgctacgttgctaacaaatcagagggatctttggtacgggaaagttcaggatttggaagccaagctggcgacgccggtgcggttgaaaaaggtcgattccagcaatgttccctatgccggtgacggctttaatgctgccgttgattattgcgccgaccgcgttcgcgccgctggcttcaccgtagagggggatgagtag

SEQ ID NO: 432423 - DNA, 606 bp, Serratia marcescens
atgaaagagcgcccagtgattttcaacggcgagatggttcgcgccattctcgacggccgcaagacccagacgcggcggattgctaaagctgacaactccaatcacttgcttggctgtccattcggccaggtaggcgatcggctgtgggtgcgcgaaaccttcgccgtcctcggcaacgaagacggatgccctatcgattggaatggaaacctgattaagggtgacgagaagcaagcggcgcggatttataaggcatcgtgctggcaggaaccgggcaactacggcctgtggtcgatacctgatcgagaaacccaatacgaaggcacatggcggccatcaatccacatgccgcgctgggcatcccgcatcatgctggaaatcaccgccgtgcgcgttgagcgcctgaacgatatcagcgaagaggatgcaaaagccgaaggcgtgaaagccggtgtttgccctggtcacgaacacatgatgcaccaggtggcattcagtgaattatggcaatccatctacggtgaagaaagctggcgcgccaacccttgggtttgggttatcgagttcaagcaggtcagcgctagggaggtggagcgtgaggcatga

SEQ ID NO: 432424 - DNA, 597 bp, Serratia marcescens
atggttcagagatataaccctgattacgtcatgcatgcggcgcgatttgcgccgtttgcccgcgaaaatgagcatggtgagtacgttaaattctccgactatgaagccttggtgtcagaactcgcaagcagcctgcagatcaacgcccagacgcttcaggtcaagctgacaatggctgaaaccatcaaagagctgactgctcgagttaatgcgctggctgtggagaatgcgggatttaagcacgcgctttccgtcattttggaacatgtggatgttaccgataaagggcaagccggaatagtggcaatgattgccaatgacgagttgttcaactccgaaaccccagccactgacgcagcacttgcagctatccgggataagcaccgcgcggagggtatcaactttgcggccaaccggctattggcggcatttgaacatggctttatcgataagccagcaggtgaagtggcggacgtggcaaaaatgattttgtcggctgtaactgagttacctggagctcctgaagaggatttcacccgtgattacagcgatgaagttatcgcgatgattcgcgctgagctgcgggaggccaaatga

SEQ ID NO: 432425 - DNA, 840 bp, Serratia marcescens
atggcgaactcattcaagcagatgaagaacaacggaacgcttaagcggactgactccggaatgttcatcaagctggctgatattcacgtccaggagggcttcaacaagcgcgtagatgatgagcgcacacaggccgcagatgatgacctgtttaatcacctttcatcaggcaagccggttcctccgcttgaggttcgcccacgcgatgaaggcggcgtttggattgttgagggccaccgccggcaccgctcatatttgcgttgccgtgacgcgggaaagcccgttgagtggatagccatcctgcctttcactggtagcgacgtggagcgcatagcgcgcatcatgaacagcaatagccaactggcacttaccccatacgagcaatcgcaggtggtaaaagagctcgcaggcttcaacctgtcaccagacgagattgcctcgttggtcggcaagagccgcgctacggtcgataaactgcttgccctcacccaggcaaatcacgatgttcagacgcttgtcaaagatggcgccgttgccgtcgatgccgctgtcgagcgcgtaaaagagcatggcgagcaagccggcaaggtactggctggcgacgtcgaaaaggccaaagccgcgggcaagaaaaaggtcacaaaatcctttatcgctccaaaattcagcgcgccaaagtcccgcaagctcgtcacgctcttagcacaagccgaagtccgtgaaatcgacggccagaccgcctacatccttcccgcaggcactcagcttgatgtgcttgccattctcgatgaataccgctccaccagcagcaaggagaatcctgatggttcagagatataa

SEQ ID NO: 432426 - DNA, 204 bp, Serratia marcescens
atggcagatcaatccaatcgcgggaaaagcccgcaagaagtcgttaacaacgcgatcaagcaattcgacggcctgaaaaaaggcgatccagtaaaacgccctggttggtattacctcgacgcgttagaggctgaagaaaatgccgtcattgtcgagggtcgccgtgttatcaggcacgaccaaaaccataaggataaagagtaa

SEQ ID NO: 432427 - DNA, 690 bp, Serratia marcescens
atgcaaccaatgtttacctttgatgacgaatccgcgcgcacagccggcgccgccggcgcttctgaaactggcgcctatgcaggcaatatcggcagcgccatttttaccaccgggcgcgactcacaatccgaagcgatggagttctccatcgagtctgacgtgggcaaaatcaactacttgcgcataaattacaaaggccgcgaaggccagccgcttaagcatggatcggcgctaatcaacgccattatgggcttgacgaaagttaagcaactcaacgctaccgagcaaacgaacagcgaaggcgatatcgaacttcactgcaaagagcttgaaggaaagccgatcggtttcgttctgcagaaaatcctctacaccaaaaacgatggcggagacggttacaaattcgacgtcaaacaagtttttggcgctaatacgcgtaaaacctacaaagaggcgatcgacggaacgccggccgaggccgttgataagctcctggctgtcctgaaggataaggatgagcgcttaaccaatgacacggcacctcaaacgagtggtatcggtgggcagcgctctatgcttggcaaccaaaacaaccaaccgacctcgcgccttcagcaggttgctcagcagcggcaacaaagcgccacgcaacaacacgcacctgattttgacgatgatattcccttctga

SEQ ID NO: 432428 - DNA, 666 bp, Serratia marcescens
atgggtattccagtccttatcctgggcgattccggatctggcaaatctgccagcatgatgaagcttaaccctgatgacggttttctcatcaacccggaaaacaaacgcctgccatttcgctccaccggctggaaaccgcgagatttcgaggccaaaaccggcaacgtgttctttaccgacataccggcggatattgtcttgatcatcaacttcgcacggcgagcaggtaagaaattcgtcgttgttgatgactttcagtatgtgatgggcaaccagtttatgcgccggcgcagtgaaaaatctttcgaaaaattcactgaaattggcggtggcgcctgggacgtaatcagagccgcccaggcagcagccgatgacctgatcgtctacttccttgcccacaccgaagaaacacccgccggccgcgtaaagatgaaaaccatcggcaagatgctagacgaaaaaataaccgtcgaaggcatgttcagtatcgccctacgcactggtgttactgatggccgttactacttcaccacgcaatcagatggaaccgacccggttaaatcacctatcgggctgtttgacagcttccaaatcgataacgacctgaacgccgttgatgcggcgatccgcgaatattacgaactcaacgatggagcaccagcataa

SEQ ID NO: 432429 - DNA, 672 bp, Serratia marcescens
atgagcattacctttcgtgtaattgacactgaaaccaccagctttgaaggcggcgtggttgaaatagccagcgtcgacatcgttgatggcgttatctgcaaccccattagcgaccttgtacgccctcttgagcccatcagttttgaagcaatggccatccatcacatcaccgaagaaatggtcgctgacgcaccgctgatcgacgatgtgatagaccgttacctcggcgctgatatctacgtcgcacacaatgccgcttttgaccgtgagaagcttccgcaaatcacggccccatggatttgcacgctgaagctggcgcgcaagctatggcctgaagagcggcatggcaatcagtacctgcgctatcgctttggccttaagccggatgtgcctgaaggcctctatgctcaccgtgcgctgtatgactgctatgtgacagccaccaatctgctctatatgaacagcatcgctcgctggagcatttcacagatgcgcgacatcaccgcgcggccatcactgcttcacacgatgcagttcggtaagcataagggaaaaaccttcgtcgacatcgcctccgacgatcctggttacttgcgctgggcgctggcgaacatggatctgaatgaagatcaggaattcaccataaaacacgcgatgggggcgctcgtctga

SEQ ID NO: 432430 - DNA, 144 bp, Serratia marcescens
atggtgaacctcaatacgcgcattcaacataagtatgacctatctgggtgtgacttttccgccaaacgcaactacggcaaaagcatctttaccctaaccattctgactttatgcctgctggctatgggcgccgtatggatctaa

SEQ ID NO: 432431 - DNA, 222 bp, Serratia marcescens
atgacaccactgccaacgctaacggtatgtgaacactgtaaaaaagagctgccaaagtcgaagtgcaagtatgtgaaggttcagcgttattccgacggccgtttcaagatggtcaacatcctggtgtgcgctgatcgttgtgcctcctactatcagtcccgccaaagcatcaaatcgttgcaacggcagatgcacgtaatacagcggaggccaacatggtga

SEQ ID NO: 432432 - DNA, 141 bp, Serratia marcescens
atgaagataatggacttcttagaaaagcaccctgtcataaacgggatgctgattggagcattaattagcttcgtcgtcggaattatcattcccccgctcacggtattttttaagtggtggtcgtcaattttcggcgtatga

SEQ ID NO: 432433 - DNA, 741 bp, Serratia marcescens
atggaaaccgaaaagaagctacctaaagaaatcgaccctactgtaggtcgtaacatccggcaccttcgcgttaagaaggggctaaatcttgctgaccttgcgaatgctgttgatagcgacgtagggaacatctctcgcctggagcgggctaagcagggttatagtgacgagatgatcagaaagattgctgacttctttgaacgccctgttagcgaccttttcaggcctgatttgcctttcgaaaacttatctcctgagtctgatgctcagccaaccaggcttaaagcctcagtgtgggaggatggagctcaggacagcgaggagtttgtggaaatcccactaattgacgttcatttttctgcaggcgatggcagtgtcgaaattgtggaaaaagaagagtttgccttaattttccggcgttactatctacacaagttgggagtgtctatttctgcggccaaacttgtccgggtgatcggcaacagtatggagccgagattgtccgacggtgatgtagtaggcattaataccgacgatacgcgcatccgggatggtaaggcctatggcatccgtcatggcgatctgcttagagtaaaatatcttattgagcagccagacggcggtgtcgtgatccgctcaatgaaccgagaagagtttaaagatgaagttcttaccctccaacaaagaaaagaacaactagttgttcttggtcgggttttctggtcttcatccacctggtaa

SEQ ID NO: 432434 - DNA, 294 bp, Serratia marcescens
atggaatcaaccgcaacaacacgcaacgaagctcaggcgatccagagcgacatcatgagccgcattgcagttatcggggtgacaagcctggccggcgcgatcggcgttgataaatcacaagtgagccgctggcagagcaaaggggggctggtggagaaagcgagcctgctgctggctgctacgggcttcaagcgttcagaaacaatgctgacgttcaggggcgaggaagtcgctgatctggcacgcggattaatagcgatgcttgagcacatccgggaaccaaagacggaatag

SEQ ID NO: 432435 - DNA, 267 bp, Serratia marcescens
atggcctgggacacgtttgtttacgacaacatcaagaagcagctggtgaaagagggattcagcgaagcgctggctcaggggggggcatcacacggagccgacctttaccggagaaagtcgcaggcgagcaggaaggggatgatttatgacgactgtctcacgcttgcgcgccagtacgtacttgcgagctgtaccaaggaagaaaaaccggagtcagggaagaaaaagagccgaacagttgcagctgctcggccgacacttttctag

SEQ ID NO: 432436 - DNA, 738 bp, Serratia marcescens
atgaacaacctgattgttatcgaagagactgccattcgtcaagactcggctggccgttactgcctgaatgacctgcatcgggccgcaggtggagaggaacgccataagccgaaatactggtacgccacccagcaaacgcaagagcttgtgcaacttttgaccgagggaggaattcccccctcggaacaaaatcaaccaattagcgttattcgcggtggtttggagcagggcagctatgcctgcaaagagctggtttactcctacgccatgtggatcagcgcagccttcaacctgaaggttatacgcacctttgacgcagttcagaccgcgtcaccaatgaccgagctggaaatgatcgctctgatggcgaccaaggccgccgagcagcagcgccagatgaacgcattacagctgcaggtgagcggtgtaacccagcagattgaagaaatctcgaccggcgccattcctccgggttggcagactgtccgcaacctggttgctgaatccggcctttccgacgggaaggtgagagcgttgatcagcgccttccatgtacccagcaagaaaatccccttcaacgcaccgggcggcattttgacgaatgcgacggtagcgaaagaggacgatttcatgtctgcactgggcgaggtacgccgaacggcgacgcgcgcctgccgcagcaagtactggtatcacccgcgccttggccgctttgagatgaaagagctgcatgactag

SEQ ID NO: 432437 - DNA, 177 bp, Serratia marcescens
atgactagccgcgaggttgatcggtactacgtagacagccacggcatccgcgtgcatgtcatccgttgggacatcggcgagaaccgagtgattttcctgcgtgatggttatgagcatggcgagtgcttcaggtctgtcgagaacttcaatgagaattttaagcgagtggacgtatga

SEQ ID NO: 432438 - DNA, 975 bp, Serratia marcescens
atgagagcgatagtcaaagcagcggtacagcgtgatctgggcattgcgctgatcccggtagacgaaaatctggcgtttcacatgacaggccgcgtgatggtttccacgctgccgaaagagttcaaggacgcacctgaaggcatcctgccggcggtggagcatgagatcgccaacgacccgcggttacagggtttcttcacagatgaacgcgttatcaacgcctgcggcggcgttaatgctattgaagcctgggcgacgcagttcaagaaatgtcagtacaacaagcacgaactgccagagacaattctggacaccgagcgtgttggtaattctgccgttcgcatctgccctgggtgctacaaaaaaagcctgggcgtatcgccaaaactggaaaaaatcgctgctcgcaacacggcgcgctgggtggtagcaacggccaaacatcgcctgaagtctgaggggcagctgacaatcccagagctgatgctgtgggccatgctatccggtgtattcgacctgatccccgatgacgtctcgcgcaccgtcaccgacttaccggagccaaaggtgattaccggcacccgcaaggaatccgagatggactgcacgccggcggccactgcgattatttccaagcaggcccagaagtgcttcaaggtcgatcctgaagtaccaggcgcctttgtgctgcgcccgaagaaaacccgcgccgaagacagcaaatatacccgctgggttaagactcgcccctgctgcggttgcggtgctcgctcagacgaccctcatcacatcatcggccacgggcagggcggaatgggaaccaaggcccatgacttcttcactatcccgctgtgccgtaaatgccacgacgcattgcacgaggatatgtcggcctgggaagcggaacatggtagccaggttgaactgctgtttgagttcctggatttctccttcggcatcggggcgatcgcatga

SEQ ID NO: 432439 - DNA, 813 bp, Serratia marcescens
atgagattagagtcaattccgaaatactttgcaccgaaatcaccgacctttagcgactcaccgcgcgctacagcttcggactctttgaccggtactgacgtgatggcggcattcgggatgtgccaggctcaggcagagttcggtctggatttgttcttggcaaaacagggcataagttcacctgagcgcgcgctggagcggttgaagcaatacgcgctaaaagccgccggtgcacacaaggccatccgcaaacacagtgaagagattcagcacagagcgatcggcgtcatggtggcttttgcattccaggattactcccgcagcgcggccagcgtcaggacgtgcgaatgctgcaggggggagggctttattgacgctgaggttttcaccaacaaagtccagtacccagacggtaagccgccgaagtgggcgaaaatcactaagggtgtattcccgtcgtactgggaggaagtgaaatcagtgagggaggttgtgaaggtgctttgccccacctgcaagggaaagaaggtgataagcaacgcctgcagatgccacggccgcggtaaggtgctggacaagaaactgagcgacaagacagggatcccggtgatgaaggactgcgacaagtgcagcggtagagggtatgcgcgcctgccggctgaacaggttagaaaggcgctggcggtggagggagtagagatagcggaaaccacctggcgccgggactacaaacccttctatgagcagctcgtcacgcagtgtcacaaagaggaaagcatcgcggattctatgctggcggcggtcacggtttaa

SEQ ID NO: 432440 - DNA, 180 bp, Serratia marcescens
atgaaggtaattattgaaacgccggaaggtattatctggatgcgtaacgctgaaactggagaggggattgcttcgacaggttacgtaaaggacggcacacagcagaagattattgccgcccttgaagaggctctctttcaggcaaaaggccaattcgggttagttgataacgttaattga

SEQ ID NO: 432441 - DNA, 261 bp, Serratia marcescens
atgacacgaatgctaatcagagcagccgatggagccgtgcacactggtagcgcagtgtcattcgtcctcggcatcattaattatttctcacagagcgaatggatcattctcggcgtcatcttcggcatgttctgctcagcgtttggtattgccctcggtacttactttcgctgccggcgcgagcggcttctgcgtgattggataaaaaaacgcaccgagacgatcgacacggaagagcttgaaatgctggagcgtgagtga

SEQ ID NO: 432442 - DNA, 528 bp, Serratia marcescens
atggggaacaaatcaaaactcagcgctgtaatgttggcgctgatcgccgccggcgcatcagccccggtgatgatgtcgcagtttcaggaagagaaagaaggccaacgcctgtccgcataccaggacggagtcggcatctggacaatttgcggcggcgtgacgatggtcaacggccagaaggttgtgaagggccagcgcctgaccgctgagcagtgcaagcagattgacgcagcagagcagaaaaaggcgctcgactgggtagaccgcaacgtcaaggtaacgctgactgaaccgcaaaaagtcggtatcgcgtcattctgcccttggaacatcggccccggaaagtgcttcacctccaccttttacaagaagctgaacgccggcgaccgcattggcgcctgccgcgaaatccgccgttggatatacgacgctggccgagattgccgcatccgctcgaataactgctacgggcagatcttgcggcgcgaccaagaggccgagatggcttgctgggggctggacaaatga

SEQ ID NO: 432443 - DNA, 468 bp, Serratia marcescens
atggctgcattaaaaccagatgtaaaagccttcatcattcagtcgcttgcgtgctttgacacccctacgttggtggtggagtccgtccaaaaagagtttgggctaaaaatcacgcgtcagcaggttgaatctcacgacccgacaaaggttagcggcaagtcgctggctaagaagtgggtagacctgttccacacgacgcgggagcgattcaagacagaaatttcagacattccgatcgccaacaaggcctaccggctgcgcgttcttgatcgcatggcgacgcgaaccgaaaccatgaagaactatgcattggccgctcagatcgtcgagcaagccgcgaaagagtgcggtgatgcatatagcaacaaacagaaggttgagcacaccagccctgatgggagcatgactcctcggccaacaacaatcagactggtgggagtggagccaactaatggaaagtcaggttga

SEQ ID NO: 432444 - DNA, 1314 bp, Serratia marcescens
atggaaagtcaggttgatctgcaaattcccgccaagcttgtaccggttttcgctactgaagggattcgctatcgcggtgctcacggcggacgtggttcagcaaagacacgcacctttgcgcttatgagcgcggtaaaggcataccaggcagcagaaagtggattaagcggggtgatcctctgcgcccgtgaatttatgaactccctggaagaatcctccatggaggaagtaaagcaggccatcaggtctgtaccgtggctggatgattacttcgatattggcgagaaatacattcgtaccaaaaaccgcaaagtaagctacgtgttttgcggcctgcgtcataacctcgacagcataaagtcgaaggcgcgaattctagtagcctgggtggatgaggcagagtcagtttcatccacggcctggaaaaagcttcgtccgaccgttcgtgaagaggggtcagaaatttgggtcacctggaacccggagaaagacggcagcgctaccgataagctgttcagaaagaaccctcctaaaagttcaatgattgtcgagatgaactacagcgacaatccgtggttcccagaagtgctcgaagatgagcgaattgaagactttgaaaaccttgattacgccgattacgcgtggatctgggaaggcgcatatcttgagaactctgataagcaggtgctggcgaataaatacatcgttcagagctttgctgatgacctgtggcagaaagctgaacgattgctgtttggcgccgacttcggcttcgcgaaagaccctagcacgctcattcgaatgttcatcctcgaaagcaacctctatatcgaatacgaagcctatggcaatggcatagagctcgatgacatgtggaagttctatgctggcagagaaggggcatcgcagcggcaaatggaagaatggaaggtaacagacgaggcgaaatatcccggcatccccgaggcgcgcaaatggcctatcaaggcagacaactctcgtcctgaaactatcagccacatcaaagctcaaggattcaatattgccgctgctcagaagtgggcaggtagtgttgaggatggcataacctgccttcgtggatttaagaagatcattattcatcctcgctgtaaagaaacagcaaaagaggcgcggctctactcgtacaaaaccgaccgtattactggcgaagtcctgcctatcattgaggacaagaataaccattgctgggatggtgttcgctacggccttgatggctatatcaagcacaagcctcaagcaatgggaatgctgatccctaagcgacttaggtaa

SEQ ID NO: 432445 - DNA, 510 bp, Serratia marcescens
atgaactatccaaccgtagcagtaaatggcgtctccgttcgtgttgatgaagaaggtcgctataaccttaatgacctgcatgccgctgctgtctccaatggagatgcaacggaaaaccagagaccaagccagtttatgcgaagccgacaggttcgtaactttgtcgatactttgagcagagtgcaaaaatgcacggcggtgcaaacgattaatggcgggctccatcatggtgtatgggcgctagagcttgtggcaatccgctatgcggcgtggctcagtgctgaatttgagattcgtgtttaccagacttttcaagcattggtcagaaaaggttttgatgccatgtcgcgtctgaacaaaatagacaacatcatcaagaccgaaaccaaggaaataagccagtgtgccagccaaatggcgaagtggggtgtcggcggtcgaaaacgccttcttcacactgcccgagaacgtattgctgatgaagtgcagatgtaccttcctggcttttga

SEQ ID NO: 432446 - DNA, 570 bp, Serratia marcescens
ttggaacattatgatttcaaagccgcaacatacagtattgccaaacatgaggcagggcactggttgtgcgctaacagcttgggttggtcgccaagagacatagttgttcaggttccttcgcataccaaaggacattatggatatgccttgagctcttatcggacgtcactcactgcaatagaggatgtaagagagtactcaatgggtagagtgaaggtgctttatagtggggcttatgctgagaattttaacggtgatgatttcgatcatgatcaagttatgcgcgacttaacacgtggcggcggtgcaaatactgattttttgaaggcagaggaaatttactttttttattataactgcttgcctaatccacgaggatgggagcaagagtttaaacccatcatttgtgatgttcagctgttaattgatatgcgttatcactttattgatgcagttggcagaagattcaaagaaatggcaacggagatagggcaaaagatcattatgggaagaagcgaattgcttgccatttataacgatacccctataaggttagccaacccaacctga

SEQ ID NO: 432447 - DNA, 351 bp, Serratia marcescens
atgacagtaagtgctgaagatttacgaaatggctgccaatggctcgccagagagctaacacgactggagcagctaaacagacctttaagtttcaaagacttttacaagtggtcagaagatgggatgtttataaaaaccattttcaaagaatacggtcactttatgaaaggcgtccagatactcgatccagactatgagcgtcataacaagaatttgttggtgtttatggaggatgcgcttgcccgccatgctaacgttatcactaatgacacctatggtgtggtggataacgcctaccttcttgctataaacgtgatttttgccatatcgcgtgaagccgacgatttttga

SEQ ID NO: 432448 - DNA, 1989 bp, Serratia marcescens
atggaaacgccacgttacagcaagctcgccgctctggtgatcgcctcactcagcgccaccgccgcgctggccgcgccgcaggacgacacccaggacaccatggtcgtcaccgcctccggcttccagcaaaaaattcaggactccgccgcttccatctcggtgatcccgcgccagcagatcgaagacaaggcctatcgcgacgtgaccgacgcgctgaaagacgtgccgggcgtggtgatcaccggcggcgccagcagcagtgacatcagcatccgcggcatgtcctccaagtacaccctgatcctggtggacggcaagcgcgtcgacacccgcggcacccgtccgaacagcgacaacgccggcatcgaacagggctggctgccgccgatggaagccatcgagcgcatcgaagtggtgcgcgggccgatgtcttcgctgtacggctccgacgccatgggcggcgtgatcaacgtcatcactcgcaagacctcccgcaccgagtggaaaggctcgctgcacggcgacgccaccattcaggaaaaccgcgattccggcgatctgttccagaccaacgcctacgcctccggcccgctggttgaagggctgctcggcctgcgggtcaacggcctgctgtcgcgccgcgcggaagataaaatcgtcaacggttacaacgaacagcgcatgcgcagcggcaccgcggtgttcaccctgacgccggacgagaaaaacgaattcgacttcgaaatcggccgttcgctgcaagatcgcaacagcacgccgggcaaatcggtggtggcggagcgctgcagcagaggcaaatgctcgccgacgtcccgcagcgaaagcctgtatacgcgcaccaactacgcgctgacccacaacggctattatgacttcggcaactccaccagctacgtgcagcgggaagagaccaataacccaggccgtaacatgaagatgtacaacaccatcttcaacacccagaaccagttcgaactgggttcccacatgctgaacctcggcggccaataccgctatgaaaaactgggcgacggcggtaaccagcttgaatcggctcaaggtctcagcaagctgacgcgctggagctgggcattgttcgctgaagacgaatgggcgctgaccaacgacttcagtctgacaaccggcatccgcatggatcaggacgaaaacttcggcagccactggacgccgcgcatgtacggcgtctggcacctgaccgaacagtggacgctgaaaggcggcgtctccgccggttacaaatcgccggacctgcgccaatcctctcctaactggggccaggtcaccggcggcggcgtgcgtaaaggcatcatcgtcggcaacccggatctgcagccggagaagagcctgagcgaagaaatcggcctgatgtgggatagcctgaaaggcgttaacgccggcgtgaccgtcttcaacaccgacttcaagaacaagatcaccgaagtacgccgctgcgaagacacgccggattgcaccatcggcggcacgtcctacgactttatcagcgatcgcgtcaacgtcgacaaagccaacatgcgcggcgtggaagccaccttcggctggcagatcaacaaagactggaagtggaacaccaactacacctatacctcttccgagcagaagagcggcgagttccagggcaaggcgcttaaccagatgccgaagcacatgctcaacaccgtgctggactggcgcgccacgcaggacctcagcctgtggtcgcgcgtcaacttccgcagccgcacctctgactacctgagccgcacctcgatggccaagagcacgccgtcctacaccttcgtcgatgcgggcctgagctaccaggcggcgaaaaacctgcagctgaccggcggggtctacaacatcctcgacaagaccgtggattacgaccactacaacaccacgctggacggccgccgttacaccgtcggcatgacctataacttctga

SEQ ID NO: 432449 - DNA, 240 bp, Serratia marcescens
atggactcgctggccaccggtcgcaggataaaatacctgacctgtgtggacgacttcacgaaggagtgtctgacaattaccaccgcattcgggattgcaggtgttcaggtcacgcgtattctggacagcattgcactgtttagaggttatccggcgacgataagaactgaccagggggcggagttcacttgccgcgcactgatcaataggcctttgagcatggtgttgagttgcgtttaa

SEQ ID NO: 432450 - DNA, 720 bp, Serratia marcescens
atggcattactagaatacatcagcaatgaaaacttattcagcgaagttgaaaatttgttaacaaaggctaaaaagaaaaaagaaaccgctgagaaaacttttaatagtaatgtgatagacccgtttggggctctttttgaggctccgggattctcatcccatgaagagtggcgaaattccgaacttgcacgacaacagcagaagacgattcagaatcatgtgggtacctttcaccaaaaaatcctcggccatgtggatggatggcaggacatggggattggtggaatcgttgatcttctcaatgaagagagaaaaatcatcgccgaagtgaagaataaatattctacagtgactggtggtgacttagctgataagtacaaaggactagatgagctggtatcaccaaaacatagccgatttaaggattattgcgcttactttgtaaatataatccctcgtagaccagtcagatccgacatccctttcaccccatccaataaaggcagtggtacattgtgcccttccaatcctaatatccgaattattgatggggcaagcttctatgagctagttactggtaggcctgatgcgctcaaagaattgtatacagctctcccgcacgcaattgagtatgttttgaatgagcgtcttgagcaggaagacttctccatccctgataaagataactttattcagtattttagcctcgcctatggttaa

SEQ ID NO: 432451 - DNA, 1254 bp, Serratia marcescens
atgttggcatggttactaaatatgttaaaggaagagttttcactttcggaagttgcagacatcctaggtgtgtcaaaagaaactttaagacgttgggacacttcaggtaagttagtttctcatcgaaacgatgagaataactatcgtttttatagaatagatcagcttaaaaattttgagcaggctcaatttttatttaaaagccaatggtctgatgagactaaatcttgcaataacacttatactgtattggaattatttgctggtgcaggaggtatggctttaggtttggaaaaatcaggtttaaagtctgttttgttaaatgaaatagattctcatgcatgtaaaacactaaaaagaaacagacctgaatggaacgttattgaaggtgatgtcagcaaagtagacttcactccttatagagacaccgtcgatgtactggcaggtggtttcccgtgccaggcattctcgtatgcgggcaaaaaacttggctttgaagacacccgaggaactctcttcttcgaattcgctagagcagttaaggaaacaaatccaaagattcttttagccgagaacgtgcgaggattactaaatcatgatgaaggtcgaactttagaaacaataaaaaacattattgccgatttgggttacacgttatttgagcctagaattcttaaggccattttctataaagtaccgcaaaaacgtgagcgtttgattataatcgccattaggaatgatcttgctgatggaattgattatgaatggccatcttcttacaacaaagtattaactcttaaagatgccttaaaaaagggagaactgtacgattgcgacgtgccagaatctgagggacagaaataccctaaaagaaaatcagagatcttaagcatggttccgccaggtggttactggagagaccttccagaagacatccaaaaagaatacatgctcaaaagtttttacttaggtggcggtaaaacaggtatggcacgacgcttgtcctgggatgaaccaagcctaacgttaacctgtgcccctgcacagaaacaaacagagcgttgccatccggaagaaacaagaccattaacagtgcgtgaatatgcaagaatacagacgttccccgatgattgggtatttgaggggccaatttctgcgaaatataagcagataggaaacgctgttcctgtcaatctctcatttgctgttggaaaatctgttgtgaatcttttagaaaaaataaacacaagataa

SEQ ID NO: 432452 - DNA, 267 bp, Serratia marcescens
atgcgtaaagcccgattcaccgagcaccagatcattaccgttctgaagtctgtcgaagccggacgtaccgttaaggatgtttgccgcgaagcgggaatatccgaagcttcctattacaactggaaagcaaagtatggcgggatggaagcttctgatatcaaaaagatgaaggatctgggggacgaaaaccggcggctcaaacagatgtttgctgatctcagccttgaatgtcgggtcctgaaagacgttatcgaaaaaaagctttaa

SEQ ID NO: 432453 - DNA, 240 bp, Serratia marcescens
atgcacgatgcgctggtctgcggcaggcgcttccggaccttcaacgtggtagatgattttaaccgtgaagcactggcgatagaaatcgacctgaatatccctgctcagcgagtcgtccgggggctggacaggatcgtggcaaaccatggttacccgctgaagatgcggatggacaacgggctcgaactggtctcactggcgctggcccaatgggccgaagaacatggtgtgcggctctaa

SEQ ID NO: 432454 - DNA, 717 bp, Serratia marcescens
atgttagataaagaaaacagagaaagtattcttgagaaatcaaaacattggtttattgaaaaaatagcaaaaagccacattagaaacactataaagttaacaaacccaaaagaatttaatataaacccattcttgaatatttatttatcaaactttctaactggaaattcatctccagaaagcatagctaaagcacttatttatcctcgtgtattaggaacatcaattacaacatcatttgggcagcatattcaaagtttcatcagtgaagttctagatggttttggtagtacaactagcggcattgatattgagtttatagaccaagtagatgggatgaaaaaatactgtcagataaagtcaggccctaacacaataaataaggatgatgttgagacaattgcagggcattttagaggtgtaataaaccttggaagaactaataatctgaagctaggatttgaaaatatgattgttggtgtgatatacggtgaagaattagagcttagtactcattataaaagaataaccaatcaatatcacttccccgtaattgtaggtaaggatttctggcaccgattaactggtgatgaaaatttttacaaagacttggcagaagcaatcgatgatgcagtaaaagattcagactatagcacagaacttgacactgtaataaagtccctagctagatctgaaaaaataatgaatataaaataa

SEQ ID NO: 432455 - DNA, 720 bp, Serratia marcescens
atgagcatggaaatgatggtgcaggccatgaaaatcaaagtcggcaacccgctgcgtaaacttgtgctgctgaaactggccgacaatgccaatgatcagggggagtgctggccagcggttcagtacatcgccgagcagtgcgaaatctccaagcgctccgcccaaaatcacattcagcagctggtcaaagatggcctggtgcgcatcgaagagcgcaaagcagagaacggcctgaatcgctcaaatatctaccacttagtgctgaataaatatggtgcagatgctgcaccctatggtgcaaatcctgcacccatgggtgcatctgctgcaggggggagggtgcaggagctgcacccagaatcagtcagtttagaaccagtcattgaaccaataccccctaacccccaggagggggacgacgctggcgcgccagataagtcaaaaattaaatatcaggacgtggctgatgcctacaacgaaatcctgggtgatcgtctgccgaaggtgcaggagctgaacgacaagcgcaaacgccaaatcaagcgcctgctgggcgaactgcatgagccaactctggacgcggttaaagcctacctcgagacgtttgctgacactgctgggccgttttacttcggcgataacaaccgcggctggcgcgccggattcgattacctgctccgctccgaagtgctggttaaaacccgcgagggttcgctatga

SEQ ID NO: 432456 - DNA, 1374 bp, Serratia marcescens
atgactccgcaggagatggaagcgaccgtgctgagcggcctgctggttggcggcgccacacctgatgcactggacgtaattgccaccatgcccgaggacgctttcagcatccggttttaccgcgaggcataccgggaaattaaaaaacaggcgctgacgcacggggtgatcgacgtggtgctgatcagcgaatcactcggcggcgatagcctggcgtcgctggtgcaaatcagccgcatgcccggcacgctggccaacctgaaaggcttcgcatcgctggcaaccaaggggtggcgcagccgccagatggccacgctgctgcaggacggcgccgacagcatccgcagcgccagaaaccaagaacagcgcgacgccgcgatccagtcgtcagtaaccaagctgatcgaaatgtctgccgataccggcggcgtggtgccggtgcacctgggcgaactgctgggcggttacatggacttgatggatcgccgaatgaagggcgacgccgaaatgcgcaacctgtacagcggcattgccgagctggacgcgattaccggcggctggaacccgcaggatctgatcgtggtcgccggccgcccgggcatgggtaaaaccgaattcgcgttgaaggtgatcgagggcgctacgcgcgacggtggcggggcgctgattttcagcatggaaatggcggcgctgcagatggtagagcgctcagtcgccggggccggaaacctatccgtgtcgaagctgcgcaagccggaatcgctgtgcgacgaggattggggccggatacacacggcgcttgaggtgctcaataaccgcgatatctggatcgtcgatgcgaccgacctgaacgttgaccagatccgcgcaatcaccgaaacccacaaacgccgctacccgcacctggctgtcgccatggtcgattatctgggcctgatcgccaagcccaaagcagagcgtaatgatctggccatgggccatatttcccgcagcctgaaaaccatggccatgcggagcaaaacgccggtgctggcgctgagccagttatcgcggaaagttgatgatcgcccggtcaccgcccgtcggccgacaatgtccgacctcagcgaatccggcaaggttgagcaggacgccgacagcatcgtgttgctgtaccgcgacggggtttataacccggacggctcggcggcgcgctatgcagaaatcatcgttggtaaaaaccgattcggccccggcggtacggtttaccaggagtttaaaaacggccacttcgtcgattgcgaccaggtagtggcgcaggaagcaactcgcatccagaaggaggcgcagcaacccaaaccgaaagaacgacgttacgcgacaaagccattttaa

SEQ ID NO: 432457 - DNA, 1233 bp, Serratia marcescens
atgattaagtggtataggtttaaaaacttctactccttcaaagacgagactgttgtagatctgactttaaaatcaaactcttcagagtcaagttttgatgtagatgttaataattcgagggtaagcaaaatcttagctgttctgggttctaatggttcaggtaagtctaatcttttgaaaccgctagcctttttgagctggttttgtgagcattcgtttaaagatcttgaatccaaggaactgcttcccttttacccacattttagtactaaagaagattgctttgagattgaggtatgctttacagatctgcagttaagacatgaagataacgcatatgaatacaaataccatcttaaactgactcgtagtaaggttatgcttgaggagctgaaattaaaaaccaataggcaattctactcacttttctcaagaaaatatgatgaaaaagaaagtgtatataaagttaaagtaaattcagccttttctaaacctcaaggttttccaaaggatgagcttttgcgtatacctgataatgcttcagctatttcctattttaatcggaaggaaagtgccgtggctaaagttgttttgaataacttttcatcaatcgataacaatttgaatgcacatggtaaatataacttcagctacaaagatgtcatgcgtgcaactaaaatatatgcagaagatgaagagttgtttaataaagccgttaagattttgaagcgaatggatttcggtctctcggatattaaaattaaaaaagaagaagttatagatgaaaagacgggagaggcgaagagtaaatatttgccatatggtgttcatgagcatgatggaaatgtgtacgaagttcctttctatatggagtcaagcggcacacaagcttgttactcctttattcaatcattactctactcgttagagtatggcggcatcgccattattgatgaacttgatagtgatttacaccctataatggttgttgagttattaagtatgtttgaaaatgaagatataaacaaaaataatgctcagttaatttttagttgccacacacctgaagtacttaaacatctaaaaaaacaccatgtttatttagttgagaagaatgagagcgccagtgagtgctggcgattggatgagatgaaaggacttagaagccaggataatttgtatagcaaatatatcaccggtgctttaggtggtgttcctgatatttgcctttaa

SEQ ID NO: 432458 - DNA, 453 bp, Serratia marcescens
atgggacgaccacgcaaagaaatccaaacccccgggcaggaaaatcagcggccggaagaaaacgccactgacgcactgctgttgaattctgttgtgcagcaacccgcaaacacgccggaacagctgaacgctgccaccgctggcgctacggtaattaccgtccaggagccacaaagcagcgaagaggaattggcattggctgcccgtaacgcactgctgggaaccatcaacgagcagggagccgccatcatcacgaagtttgaagcgtacgccttcatagacgaaaaaggccacccgcttaccaataatctcgaattcctcaccctagtgaagaaagccaccgaagcggcaaccggtggcgccgagccgatggtgacgaacgaagagggcaagaagcagccggcaccgggcaaacctgttttaaccgaacacggctggtacgtaccaggctaa

SEQ ID NO: 432459 - DNA, 228 bp, Serratia marcescens
atgtgtggatctgcaccgaaagtagtacagaccgacccgcaggctgaggcagacgcagcagcagacgccgcggctaaagcctcaaatgccgacgccgcaagccgtaagaagcgcaagaaaggctcttcactgctggccagcggcgcccagggcgctaccgacgccggtgattcgctgctcgcgagcggcgcccaggcggcaggcaacaaatcaacgctgggagcgtga

SEQ ID NO: 432460 - DNA, 882 bp, Serratia marcescens
gtgaatgagttagccgaagctgtaaagaaaacactagtggataggctcaatacgcctttgtttgggtttatcgcaatatcgtgggttatgtttaactgggataatattttatttgttatttttagcaagctaactatagagcagcgtataagtggcctgcgagcaatggagtttttttattgtaagacgattatcttacctgcggtaactggctttgttttaagcattgtttttccctacctgcaagttctcatatctatttttcaaatagccgcacagaaaatcaatgacaaaataaccctaggtcgagagaagttagagtgtgaagcggtaatgcagctggcggctgtaagagctaaagccaataattctgttaaaatagcaatagctcatgaggataagttattggctatggccgaggatgaggctacaaaaataagatttgatactaaaaacctggaggttaaatttaattctttaaataacgatattgttaataaggaaaatgaacttggcaatctcaaatcatatatagaacaaaatgagcttgatattggtgttatggaggggaaaatccaagagctagaaggcaagcatggtaatttcgaatatatggttaatcattttaatgaatgtaaaatagaaattaataaaatagcctcgacgatagttagtcttcaagatacgttggttagcgcaggagctataaatggggctgctgtggaaaaaggaaggcgaaaattctcattaaaaccttttgattttaaaaatggtattaatgaggagtatttgctgaatgagttgggtgtttcacttggggttatatattcttcagtaggtaaactgcagtcagttaatagaaatattaaatttgatagttga

SEQ ID NO: 432461 - DNA, 2721 bp, Serratia marcescens
atggcggttccaatccaaaccccttacaacatctacaccgccaacggcgtgactacggtatttccgtatgagtttttaattctcgatgtcggggatttaacagtctccctaaatggagagcctgttacttctggctttagcattaccggcgtcggcacaactaatggcggcgatgtgattttcctgacgccgcctgcagctggcgtaacagtgatgaatcttcgcgaaatcccagctacgcgactgcaaaactatcagaacaacggagatctgcttgcggccaccgtcaacaacgatttcgatcggttgtggttggcaatccagcaatcttacctgtatctcggtttgtgcctgcagcgcccactgctcgggggtccattcaacgcccacggctaccgaatcgggaatttagctgatcctgtaaatcagcaagacgcggcgaccaaaaattatgtgctggtaaaaattgctgaatcagacgcggccggttctgaggcactggcacaagagagagcagccagaattgctggggatatagccgaagcagccgcgcgccaacgcgaagacattgccatacgaaatgaacttgcatcctcaaacgcgcgcagcgtcaggttcccttatggtgtacagcctctcccacaatctggaacggcaaataaattaatcggcatcaatgctcaagggcagccggtggccgtttcagctgacagtgattctggtaccgatctttccctcgaactttctgatcagtcgataccaggcggcgccggtatgattggctggaatggagagacaaccgctgacgcgctggcaggtgcattatcatgctcggtgtctcgggtttcggatacgggttggggcttcgctaactggccacaagggaaggccgtggctattggcggtcgggcattcatcggctataacctgggttctgatcacacatcgattaatatggatgcgatgtgtacgtcgacacgcgacggccaaaactttagccagcctcggcgcattgctgcgcatacatcaaacgaatctgctgctgcgttctcgctaggtagagatgcagccggaacaaaattatttgcgtttgttcgattcagaaaggggacgaatgataatgcagaaatccgctacgagatttacgaatcagttaacagtggtgtgaattggtcattcgttaagaattttaattttcttagtgatgcgggtaatccagccattgccctacatggatttgaattgacaggtgatggcagggggatcgttggctatcattctattgatggtgagtttggttgtctggtgttcaacacatcaacgtatgaatatacaaaaattaagttgttagatgcgtcaagtaacttaaataatggcaacattattcatgtggaagctaacttcttgaagcggtctgataatgggaaaataatcataatttcccgcagccagtttgctggcgttcaaaaaccgctgatgtgggtggcagaggataacttaacctcagttactgggcctgtagaaacctctgttccgtttagtgtaaacccagtgagtccggtattttcacctgatttcacgaaagtactttttttctactgctatcggttcgaccagcaaaaccccaacgcagagcaggccggtctttgggtttctgaacttcctgttaatgatgcttataacctgaattggtctaacgcacgcacgttttgcctggtgcgcatcgccggtgaatataacttcgctgcggcaactgctggtgtgcagcatgccgttacgctaggcaacacggtgctggtgccgtttgcgagcatggttgaagataatctcgatcgttctgatgtgtattgcttgaagatagattataacgaatcccgtatgcagaagggggccagcactcatcacttaggatcgctttcaggaagccaatttggcggccgtgcggaaatgcgtctcaatgatgtagggccattctcggcgaggattaggtttaatggacgctctgttttggggcttgatgatgtattgagtattggcacctatggttcaaacttcacccaagggattgggatgtacacatataatggcggcccacaaaccccggcgttatttattcagccgtatacggtttcatatgatggctcaacgggtccgcttgatatcaacagggatctgagaatccttgccgcaaatagaacaattcaccttggcaagggcgcacgaattagaattggtggcgacactggaacagtagggccgagccttctttaccataacaatgcgagcaacacgatcgagataggaacgacgcagagcgcgtataacgtgcagatgattatgtactcctctaacggatttacattcaaacggtcgtcatttgctggcccatctgctgcggttaatttgatacttgaggatagcagcggatcgcaatctgttatttctggcggtgggtcagttagcggtattgcattcagcacgcctggtgcatcgcaaggcgtaaaagttaccaatgctggcgggttaacttcaatccgagatttaacaccgggtaattttctcgttgcagaactccccgccggccaagataagggggcttttgtgtatgcgagaaacgcgaggaaagctggtgaatcagctggttccgggactggctgccccgtgtattgggatggttcggcctggagaacattctacgacaactcagtcgctgcggcttaa

SEQ ID NO: 432462 - DNA, 375 bp, Serratia marcescens
atgtctggaaaaataacgtctgcggtcttgatcctgctggcgctgacggccgttgtcggcgctggcgcctggctggcatctcgacactaccagccaacgattgaccggctcaatgagtcgctaactcaatgccgagataccggcaggcagctggcggcgatgattgataaccagagcgctggcattgaggcgctgcgacgcgctgatgctgaacgagaagccaaggccaaggctgatcaggaaaaagcccgcaagcaggctcgtagcgattatgagagggccaacgcagttatggccgagcgcactaccggcgaatcatgcggcgcggcgtctgctgcttttgacgacgagctgcgtcgggagcgcgcccaatga

SEQ ID NO: 432463 - DNA, 249 bp, Serratia marcescens
atgtttgtttgcccgatctgcggtgctatggcccgcacccgcaccagtcgccgtctcagtgaaatgacgatacgccaatatcatcagtgtcagaatttcgaatgcagtatcacgttcacgacgctaaacagcgttgaaaagctggtaacaaagcgcggcccgcgcgaagagctaccgcccgactttatcccgcaaaacgccttccccacgtcccactatgggcgtgatcagctcaacctgtcactgtga

SEQ ID NO: 432464 - DNA, 1092 bp, Serratia marcescens
atgccgcagtatatcagcatcattaccgatgtcggcgcgaacaaaattgcagcagcaacggcaaatggtgaaaaaatcaatattgcccatgccgcggttggcgatgggcttggcacatcaccgacaccggagccggggcaaacggaattactcggcgaacggtatagaacgccgattaacgcactacggattgatgaccgcgcccctaatcagatcatcgcagaaatgacgataccggccgccgtcggcggattctggtgtcgcgaggcgggggtatttgacgataccggcgcactcattgccgtctgtaatctgccgccgtcgtacaaaccaacgtcggcagaaggttccggcagaattcagaccatcagaatagtgatcgccgtcagcagcactgcggccattcagctgattatcgatccgacggttgttatggccaccgtcgaatatgtgaataaccaggtgcggcaggcagtacagcgtgcaaacgatgcctacgagctggcgcgccagaaggtcacatttgatgaaatgtatcccatcggtgaagtgaagcttttcgcgacgttcctcaaccctaacaagcagtggcccggcacgctttggtattacaccggtgaaaataagtcgatccgaatcgctaaagaagatggctccgatgtgatgggaacgggcggcgcagatacggcgacactgagtgtcgagaatatgccaaagcacaaccacggcgtcagcggccaggtgggcgagtttgaccacggcaccaggtgggcgtcggaatttgaccacggtacgaaatggacgtcagaaggcggcgagcacgcgcaccagggcggcatggtggcccccggtgaagcgtgggatggcgattacgtcgtcggttcggacaatgacagccaccgcacccgaaactggacaagtcagaacggcaagcacagtcacaccgtcgatattggcaagcacaatcacacggtagacattggtaagcacagccacagcctcgaactggcgtctgccgaggtcggcggcggccaggaatttagcattgttgaaagccacatcaagctgatgtgctggtatcgcgccgcataa

SEQ ID NO: 432465 - DNA, 936 bp, Serratia marcescens
atggcgataattaataacacgcgctcaccgtataacggaaagcgaaaggggttcgacctcagcccgtatattctgagtcccgagcagctttacgccgcgcacaaagcccgcgttatggcggacgggggcgttattttcgatgaagcgggttgcctggcacgttttgaaatgctggttgcaaatgcgatttatcaaaaggtgatgttggctatcaatccgatgttcggagttaaacttgctgcggatggcgtctctgttctaaaggtttacggcctgcgcggcgatgactttattgccgtcaaacagcagctcgataccccaccggcgcaggagctgccactgttcgatcgcaacagccggtcgattcgcgtgaaggtggcggcgtatgccggcgggtacctgcgcagcgagcacgcgcaaacaatccagcatggcgatacgaacacctacgcaatttcaatgctggcgatggataccgacccaatggactccgtcggcctgacggcggggttaagcctggccaatttaggtttggcctatatgcgcgtgatcgcaagcccgtactcaactggcattcgcgaagcctggcgctacggcacgcgcgccagcaattttatcaatcaaggcagcccaggcgcggcgatcacggtggctcgcgaaccgtacgaagcctatatcccctcggcagcgtattttgatattgcggcgggtacgatcactgcgtttgaaaacggtggcgaaaaaaatacggcgcagtcgccgaccggagcgctcgcgtcgttgcgtgatgcaggatttgtttatgtgggtaatgtcatgttcgacgtgaagcagggcagcggattcatgcagagttgcgacggctcattcagggatttcacgttactgacgggggcatcccgccgcgatgctgaagttttatcacggattagctag

SEQ ID NO: 432466 - DNA, 2163 bp, Serratia marcescens
atgagtaacattaatgaggtgtcgcgatgggaaccaaccattgatcaggtcgatgatagcgaccgtgtcaaaggcggggaatctggcgtaattaatattcaagcggcacaattagccgcgagaaccaattacctaaaaaacctgtttgatacgctaatggggatggttaccctgggcgaagggccgtatacatcagtagaacaagctcaagccgacattgaccgcggaaaaatccccgaagcgatgaaattcagcgtgcgttctattatttccgggcactgggttgatgaatattcaaataccggcgggatagcaaccccaacgggcgaataccttccgtcaggcgaaagcattatttcagcgctgggtaaaatagatgcgacaaatcagcgtgtagacggaatgatgcgattggcagacgaatcccccctactcagctccgacgaatatatgtggggagtcagtagcgccgcaggcacgcgcgatatcggcatggcgctggataaggattggggtctgatgctggcagagctgccgcgtgccgtgcaggaatatcttgtcaacatgctgccggaatcgctctcaaaccgatactccggcgtgcgttgggccgtcggcgaaggcaccaccggtgagctggttttgctggataacggcgatttctacatccccggtgtggcgctcccactgcaggacgcgctggggcaatcgtcagcgcaggtaaaatcgcataacggtacccctgcgctattttggaatggcgtacccgtctggactgaaaagccggtcatttcagccaataaaatgaccgagtcgggttgcgttttttcataccaaaacgcagacggcagcacgggggcgggcttattgttcgtgccaagtattcgtgaaatccccgtatctgccgcctatattctgctgtatatctgcctggggcaaagcctcggcgcggcgtatgacaaacccggcaaggacatccgcattgtgggggctgacccagagttgcgcgggcgctgcctgtcgccggccggccgcgcggacggcaatagcggcagctggagccagcaggatttagagcgcacaacggatatggcccataacaaagaccgccaggggcacaatattccgctcgcaaatggcctgatgtacgaaatgcgcgatgccggcatgaatctgccgacgattatcaacgccccatgcaatgcgggcgggcagccattttcaggaatatccgcaggtaccccggcatacatcaaaagcatgaaaatggtggaatacatcacggcgtttgctgctggcgtaggaaagcccgtcaatgcggattttgttctttttgagcacggggaaaccaataacgataacggcagttgccgtaatcccggcgactatgatgcgctaatgacgccctacatggatgattcaataccagcatttaaggcgataacggggcagcagaacgacatttgcattgttgtcgggcaggtcggcagcagaataaacacgaaagccggcgcggtggacgcagaggggaacccgacgggcgagacggtgatcgtacaaccgtattccgtagcagctgttgatcaaatgacctatgtcagacgaaacgcgaacgccatcatgtatggcagtaaatacatgttaaaccacctgtttagcgatggttcattatcgcacctgaatgaaaagggaaaggttattcagggggaaatgattgaaaaggcaattttctggcatttatacgacaacaacaaaaagggaacatggacagggaatcgcgtaaaaaaaataaccatcacggataacattattgatattgagcgtgatgtgccattcccgccgctggtcttcgacactgcgatgttgggtgactgcgaaaattacggacactcgttagagtgcgaatccgcaattattgagcgcgtagatatcattgacgaaataaaggtcaggctgacgctagataaagcgccatcacctgaagaccatctattgattggatttaataacaggtctcaatcggataatggttatgtttatcctcgaacatgtatcagagactcgtcgccgtgggtttccaggtatgtaaaacaaaatgatgacgcattccctatttacaattgggcggtacttgaacgcatcccgctaacaggagagctatag

SEQ ID NO: 432467 - DNA, 612 bp, Serratia marcescens
atgaataacaccctgctccccccgtccgccggtgcctggatgcgccacaccgaaacggtcactgcgcggttgtcggcgatcaccgtcgcgctgcgcacgctgtggacgccgaccgcctgcccggttgagttgttgccgtatctcgcctgggcgctgtcggtcgaccgctgggacaagaactggccggcagagaaaaagatagcggcgatccagcaatcctactggcagcaccgccgcaagggcacccgcgccgcggtgcggcgggtgattgagagcatgggattttcggccacctttgctgaatggttcgacaccggcgataggccgggcacctttcgccttgaggtcgacgtcaacgatgtgggcatcaccgaaaagacgctggccgaattaaatcgcctggtcgcggatgccaaaccggtcagtcggcatatagcaggcatcaacattattgttggtgcggccggggtgttgaatgtgggtgttgccagctatgagggggatattgtcgatatatacccggccggatttataccagaaagagcaatttattacgatgcatctattcattatgacggcaattatcattataccggggtagcaaatgagtaa

SEQ ID NO: 432468 - DNA, 396 bp, Serratia marcescens
atgaaagggttaggttgttttactttgatttttgccattttgctcgctttggcattcatgcaaaaaaaagccgaaaccagaaaacgcatagccgcagagaaagaattgagcagcaccgtgcaggtgctgaaacagaccaacgatgtactggccgaagtgcgcgccctgcgtgccgacgtcggcgagattgaggcaggcatgaagaagctgagcgagaagcgcggcacaaatggagagcaacgacgtgaaaccatcaagactgcgctggccggcgaaacgtgcgccgttactcctgtgcctgctgctgtcgctgacagcctgcaaaagcgcgccgcggaagtccgcgccgcagattattcaggaacctttgccggccagcctaacggcaaacactga

SEQ ID NO: 432469 - DNA, 204 bp, Serratia marcescens
atgcacgatgacgaattacacacagcttttatgaatgcgcgcagttctgaacggttgcaattacttgagctgttagagagcaaacttgatcgccttgcggccgataaaacctcccgcgaccaggtattcagtgcgctaaaagactggatcaaccttcgccgcccctccgccaacgaaaccaagccggagacaacgcaattatga

SEQ ID NO: 432470 - DNA, 264 bp, Serratia marcescens
atgaaacagccttacaagatcctcattgaggaactcctgcagcactaccacaccaaaacggccaacttgcagatggcgaccgccaccgcgccagaggttcgccaggtatcactgaacgattacgctttccgcctgtgcattggcctgaccggtttactgagcaccgcagaagccgctggcgatggcccggctgccgccgttatcgatcgcctgatcatgcgctgcaacaacggcgatattccgcaacctggattatctgcatga

SEQ ID NO: 432471 - DNA, 213 bp, Serratia marcescens
atgacggagatgcaaccgcgtgccctaatccagctctcgaagcacacgttcgtctaccgcgggttcactatccataagtgcccgcgccatagcgaaacgaaccgcacggcctaccagctgatgagcaacggggattatttcggtcgtgatttcgcattggcggaagccatgcgcacagtcgacaacatggtcaaagctcggggaagaaaatga

SEQ ID NO: 432472 - DNA, 270 bp, Serratia marcescens
atgaacaaaaaccgacaaaaaaaggtgattggagtgagggaaaatcaattacctgcagattacccatttggtgatctgttagaagagtcgatctctgattacgcacgccgcattggtaagaatccgcaaacgatccgcactcaggcagacaccggtgccctaccgattttacaagctcgtccaggcgccaagcgccgggtcaatctttacgccatctacctgaatgccaaacgtcacgcggagaagtttgtcgcgcatatgggctcttga

SEQ ID NO: 432473 - DNA, 648 bp, Serratia marcescens
atgtttaataattatttcttcgatctctcacggactgagtttttactcagtaaccctttgaaagaaaattcgtcgtttttgcctgtgacggtcatattcgccattattttatttattgtaaaagaggttgttgaagcagttaaaaaataccgtgcaaataaaagaaaactcattgccatgaagaacataatttcacgtgagtgcgaaaggaatctatggactataaaatctttgaagagggtgcttgataagattaatagcctatataaagaagggaatgaggttgatgtttcctttgtaatgcatgatcctagttgttattttatttattctaatgaaaaagttctggaaggtgggaaaattacggaggtacacatggatgtaatggagaagaatctcatggaagctgcagttttaagcaagccattatatgagaagctcgaaaaagcatgtgattatcttttagagttagagcacgttagagattcttttttaaatataaagaaatctagtgaagaatataaacttcctctactgactagtcttcctaagtatggattagcgcaactttcgaacatcgaacggtcactaaatgatctgtataaatattgcactggcaatgaacttaaaaatgctcgtcttcgctag

SEQ ID NO: 432474 - DNA, 1158 bp, Serratia marcescens
atgtacaagatatcaacagtaatggttatagttagccagattataatattcactttaggaggaggtgcttatgcttatagtagtgaaagcccggtttcaacaaataagataagaaaagaaaaagcattctctccgaccagaagtgatctaactgcgttgctgattaggccggatgttcgcccaaactttatacctattgcctcacatcgggcgcaaatcatgggcagcaatctgccggagaactctctatcggcgattcagtatgtcaataaaatagatgcggccgaaatattggagcttgacataaagattacttctgatggcattccttatcttatgcatgacagctatcttcagagaacaactaattttgttgatgttaccgtaggtgattatggagataaatcatacggagccagttcagggcaatatagttggcgtcagataagagagctttatctaaaaaatattgatggcacatacagtgaagaacaccctgtctcttttgaagacgtgctggtttgggtcagagacaacactaatatgttaattaatcttgatataaatgagcaagcagtttttgatgccgtttgggatgtggttaaatcgagagatgcgtttgatatttgcatatttaaaggtaggtacaataagaacgaattcaggagcttttattataacagtttaaatagcatgcaaaaaagcaagctaatctatttcccgattattcctgaaccaacagttgattacccgactaaacccattgatttttataatcattgggaagaagggattgataaaatagcgaaaggctatgaggtcggttataagaaggatacgccgaatgcaaaattcccgatagaaagcgagcttctaaaggtggtgactgcaattcggcagcaaaatcgcgttagagtacatgttttttctgccatgccggatacttatcttggacgctatattggaaatgtgaatatagaccaatgctgtaatgctactgttgattctcgtggtgatttagagtatttgctggatccttttggtaagaaagacatgagtaaaggcgttaacgggtacatcataacggatgacgcatttacgttatatcattacctctctgtgcttggtaaacggaactttaatataaatggaatgtga

SEQ ID NO: 432475 - DNA, 1872 bp, Serratia marcescens
atgaagaggttatgttggttatttattttactgagtttttcagcgttttctcaggaggttttttttaagggccaggattttcttgatgatattcctccagatcatctatatctgcatggccagggggggcaattcgatatctatagagattttataacaaagaacgccgattatgatatttactatacggggggcgccaatgacaagacgggtaggaattaccatagcagtacggctatcaagtttgccgatgatagttctaaactggttattccttcggtggtaacaagagatatcgtcaataataaaaaaggctttacgatctctgggtggttttatgtctccgacataaacagcaacagcacgattgcttatattggaaccgacgacaaggccaaggtggatatatttctttcgcggcagaaaattctcgttaggaaacgttctaatatcgataaaacacagatgatgccgatgatagaaacggcattccctttgtcatatgaaagttattctccggtggagggagatattaccaatggttatttttatctggcaataaccagtgacagtaatagtactagagtgtatttgtcgcgccccggagggagactttattcacaatggttttatttcagtctggttgacaatatttccaggttagataatatttatttcggtagtaatcctagtcttaagctgggattcaagccggctgatgcttactcaaatataatgatatataaaagagcactttctcccaatgagacgttaaatgcattctatctgcagtctccgttgtatcccggtgtctcttaccgattttcaaataacaataatctggatttggttcctgctcagtcggataatcaaaacggaaagtttgatgaagacggttattacatgtggaaaaagaaagagggagggaacaatggtcccttgagcagtacgagatggtttattgatagccgaatgaaagattccgggaaatttataccagtaaatctaagaaacgcgcgtacaggcggatacgtttatcaaaaatcgagcagtaactattattatcaactgctttatccagcggaaaattatggggatagaacgctgttttatatggagaagctagaggatgatcccaagtcgctatatagcagacattctcaggggaatatcaaactgtggagcgcacatgatccaaggtattggttgggaagtaacgacaactatttatatttagatgataacgaaaagaatgggcgttggagtatagattccgctattaaggtttatcatggtgacgatatatctttacctgttcgaggggataatgttgcattgaggaatctgggggacttctccagtgatgataaaggggcaagaacatatctgaatctgtattcaggttcgtcatattactatgcaaagctggacaaatacagtgtttcaaatcctaatatctctcacgtgatgcacttttctcttcgatggttggcacccagcgactacggtatctatcggaagtatattttcagggggccggctggagatggtttactgcagccgtattatggacgaatggataaatcggaagatgattatgtcataacctatgagaataaggacaaattttattgggaagtcattactatagatacagctaaactggacaagaaaaaagtgggtgatagaaatttccatgcaataagagcgagcaatggttatggttcattcttgttgggaagaaaagacagttactgtcctggcggtacgagcacttgctatgtgctgaagtctggtgcgggcgcttatgacagtgacggcacgccgaaaaaggattttttatggattattgattatattagaagtaactga

SEQ ID NO: 432476 - DNA, 711 bp, Serratia marcescens
atggatattatgctgtacatcagagacgcggtatatccacactgggaaatcgcggccaaactgttggccgcctttttactcggcgggatcatcggcctggaaagggagtccaaagggaaacccgtaggttttaaaacctgcgtgatcatcgcaacagccagctgcatgctcacgatagtgtccattacttctgccgaacattatgccgagttagccagcaacattcgtacggatcccatgcggctggcggcgcaggtcatcagcggcgtcggttttatcggcgccggcgtaatcctgcaccgccgtgatgatgccatttcaggtctgacaaccgccgctatcgtttgggcatcagcggggatcggcattgcctgcggcgcaggattctatctctatgcgctactggtcaccctcttgtttttactgtctataaagttaagccccgtcgtttcccatcttcatttcagatacggagccgtagggaaaattaaagtcaaaataattattttgaacaaagagggtctcaacgaagtcatcactgaaatgaagaaaaacaagtatctggtcgatggtttgacaatcagggatatcaaaaaagacctgattgagatcaatatgaaggtatccctgcggcgtaagacctcgctgagtgaactctatagcacgcttaaggctctagcctcggtgcgcgccgtcgcgttggaatattga

SEQ ID NO: 432477 - DNA, 1239 bp, Serratia marcescens
atgaaaaataataagatacctcgtttggtcgtcatgatgtacctgcaatatttcgtccaaggtgcctggaacatgaccatgggattggtcttaagcagcgtggggctttccgccatcatcggagatgcgtacgctttgctgggcatcgcaacgctcatctccccgctgtttatcgggctcgtcgccgaccgttttatcccttcgcaaaaagtgatggcggcgctgcatttggtcaatgcgggcgttttactgctggtaccgcaatacattgaagtacaaaacaccacgatgattttgctgctgattttcttcgttggtttaattttctatcccacgacggcgttggccaacagcattagcttccgccatatcgacggtgtgcaactgttcccagtgatccgcgttttcggcaccttcggctttatgtccatcggttttctgctcggtcaactcggcctctccggtagcacgacgacctggtatatcgcctcaggcactgcggccttactgggcatttactgcttcacactgcccaatacgccgccgaaagaacggaaacaaagtttcacgctgcgcgagctactgtgcctcgacgcattgtccctgttcaaagataagtatttcgccatttttatggccagcacctttgtcttgatgatccccaaaacggcttattccgcctatattccggtttttctgaaatctttgggcttcgacaacgccgcaaccatgatgcaagcaggtaccgtgatggaggtcttgttcatgtttgtcctgtcggcgtttttactgcgttttggctttaaaacggccattctgctgggcgcgatctgctggattctgcgctcattgctgctttcctactccgcgctgcatgtcgatatggcctacgtccttgccgcattgatgctgcagggcctttgctgggatttcttcttcaccgcgggagacatctatgtcgatagcaaagccaaggaagaaattaaggctcaggcgcaaagcttgcgctttatcgtctccaacggcctcggtctgttttttgcctcggctgtctgcggccaaatatttaacgaaacggtgaccgtttccagcacttccgccgccgcgcttccgcaatgggcgacattctggctttaccctgccgttgttgccgccggtgtttcgttgttcttcctggtgttctttaaagacgacacgctgcgaaggaaacaaatcgccaccgaaccggccaaacgctaa

SEQ ID NO: 432478 - DNA, 819 bp, Serratia marcescens
atgaaaattcactttctgggctcttcctcatctgaaggaatacctaacccattctgccgttgcgacctgtgtctgcaagctcacgcgatgcaaggcaaagacattcgcactcgttcttcagcgcttatcgatgacatcttattaatcgacatggcgccagagttcagttatcaaatcatgcgcgacgctattgatgcgacaaaaattactgatttgctgttcacgcatacacacgccgaccatttcaacgttggcgagctttttagccgtatggaaggtttcggccaccatattgaacatccattaaccattaccggcaacgaccgggccatcaatggctgtctcgacatgctgccgaattacagccgggagcgatttcgctttatctgcccgccgcccctcactaccgtcgaacgccacgactaccgcatcactccgctgctcgccaaccacgcgccctgggagttttgctacgtctattttattgagaaagaagggaaaaaaatattttacggccatgattcgggctggttcccagaggcgacctggcaatggttggagagaaaacgtgccgacctggtcgttcttgaatgtacctatgggtttactcaaaacgcacgttcagacaaccacatgagcatagaaaccatttttgccgcacagcagcgattacaagattctcaggcgctgcacccaaatggcgaaatagtcatttcgcatatttcacataacgtgaacctgttgcaccaccaattagtcgagttgtttgatgagcgcaatatcaggatcgcctacgacgggctgaaaatagaaatataa

SEQ ID NO: 432479 - DNA, 2166 bp, Serratia marcescens
ttggccggcgtctctcacggcaccgtatcgaatgtactgaatggtcgggggaacgtcagcgtcaagaaaatcaacgcggtcatggacgccgcccgacagcttgactataaacccaatgcgcaggcgcgggagttgcgggccgggaaaggcacgggaattgccgtggtgttgcccgatatcacttccgagcgctacggttctttttataccggcattactcaggcgctatcgctgcaggcagaggtggccctttatctgaccgacgatcgtgagcaaaacgaacgacggatcttgcaaatgttggcggcgaagcaatatcgattggtcgtcagcgtttcctgtctgccccaggctgccgactattacgatttgttggggcaggatggggccgagatcgtctttgtttatcgccaacccgaaggcgcagagcgcttcgtgtcgccggatttcgtacaggctgcccatgacattgcgcaagagctcgcggtttcttccgcaagtcgaatcggcttgttctgcgaagagcgccgatatccgtatgccgagcaatttgcgtctgcgttgcaaacgcgtttggcgcttctgcgccctgaaagcacgttgacaatatacagcagcagccaagctgagagttaccgcaccgcgtttgcgttttttgcggcggagccttttgatgcgatcgtcgctatggatagcgaaaaagccgacgatctcagggcggcctgtcgtctgggcagtgaactggcctgtccggcactgtacgtcctgagtggcggagcgaaaggcggagaagacaatctgcactgttatcaattggatgcgatgcagttggggtacggcattggcgacggttttctgaacgctttgccgcgaagcatgccggagcaaccgggtacgggcaataaagggttcgacgtggccgctaaatctttgctgttccagcgtgaaatatcacggcatgttttgcatttcgcatcgttggccaacccttccattacggctctcaataagcttctgcccggctttcgtcggcaaagtggcatcgacgtcaatattacgacttactcctacgatgaaatgttccacctgctggaagagccggatcaacagcgcgatatcgatatttttcgcgtcgatgtcgccgttttggcttggttggctcctcgtttgatgcggccattggtcacccttggtgacggggttgcgtcgctggcgacgcgtttctctggccaagcgttggagaaatatatcttttgcggcgggactgcctatgcgttgccttttgatcccagtattcaactgctgttttatcgtcgggatctgctcgaagaccccgtaatcaaaaggatgttttacgagcagttcggcgacgaactccgcgtgccggaaaatttctctgattttgatagggtgtcggctttttttgccaggttgcatcagccgggaaaccggatgcgtcctatgggggcttgtgcgataacgggcaatcccaggcttattgctacggagtttctgctgcgctattacgccctttccggccatttaatgcgagacgagatggggccgcagttagagcctgtggttggctgcagggcgttggagcagtatatcggccagtttaaccacgtccgtgaactgcccggcggctggtggagtgagtctctggcactttttgaacaggatggagtggcgatgttgaatgttttcatgaacttgttcaacgatgtagcccatagtcctgtcgccccttctctgggatatgcgccggtgccgggcaatgtacccatgctgggcggaggctcgctaggggtgtcacgccatagtcgaaaggacaggcaaatcgcggtatttttcgactggctattttcacgtgaaatatcggaacagatcgctttattgggcggaaatagcgctcatccggcgatttatgacaatccacgcatcattcatagtcacccgtggctgcgtctggtgagagcggtgggatatcagggggtaagagagtcttctttaccggacggtaaaggcgtaaacctgcatcagatagagttgatcatcggccaaggtgtgatgaaatctctcgataagtctatgaaaccaatagaggctattaactatatcaatagtaaactacgcgttttgcaaaattcgacgggcgctccttaa

SEQ ID NO: 432480 - DNA, 1137 bp, Serratia marcescens
atggtactgggtctgctccggcgtcaggcgcgataccggcggcagtacgccgaaggcgtcggcggtcaggaagatgatcttgcgcgcatggccggctttggacaccggtttgacgatgttctcgatgtgataaatcggataggaaacgcgggtgttctcggtcttgctggcgtcgtcgaagtcgatgctgccgtcggccagcacggtgacgttttccagcagcgcatcgcggcggatcgcctgatagatttccggctccgcctgcggcgacagcttgatggtcttggcgtagcagccgccttcgaagttgaacacgccgtcgtcgtcccagccgtgctcgtcatcgccgatcagctggcgcttcggatcggtggagagggtggttttgccggtgccggacaggccgaagaacaccgccacgtcgccttgctcgccgacgttggccgagcagtgcatcgaggcgatgcccttcagcggcagcagatagttcatgatcgagaacaggcctttcttcatctcgccgccgtaccaggtgccgccgatcagctgcatgcgttccgtcaggttgaaggcgacgaagttctccgaatgcagcccttgctgctgccagtccgggttggtgcatttggcgccgttcagcaccacgaagtccggctcgaagtccgccagttcggcgtcgctcgggcgaataaacatgtttttcacgaagtgcgcctgccaggccacctcggtgatgaagcgcactttcaggcgcgtgtcggcgttggcgccgcagaacgcgtccaccacgaacagacgcttgccggagagctggttgcccaccagcgtcttcagatgctgccagacttccggggagagcggctggttgtcatttttgccggtgccgttgtccgaccaccagacggtatcgcgcgtggtgtcgtcgcgcacgatgtatttgtccttcggcgaacggccggtgaactcaccggtcgcgacgttgaccgcgccgagttgggtgagggtgccgcgttccagcggcggcaggtcggcgcgggtctcttcggcgaacagcaattcatagctggggttatagacgatgtcggcggcctgatggatgccgtagcgagcgagggtttgtggggtaacagcgcgtga

SEQ ID NO: 432481 - DNA, 1188 bp, Serratia marcescens
atgcgcccagccctctccctgcgccacctgaccctgcccgccgtcatggccggctttgtcgccgttctggtgggttacaccagctctgccgcgatcattttccaggccgccgccgccgcgggcgccacgccggcgcagatcggcggctggctgagcgcgctggggatcgcgatgggcgtcacctcgctgggactgtcgctttactatcgcacgcctatcctcaccgcctggtcgacgcccggcgcggcgctgctggtcaccagcctgcccggcacgccgatcaacgaggcgatcggggtgtttatcttcgcttccggtctgatcctgctgtgcggtgtcaccgggctgttcgcccgcctgatggactacattccgcaggcgatttccgccgcgatgctggcggggatcctgctgcgtttcggcctggacgccttcgcttcgctgcagctcaatttcccgctgagcgccggcatggggctggcttatctgctcagccgccgttatctgccgcgctacgccatcgtgctgacgctggcggccgggctggcgatcgccgcgctgcagggcaatatccagccggcgcaacacgcgccggcgtttgccatgccggaatttatcgcgccgcacttcagctggccgacgctgctgggcatcggcgtgccgttcttcgtggtgaccatggcttcgcagaatgcgcccggcatcgccacgctgcaggcggcgggctaccgcgtccccacctcaccgctgatcgcctggacggcgctcaccgcgctgctgctggcgccgttcggcggattctcggtgtgcatcgccgcgatcaccgccgccatctgcatggggcctgacgtgcatcccgatccgcagcgccgctatatgggcgcggtggccgccggcggcttctacctgttggccgggctgttcggcggcgccatcggcctgctgttcagcgcgctgcccctcgccctgatccacaccatcgccgggctggcgctgctcggcaccatcggcggcagcctgcagcgcgcgctgcatgatgagaaacagcgcgacgcggcgctgatcgccttcctcatcaccgcctccggcgtcacgttactgggcatcggttcggccttctggggcatcgtcggcggcgcgatcgcccatctgctgctgtcgctgccgcagcgaacaagccaagcataa

SEQ ID NO: 432482 - DNA, 564 bp, Serratia marcescens
atgatcttcccaacccgcttactccgcgctgcgctggtgtgcgtggctaaacatgacccgcgttactacctcgaaggggtgcacatcaccccgaaatatatcgaggccaccaacggccatgtagccctgcgtatggagcacggcatcaagacccgtaaggacatcatcgtgaagttcgacggcgcggtgccggcaaaagctgagacgacggagctggtattcaacaaagagccgctggccgtccaccgtgacgctcacggcctgcgtatcggatttaccgttatcaggctgctggatggccgctatccagacctagatcgcgtcatcccaaccacgattgacgaaagcgtgatcccaccggtgcagggtgaatacatgtcctatccggccaagatgttcgggcgcgacagcaagatggtatcggtgaagctggcgccatccggcgagacgactgcatgccgactgttgttcgataacgcggtttgcacgctgttcggcaaccctcagtttgtcgtgatgccgatccgcttcaagaaagaggactacccggggctgagccaatga

SEQ ID NO: 432483 - DNA, 360 bp, Serratia marcescens
atgatcggtactcagagcaaagtgatgaactacgacccgaactacacgctgtgcggccgcatggccgatcagactgtccgcctgacctttgggcagtgggagtaccgcaccacaatggatgttgttgtcggtggcaataccaacggactccgcgttatcgaatgcgccgtcgagtttgcatacgagaagctggaaaccattccgttttttaatgacgaaacgggtaagaacgacgaaatgtcagtgatccacctcggcaacctgcagtgcgtggacgacgacttgcgcggtgaggattggctgaaagacatgctgattggcgctgaaattgtcaacatcgaaccggaggcaaagcaatga

SEQ ID NO: 432484 - DNA, 813 bp, Serratia marcescens
atgatgagcagccgcttaattgcccgtcttaccacaaaggagcacaaggatgtctgccgagatattcgagtgatgcttgtgcagctttatggtggtgatgagcgtgattatatccgtagcgcaaatttgctctacgatacaaatcaatgtgttagctgcattcagtacgatacctcaaatcctaacgcctgggagtatctgctcgactatgagcactctcagtgcctggtcgctggttacgatgcggctcgtcgcatggcaattattaatgagtggcaggatatgaaagtagagctggcacaaccacgtattgccgcaccggccccggtacagcaggcgatctccacatccgatcacattctgtcggtcgcccgcgtcgtagcagaggccaccgcctccgcgacgatgaaagccgtgatggagctttccggcacgcaggtgttcgctgcgcaggctctgccaccagcatcacctgaaccagcggcgcaggtatcaacagtcgccgctgaaccaatggcctcgcagcctgccccggaattctcaccagtcatcgatctgatgtgggcctttggcatctccgacgcagcatgccggcgcttggcaagttatgccaacctgccgaccaagctgaccaatggcgagcgcggccacctgctgatccactattcctctttcgctgatgcggcattcaccctgatcgacgaatccacaccgccgacgggtaagcgcaaacgctggcagcacccagacttcggcggtttcacgctgaaggtcaccgaagccaacaaagccgccgtggaggccaagcaatga

SEQ ID NO: 432485 - DNA, 222 bp, Serratia marcescens
atggcgaagaaaggcggcagtaaaacgtgccaaggcatgtgtggcatgacgctggcccaggggtaccggctgacccgtcaacaagcttgggagtacggcaacgtgcagaagtcagtggcggactacagaacggccgacggcaatatccagatgccgctgaaccggagtatgcgccggcacgcaaaacacatggggttcaacttaaagaaggcgacgaaataa

SEQ ID NO: 432486 - DNA, 303 bp, Serratia marcescens
gtgataaagattcagtacagcgaagcggcccagcgggccatccagcacgaaaaggccgaagagttcatccaggcggccactttctggcgcatcgctgagtcattcgcggtgaagccggttaaccaggattgggcagccacccgcgccgagctgtgcgaaaagcgccacagccttacggagcggcgagcgctgctgcaagaaagcgccagtgagcgagcaaaggaggcagcgaaaaccaaggccaagaagaagatggccgaggcgctcgaggcccacattaagaccaccagcggagaggtatag

SEQ ID NO: 432487 - DNA, 327 bp, Serratia marcescens
atgaaccataccatgccaaaagagaaaaaatcaaccaaggccgtattggtagatcgtagcaagttgcaaagagcacaacagagaatacagcaagaccaaacatcatgggtttggaagcaatgcatgcatatggcaaaacaagcctatggtttgaaaagtgaggagcctttacctgagattggtgagcgaaacggcaactacatttgcacatacgtaaataaagaaaccggtgaatatgttttcatcaatgagcgcagcctatttaataacgttgttagtgaatgccagcaatataataaaatggggttcctgcatgttaccagctaa

SEQ ID NO: 432488 - DNA, 330 bp, Serratia marcescens
atgaataccagtaaagatgaagcaacaccttcagtagtccaaaaacaattttgcatccatgaaaaacttaaagcggagaattcgcactggtcttacgcattccccgttagcactgttcacggcaatggaaaacaccaacttcacaccagcttgcttgatgatgttgaattcgccgtatacgaaaaaactggtacctacttcgttttggttgactttgcaaaagattattcttcgttgaatgacgatgcaaaaaaaatcattgacgccaaccctaaagcgaaagcctcaattcttgcctgggaaaaagaaaaattcagatggagtgattaa

SEQ ID NO: 432489 - DNA, 732 bp, Serratia marcescens
atggatatgaaaaacttaccgacatttgccgaacggctaatttatgcaatgaatgccgctgggatgacccagggggcacttgcgcgcgcggcaggaatggctcagccgacggtttggcgtttagtatcgggtaatgccagcggcacaaagaaagttgtcgaaatcgctcgggcgctgggtgtcgagcctgagtggttagccaccgggcgcggcccaatgaccttaagtgaaaatcctcatcgtccagcagattcaaacatcccaccagaaaatgaatggggaactgtagacgcctgggatagcagcacgccgttacccgatgatgaggtggaagtgccatttctaaaagatatagaactggcctgcggtgatgggagttatggagacgaagactataacggctttatgttgcgattctcgaaggctacactacggcgagtgggcgcacaaaaagggagtgttctatgtttccctgctcatgggaacagcatggaaccaatcattcccgaaggaactaccgtggcaatcaacctgctcgataagaaaattgttgacggaaaagtgtatgccatcaatcaggatggatggaagcgcctcaaggttctagctcgctcagggccgaacaaattaattatccgcagctttaatagcgcagaatatgatgacgaggaagctgatatcgatcaggttgaaatcattgggcgcatgttctggacatctacaatctggtaa

SEQ ID NO: 432490 - DNA, 186 bp, Serratia marcescens
atgaccgacgaggtcaccgctctggataggcagtatcgcgatccgcgcggagtggtggtgcacgtcaccggttatgaccgggctaagcagcaagtatttttcacaagaccgaactacgagcacgaatgcatgcagccagtttggaagtttcaacagtatttcgagaggctcgataccgatgcgtga

SEQ ID NO: 432491 - DNA, 471 bp, Serratia marcescens
atgtccgattcgaatcggactgccgacgaaaacgcctctcacggtctagaaccgcctgcacccgaaaatcctgattcggagtctggtgagctggctggtggcgcaggcaaggccgacccagtcgaaaccgccttcgaggaaatcttctggggcgcagggctacgcaaggacgccaaggtcaaggccaagaacgccttccgaaccaaattcacggcctggaagaaaaccacccggggcagcgccgccgagttcgcccagatgctggccgacgacatccggctgcgggtgcaggcaaaaaccttcggtttcgacaagctgctgccgacctcgtacctgaacggcgagcgctggaacgacgagaaaccacaggttgctgcccagcctggcgccgccggggcgagaccgttggttcagcagggcgccaaccaggtattcgtcgattacgacgcgctgagggcgggaggtcgctaa

SEQ ID NO: 432492 - DNA, 1878 bp, Serratia marcescens
atgaatgcggctgaactatcggaaaagctttggggcaacgctgagcgtgttgtgaaatatctgctgccaaacgggcaccgcgaggctcatgagtggtgttgcgggagtatcaacggcgaggccggcaagagcctcaaggtcaatctggcgggcaaaaacgtttggtctgatttcgcctccggcgacagcggcgacctgctggatctctgggtgctggtgcgcaactgctcgctgcatgaagctatgcgcgaggccaaggaaatgctgggcctgaaggacaatgaccagcactttcaggccaagaaaaaaagcttctccaagcccaagaagcagggcgtgaaaaagggtgatgcacacctgcaataccttgccggtcgtgggatcaccaaagaaaccgccgaagcgttcaaggtgagcaacgcggtggtctggttcgctgatgaaggccgggaactaccggcgatcgccttcccataccttcgcgatggggagctgctgcaggtgaagcggatcagcaccgaacgccccaatggcaaaaaaatcatcatggccgaggccgactgcgagccatgcctgttcggctggcaagctctgcccaaagatacgcgcgtcgtggtgctgtgcgaaggcgagatcgactgcatgtcgtatgctcactacggctttcctgtgctgtctgtgccgttcggcggtggcaagggcgcgaagcagcagtggatcgagtacgaatatcacaacatggatcgctttgatgagatttggctcagcctcgacaacgacgaggtgggcatggaagcagcgaaagagattgcccgccggcttggcactcaccgttgccggctagtttcgctgcctcacaaagacatcaacgaatgcctggttgccggtatgactcaggacgaagtgtttcgctgcctggagacggccgcttacttcgaccccgatgagctctgctcagcgtcggagttcctgcaggacaccatcgacacattcgagcgtcgcgacgagggcatgtttatcagtccgtggacgcgtctgaacggtaacttcaagttccgtgaatctgaattctcgatcatcaacggtatcaacaaccacggcaaaaccgagatggcggggcatattgccgtctgcgcaatggaccagggcatccgaacctgtatcgcttcgctggagttgaagccgggcaagttgcttgcgcgtcttgtgcgccaggtcatctgcaataagcgcccccagcgtggagaaattcagcacgtgttcgagtggttcgacgacaagctgtggatcttcaatctcacgggaacggcgaaggcagaccgtctgctggagatttttgcctatgcccgccggcggtatggcatcgacttgttcgttatcgacaacctcgccaagtgcggattctccgaggaggacgccaccggccagaaagacttcatcgacaagctgtgtgatttcaagaacaccaacaactgccatgtgattttggtgacccacagccgcaaggtggacgagaacgtgcccaccggcaagatggacgtcaaaggcactggcgccatcaccgacatggcagacaacctgttttctgtctggcgcaacatcccgcgcgagactgctcagcaaaagcaggatgatccgagcgctcccgaactcacggacaaagacagggcggcactggcattacctggcacgcttattcgcctgttgaaacagcgcgagggggaaggatgggtcggcgacattggcgcgtttttagagccacggtctcaccaatttttagaaaacgaaaaaggcagcccatggaactacctcgtcgcgcgcgagcaagccgaagtggacatggactgggaaatgcaaaatgtaacgagggcttgctga

SEQ ID NO: 432493 - DNA, 945 bp, Serratia marcescens
atgcaaaacgaaattgattattggaaaaaacgcacttacgaagctgaaggagctttggcagaaaaggaatcagcggaatttgcacatactgatgcaggtaacccagaacatcgctcgctgttcaccatcccggagccgcagtatggcaccgcgttggctattagcaagccactgccaccgcaacgggtgatcactggtcacaagcagacggacgcttatttgtgggttctggatgttatccgtttgaacgaaccggcgcacctacaggcggcagaagatgcgttgaataagcttaaaatcagccctaagcaggctcaggagcgttacagcaattatctgatgaaatcgggcgcccacgcattccagattgcccttgccactatgtcaatggataacccagctggttacatccaaggtgcgaaaaaggcaatcgaggaggctagtaatgttcgcgcagccttcggtagctatgagactgcactagataacacgccggccgaggatttgatgctggccggtgagatgggagaggtttactcggcttgctggggatggacggaggaggagctgtctcagggctatgttcacggcgagcgctgtaatgaactggatagccagcgcaaggcaatatcgaaaggctttgctggacagcttcctgagcctgcgacgctttccgacgtcgtacgcgaatatcaatactgggattggttatacaccctacgcaacagggccgagaaggaactcggttacgaatacgcggacggtggacgaagtcacatttatgaccgtgagtcatacctggagacacttctcgcaaatatccgcccggtaagccaccaggaggccgtggacgtatgccagtgggttctcggagaagagcgcttcgaactgggtggtgggactactgagcagattattatgaacttggtgggggagtgcagttga

SEQ ID NO: 432494 - DNA, 414 bp, Serratia marcescens
atgcgcgatattcagatggtattagagcgttacggcgcatgggctgccaatgaaggggctggcgtttattattcgccgatcgctggtggcttcaaagggctgttaccgccatcgggaaaatctcggccggcatgctgtgacgacgacggattaatcgttaactcggctgtggcgtgcctgaagaaaaaagacccgtacctgagcatgctgcttgagtggtattacatttaccgcctgccgctgcgcacgatggcggttaaattgggtatatcgcacaaccatgtatctactcgcctacagaaggccgaagggtttattgacggctgcctggctgcgttgaacgtcccgctcgaaatggacaggtattgccagaaagaaaatatttatccgcctgcattaaaaagggttgtgtaa

SEQ ID NO: 432495 - DNA, 534 bp, Serratia marcescens
gtgagtgttttttactcgttagatcggctgcgcagtttgcgcccgggtatgaccattgatcttcaggacgcgtcttttcacattgcaacaatgcataattttactcagcaaaggtttggagccggcgttagccgtcacggcaaaattttcgctctcgacgctaatgcccgagtttgcaataacgcttcatcacagtgcgagattgtctttgagctttatcgccgagcacatcatccaagtaaaccatcgcgttatctatccatgtttggatgtgagactgtaagggaagtggcgtacttccgaggacaaacagcatgcggccttgatgtcgatatttttgaggttcattcaggcggagggttccatcgcgccgacatgaacctgcttaattccaactgccctccgcttgaaatggagtacagagcagaactctattggtcgggaaatactgcagaaatgcacccagggtataagcctttttgggagattataatcccgctgccagcaactataggtgaaaaggtcaacgagtga

SEQ ID NO: 432496 - DNA, 564 bp, Serratia marcescens
atgcaaacaatcacagtaccgttccacggcaatgctctgtatgtcgtcaatcacaaaggcgagccatataccccgatgaaacccatcgttgagggcatgggtatggactggatggggcaatataccaagctgaaacaacggttttcgaaaggtatagaggaaatcactatacctaccgccggcggccctcaacggatgctctgtcttcaactgcgcaaattggcggcctggctagcaaccattcagccgaataaggttaagccagaaatccgcgacaacgtcatccagtaccaagacgagtgcgacgacgtgctctacgactattggacgaaaggcgcggcggtaaaccctcgtaagctgagtgttatggaggagcttaaccaggcctgcgccgacatgaagcgggataagcagatcgccagcgtgttcggtaccggcttgaatgcttggaaggaagttaaacctcagcacgaatctaagatcagtgcattggtaggccagatcaacggtgtaatcgacctctggctggctgatacaggtaaagggaaggtcacgcgaacatga

SEQ ID NO: 432497 - DNA, 732 bp, Serratia marcescens
atggcaaaaccggattggggggcattgcagaatcagttcctcaccgagcatgccaagacgaagatatcccccaaggcatggtgcgaggcgaacggacttaactacaccagcgcgcgacgctatatcaaactgcctgcgcagaatgatgcgcaaagtgcgcagaaaaaagtgcgcagtgcgcagagtgcgcaaaacggtcaaggcctcaccgcgcctaagcaggcaccgcaggaagtcggtggcgaagaggaagggggcgccaaagaaagccaaagccttttaaaaccgcagcatgagcaatttgcgcagaacattgcgcagggcatgccgcagaaagaggcggcgatctgcgcaggctatgcgcccacgaatgcagaatcgcaagcgtccgtgctcctacgccgtcccgacattaaggctagggtaaaggaactacgcaatgaagctgcgctgctggtatcgttcaacgccggccatctggcggagctgtcatataaatctgcgcagctggcgctaaaaaatcagaagttcggccaggtggcgcccaacgtcaagaacgctgcgcagttgaccggtatcgacatgagctcgaataagaccgaggttaatgtcgatctggctggcctgagttacggcaaggtctgcatcgtcaccccggcgaactgcccggaggatgtgtgggcctctcacatggaaaagctgcgtgagggaaagccgatagcccagtcataa

SEQ ID NO: 432498 - DNA, 1194 bp, Serratia marcescens
gtggagattgcccgtgcgttggttatcctcggcgccattgacccaatgatcatcctctgcgcgcgtgagttccaaaactctatcggtgattccgtcctggcgctgctggaggcggagatttacgcgctcgggctcaaccatttctactcggtaaagaacaacgagatcaccggccgcaacggtacgcggtttacgtttaaaggcctgcgcaacaatatccagtccatcaagtcgatgcatggcatcaaaatttgttgggtggaagaggcgcagacggtatcacaggacagctgggacatcctcagcccaacggttcgcgccaacaagtccgaagtgtgggtgtcattcaacccgcgtgaagaaaccgacccaacctacgcaatgatgatccggcaccaggaggatccgcctgatggtggtgcgattatccgcaaggtcaattactgcgataacgccttcttccccgaggttcttcggcaggagatggagtattgcaaacgcattgactttgaagcctatgagcacatttggttggggctgccaaaggctatcagtgaggccgttatcttctcgggtaaataccgggttgaggcattctccgatgacctgtggcttgaggctgatcgcctgttctttggtgccgacttcggctttgccaatgacccatcaacgctggtgcgctgctttatccttggccgacgactctatatcgagtatgaggcctatggcgtaggcgttgagcttgatgacctttggaagttctacgcagggaaagatggcgctcccgctgaccaattgagccagtggaaggtcggagacgataaaaagtatcctggcatacctggcgccagaaagtggcctatccacggcgacagcagccgaccggaaacgatcagttatttgtcgcggcaagggttcgtcatcgatgctgctgctaaatggcctggaagcgttgaggacgggatcgcctacctgaagggattcgaggaaatcatcattcatgagcgatgcaagcacatggtggatgaggcgaggctctactcgtacaagaccgaccgcttaaccggggaagtgctgcccgtcgttgtggacaagcacaaccacctgtgggatgcggtgcgctactcgctggatggctatatcaccagtgagggcgatctgggagtatgggccgcgctaggcaagcagcagtaa

SEQ ID NO: 432499 - DNA, 1470 bp, Serratia marcescens
atggcccgcaaaaaccgccgaaacggcgctaaaaagcccgttgcgactgctgacgggtacaacaactttcccgccaagttaggtgcgcagacgcagaatatccaatctgccggcacctacacgccaggctacatcacccgcaaccgcgtgatgctggaatttgcctaccggtcatcgtttctggtcggcgctgcggtagatgccgttgccgatgatatgacccgtaaaggcgtcagcatcacatcgaagctgaagccgggtcagaagggccaggttgaaaccttctgggattctgcggccatctgggacggactgaacgacacgctcaagtggtcacgtctctacggcggcgcggtgctggttgtgctgattgaaggtcaggacatgagttcaccgctcattatcgaccgcatcaagaaggggcagtttaaaggcgtgatgtgttttgaccgctggcaactcgacccatcctacaacgatccggtcaccgaatacggcccggattttggcaaaccgaagttttacaaggtggtgacgaatcagaaaggcattccgccctggaagattcaccacagccgtctaatccgcatggaaggtgattcactgccctatcagcagtcgattacggaaaacggctggggcatgtcggtgattgagcgcatcttcgaacgcattcaggggttcgatacggccaccgccggcaccacacagctgatccacaaagcgcacctgcgcacctacagcatcgaaggcttgcgaaaaatcctcgcgacgggcggcacgctggaagaaggtctgatgaagcacatggacatgatccgtgagttccagaccatcgaaggcatgaccattatggacaagagcgatgagttcgccacgcacagctattcgttctcgggtattgctgacgttatcttgcgctttgctgagcaggtttctggcgccacgggcattcctctggtgcgcctgtttggtcaatcgccatcaggattcagtaccggtgacggtgacctggagaactactacagccgcatcaactctcagcaggaacggcgtctgcgtcgtcatatccgctggctgatggatattacctggcgttcactgtttggttctgagctgcctgatgacttctccttcgagttcaacaagctctgggagatgtccgacatcgaccgcgccacgatggcgaacaacgtcgccagcgcgcttgcaacagccgtgcgtgacatcggtatgtcgccggcggccgcgctcaacgatctgcgcaacatatcagacgtgatcggcatcggtggttcaatcaccgacaaggatatcgaagatgcgaagtcgcagtatgaggagtctgaatctgaaaccggcgctccgccgtcgttcagagatccagtatcagaaaagcctactggggatagtcggcgagataaacaaaatcgtcactggctcatacgatggttcccaggccagcgctaa

SEQ ID NO: 432500 - DNA, 168 bp, Serratia marcescens
atgaatcgtggcctgtatggcgcgctgctgtatttcgcgaacacggtcggcggcttccaggggaagagacttcatcaactggatttgccggtaaacgatatcctgcgtcacctgcccgatcggcgtgttcccgaccacatcccgaagcccctcagagatctgctgtga

SEQ ID NO: 432501 - DNA, 1263 bp, Serratia marcescens
atgaaatatttcttcacgacccgcctgggcgaaacccgcttccagacggcagacggcgcgctgctatgcaaagacgtgcctatcgcgcgtaccggcgtgcaaacctacctgccggaggagattgaccttgaaccggggctggatggactggtgcatgtctaccgcaccgaggacgaggttttctccaccgagacaatggcgagctttgagggcgttgccgtcaccctggagcaccccgaagacggcaacggcaatatcgttttcgtcaacccgaccaacttcgcggagttggcccacggacacatccagaacgtccggcgtggcactggcgaaaaatcagacctgctgatcgccgatgtactggtgaagcggcaagaggccatcgaccgaatcaattctggactgaccgatgtcagctgcggctacgacgcgcagtacaagcagctatcgcccggtaagggcaaacaataccaaatcacaggaaaccatcttgccgtcggcatcgaccggggccgggcgggttctcgttgtgctatcggggactcagccccaaccatcaaaaaggagaagcctgtaatgtcatggctgaaaaaactggctacggccatcaagacgaaagatgaggatgccataaacaaactcatcgacgaggcgccggagattccatctgacggtatgggctctatccccggtcacaccatcaacatcaacgtgccttcacaggcaaccgcgttaccggctgaaagtcgcacgactaccgacgaaaacccggacgacgataacccaaccggtgatgctgacgttcctgagtgggctacggccattctggcgcgcctggataagctggaaggcaaaaccaccgatgaagaaccggacgaaatcagtaccggcgacgaagacgcagaggaagacaagaaagtcaccggtgatgcggacttcaaacgcaacatcatctctgatgcggaaatcatctgtcctggattccagccgaacggcgataaggggctcaagcgtcaggtgctgaaccaggcactgcgcacaggcgacagcctgaaggcgtttggtgtggctgacttcaacaaggcgccaaaggccactgttgatgcggtatttactgctgccgtgcagatgagcaaggtgaaaaacacggtaacacctccgccaatcaatacgcacaccatcgacggtgcgacggcccccaaaaacctcacgccagcccagatcaatgagctgaaccgtaaattctggaacgaacgcaaataa

SEQ ID NO: 432502 - DNA, 504 bp, Serratia marcescens
atggctggaaatgcttatttaacccgcatgcctatgggcattgccggggctgtgacgcgtccccgcgatctcaccattgagccggtaaccctcgaccaccagaagcaattcgcctcctacggtctggccggtaagtacgttaacgacaagtttgttccgctggagtccggcgacaccatcgacaaagtgaaggggatcctggttcgtccgtatccaatcacctcctatgccgatttggcttacctgggcgttaacgcgaaccaggtgggcgacaacctgaagcgcggctatatctgcgtcaaggtaactgccggcaccgcgccgagcgccaagaaaggcgacccgatttatgttcgcgtcgctggtggtactgccggcagtccggtaggcactttcgtgctgacaccagacgccaccgccgagaatacgcctcagctggtaagtgcagaattaatggggccaggcgaagccgatggccgtgtcgaaattgccttcaacatctga

SEQ ID NO: 432503 - DNA, 948 bp, Serratia marcescens
atgtttactattgaccgagctaccatcgactcctccggcgttttcctcgtcggcgaactggagcgcatggatcagacgctgaatctgcctttggtgtccgtgaaatggggccgagatatgccgctgcgcagcgacatctccatcgccgatgaagtgtcatccttcaccaataccgacttttccagcgtcggcggccctaacccaaccggcaaaaactggatgggtaagaaagggactgcgacgccggggcctgagctggatattatcccgacgcgtaacaacctgactccttgggcgaccgaggtttcatggactgtgttggaactggcatccgcacagcagttggggcgtccgctcgatgtacagaagtacacagcgatgaagatgaagtggaatatggacaccgatgagcaggtatatatcggcgattctactctgggcgtcgctggtttgctgaacctgcctgaagttgtgccattggccgctgctgctgcctggacagcgacaaccgatccggatgtcatccttcaggatatcaacctggtgcttaccgatgtttggctgcgttctggttatgccgtatgtccagcgaaaatcggactggcgccggaactgttcggcttactgaccacgaagaaagtctcatccgctggcaatatctccgtgttggaatacgtgaagatcaactgcatcgcgtatcaggaaaacggcgaaccgctggagattgtctccatgaagtgggcatccaaacgtggcgcgggtggcgcgcatcgtatcgttgcatacacccaggacgagcaatatgttcgcttcccgatggtgccactactgaatacgccgctggaataccgcagcatgcaacagctcaccgtgtactacggcaaactggggcaggttgaagcgccttatgcgaacaccatcggctacctcgacgtgccggcagcctga

SEQ ID NO: 432504 - DNA, 393 bp, Serratia marcescens
atgaaatacatcgtatcttcggccgcgtctctcagctttgctgatggcagtcgccatgaactgacgccgggcattcacgacagcttccccgatcacgttaaaaagcactgggcattcacccaccatgcaaaaccgctgtctgagtctgatttgcagcaggagcagcaggacggcgaattgtctctgcgcgtggtttcactggaagggcaggtaaccgatctgcagaagcaactggaagctgagcaggaaaaggtaactgagctgacaggacagcgtgacgcgcacgccaagaccattggcgagcacgtagccactatcgccgatctgcagaagcaactggaagctgcaaaggtgaccgacaatgccaaaaaacagcctgctaccaacaaatga

SEQ ID NO: 432505 - DNA, 411 bp, Serratia marcescens
atgccaaaaaacagcctgctaccaacaaatgagaaattccgcgctgactttcctgagtttgccgacaagacccgctacccggacgctgctgtaaatttctatctcggtcaggctgacaccatcctcaatcaagacgtgctgggcgatcagttcgtgtatctcgctgagcttttcacagcgcattacacagagctgcgcggtcgcgcgctggctggtgctgggctgggattggtgaacagcaacggttcggctggggtggcgacatccaaatcggtcgataaggtgagcgtaagttatgacgtgtcaggggtaatcaatcctgatgccggcttctggaataacaccgcctacgggagggagttcttctggtggtggtcgatgttcggcgcgggtgggaggcaaatcctgtga

SEQ ID NO: 432506 - DNA, 1485 bp, Serratia marcescens
atggctcagcagggtggtttacccgtccgtaacgttattgacgtcacggtaaatatggccttgcgcgctgcgcaggctcgaaactttggttcgctgctgattattggcgcatcgacagtcatcgacgccagcgaacggatgcgttcctattccggtatctcaggggtgcaggccgatttcggcatccaggcacccgaggcgttagctgcgcaggtttactattggcagcgcccacagccgatcgacctgtatgttggtcgctgggtgaaagaagataccgccgcagctttgcgcggggcaatcctgaccactgcacagcaggcgatgaccaatttcacaaccgtgaccgatggtgcgatgaaaatcagcgtcgatggggcggtcaaaacggtctcgggcgttgacttgtcggcagaaacaaacctgaatggcgtcgctgcgcgtgtggctgaaaagctgaccacggcgaatgtcgtctgggatgcgaacaacgcgcggttcgtggtgacctcgaaaaccaccggtgaggcgtccgcagtcggctttgctacaccaaacgcaacgggaaccgatatttccgcgctgatgggcattcttgaaggcaccggcgcgaaaattatcgcccgccagccggcggaaaccatagctgaatgcgtcgcgaaatttatcgacctgtcgtcgaaatggtatggcctgtatatcgccgagacgatttctgatgatgaagtgctcgcagttgccggcctgatccaatccgatgacgtttcacgtatctacgcccacaccacgcaaaacaccgccgtgctcgacgcggacaataacaccgacattgccagtcggctgaaagctgcggcgtttggtacaacctgtgtgcagtattccagccagagcccttacgctgctgtgtcgattctggggcgcgcattcaccgttaacttcagcggcttcaataccacgatcaccctgaaatttaagcaagagccgggtatcgtcgcggatacgctgacgcaaactcaggcgctgaccctgcagcagaaaaactgcaacgtgttcgttaactacgacaacgacacggcgatcttgcaggaaggggtgatgtgtaacgccgacttctttgacgaacgccacggcctggactggctgcagaactacgtgcagaccaactattacaacctactctataccagcaacaccaaggtgcctcagaccgacgagggcgttacccgactgctgaccaacgtagaggcctcgctggcgcagggtgtggaaaacggcctgattgctccgggtgtgtggggcggcgacagcttcggcgcgctgagtacgggtgacacgctgaccaaaggctattacacctacgcaccgccgattgcccagcaggttcaatctgagcgagaggctcgcaaagcgccggtgatccagtgcgcaatcaaactggccggcgccgtgcacttcggcgacgtcatcatcaacgttaaccgctaa

SEQ ID NO: 432507 - DNA, 441 bp, Serratia marcescens
atgtcaacgtatagctttttagacgtatcggccagcatcaccggtgttggcggttctatcgatcttggtaatggcgcggccacttctgacgaagggatcaccgtcaccatgtcggaaaacaagaacaccatggtgaccggtgctgacggggaggtgatgcacagccttcacgcgagtaaatcaggcacgatcaccgtgagcctgctcaaaaccagcccagtgcatgccaagttgtcggtgatgtataacgcacagtcccagtcttcggcgacgtgggggaacaacgtgattgtcatccgaaacaagtccagtaacgacatgaccacggcccgcagtgtggcattccagaaacagccagaccataccaacgccaaagacggcaatacggtttcctgggtgttcgattgcggcaagatcgaccaactgctcggcacgttttaa

SEQ ID NO: 432508 - DNA, 399 bp, Serratia marcescens
atggaatttgaaattaagggccagaagtacagcgcggtcaagctgggtgtattcgaacagttgaaagtctctcgaaaactgctgccggtgctggcgggcattttgggcgaactgaaggggggtaaaatcaccatcgaatcagccctgccgatcatcgctcagtctattgccgacctcaaggaagaggactgcaacgccatcatccacccctgccttgcggtagtttcgcggaaaaacggcaaaaacttcaactccgtgttcaccggcggtcagctgatgttcgatgacatcgatctgatgaccatgctgcagatcgtcggcaaggtggttggggactcgctgggaaattttttgcaagaactccaaggcagcgagacgggcgaccaggcgcaggaataa

SEQ ID NO: 432509 - DNA, 153 bp, Serratia marcescens
atgcgtccggtgcgcaagggattatgtaaatacgaggcgctcaaggacgggcgcattgacctctacgacatcgcgctgatgaacgactacctggacttggaagccgataacgaagcgaagatagcgaagtggagacaggataatgaacgttga

SEQ ID NO: 432510 - DNA, 2001 bp, Serratia marcescens
atgaacgttgaaaccctcaaggactttctgatctcgctgggcttcgaaattgactcggctggagagaagaagttttctgccgtcgtcgccggtgtcacggcgaacgtgctcaaaatgggtgtggcggttgagggtgcggcgctgtcggtcattgccttcacaacgaagattgcccaagcatccgatcggctgtattgggcatcgcagcgcaccggcgcatccgttgccggtattcgcgcgctgggctatgccgcatcacaaacaggttcagatgcggccgctgcccagaactcactggaaagcctcgcgcgcttcatccgtaacaatcctggcgccgaagggttcctgaaccgcctgggggtgaatacgcgcggtgcaaacggccagatgcgtgataccgctgccatctttaccagcgtcggggataagctgcgcaacatgccgtactaccgcgccaatcagtacgcgcaaatgctcggcattgacgaaaacaccctgatggcaatgcgccgggggatttcggggtttacggcagattatcagggcatgctgaaggcggtagggctggactccgataaagctgctgcgcaatccaataaatttatgacctccatgcgcagcctgacagcgcttctgggcatggcaaaggacaagataggctctgaccttgctggaggcctgagcggatctctggagtcgctacgcaagcgcatcatggacaacttccccaagatagagggcttcattaccaaaacggtgaaaagcatcctctggctggcggaggcgttcgggcgaatgctctatcgcggataccaggcgatcgacaaggtgatcgagtggtggaaagggcttgatagcgagtcaaaaaaactgcttggcacctttggcgcattgctggtggcctggcgcatgctgaatagcgcgttcttgatgtcgcccataggcctgatcaccgcgctggtgattggccttgctctgctctgggacgattatcagacctggaaagaaggcggcaagagcctgatcgattggaaagagtgggaaccgggtattcgcaaggctcgcgatgccattatctggatccgcgataagctcatcgaactgaaggatgccgtgggcggctggaaggtcgttcttatggggctcgcgacctacatgggggttacctggctcaaagccatgatggggccgctaagtaccgtcattaaaacgctgcaggggttccctgccatattcagcgcagccatgaccgccgccggcatttacgtgattatcgcttctatcaacgaagcatacgagcgaatgattgcgctcagagacgggaaaacctacggggcaatcgcctcccagtctgaggaaatgaccgagctcgagcggctgaagcgaatgaactgggcaaataataatcctggcattccttacccggaggacaatcaatacgggcaatccgttaaacgtccgcaggctacaaaagccggggcggcgttgctgggatggctccagccaaaactgacgcagctcgaggcaatgtataacctgccggcgggcctgctgcgcagcgtggcgctgacggagtccggcggcaatcagttcgccatctccggcgcaggcgcgaaaggcttattccagtttatgcctggaactgcaaaggacatgggcctgcgcgggaatgacgttttcgaccccgagaaatcagccaatgcggcggcccgctatctgggaatgctgctgcgtatgaatggcggcgacctggataaggcgctggcttcctacaactgggggatcggtaacgttcagaagcatggtatgggcctgatgcctgcggagacgcggaactatattccgagagttcgcagtaacatgcctggcgccacagtgcagcaggaaaccaatattcacatccacggcgtgagtgatccgctcagcgcgggtaaagccgctgcaggaaagcaggtagaggtcaattcgcagcttactcagcaactgaagagggtcggatga

SEQ ID NO: 432511 - DNA, 633 bp, Serratia marcescens
atggatattctctcggtgctgttttcacagcagaccaggaagatcggcgtcatcgtgccaagcgtcgctatctcggaaaagcataacgacacgctggagattactgaacaccccgtagagcggccaaccgctgaaggtgcggggtttatttctgaccatgcgtatcggcgcccctctgaggtgacgatggaactgggcttcgctggtggcggttcattgctggatggggtggacacaacgcagatgttcgatctcagtagcggcctgtcattgggggatagcccccgcgacgtgtatcagaaactgctcaacctgcaacgcgaccgcctgccgttcgacgtcaccaccggcaagcgccagtaccagaacatgctgattaagtctctggatgtcaccaccgacaaaatcagtgagaacgtgctgatgtgcgtattgacgctgcgagaggtgatcatcacgcaaacttacactatcaaggttgccgataagtcgaatatgactgacggcgtcagtacggcgcccgttcaggatgccggcgttaaatcaccgaaggcggcgaacgaaagcctgttgttccaggcacagggcggcgcaaacgcgctgtttggtatttttaaccgaggtgccggatga

SEQ ID NO: 432512 - DNA, 306 bp, Serratia marcescens
atgaatattcaggaaattcccctgacgccgacgaaccagcaattcgctatcacgcttggagaacaacagctcaacatgcggatcacgtggcgagatgaggccggttggctgctggatttaatggacggtgccggggctgagttggtgaacagcatcccgttggtgcctggcgccaacctgctcgggcaatacgcctatttggggctgaaaggcgcgctggcggtgctggtggacaacaacgaaccagagctgccgacgaaaaccaatctggggattggcagccatctttattacgtgcaggagtag

SEQ ID NO: 432513 - DNA, 1077 bp, Serratia marcescens
atgagtcaaaactggatgcgccattttgagctgcagcttttcgaccagcaggggaatggcgtcagcctgtccgattttaaggtgctgttcgacattcagaaaatgcccgcgacggtgttcaacggctttgtgggcaacttcaaaatttacaacctgtcgccggacacccagaacaagattatgggcaaggagttttcccgtatccgagtgatcgctggctatgacggtatcgcgcctgatgcagatgccgaccaggtcggcaaggtgcgctctgtcgatgcggcgcaaagcggccagcgtgacggccaaaacttcgggctgatattcaacggcgatattcgcttcaccattaccggcaaggacaatgtgaccgacagctggatcctgctgcagtgtatcgacagttgggaggggcatctcggggctatcacgaaaacaaccgtggccgccggctggacgtatgccgacctgttcgaccagggcatgaaatcctatgcaccgttcgggatttctgccgggtcagtgccggacatgccgcctaccgtattccctcgcggaaaggtcattttcaaaaccacatcggcgctgatgtacgacatcgcaggccagtgcaaggcgaactggtggttcgaaaacaaccaggtgcacatcctgcctgagagcaaatacctcaacgaggcgattgtgctgaatgccaataccggcctgattgaccgaccacagcagacaatggggaatggcattaatgcccgctgcctgattaacccgaacatcaaactcggcggcctgatccgcatcgaccaggcggcggtttaccgcgcctctctggcgaatgatgatatcgcaatggccggtgaccgcctgtcggagacggaagataacggcaacctgtcagtgagcaccgggcgcggcgatcgcatccctccatccagcatcaacatggacggggattacatcgtctacagtatcgactatcatggggacacaaggggcaacgcctggtacatggatctgatgtgcatcgcgcgcggctcgaaggatttgcagaccaacacagcgctgaacaaggcatactga

SEQ ID NO: 432514 - DNA, 345 bp, Serratia marcescens
atgaagataaaggctttactaattgtcgccgctctaattcctgtcgttagctatgccgactctcagtgtgggcctttcttccttggtacaagccaggctaacgatggtttggcgcgtattaatggcgccaagccactgagccaaaaagtcactttcttgaagaagaaagaggactacgacaatgtcatgtttcagtggatggtcgaagaccccaaaacagggcaactgctgggaatcgaatacgtgaagcgcgccggtaaggccattctgaacgctgaggccgtccgagccaacatggacgccccgcgagtgtttggcacctatgactgcgtgagggtgaagtaa

SEQ ID NO: 432515 - DNA, 759 bp, Serratia marcescens
atgccggtatcaatcccttctcaggtcggcggtgagcagaacatggctaccgcgctgaccgatgacatcatgtcaaatctgcgcgtggcgctgcctggcatcattcagtctttcgacccggaaaccgtcacttgcgttgtgcagcctgcggtcaaaggctatgagtccgacgacgctggaaagaaatcttccctaagcctgccgctgctggtggatatacctgtcattttcccgcgtggcggtggcgtcacgctgacgtttccggttaaggctggtgatgagtgcctccttgtttttgcagaccgctgtatcgatttctggtggcagaacggcgggattcaggaaccggtggacgggcgcatgcacgatctgtccgatgccttcgctatcgtcggcccgcagtctcaggctcagaaaatcagcggcatcagcaccagagctgcacagctgcgcaccgacgatggcgccgcatttatcgaactagacccaggcagccacgcggtgagcattaccacaccgggcaagctgacggccagcgcgcagggcggcacggagatcaactcccccgaaattgtgctcaacggcaacgtgacgattaacggcaacctgtcgcagggcatgggggacggcggcggtacggcgacgatgctggggccggtgaacgtgaccaacgacgtcaaggccggcggcatcagcctgcagacacacaaacacggtggcgtagaaactggcggcggccagacgggaggcccgcagtga

SEQ ID NO: 432516 - DNA, 912 bp, Serratia marcescens
atggcgaagaatgaatttaaaccgtttgccatcggtgaatatgcaaacgttttaacccaagaagaatatgaagcgcttccagctgtcggagctgggtatacggcaggtatagcgaaaagcgagcagcttaataaaacatggcgtcaagcatcggtaatgtctgctgttttaggtaactttattgcagaacagtccggtgatgacgtgctcgatgatggcgatttaaacaaactgaaactatcacttgagaaagcaattcatcaatatttgacaggcagctcagtcgatgagcgatatgttttaaagacgcagaaagttaacggtaaatccctctccggtgacattgcgttatccgctagtgacgtgggcgctctgccaattgccgggggaacaattaccgggcctgtaaataccctgggtgatgttggcacacaaggcggcgtgtttgttttccgcaatgctgaagggtatcaaacgggcgtcgtggcagcttatgacaatggctcattagcgattaaccgaagtgacagtggtcgcggatttggcattgatgccgatggaaactttttcacgacgactggagtgccaatttttgagtctggtcaacgggtttacagcccaaacaatcgaccggatgaactgcatgttgatggcgataattggtggtcgcgtgattctgcagggaaaatcgtgcagggaggaatagtaaatcgttcggccaactcaaatcccgtatcctttccaattccattccccaataaattattaggtatcaagttgacattaagacaagttagcgaaagcggcggctccgctgacaatataattgcacaaggggcgagtaattctgggttcaatgtgtggatgaactctaacgaattatcagcatattgggaagcaacagggtattaa

SEQ ID NO: 432517 - DNA, 2415 bp, Serratia marcescens
atgtcgaataacggtttgccagtcactgacgtggtaggggtttctgttacccttggtcagcgccgcactgccggcgcatcagcaggtgatgcatacgcccaggcggcacaaggtagcgcaatttcggcggccaattctgcagcgaaggcttcgcaggctgaacttggcgcagtggaagccgccgatggcgtggctgagaatgcagtcatcgcgacagacgccgctactaaggccgagacggccgcagaaaacgctcagaacatcgcagacgccaacacctactacaccacaccgtcagaccccgacgggacgattgctgggattgccgggacgccagtcgggaaaatgttccgggttgcaattcaggacggtgctggcgtgactgtatcgttcaattattataaaaatgacgcgggtactgctattttcataaattccgaccctagtaaaagatttgttgatgccacgaatgaaacggcaaatcttgctatggctggcgttgatgaatttaattcactgcgcttgtattacactctgaacggaagcgggcaatttcctttctatttaggaaatggggctgatggtgcattagcaatagacagggatcgcggggcgtggtttgctggtttgcaggccgcaattcaagattatgttaatcagttaattcctcgggctgccggcgcgtattacaaaggattgacccatgtaattacagacatcaccgggaaaaaagcattgcagtatttcgatgctgataatgctgcgtggtttgccggtttaagtgaatctctacaggcgcacgtcagccagttaatccctcgcggacaagctgtaaaatatcgcgataccgcacatgtatttacagatgagacaggtaaggctggctttggtcgcataaatcgacgcggtgaatggtttatcccgggcgtagatggcccgctgcaggatgcgatagggaaaacgtcagccgatattaagatggtaaacggtaagcccgcccttttctggaaaggggcgcaggtgtggaatgattattacgtgaccagtgccaggccggtttctgataatgccgcgcttttcacttttgaaaaagacgatggcaccggcagttcaggattgctgttcattccaagcattcgtgaaattccagttacctcagcatttattctttgctacatctgccttggtcagagcttgggtgctgcatttgacaagccaggccaaaatattcgcgttgtcggcgctgacccattgctgcgcggccgctgtttgtctccgtcaggccgcgctgacggcaacagtgctccagttagccagaccgatttagaccgtatcacggacatgggctacaacatcgaccggcaggggcataacatcccactcgcaaacggcctgatgtacgaaatgcgtgatgcgggcatgaatctgccgacgattattaatgcgccgtgcaacgctggcggccagccgctatctgggatttcaaaagggacgttcgcctacacgaagagcctggcgatgcttacgcgcataaccgaacttgcaaactccatcggaaaaccattacgcaatgactttattctgttcgagcatggggaaacggataacgacaacggaaattgcccaacgccgggtagttacctgtcgttgctcggcccgtactttaatgactgccttacggacttcaacggcatcaccggcgccacaaccggcccgattatcgttattgaccaggttggtagccgcatcaataccaaagccaacgatgttgatgatgagggtaacccgattggcgatccgatagttgttcagccgtattctgtcaccgcaacagatcagctcacatatgtgcgtcagcatagcaactctattatgtgcggaacgaaatactggctcaactggctgtataacgacggatcactgtctcacctgaaccaatacggcaaagtgcttcagggcgaagctattgaaaaggcagtttattggcacctgtatgaccctgctaaaaagggaacatggaagggaacaagggtgcagagtatcgctgtcaacggcaacgtgattgacgttaagtattacgtgccgttcccgcccctggtcatcgacaccgatctccttggcgactgcgctgggaaagggtactccctggaagccgggagcgcgtcggtagtgtcggtagtggttgtcggcggtgatactgtccgtctaacgctcgaccaggcgccagcgaccacagaccacttgctaatcgggttcacaaacacgacgcaggcgaataacggaaacacctacccgctggtatgtgtacacgactcgtcgccttgggtatcacgttacatcacaaaaaacagtaatccggttccgctctataactgggcaaccctcgatcgcattccattaactggggagttttaa

SEQ ID NO: 432518 - DNA, 897 bp, Serratia marcescens
atggcaacaggcattaatacaggcgtcgcatttaacaccagtcgttgggcgcctatcgatttaacggggcttatcttgaatgcgacaacgctttttaatactcataaagcccgcgttctggccgatggcggtattattcccgacgaagccggctgcctggctcgttttaaattgctcgtcgataacggcatgtatgaaaatgtcgccgtttcattaacgcctagatttggcctaaagctggccggtgatggtgtttctgtacagaaaatttataacctctccggtccggattttatcagcgtaactcaatctggtagctggctgccacaatggaattcggcaacgggctctgttcgcgtgcaagtgaattcatcagtggcagggtatctccagtctgccagtaatatcacggttcaggttggcaattcatacgttgtcagttgtgtgggtaaagacactgatccgactgacgcggttggtctgacactcggcgcagtgatcggtaatttgccgatggcctattgccgcatccaaaaaacaccgactcaggatgaggcatatcgctatggaacacgcgatagcgcgtatacgagaccaagcagtgcgggcggtgcggtaagtgctgttaaaactccgtacatcgattatcagccgtctgccgcatttttcgatgtcagcgcgggtgttgtgacgccgttcgacaacggacgcattgggacgccggcaacggcgacaaccggcgcgctttatgcgatgcgttccgctacgcctataatcatcggaaacccggccttcaccggttctgtgatgcaaaactgtgatggctcgttccgagatttcacaattctgagctctgctcaatccgctgatgcgctgattttgtcgcgcattgtgtaa

SEQ ID NO: 432519 - DNA, 864 bp, Serratia marcescens
atgacccagaaagaaatttggtacgaaacgctgcatacgggcttcggccagtatttctcggtagagaaggtgctgtaccgcgagaagaccgatcaccaggatctggtgatcttcgagaacccggtgctggggcgcgtgatggcgctcgacggcgtggtgcaaaccaccgagcgtgacgagttcatctatcacgaaatgctgacccacgtgccgctgctggcgcacggcgcggcgaagaaagtgctgatcatcggcggcggcgacggcggcatgctgcgcgaagtcagccggcaccctggcgtggagcagatcaccatggtcgagatcgacgccggtgtcgtcgagttctgccgccagtacctgcccaaccacagcgccggcgcctatgacgatccgcgcttcaagctggtgatcgacgacggcgtcaacttcgtgaaccaaaccgacgaaaccttcgatgtgatcatctccgactgcaccgatccgatcggccccggcgaaagcctgttcacttcggcgttttatgaaggctgcgcccgctgcctgaatgagggcggcattttcgtcgcgcagaacggcgtctgcttcctgcaacaggacgaggcggtcaacagccacgccaaactgagccgctactttaccgacgtcagcttctatcaggcggcgatcccgacctattacggcggcatcatgacctttgcctgggcgagccagaacccggcgctgcgccagcgcgatctgcctactctgcaacagcgctttaaccaaagcggcctacactgtcgttattacaacccggcaattcacgtcggcagttttgccctgccgcaatatttgctcaatgccctgaacgtaacacgttaa

SEQ ID NO: 432520 - DNA, 123 bp, Serratia marcescens
atgatgaaaaaaacaacgttatcgatgctgttgctggcgatgctgggcttctccaacgccagtctggcgctgaatgaatccgaggcggaagatctggccgatctgacggcggtatttatttga

SEQ ID NO: 432521 - DNA, 543 bp, Serratia marcescens
atgttagggataaccagagcggcacattggtggtctatctgcatggggctgctgttggcgggcgcgagcggtagcgcattggcggccgacaatatgtattttcatggtgcattggtggcggaaccttgcacgctgcggccgggcgatgaggacatccgtctggacttcggttcggtgatcgataagtacctgtatacctatggacgcacaccggggaaggcgttcaatctggtgctgcaggattgcgatctcagcctggggaaaacggtgaaggtcacctttaccggtgctgaaagcgccgcgttgccggggttgttgttgccggatggcggcagccctctcggcattgcgctgggcatcgagacgatggcgggctcgccggtggcgctgaataagcccagccaaggatatgcgctggccaacggcagcaacagtctgcaactgcaggtgtatatccagggtgagccggcggcgatcgcacagaaaagcatcggtctcggtgttttttcttccgttgctactttcgctttggagtatgaatag

SEQ ID NO: 432522 - DNA, 816 bp, Serratia marcescens
atgaattataaattttggggttttttattttgtttttttctagttggtggggggtattcggcttctacgtatgccaagctaaatatgctgattgactggcagtacgatgaaagtaatgaattgatgaactttacgataaggcaagcttattattttggtgatgattatagaatgacgtgcagcataatgtcaccttgtaccattgcaatgacctactctgcaaatttgggttatccgtggaagtataaaatcaaagtgtatggggtttcattgccgatgagtgatattgtctatagccttaataaagatcttcctgtttctgggagtatgccggttgttaatgcaagtaatatttgctacatggtcgctatgttaagaggcgataatagcgagaggggatattatttgggttccacttgtgatggtagcattaatccgccggaacccccaaaaccacaggtctcatgttacatggacggcaacatttatttgcgtcatggctcaattaccgatagtgaagtggccggcaatcgagccgagagcactgcctatgtttactgcactggggacgccaaagtgaaggtgcgagccctgagcagcgttggcagcgacagctatatggtgaatctgcgtgccgacggcagcctgaaatctttgctgagcgtgaatggtaccgccggtaatggcgggataacgctggaagtaccgggaacgaggggggctgctgtaacgttctcttcgctgttgattccatcgggaacgctgacgccgggggatttttccggttcagcggtggcggtgatcgacattatgtaa

SEQ ID NO: 432523 - DNA, 492 bp, Serratia marcescens
atgaagcgcaaatttggccttttggtctgtgtagtggccctgtggatccagcagggcaacgcgttggcgggtgaggcggcgatggcgttcagcggcacgttgaatgccccaccaccttgtgtgatcaacaacggccagcgcatcgacgtcgattttggcgaacagcttggtattagccagatcgacgggcaacgttacctgcaaaacgtcaactatcgcatcgactgcgagcctggcggcagcgggcaaacgctggggttaacgctggtggccgccgccagcgggtttgacgccgccgctgtgccgaccaatgtgccggagttggccatccggctgctgctggcgggcaatccgtttgtgctgaacaaacgtgtggctatcgattccgctaatcccccgaggctgcaggctgtgccggtcaaacggccggggggcgcccttaaacctcaggcattcagcgcccaggctacgttattagcagactatcagtag

SEQ ID NO: 432524 - DNA, 516 bp, Serratia marcescens
atgtgcgcaacgcggcaatcgttaccgaaaagaacaggatgtaacgggaaatgggcgctgctggccgttgccctggcatccattccggcggcagggctgacggcgaccgcaccgatcgtcatctctggctcgatcaacgccagaccccagtgcgtggtcaacgacaatcaaacgatacgcgtggcgttcggcaacgatttgatcaccaccaaagtgaacggtgtgaactacctgcgcaccattgattacacgctggagtgtaaaaacgccggtcaaagcgtgatgaagatgaaggtgatgggcgcgacggctgccttcaacaacagcgcgatccagacgagtaaggccaatttggccatttcgctgcgcgccaacggtaatccgttgccgatcggttcctggctggccttcacttatcccaataagccggtattgcaagcggtgccggtcagcggtggcacattggccaccggcgggtttagcgcggcggcgacgttgatggtggaatatctatga

SEQ ID NO: 432525 - DNA, 657 bp, Serratia marcescens
atggcaatgaaaaacgtcaaagcgcgtgagtgggcttatgcattgagtgaactgcgctattacgccgccttgggggggctggtgctgatggcgccgcttagtctgacggcgctgctgtggctgctgccggcggccaacgccgttgacaactgggatgtggatggcgccaacggcgtgctgtatatcagcggggcgctgaccgagagcgcttgccggctagagatggacagcgcgcggcaggatatcagcctgggcgaggtagcgaccggtaagttggctgttatgggcgcgcgcggcacgccggtggcgttcgagctgcggctgcacgactgcctgcgcggcccggcggtgagccgggatgaacgcaccggggcgcgactctgggcgcatgaccagccggcgatgcgggtggcttttaatgccccggccgacgccgataatgcgcagcttgtaaaggttcagggcgtcagcggtatggggctgcgcctgctggatgcgcatggccgcgacgtacggctgggcagccgcggcgcgccgttgtggctaacgccgggcagcaacgtactgagttatagcgttatgcctgagcgcaccgtggcgtcgctgagggccggcacgtatcgggcggtggtggattttgctctgagttacgactga

SEQ ID NO: 432526 - DNA, 1557 bp, Serratia marcescens
atgtcaacaccagaattgtcgcgctccggcggctggttcgaaaaagcccagctgttcggcaaatcgttcatgctgccgatcgccgtgctgccggcggccggcctgctgttggggatcggcggtgcgctgtccaatcccaataccgtcgaggcttatcccttcctcgacgttggctggctgcaaagcgtatttaccgtgatggccagcgccggcgccatcgtgttcgccaacctggcgatcctgttcgcggtcggcgtggcggtggggttggccaaaagcgacaagggcacggcggggctggcctcgctgatcgcctacctggtgatgaacgccaccatcaatgcgctgttgaaaatcaacggcacgctggccgcgcagaacgccggcgcggtggggcagggaacgattctcgggatccagacgctggagaccggggtgttcggcggggtggtcatcggtctggtgacctggtatctgcacggccgctacaacaagatatcgctgccgccgttcctgggttttttcggcggctcgcgctttgtgccgatcgtcagctcgctggcggcgatggcggtcggcgccctgatgaccgtggtgtggccgcctttccaacggctgatcttcggcatgggcgggctggtggacgccagcggctatctcggcacctttatctacggcttcgtgctgcgcatgctcgggccgttcggcctgcatcacatcttctacctaccgttctggactaccgcgctcggcggcagcgaagtgatcaacggacagctggtggaaggcacgcagcgcattttcttcgcccagttggccgacccgaatacgcagcagttctacatcggcacggcgcgcttcatgtccggccgctttatcaccatgatgttcggcctggtcggcgcctgcctggcgatgtaccaaagcgcgcgcccggagaaccgcaaacgcgtcggcgggctgctgctgtcggcggcgctgacctctttcctgaccggcatcaccgaacctatcgaattctcgttcctgttcatcgcgccggcgctgtacgtggtgcacgcgctgttcgacggcctggcgttcgcgatcgcgcacattctgcatatcaccatcggccagacgttctccggcggttttatcgatttcatgctgttcggcgtgttgcagggcgaagcgaaaacccactggatgtatgtgccgctggtcggggtgccctggttcttcctgtactacttcacgttccgtttcctgatcctgcgcttcaatttcaaaacgccggggcgcgaggtggaaaccgcgccggaagcggtgacgaccggcaccgaacgctcgcagcaggtgctggcggcgctgggcggcaaagagaatatcgtcgaactggattgttgcgccacgcggctgcgcgtgacggtaaaacagagtcggttgctggacgaaagcgggctgaaggccagcggcgcgcgggcagtgatcgttcgcggcaacggcgttcaggtgatctatggcccgcacgtgaccattattaaaaacgaagtcgaggagttgttggatttatga

SEQ ID NO: 432527 - DNA, 825 bp, Serratia marcescens; identical to SEQ ID NO: 422405

SEQ ID NO: 432528 - DNA, 240 bp, Serratia marcescens
atgggcagtatcaccctcgccggccggcagatcttcattctcaacgaaaacgacagatacccagaaccacagcagaacagccctccgatgttcgcgatacgcgaagacgaggagagccggcactggctttatgtttggcataaagggcgctggccgctcgtctcagaaacgccattcgaaacagagggcaaagccgttgatgcggcgctcgcattcgactttgccacgctttacaaatag

SEQ ID NO: 432529 - DNA, 2532 bp, Serratia marcescens
atgacaacaccaactaacaagccaattcctagtaatgacctcaatgacttcaggtttaacgcagaaaaagttgatgaggttgtaaactctaataacgaaaattatacggatagatttggcgtcaaaagatttactattgaaggcattaggaaaaatattgctcctttaggtaagcgatatgattcacttcagcaagcaattgatgcatttgactctgaaatccaagatggggcctatttctttgtaagatctagtggtgatgcatctctggcttatgaatatcaacgcgttggaagtaatgcggttcctaccggcgagagcatgtacaatggtaatgcagtttcagaaattaacaacaggctggcagggggtaatgtagatcagttcttgcaatctgcaacaaaaaccggaattggagaatcagtggcgagaactcgagtcgaaggatcaaacttctcagtaagcggtttgctagagtccgtcactgtttttgccgaggtctctggtgctgcaatagttaaaattgtaaccaatggatctgccagcggcacttattctctcgttacagaattcccgataacactttcagttggtgagaataaattcacttcaggagttgatttcttaccgatatcagtaaatacatctcaaacaatagcggtttatagtaacgtaggtcgaatgtcatcatctgcaaatggtgttggacaagagggctctagttatatttttaacggaaacctaacaggtaacaacgtggccgtgacaactacaacaaatgaaatgcagctaaaggcggttgttgttactgggactggagaaacctatgaggatatttctcagaaagttgtagagattagcaataaaataaacggtcaaacactctcgataggtgttaactctccgtctgcaacaggaactgtagaatcaacaactagaaccagaatactaggggatattataacctctgctggttatttgagtaaaataacagtttatgctcatacggcaggaacagcaaagattaaagtagtaaagaaagttagcgataaaatatttagcttaattagtgagttcagtgttacctgtgtttctggtattaatgagtttgttagcggaacgcattttgaaaatgtagctgtaacaaacggggatagcattgcgttttatggcggtacagcaagaatagaagcatcaccaactgggtctggacctgatggagtgacgctaatttacaatggtgatctaacaggaagcaatgtaactgttgtttctactacaaattacatgcaactaaaggctgattttagtattggggtttcatatgatcagcttgttgacatcgctactgatgcatatgcgacaagtaaggacgtagaaaataagattacctcgcttccaacatccatttcagatgcattgcgaaagtcaataaccaccgaagtgcagaaatttacagggacatcaatcccaccaaactgggtaacgagtggcgctgtatggtctataagtgatgctctattagcatctggagtggggggcgcgaccaccgtagcaagttttgataagtactcgtcaatggccaggaagattacgcgtgcaagaattaagatgatagactcttcgtctagagctggaataagctttttaccgcaagagtctaatagaggcaccgctgttttgataaatggtagttctggtgtttttgagcttaattcatacacaggaactgcattaaccttatcgagaacaacacctttgccctcatcaatagtggctggtagggaatatttaatcgaagttagaaaagtagggataagcactattgcgacatttagagatacggtaacaggggcgacgacaactattaatcaatcccagggtgatggcggcgtagatgccggcgcgcaacatggtaagcctggggttatgtttatttctggaagtatttccgtttctagatttgagtttgtatccggagttcagcaaaatccagcgtggattatcctcggtgatagcattgtagaaggcagcaataactcttcagattggtctaagatgtggggttacttacttgaaagtgctagaggaaaaggagacacactaattgctgcacgtggcggagatgaaacgcctaacttactgccacggcttgacatggatttaaatcagttttctccaaagtatgtaatttatgaaattggaactaatgatgctaatcaggccgaatggcgagttaatactcagtcagtgataaatgcaatagtagcaagaggagccacaccaatcctatgcacacaagtgccaagaccagctaagcaggcacaaatcaccgctcaaaattctgatattagatctcgattttttggtgattatgactacatagatctagcattagctgtatcactcaacaatgcaggagttgagtatgatccagtatattatcaacaagataaggttcatttaacagtcgaaggagaggcaaagttattttcacaggttttggctgacgcaccttatttattggattga

SEQ ID NO: 432530 - DNA, 963 bp, Serratia marcescens
atgaatagtgaagcttttgtacagctggcattagcagccttacattgtaatcaaagggagttggctactcgcctcgaagtgtcgccaggtcaggtaagtaaatggaagaaaggtgaatatatgtcacctgatatggaaaataaattcagaaaaatcactgggataggtgaaaataatccttggttggttctttgggctggttctctggataacgcagaaaagtgggcgaaactgactggctatcttgcaggcatggcccaaatgagtgctgaaacaggctatatcacatacccactagaagatgatatgggactcttatgcagtgagactttacaggtgctgcatgatatggggatagttttacctaaagagttccctaaagtgctagacgttgactacaacgatacgggtgacgatgaatatactgaggaactatgggaattaatagacgcgaatccttattcttctcttatccgaaaaatttacaattcacttaatgacgtttatggattctatgctgcttatgtacaggatattgtaaatgatgatgagttagagctatttgatacaccagctgtgaatatagaaccgtgcttaatgtttcttgccgctactaagatagatatagacccagagttcgcaccgaattttgggaagtttagacaccgtattgaacaagattacgaggagtggctcactcttgtgaaagagaaagcattccgaaatggaattcctctaaaagctgaacttttaggcatggtatatgattctagtgatcaattgggacatgaggctgaagctgagagtcttggcgttaactcatcacgtatccatcccgatatatatatgaatgagcttttagtcgggatgagaataattcaccaggttttacctgctataatggaaaaattagggatagatgaagagtttacacttaacgcatcagatctgcggataaggtaa

SEQ ID NO: 432531 - DNA, 1047 bp, Serratia marcescens
atgaaatcagtgaaactcagcgcgttaaccctcttgttgatcggcttcagcgcctcggcgctggcgctgcccaacatcaccctgctggcgaccggcggcactatcgccggcggcggcgattcggcgacgaaatccaactataccgcgggcaagctgggcgtcgaggcgctggtcgatgcggtgccggagctgaagaacgtcgccaacgtgcagggggagcaggtggtgaacatcggctcgcaggacatgaacgatcaggtctggctgacgctggcgaagaaaattgacgccgactgcggcaagaccgacggcttcgtcatcacccacggcaccgatacgctggaggagacggcctatttcctcgatttgacggtgaaatgcgacaagccggtggtgctggtaggggcgatgcggccggcgacggcgatgagcgccgacggcccgttcaatctgtacaacgcggtggtgacggcggcggatccgcaatcggccaaccgcggggtgctggtggcgatgaacgacaccgtgctggacgcgcgcgacgtcaccaagatcaacaccaccgccgtgcagaccttccagtcgccgaactacggcccgctggggtatatccacaacggcaagatcgattaccagcgctcgccgcagcgtaagcatacccgggatacgccgttcgacgtcagcaagctgaacgaattgccgaaggtcggcatcatctacaactatgccaacgcctccgatgcgccggccaaggcgctgatcgccgaaggctaccagggcatcgtcagcgccggggtcggcaacggcaacctgtataaaaccgtgttcgacaccctggcgacggcggcgcacaatggtgtggcggtggtgcgctcatcgcgcgtgccgaccggcgccaccaccgaagatgcggaagtggacgacgccaagtacggctttgtggccgccggcacgctgaatccgcaaaaagcgcgcatactgctgcagctggcgctgacgcaaaccaaagacgcgaagcagatccagcagatgttcaatcagtactga

SEQ ID NO: 432532 - DNA, 2547 bp, Serratia marcescens
atgagtggtggtgatggtaaaaacagccgcggtcctagcggtggtgtaaatggtgggccaaccggcatcggtggcaatggcagcaaagggggcggggttgatgcttccgatcactccggctggagttcggagaataatccatggggaggcaaggataaggacactggcgggcatactggcggtggcaacaatggaggggacagggatcccgccaacagtggcggcaatgttaacctgagtctgtttccggaagcacaagcgtccgtcgcggtgggggcacaatttaatctttcgctgttcgatggcgcatggggattcagcctactgaaatccaaaacggtgcaatcgtttattacgaaatcgatagccaaagtgaaaacgctcgatattcccacggtaggcacattgtggcgaactagtctgtggggattggtcgtggaagccattacgccaaccaagattgctcctgatgatatgtctatggtgcgacatattgtgacgacactccctgcggatttggtcactcagacgccgccgggccaacttcccactcaaccggcaaccctggtcagcgctcgtattgctgacctcgttgatgaggggcagcaaaaagtagccgttgttcgttcaccgtcgttaccgatgagcgttccggttgtggaggccaagcccaccaagcgaccggacgtctatacggtaggaattgtaccgggcatgcctgatattcatattcgcgtcaatgcgccggcgccgccaaccacggcgaaacctgtggacggtgttaccgagataaataatgctgaagccaaaccgttgcctgcgacgcaaccgggtggcaacacgcacgatggtatcgtggtgttccctccaggcagtaatctgccgccggcttatgttgccgtggtggagatcattccgcaaaatgaagtcaatgcccgcgagaccgaacgcaaagcgcttctgagttatcaggaaatccgccaggagcgtgaagcaatgcaaaaggcgcgcgaggaaaaatccaagaaatttggttggctgttgccagaagatctggcaatcatacagcagcaaattgcggaaacgcaggcgcaaattgttctcgggcaagctaccgcgcaacgccagtcggttcaggaatcgaatgccagagcccgtaaccaaccggctcaggctgaccagtatcgccgcgagctgacccggaccaatgcgtctacggaagcactgaataatcagctggcctcgcaacgacaggcggaaaccgacaaacgtgcagaaattgccgaattcgagcgcagagcacgagaaaatatgagcaaaattcgtgctcggcagccgactgatccggatattgcttcgttgtcaccgcaagcgcaagcggcgttctggcgcaaccaggcaaagaaagagtttgttcttacggttggcgatagcgatttgcccaaatatcctccggttatgggcagcaaacccagtccgctgtttctggatcaaccggcctacttctggcgagaaagcggatttgctatcagcaactataattcggtggcggcgacggagacactggaagccggtatccgtggcgcgtttgcccgggcctcggcgacgttgacgaagatacctgcggaaaaactgtatgccaacgggcaagtcaccacggccgagtttgctcagctctcttttgtcttttccgagagtctggatgtgcctgcattgagcgtcatgtcatccctgggtgtcggtcggttcggattgacgcgagacgatgtgaggaatgcactcggcaactataattcggtgcggttaccctatcggctggtttctcgtgagacgggggatgtcggggaagagaaaatccacatcaacatcgtttgccctgatgagcggaacgtaaaaggtgcggtgccactaaggccactatcatgggatgcggtgaaaagggagttacgctttaccactgatgacggtgctatctctctgacctggacaccggcgaatgacaagggcgtatccggttatattattaccgtcacgccggttggtgcgcctgcaggcaagctttcgacgggaggcagtgtcgatgtgtcagggaaaggaacgctgactgcattgcccaatggtgatgttcagcagatccatgactatattttggttccaccggttgaaagtggtcttgatccgatttatgtcatgttcaacaaaccacggaaaaaaccagctcgagaagacaagccagagcttattaaacctcgagaaggaactccggagcgcgggcacaaatatcatcctgccccaaaaactgatgaaattaaggggttgggagagcttaaagcaggtagaccaaaaactcccaagcagtcaggagggggccgccgggctcggtggtatggcgacaaggggcgtaaaatttatgagtgggactcacagcatggtgagttggaaggatatcgtgccagcgacggtgaacatctgggggcttttgatcccaaaacgggtaagcagttgaaaagtccagatccaaaacgaaatatcaaaaagtatttatag

SEQ ID NO: 432533 - DNA, 255 bp, Serratia marcescens
atgggattaaaattacgtcttacatggtttgacaaaaataatgatgattttaagggcgaagagtattcaaaagattttggggacgatgactctctcatcgatgctttaggcctccccttggacgatacaatgaataatggtgagtttgatgtaaaggagagctgggtagctttgattcaaccctatttcacaagtaagatatcgaccgagaaatttgactacttcctttcattcaattatagagataaatggtaa

SEQ ID NO: 432534 - DNA, 2127 bp, Serratia marcescens
atgaatccgctgttatccactccgcgccgtcgcatcgtggccgcgctctggctttctttaggcatcgccggcgccgcgctggcgcaaccgcagccgccgttggcggagcgcgtgccgaaagcgctgaccgcccacggcgagacgcgcaccgacgattactactggctgcgcgacgacagccgaaaagagcagaaggtgctggactacctgaaggcggagaaccgctacaccgagcagatgatggcgccgtaccagaagctgcgcgccacgctgtatcaggagatgctgggccgcatgaaccctgacgatcgttcggtgccgtatcagctcaacggctatcgctatcaggaaagctacgccgccggtaaagatttcgcgcggtatcagcgccaggcgctgaccgccgacgcgccgtggcaaaccttgctggacgccaatcagcgcgcggccggccacgcctactatcgcctgggggcgatggacgtcagccaggacaaccgccggctggcggtggccgaagatctgcagggccgccgccaataccgcatctccctgcgcgagataggcagcgaacgctggtcgccggaaacgctggaaaacacctccggcaacatggtgtgggccaacgacaaccaaaccctgttctacgtgcgcaaccacccgcaaacgctgttgccataccaggtttatcgccatcagtacggtacgccgacggcggaagataagctggtgtaccaggaaaacgatccggcgttctacctcagcctcggccgctcgtcctcgcgcgattacctgattctgaccatcagcggcaacaccacctccgaagtgcgcctgatcgacgccaatcagccgcagcgcgagccgcagctgttcgccgcccggcagaacggccgcgagtattacctcgatcactaccgcggcgagttctatctgcgttccaaccatcaggatccgaactttggcctgtaccgcacggcggcggcgggcaagccttggcagacgctgatcgcgccgcaggcgcagcacgaggtggagaacttcagcctgttccgcgactggctggtggtgcaggagcgcgccaacgggctggtgcagctgcggcaaatcagctgggacggcaaaaccgagcgcgccatcccgttcgacgacgccagctacatggcctggctgggctataaccccgagccggacagcgatcggttgcgctacggctattcggcgatgaccacgccgacccgcacctatgagtgggatctgaacaagggcgagcgcaccctgctgaagcagcaagaggtgaaaggcgtcgatccgagcctgtatcacagcgagcgcatctgggtaacggcgcgcgacggtgtgaaggtgccggtctcgctggtgtaccgcacatcgctgttcaaaaacgggcataacccgctgctggtgtacggctacggcgcttacggcatgagcatggatccggcgttcagcgccaaccgcatcagcctgctggatcgcggcttcgtctatgcgctgatccacgtgcgcggcggcggcgagctggggcagagctggtacaaacagggcaagctgacgcacaaaccgaacagcttcaacgacttcatcgacgccacccaggcgctgatcaaagacggctacggccaaccggggcgcatctacgccatgggcggcagcgccggcggcttgctgatgggagcggtgatcaatcaggcgccgcagctgtacaacgcggtagtggcgcaggtgccattcgtcgacgtggtgaccaccatgctggacgacagcattccactcaccaccggcgaatacgaggagtggggcaacccgcaccagccggccgcctatgcgctgatgaagtcctacagtccgtacgacaacgtgcgcaagcagcgttacccgaacctgctggttaccagcggcttgtacgactcgcaggtgcagtattgggaaccggccaaatgggtggcgaagctgcggcgcttcaagcagggcgattcgctgctgctgctctccaccgacatgaccgccggccacggcggcaaatcgggccgcctggcgcggctggaaaacggcgcgctggagtacgcctttattttggcggcggatcgacaggcgcagaaataa

SEQ ID NO: 432535 - DNA, 438 bp, Serratia marcescens
atgcaaggcgctattgtcgataccgcttgcgccatcgccacggaaagccgggaacaaattatcgacatgaaaaatacggcgttggtggacattacacgcggcgtgcatggcaaaagcgttccattcagcattgagctggttaactgcacgcttgaacgcgccgataaaaaacagccggactggaaacagtttcaaattacctttgacggccatgctgatggcgaggcattcggtatccacggcgatatctctggcgtggcgttaagaattaccgatgccaatgggaatattgcccggccgggcaggccattacctccaatggagattattcccggaaattaccagctgaattttaccctgatgctaattgagaataatcagccgcttaaagcagggagttatttttcttcggtgcgtttcaaaatggattattactga

SEQ ID NO: 432536 - DNA, 756 bp, Serratia marcescens
atgattttcatcataaatgacatcgtcctttacaacgaggaggacggcacactggtgcatatcgataacgccagtaataaaatagctttacttaaacccagcgccagattgttatcgttatttattcgcaataataacaagctgttgctgcgcgagagattgctcaatgaggtttgggtcgaacatggcctgaaggcctcgaataacaatcttaataattatgtctctggcttgcgtaagtctttggcgcaatgcggcatagaagaaatcatcgtgacttatccccgccagggatttaaattcaacgctattaacattcacgagacaaatataaataaagaagatcataatgaagaccgcaataaaacagtagaggaaagcactattccgccaccgagaaataagctccagggcataagacgatcgttgcaaagattaattatgatcatggcggcctgtctggtgcctttcgccgccgtcgtactgtatcaaaatagcacgcgtattaatgtttatccgctggggagttacgagaattgccaaatctacagcatgacgttaggcagtggtgatttaagtaaaatcaaacaggtgatgcaaagtgccggtttcagttgccaaatgcgcgccgacgtttattactacgataatatccgtaatgagggggcggaaaacaatgaacaatgggtgacgtactgtccccgagcgggtaacagcccttgcatcaacaattatatcgataacaagcagccttga

SEQ ID NO: 432537 - DNA, 495 bp, Serratia marcescens
atgaaaaccagaaattgtagtcgaatttggcggtatcgtttcgcgttgttaagcatggcatctgcactgagttgcggcattgccggatacatgctgtttgttaaaccgcagataccggaatgccgtgcggtggtacaactcacgaacgaaatgcccaacgaagtatggaaacgcttgttattggtcagtatcgtgcctgacggcccgcgacgcgctaccgtgttgctcaatggcagcttctatcaaggagatacgcgttacgatatcagccgggcggtggtgttttcgtaccagcgtcagggaagcaactatgcgctaaaggttgatgaaaatatccgaaagccgtcggataccgtgacgaaagacgagatgaaccggcggttgcccgtgttgggggttttatatcatttgcgcatcgagcaggtcgatcggcaccactatctggtgagcaacaaccactctccgtggtttgtctgcgccacgaaaggggaataa

SEQ ID NO: 432538 - DNA, 789 bp, Serratia marcescens
atgagatacataattaataataatattaaatatcatgaagatagatcggagctgatctcgctgcatgacgacattccgccgattgcgctgacggccacgctgaatcgcctgctttccgccctggtgcgcaacaataatctggtgctttcccgcgaaacgttgctgacgcaggtgtgggaggcgcacggtcaggtggcctccggcaacaacctcaacaacaccatttcgattctgcgcaaagcgttctcttcgctcggcgaggaagatattatcgtcaccctgccgcggcagggatttatgtttaccgccaccgagctgaaaacgacggacagcctggcagagatgctgatggtgcagaacgcggcacccgtcggcaaggccgtgccttttgcagagcctgcggtccgattgatgcgctttaaacacattatgctgggcgggttgctgctgctggctgtgggaatgagcttgtgggcctggcaagatgccgattacgagccgctcagcgcgatgaaggtgggtaacatcggtagctgcgagatcaaattcgtcacctcataccataagcccgggccgggtgaggttgatttaagccacctgaaaagcctgctggagcagaaaaacatcccatgtgatgtaccggcgaccgtattgtattacgacagtaaattcattttgccaaatgccaccggccggatcagatcgtcttacttctattattgcccccaagtgaagatggcgatcggcgacgcgcaatgtgagaatttccatgaaaaccagaaattgtag

SEQ ID NO: 432539 - DNA, 1629 bp, Serratia marcescens
atgaagctcacagaggaacaaaaggatgctataaattatgacgggaacatggttttaaccgcgtgtcctggtagtgggaaaacaacagtaatagtcaataaggttgctaaaatattaagtgagtgtaaatcatatcaaggtgttatcgctatatcatatacaaataaatctagcgatgaattaaagaaaagatgtgctaaagttgtggcagatacgaaatctagtttttttggtacgattgataaattttacatgtcagagttaataattaaattcatgcctcatttgtggggagggattcctaacaactttataactattaaatataatgggttaagtactgaaaaaaaggaagagatagcacatcttttttcaaacgaacttgtatcttataatatagatgaagataagttctcttctctaagagatctgtacatttcaggtgtcgttgttatggagttgatacctttaatgtctttgtatgttttaaaaaaatcaaaatcatgtttgcgatatttaacctcaagatataaatcaatttttattgatgagtatcaagattcaggtcatttgcagcatcttattttcctatttctttctaagtctgggattgtatcgacagctgtaggtgatatagatcagtcaatttatgggtattcaggtcgcagtgaaaaatatctgctcgatctaagggataatcatattgaatttaaaccttttacaattaatattaatcataggtgtcatccttcaattgttaactatgcaaatagattaaaaaacccaaactgtgagttattaaaggctgaaaagatacatgtgtttagaaaatgcattaaaggctcgcaaaaagaaattgcggattggattgatgcacaaatacccttaattgtatctcgaggttatgcgaaaagaccaaaagatatcgcaatcttaactcgtgctaacaaaagtgctgaaattatatcttcttcgttaacttttcctaaccgtgttttccttgacgataaattatctaagttggatggtcgtgagtcacagcttttaaagaagctaattttgttaaaattcaccccgaaaaatacagcgcaatctttaattgatgagtttggtggcaagacaataaaaaaatcaaatcttgttgaattaagaaaaatgatttgtgcagtgaaatcagttgaatatgatgggtgtatagcattgtttaatgcaatactttataggtttggattgaaaaatctaagcgctaatcatatagatgcaattcaagaggtttttttaaatataggggttcaaaacaactataggccgactaatgatgatgaggttcaagttttgactttgcataaatccaaaggtttggagtttgattttgtatttcatgtagatctgtatgactggattttaccgcaaagagagtatattgagggctcatttgatgaggtgtttacaaatattcaacaatgtctgaatctacattatgtaggggttactagagctaaaaactttacagttcttatgacctcaactcagcgctttaacacccagggtcaattgaaaaaaggaaaaccatcccagttctttctactggatggccttgaagggctttatacgatgattgataactga

SEQ ID NO: 432540 - DNA, 2241 bp, Serratia marcescens
atgttaattcagaaaaaaatatctgactttttagtgtttgaaaccgaatcaatcattaaagccttagaaaaaatcaactcgaataaaaaacgcattattttcgttgtcaccgaagacggcaagctgtgcggttctttctcagacggtgatttccgtcgttggatcactaacggcgacttcgatctgagccgcgaaatgtcggaagtgatgaatcagaacgtccgctataaaaaagtggatgcgccacgtaatgagattgaatcgctgttttcgaatggcgttgacgttctgccgctggttgatgattatcgtcgtttggttgccgttgcgctgcaaagcgaaaaaggcctgacgattggcaaacacactatcacggaaacctcgccgacttacattattgctgaaattggcaacaaccataatggcgatattaagctggctaagcatctggttgacctggcggttgacgcgggcgccgattgcgtcaagttccaaatgcgcgatctgagctctttgtataagggcggcaacgataaagacaaatccgccgatcttggcgcacagtacacgctggatctgctgagaaaattccagctcagcaatgaagaactgattgaagtgttcgattattgcaaggagaaggggctgacaccgctgtgtactccttgggatctgaagagcctggaagtgttggaaaactacggcatggaaggttataaggtcgcttccgctgacttcactaaccacgaaatgttggccgcgttggccgctacgggcaaaccgctgatttgttctaccggtatgtgcagcgaagcagaaatcaaaagctcggtagatttcttgaaatcgaaaggtgccgagtttgtgatcctgcattgcaactctacgtatccgacgccgttcaaagacgtcaacctggcctatatcaaacgtctgcagcaggtgacgggctgcttggtcggctattctggccatgagcgtggcatttcagtgccgatcgccgtgaccgcgctgggcgcaagagtaatcgaaaaacacttcaccatcgacaaatccatggaaggcaacgaccacaaggtgtcgttgttaccccctgagttcaaagagatggtcgtacgtatccgcgaagttgaagagtccatgggcaacgccggcgaacgtactatcacccaaggggaaatgatcaaccgcgaaactctggcaaaaagtttgattatcaatcgcgatctgaaaaaaggtgaaatcatcactcgcgagatggttgaagtgaagagtccggggcagggtctgcagcctctttatctggagcaattggtcggtaagaaagccaatcgtgaccacgaaaaaggcgggtatttctatgagtcggatctaaatgatgtggcgatagaagccaaagactatgatttcaatcgtccgttcggcattccagtgcgctaccacgattacggcaagttgaagaataaatccaatctggacttcgtcgagttccatctgagctatcaggatatggaactcgatttgacagaattcttctccggcgctgaaaatatcggttttgcggtacatagccccgagctgttcgccaacgatcatattttggatctggcgacggatgatcccgtttatcttgctcattcgatcaaacagctgcagcgtgtctgcgatgtgactcgcgcgttgaagcaatatttcccgaaaactgagcgtccggtcatcgtggtgaatgcaggcggtttcaataccaccggtttcttgccaaaggaatcacgccaggcgatgtacgaacgcattggcgccgctctgggtgaaatcaatcaagaaggcgttgaaatcatcatccagacgatgcctccgttcccatggcactttggtggtcaaagctaccataacctgtttgtcgatccggacgagattaaagcgttctgtgagaaatacggctaccgcatctgctatgacacgtcgcattccatgatggcttgtaattactaccaatgggatcttcatgagtttacccagaaggtcggcccttacaccgcacatatgcatattgttgatgctttgggagtggatggtgaaggggtacagatcggtaaaggcgatgttaactttgacgagttggctgatgatctgcggcgtcatgcgccgggagcgcagtttattcctgaagtgtggcaggggcacaaaaaccaaggggaagggttctggcatgcgcttaacttcctggaaaagtatctgtaa

SEQ ID NO: 432541 - DNA, 993 bp, Serratia marcescens
atgcaattgttgaataaacagcaagagctctcgatcactaaagccagtaccgttggtaacgtccgcattattgactctgctgaggctgcccctaaaccggtaaaaccgagaaaagtgctaatcataattattgctactttatttggcggtgtgctttcagttgttgtagtagtcttgaaaaatatgcttcacagagggatagaaagtcctgaggaacttgaacagcaaggcattaatgtgtatgcgagtattcctctctctgaatggcaacagaagaaagatagctctatccttaataaaggacaaagaaagaatcaagctaatgttgactcgttgcttgctgtaggcaacccagcagaccttgctattgaggctgtacgtagtctacgtaccagcctgcattttgcgatgattgaagctaaaaataatgtgctgatgatatgtggcgctagcccgaatatcggtaagacgtttgtaagtttaaacttagccgctgttgtttcacaggctgggcaaaaagtcctccttatagatgctgatatgcgtaaagggtatgcgcatagcctgttaggttgtgagttaggtatggggctatcagatttcttatccggtcaaacgtctgtcgagagcgtaattaaaaagacagagttgtctagtctagactttatttctcggggtaaagtcccaccgaacccatctgagctattgatgcataaacggttaaccgatctcttaacatgggcaagcgaacactatgacatagtgcttgttgatacgccgcctatccttgcggttacggatgcagctattgttgggcgaaacataggcacaacattacttgttgcgcgtcatggtataaattcattgaaagaaattgaagtgagtattcgtcgtttcgaacagaatggtaccgagattaaaggtgttattcttaatgccgttgaaaataaatccggtgacgcttacggctactacgcttacgagtataagtaa

SEQ ID NO: 432542 - DNA, 984 bp, Serratia marcescens
atgtataaagttaatgctccgtgcgtgttattgagtgtgctgctctttttattgatgggtgaagcacgtgcctttacttgcatcacctctgatggtggggttattggagcgggtggcagtgaagaacctcttccggtaagaattagagtttccccgaatttggtggatgggaaaaacagcattgttaatgttagtcagatttattgtaagaacgatttgcctggaaattatatatggactgactatctctactttaaagcagtgtctgttaggaaagctgatttatatccgctcacgcttggtataacaattaatggaaaagatttcgatatacctgggaatatgctttccctaaaaaatcttgaatatttgtttcaggtggtgagtggagggaagaggaatgtgccaataaacatgtatattaaaatgaataagcggccttcacgagatgttgtgataaaaaaaggggatgtaatagcaaagattgatatgtggcaagtaaataatcaggtaggctgcccagaatgtggtccttataattggttgttgatcgctgataacgacgcttatttcgcgacgaccacctgtactatcaatggtgccaaacagatgaacatcgattttgggccgatcagtcaggacaatttcactactggcgtggagagcgcggtgattaagcagaatcataaccttgattattattgtgaggattctaacgccagtcaagatatcgcggttcgtttagtcggaaacgccagcgggtttagttctgaggtgattaaaacctcgaatgaaaacattggtattgccatggtgtacaaaggaaagattgttaaacctaatgaaatttttaattctaaagttgtgaacggtatcggcagtgatacgttgaccttcgtgccgataaaaaagaacgttccttttaatgagataaatacggggccgtttaccggttctgcaacgttagtgttcagcgtgccttga

SEQ ID NO: 432543 - DNA, 663 bp, Serratia marcescens
atggaacaacttgagcctgagttgaagaaagtgccctgtcaactatcactgctgcgcaattttgttccttgggatcatgtatctcatgaggcagatagtattccaacgttaccgcgttggtcgagaaggcctatcctatttttgggacgtatggataagttaaaaaacccacttgaactattagatgcatttgtttcactgaaagcgcgccatcctgaaaaatatatgcttcttctgtgcggcccacaatcctctgagatcgacatcaataccgagttagcaagccgaggcctgattggcgatgccgttgtcttgccgccagtgccatttttaaaagttgataagcttctcatcgcagtctccaaagcaaatggcatatttatttcgccatcaacaggggagtcctttgggctatcagcttcagaagccatttgttccgatatacctgtcgttttatccgatatcgaagcacaccggtatttagtggctccccgtgagaaagagttcacctatcctctgcatggtgcacgtcaattgtcagaaaaaatagagtttatttctgaaaactatgcaaattccaaagtatcactgtccgaacttaaagataagttttcagctcatgcctttatgagcgattgggatgaattgctacgtagacactaa

SEQ ID NO: 432544 - DNA, 345 bp, Serratia marcescens
atgaacatcacctttacccctgagccgatcccggagctgacgctcacagacggcgccctggccgcactcggttttacatccggcataccgttgcagcttacgctgcggcctggtggtctgtggatcaccactgtgaccgatgaggccacctgggaagccgtctgtgaagccagccagcaccgccacggcatgggggctgaatgggtgcgggagaacggcaaggtgattattggcggcgactggctcaccgagtccggcattgccagcgctgaacagcttgaggtgaccgctgcgcacggtgttatccggttacagcggcgggaagtgggaggatttagggcttag

SEQ ID NO: 432545 - DNA, 408 bp, Serratia marcescens
  misc_feature (393)..(402): n is a, c, g, or t
atgaaaaataaactcgataaggaaatgggggattttcaaagtagtacgatcatccctccgagtgccgagcagtctgtgatggcaaaattaagtgaactagagcagcaaaatcaatcgttgcaacaagacgttaaatctctggttcaactattgacctctatggcggaacagcaaaaccagcatatgcaaactcaagcacaagccttgggggcaacctcactgcaaaagctcagatattggttccagctcaccagccagtctgtcaccagaccagacaaacgttatgaattagctaaaaccctttactggaagcttcccgagcctctaagagtgaagctacactcacaacgtcatcgctacgtgcaaaaatatttccagtatcgctgcaatgcnnnnnnnnnngtataa

SEQ ID NO: 432546 - DNA, 978 bp, Serratia marcescens
atgactataagtgctgctgttttttttaaggaaactcagggtgtaacggatgaaatgggggatttcttttctttcacttgggcaagttacgcaggcttgagagaattatggtggcaaacgcgagggttcaaaagttgttacccggatatatctgataaggaattatatgagaaatttttctcaggtctacaattacctggtcgtgttgacttaaaaacgttatgtataagtatggactgggaagaacacgaatataggttcagctcaaatctaatttttaatgcttgcacattattcgaaacttggatagaacgagtttgctcctatacagtaccatcaagtcaggattggtttccaaaagctttgcaatgtcccgtcttaccaagcacaactaatcagaaaacatacattgattgtgtaaactatattaaatctaacaaatccatttacttaaatgatgaaatattacctactttaacaaaacataaagcaaatgcgtggccgcgcctaaattctttgttaataatttatacatacttcaagagcataaggaataacttggtgcattcaggaggggtcgttacaaatactattgtaaataagcaaaatgcactcatttcagagttgtcaactaatggaaatcctgtaaaaggtgtttttgagatgcctgcgcaaattttaggtgaaaaaataaaattaccaatcaaagactctataaacatctacagcgttttaaagtgtttgatttttacttatgatgcagcactcagcacaacaaattatagtgaagacacgtttaaaaaaagactgcggagtacggtggaaaatagcaagcattcgttatatagagtgcctgtagatataagaaaaagaaaaagagtgctaaggtctatacttttaaaatcaaacctcccaaccgatattgattttgataaattttactcttttcttctttccaatggaattatttcccaatga

SEQ ID NO: 432547 - DNA, 990 bp, Serratia marcescens
atgagcatattaatgtttctgacacatcattcccgtgatgaatcaatactagacaaggtcgttttgcaagctcaaagtcttttctctgagtctacgccatatcggcttgatgtagatactgaattcgttaacaaaattattaataaattgccaatgtctcctgtaacgtttgagcgccagaatctgctggaattaaggaaacagattgagacacaaaaagataatattgaagatggacatgagcacgattatgattcaattttgaatcgtgaagacaatgaagatgagcgtgatgaatcacaccatcctgttaaggttggacagggtcaaaaagagatcgatgaagcaaacaactatctcaaagatatgaatcttacctttaaatcccttgaaattcttggacaactgtcacgaaactactatggatctctgacggtaattcagaagaaaaaactacttgaagaagccatcaaagcacctttgcgatcacttgattactttttctcactgatagaacaaaataccgaaagctcattcgatatgatagaaatgaaaatattggaaaaattacaggctaaagttgaaagcaataccgagaatgaaatgcgggaaatagctcgtaaactcatgtttgaaatgatatttggtttatgcttcttctttattacgaaaatatcagcatctattggtagtacgaacctccagcaggttattgatgacgtctgtaatgatatgggttcaaatgctgggaaacttataaaactcgccacgatgttagagttggggaattccgtttcaattgaacagttaagacgttcgcttagcgaattcgagaaaaatcacttatctgacagactcacaaaatcaattatacttaattatttatatatgtttgaaaggtcagacaaggatgcccagcaaatatgctccctggctggcatcaatttcgggagtgtatcaaagcaaattggattagaacgattaaagtaa

SEQ ID NO: 432548 - DNA, 1977 bp, Serratia marcescens
  misc_feature (1956)..(1965): n is a, c, g, or t
atgtcaaaaaacctatttattatcctgagtgatatacatatcaaaacatcaaataaaaaagatgttcttcataagcttgaagttttcatcaaaacattaaatgcaatctgcaaactaggtgaccaacacaaaattataatactggtttcaggtgacattgcatttagtggaaagacagaagagtatgattatcttgagagtgtttttgaggaacttgcaactaactatgatttgataatgtgtccgggaaaccatgaccatgacttttctagttatacgtcaagcacgacacgcaatcatatgttaagaatggatgtcgaacttcaagacgaagaatcgattaatattataaaaaaaggaatgggtagtttctttgatttcaaagaaaaatttcagacatttaaaccgaaaaatgtcacccctctttcagagagttatgatattttagcacagccaacaaatattaccgtagcaacatttaattcagcatggtgttcaatgttgcatgaacgtggtggagatatcaagttccctattaagtatcttccacgggtagagaaagggaaaaataatatacttttctttcaccaccccctttcttggtttgaacctgataaccagaaagccatcagaaatttgattcgggatgactatgcaatcatcgtgacaggtcatgaacatcttaatgataactttaaaatcgttggcgagagcaattcatgccttatgattgaagctatgccatttgacgacccgcatattcaagataatggttttctgacatttgaaatagatgactctgccgtaacgattaatagttatctatggcgtgaaggacagtttgaattgagtaatagttataacaaaaatgaaatactcaaatcattttccatatccaataaaaatgccactgtgagttatgattattacaccaatcttttagacataggggttcattatatacaccctgataaagacacaattgaccttaatgatgtatttgtatatccgaatcttaaatccctcagcgaggataataaattcgatatgaagaaggtatcatcaaatgtcattctaaaaaatgaaaacaaaaaaatgttacttattggcgatgaatactgtggtaaatccactatgcttagaaaattatttatagatgccattggtaataatcagacaccgcttttgattgaaggaagttctatcaggaatggaaatatagaatacgataaaatcatctcacgaagtgtaacaaaacaatatgacaacctaaacggcgttgactttattaatcttgaaagtgaaaagattttgctccttgatggatttgaatatattaagggtgacagaaaatccatctcatccttcttggaaaaatcctctaacatctttgataaaattataataacagtcagtgacacctatgactttagtggaagcgaactactgggtgacagttactttgataatgaattttataaatatgagatattaaagcttgggcacagattgcgttatgaactcgttaacaaatggaatcagctaaaagaagagtgtaatcaggataacggagctcttatattcaaaaataatcatgcagttaaaacaataacaaaagtaattggcaggaattatgttccatcaactccgttttttttactgacacttctgcagtctatggaaagtggaaatgcactcgaagtcagcgcgaatacctatggctattattacgagtatcttataacgcaaagtctgggtaatgcctcggtcaaaaaagatgaactcgatgagttatttaattacgtaaaaattctcgccaaccatttctttaaaaacaatcttaaagatgactcaagagacgcactgtgggattttaatcgcaatttctgtgatgtttacggtgttaaaatcgattttgaaagtcgctttaaattacttattaacgccaagatactnnnnnnnnnncaagatacttga

SEQ ID NO: 432549 - DNA, 282 bp, Serratia marcescens
atgctgcgtattcctgtcggtaaggattgggttatcaccagtgatgtccatcagttcattttgaacaaaaagaagctagttaaaaccggtggtaaggcgggcgaggagtggctcgacgccgtcggttattacccgacggtcacgcagttggtttccgggttggtgcatcaccacgtccgtgactcaaccgttaccagtatcgcaggtttggccgcagagattggccgcattggcgggttgtgccaagacgcgttttccgcgataaataaagaggataaatga

SEQ ID NO: 432550 - DNA, 2157 bp, Serratia marcescens
atggagttgttgcaaacgttagggtcggtagtgaaaatcgtaattatgcctaccgatggggagcagagtttttttcagggttttgataacggagttgttaaaaacccagaggtggcggagcttatttttttactcagcaagacacctaaggatataaaagaaatatttattcgcccagaggggggcgatgaggatgaagatgaagagttgcttgtggggcaaaatacaataattctcgtttccagggagtatatagaacaagtcaatttgttttttcatgctcctttttgtttgattttttgtgttcctcaagattttaattttgttaaatcattgtcaaagaaattcaccatcccacctataatatgtagtggtataaagggcgctgatattctcccgtccgcagtgaatagtatttgctcatttgataaccttctttactcaaaactaaaagtgttagaaaatagactaaaaaagaatggtggtggaaaaaaagtcacccctacgcttaaaagaaggggcgctatattcaaagggagtccttggagtggaacgctaaacaatactaccaagcctaatgagttacttatcgagtctatgggttatatgctttcgcgcgagaaagaactaaaaaaaggtagtagtaggagagaattcataaattgcattataaatagtgttgttgcgtatgaggactgtttaagggagttgggtacggccccgtcatctgaagtgatagtttatgcaccaggtatgttttcgttctttcataataaagagagttcattatttcaatttattgaaaaggatttgagtagtgatgagaaaaagttcttaattaatggtgtgttaagaaatccagattattcagggtatatattaaaacctgaaagtgagaataatagcataaaaaacatcttgaataatcccaaggttaattttcttattcggatgaggcgtgcggagttacgtcttaccacagcagccatttcattattcagtattaataaaaactcgcctgcaataagattgccaaatgcaattaatcactttggtcattaccttaaaaagcttgagcaactagcttgcttacatggaatagatgaccctagatttataaaaaaaggtaaagcgttcaacactctaataaaaagagttattggcgggaaattgagagatttcattaatgatggttataatgatattacttttgtttgcgatatccctttggattggattagatttggcaaaataccaatcatgttaagtcatgatatatcaagaatcaatgtaactccgggcaattttttattgcagaatgcatctacatttttaaaagttgttattaaaagttccgaaatgaggaagtttttgataatacgctcatttgaaccagatgatcacttaaagtttcatttggagatggcgatagaaactttcaaggaaaacatgccagatcttgactgtttaattgttgatgtcaggacaaaagacgagtttattgatgccttgaatcaatatgatggttatatacttataatagattgtcatgggagtcatggaggggacaaagaaaatgggtggttagtcattggtggggaaaaggtggacacatggcaattaaagaaagtagcacgtgtgccaccaattgtaatccttagtgcttgtttaacatcagccgttagtggttcccatgcttcggtagcaaatggtcttttagttagtggcgcgctaagtgtaattggaacattgttacctgtaaatgcaattgattcggcggtttttgtaagtaggttaatttatcgtttttaccaattcccattagcaatacctcataagtacactcatattaatatgaggcttttcctttcgttgttccttagaatgtcatatgtcagcgatatatttcgagggttcgaaaaaacaggaaggttagcagtggattcttggtatcaaaaaaatatagaaataaatacgtcgataaatatgcttaatcccaattggtttgaatatctcgtagagagcatttcagaaatgacatcgctttccaactcggagatctataatattatagagactgattttttcataactgagactatgtgttatagtcagattggttttccggactcaatagaaataagtcttagggaatga

SEQ ID NO: 432551 - DNA, 1809 bp, Serratia marcescens
atgcacgctattcttaaacagtatgttaaagatctttctactcaatttgaaattgaagctgaagagtcgaagttatttgaatatttttgtaattatgtcatagcatcaaaaaaatatttgggaagattcaatccggtcgatatcactacacaagaagatgacgcatcattggatggtgtgatttttatagttgatggggaactgatatataacgttgacgatgctgaggcagcatttaatacacataaaacatcattaccagttgaaataattcttacccaggcaaagtcgggggaaagttttttaaaggctgacatatcaaatttcaagttaggcatagaagactttcttagtttagatccgaaacttccaaatggcatttataacacacaagcaatagagattcttaaactaatttttaaaaacgttaggaagatccataacaaaaagcctttgctgacaataaacttttgtactagcgggacatatactatagagagagaaatcgaagcaacgttagatataatcaaacgttactgcattgggactgactacttcagcaaagtagaagtaaaaccattgggtagaaaggagttgatggacttatggatatcgatcactgagaaaaatgaagcagaactacagctaattgattacatcggcattgaatctatgcccggcattcctcaatcatatatcgcgactgttaaagccaaacacttcattgaaaaaatagcaatggatgaagacggtaaaattaaagaatctgtttttgaagaaaacatcagggcttttcttggcgaggaaaataaagtaaataaaaaaatctcagaaacaataacagactgcgaaataaaatccaagcaattcccggttttaaataatggggttacaattatatctccagaattgtccattcagccaaatacaaaagtgataaatcttaccaactaccagataataaatggctgccaaacgactaatacgctgcatcatcactacaatgaaattaatgatgatgtaagattaattgtgaaatttattgaatctcaagatgcagatgttgccagcagaatcattgaagctaccaatagccagtctgctattgagggggaggcttttttagcacttaaagaaaaagctagaatggtacaaaagttctttgacctaaagcgcaaggacgataagttagagagtctttattttgagcgtagagaaaatgaatatcgcggccatgaaattcaatcaacaagaatttacgacatcaaagaattggctaggtgttttatatccgtatttaaagccaaccctcataatgccgcgaggtatgtgaagaaagttttgactcaaaaaccctccacccaaaaaactccagaccaacaagcggcggaccaacaaacatctgatagaaacgaagatgttatatttagcccttcagacaacgagtacgcttacttcgcttctgtttatatatgctataagtataacacaatgattaatggcagaagagaaaatgcacaaagatacaataaatatcgttggcatatcgcaatgctgtacccttgggtggttcatggtcaagttatgaaagttgaactgaactcaaagaaaataaacacctactgcgataaaataatcaaaagctttgaaaatgatgcttatattgcaaatttttccagatgccatgaaattatagacgcagtagttaatggaagtaatggtgaggtgacggatgaccaactcaaaaggtctagatttacatcgatattaatagaaagaacacgaagcttacttggtcaaaccatttaa

SEQ ID NO: 432552 - DNA, 906 bp, Serratia marcescens
atgacagcagctatcaatactggcaaagcctatgcgggttttcgtgccgctctcgacttgtcggcatcaatccttgacccgcaggcgctctttaatgcctacaaagcgcgggtagtggcagacggaggcactatcccggacgagtctggttgcctggcgcggttttcatttttactgaacaatggcatgtatgaccgagcgacggtatgtgctgcgccagcattcgggctaaaggcggatggtttaggaaacgtccagaccatttacaacctgcttggtgttgacggtgatttcattgcaggttcccagggcactccaccgttgccgatgacgtatgatgctaccgcgcgcgcggttatcattcaaattacatccggtggtggctggttcttaaagagtcgcgcaaaccaggttattcaaaagggcggtgcgtatcttatcgctggccgcatgagcgatctgtaccgtgcggacaacaacggtattcagcttgggtacaatatcaataatctgccgctggcatatatgcggacaatgatcactaacaataacgccataaccgaatcgtggaggtatggtacgcgtgatagtgcctggccagcaggcactggcggcgcggtaggtgctgcaacatcaatctatgctgactatgtgccatcggcaggacttttcaaagtcgcgtctggtgtcattgaaggttatgagaaagggaaactgtcggtaacctcctccgtggcggctaccggtaagcttgcagatctaagtagtttcactgccccgttgttgatcggcggttcgcagggcgccagtggtgtcggcgcatgctatggtgctttcaaagatgtgttgttcctgcacactgccgatgagtctgatgcggtattggcttctcgcctcgggatgtga

SEQ ID NO: 432553 - DNA, 2307 bp, Serratia marcescens
atgaccacaccaaccagcaaacccattccaagtaacgatgtaattgatttaaagtttaacgcggaaaaaatagacgaggttgttaattccaattctgagaaatacctggataggtttggggttgaaagatacaccttagaaggcattaggaaaaatctatctccattaggaaaaacatacactcaagagcaggctgccgctgatattgcatctggagaaataccggatggcgcgttcttctttatctggtctgatgatgagggcgctgtagctgaaaaatatcaaaacgtgggtggtgtaattacaccaactggagtgaaaatatcaagtgagcaattcgtgcaaatggtttaccaacaggcgttggcaaacctggccgatatttcgcaacttaaaaacatcacatcgatgcttaaaaactacacctctaaagggtggcagttttcgttggaatcgaaaaacggcccatcggaaacgcttcttggtgtagacgataatggtgaattgtggctcgccggtcttgttcgtgggatacaggaatatgttgagcagttgatcccgacatcattagcgaacagatataaagggcttcaatgggcacttgttgataaatcaggaaagctcgggcttatcacaattgacgatgatggtgctatgaacattgtcgggatggacgatgcacttcaggatcgtgtttcctcgctttgttcatcaacattttcacgtcgtattgtgggatttcaatatgtggttttggcagaggatttaaagtcggcactgctcgctattgatgatgatggcggtttctatattccaggtattgaaggcccacttcaggataatctgggtgagtcccttgcaacgataaaaaccgagaacggcgtaccggcggcggcatggcgaggaaatgttgtgtggtcagagaggccagtactcaccgcccaaaaactgacatcgaccggatttattttcagttatgtgcctggaggtgaagcaactgcagggagtggggttaagtacgagccatccattcgagaaatgccgatcgatgcaaacgaggttcatggcggtggttcgggtggccagtcactgaacacgccaaaagatggcgccggcattaatattgtcaatcgcgatcctgcttttcgtggtcgagtactcgcgggggcaaatggaaggcctgaaggcggcggcatggatcctgtaagcgagtcagacctatctacgcttaacgatgcacagtatccggctgcaggatggcgccagggtaatgtgttgccgatgtattatgcgattctccatcagaatcctggcaaccaggtctttattcatgccccatttgcggcaggaggccgctcttttgctgagataagcaaagggacaatcccttatcaaaactcgctggacttcgtgcagcttgggaaaaatgcagccgatggagtagggaagcgctacacgttcaaattcatgacgtttgagcatggagaaacggataacgacaacggcagctcccagaatcctggtgactatctcgcgaaaatgacgccttatttctcgggcatgcaagttgacttcaaagcgattaccggccagaccgataattttgcagaggtagtgggtcaggtcggcagtcgcatcaacaccaaaaatcagcaggtagacgatcaaggcaacccaatcggcgagcctgtgattgtacagccgtactctgtcaccgccaccgaccagttaacttatgtgcgtcagaacgcggcaaaggccatcatgtacggccccaaatacccgtttaactggctctataacgatgcaacgctgagccatctgaatgccgcaggtaaagtgctgcaaggagaatatgccgcacaggcgatttattggcacctgtacgacccagccaaaaaaggcacctggacggggctgaaagctcgctcattatcagtgaatggtagcactatcgacatcgtgttcgatgtcccatacccgccgctggtagttgatacaacaacaattgctgactgccttgggcaaggcttctcgttgcaagatgcctctgctgaggttcagtcggtagtagttatcgcaccaaacactatccggcttaatctcaatcagtccccagcagttacagatcacttattgattggattcactaacactgttccagcaacccaggactttgtctatccactggtttgcctgcgtgatagctcaactcaaacatcacgctggatcactaagaataaccaaccctttccgctatataactgggcatgcctagatcgcctaccactgaatggagcattttaa

SEQ ID NO: 432554 - DNA, 468 bp, Serratia marcescens
gtggcaataccttatcccgactggctatcacttccccagaaggctaacaagagccgcacgattgatgctgggttccgcaccgatcagccggcagtgggtgcgcctatctttcagcgcctgacagatgacctcaaaactacctggtcgctgacgtggattttcacgctgcaagaggatcgggcattcgaacagtggtatcgcagccctcgttacctggataacggcaatcagtggttcacgatgctttgcaatctggggggctctggcctgcaactgcaggagctgcatttcgttgcgccgccggttcagacgagcatcaacggcaacacgaccacatggacggcgagcgtaatcacccggaaggtctacaacccggatgacgagttctcagacgtcattgttgagctgccgccatatcagtgggggatcattgatgaaatggtcaaccgcgacatgccggagttttaa

SEQ ID NO: 432555 - DNA, 2655 bp, Serratia marcescens
atgtcagagcaagatggtggaagcctggtctatcaggttgatattgaaacggccaaaatgatcactggcagtcgcaaggcttctattgttctcgaggaaatgcagcgccaaacagggaaagcctcgaagtctgtcgatgccttatcatcctctgcggataaggctggcaattcaatgggtggcttaaaaaccgtcctaactggggtggcgagtgcaatctcagtttctttaataatcgactatggaaaagcttttttaaccgtagctgataacatcactcagctgcaggcacggatagcacgcttaaccagcgacacatcaacggctaaaagcacctttatggggctagcgactatagcttcaaatactggcgccagcctgaaggatacagctaagctctgggaaactatgactgcgtctctaaaagagactggcgccacaaactcacagatattggcacttaccgacacattgcagaaaattggccgagttggcggcagctcttccgaagagatggcaaatgctttgaggcaatttggtcagtctattgcttccggtacggtgagggcggaagagtttaactctattgttgagcagatgccggagcttgctcgtcaaattgcggccggtcttggcatgactggtggtcagctaaggcaagcgatgctggaaggcaaattaagcgctgaagatgctatcaacgcgataatgaagcaatccgactctctgaatgaagagtttaaaaagctgcctaggacgatggatcaggcaagcaataccctgacgatttcattgcagatgctgataggcaaaatgaatgaaaccgtaggggcgagccaaacaatggtcacgatcattgactccataagttctgcgattgataggctcagcggcaagacagagacggcggctcaacgtatatcagacttaacttctactgcagagatgtatgagcgtagagcaagaacgtggtcatggctgggggtggatggttggtctgaacagaacaaggcgctggctgtattaagtcatagggctgctactttggttggtgatcttgattcagttgctcaggcgtcggcgagggctgcagctggtcaaataaagttcaataataccggatctaataataaacaagatgcgctaattaagaagtcggaaagaagtttagccctatccaagcttgaaggggaagccagagcaaggctggcagctcaatatgcggctgaggatgccgggtttaagaaagatgatccgcgcacaaagcgcatggaagatgaagcagcggcaacataccgaaacatagaggcccagaaaaaatttaagtctgaaacaaaatctagcgcgacagcagctgaaagtgtggctcagaaggtagagaatctaaggaagcagtctgaactagctgcagactcagcaagtgaatggagccgcgagcaagcgatcctcaatgcccaactatcactggggaaaggagccactcaggcccagatcgctgaggctggcgcttacgccgctaagaagtgggacactgccaacgctatcaaggcgcaagcggccgcagagaagttactcccggaagccaaagagaacgccagctacgcgcaggacgtgaaggatttaaacacggcgttggcggctaagaaaatcagccaggagcagtacaacaccacggctgagcaactggagcaacagcatcaggttaacttggcaaaaatccgggctgaagccgtggtaagtcctcagcagcaagctgccgggatggttgacccagtgcagcagcttgccaatgagaatgcgcagaagctggcgttgattcagcagtttgaaacggataaagggaagattactcagcgcggaattgagctcatgaatgctgctaacaagcagtacgagcaacagcgcactgccgcgcagtgggaaatccttagccagcagagccttggttacgacatgctgacgagcgctgttgatgcattctctggcaatgcctcaaacgcgattacgggcctgcttaccggcaccatgtcggcacaagaggcgatgaggtcgcttggcaacaccatcctgaacagcgtgataaacagcatcgtacaggtgggtgtggaggcgttgaaaaactacattctcggccagacgcttggcgcagcctccgtggcgtcatctgtgggtatggctgcaacaacggcttcagcctgggcgccggcggccgcaatggcatccctggcaactcttggcgctaacgcagctccagcggctgcagggataacctcaaccgtgggattggctggtgggctggctttggccggcgcgcgaaaaaatggcggcccagtgtcccccggaaaaatgtaccgagttggcgagggaggggttcctgaggtgcttcagtctagcaatgggcgaaactacctcttgaacggtgacaacggcggaaaggttatcagtaacaaggagctcaccgctggcggcggtgcggcgccaaccatcatcatcgaaaactactcatccggtgctggcgtaatggatacccaagctagcaaaggggctgatggtgccgatgtggtacgcatcgtgctggcggatctacagcaaggtggccaaatcagtcagggtatatcccagtatcaccaggctccccgcaaagccactgaatag

SEQ ID NO: 432556 - DNA, 138 bp, Serratia marcescens
atgatagacatgagcatgaaagaaaagggatatttcagcaaagcagtgacctataaggttggaagtaagaaaatatcaacagaagatgatgcgcgcgacatgtatggctatacggccatgtgtggtgaagacgcctag

SEQ ID NO: 432557 - DNA, 201 bp, Serratia marcescens
atgcgtaagtcactgctggttgctttgggtgtaatggttctatcaggatgcgcaggccagaacgatgattatcaattgaatagcaaacaatcgtctgctcagaaagacagcaaagagtggaaagagtttgtcgctcctctgtctaccaaaactcaatcgccacaagacagactgatgaagcgtgctgagagaaactactga

SEQ ID NO: 432558 - DNA, 630 bp, Serratia marcescens
atggctgtaaccatgttatgcagtcatcgagaaagagttattcggtggcttttatgcagttatccagaggtaaatatgaatccattcaatgtcataacactagcagctctttatggtgcgcttgcgcaacctgcggttatggcacaggaattcatcgcgcagccagctcctgtgattggtaaagctcatgcgagcgatgcaatctcacaagatggtttggaaagatttgcgcacgagctgtcgacaggtaagcaggcagtactaaagcttaccgagcaagccgatatctactattcagcgctgattaatgcaagccctgatgatgcgagagctatggttgtggctaacggagccgaaaccactgaagcttgtgagatgtttttacgagcttttgagattgaagtgaaaaaaatcgtggagcaaagtgacttgcctgcatttgtagctactgaaatgcgcagttactggagaatagtagccaaagcacgttctactgtaaccaggctcaacaaattcactaaaagtttgattgaagtgccaaaagtatttgagggaagcacgaaccttgaacacctgcgtgtcttggcttcgatgacaactgaaaagcttggctcaatgtcatttcattaa

SEQ ID NO: 432559 - DNA, 1422 bp, Serratia marcescens
atgtatttctcccgctacttcttcaagcagagaaccggcggcaagatgatcgtcgcaccacatcacaaggtaatccaggagacactggatcgtgtgatcgatggcgagattcagcgtctgattattaacgtccctcccggctatacaaaaacagaactggcgaccatcaatatgatggggagaggactggcgctaaataggcgtgccaggttcatgcatctgtcgtattcgcacaaccttgctcttcttaactcatctacagcgcgaggaataataaagtctcgtacgtatcaatccatgtggcctatggagcttcgcgatgatgctgatagcaaggcgatgtggtggaatgagtttggcggcggcgtgtatgcgtcatcagcagcaggccaggtaaccggatttcgagccgggcacatggagccaggctggcaaggcgctctggttatagatgacccagtaaaacctgacgacgcttactctgagatcgtccgcgatggtgtaaataaccgctttaacgagacaatcaaatcacgactggcgatcgagacgacgccgatgattgtcattatgcagcgcatccactaccacgatcttagcggttatcttctgcgcggaggcagtggtgagaaatggcatcatctgaacttgccggtgattatcgacaacagtcagtcatacgctgcgcagtatccagaaaacacccacgctataccgattgaccacggattgcctgatggttggctgtggccattcaaacacaacgaatcgcatcgaacttctctgttttctcatcgccgcactgcggaagctcagtacatgcagaaacctcgccgcttcaatgctgagggggcgctgtggaacgagcagatgataagcgctgctcatgaactacaaatcaagcatgacaaggttcgcacagtcgtggcgattgacccacaggcaaccaacagcgatgagagtgatgaaacagggatagttgctgcaagttcctatggcgctggagacaaaaagcaattctcggttgatggggattacagcggtaaatattccccagcaggatgggctaaaaaatcgatatgggcgtatgaacatcatcaggcagatgcgatcgtcatagagacaaaccagggtggtgatatggcggaggagacactacgcaatgcaggctttaaagggcggattattcgagttcacgccagtaaggggaagtatgcccgagcggaaccaatatcagccctgtacgagcaaggcagggtgttgaatcagggaaatctctacgtgctggaaaatcagctgatggagtacataccgaccactgccaaaaagtcaccagaccgccttgatgccatggtttatgcgctgactgaacttaacggctctcaaccgagagggatgatgctccctaagcggctacagtaa

SEQ ID NO: 432560 - DNA, 381 bp, Serratia marcescens
atgaacacctcattcagcttccgcactatggcgatcggcctgttgctggtggcgctgattgttgccgtccggctggcgttttacttccacagcaacgcagtaaaggctggtgagcaggttaagcagcaggaaaagacgctggcgcagcagtcaggactgatctcaaccctgcaagcacaagaccggaagaacagagccttggctgcggagcaacaacaaagagagcagctactacgccagcgcgaggaaacctaccagaggaaattgcgtgatgcacttaaaggcagcaaatgtgggaatagtcctatgcctgccgctgttgttgagctcctgcagcagaacgccgccggcaacccagcaaatagtcctgttaccccctga

SEQ ID NO: 432561 - DNA, 771 bp, Serratia marcescens
atgcctcagccattaccaaagtttgttgaaatcaatgatgaactcactgatcgattgagtgcaggaagcttgcttactgagatggaattttatcgatatatcagatcgatagaatctgttaatgataaagctgtacaaagctatctgtacgctatggcacatgctgcgtatggtcaaaaggaaaaagcagttgctttctttgaggaagccttaaagtttggagttgtcattgccccaaacaactacctagcatacatcaatgatgttgggtcgttctccgaagtgaaggagctggctcatcgtttagcggaatctgctgttaataaacagatttttcatactgcgttccagagtagtctttttagcggtgatttagaacaagctacctcctacgcagaaaaatacatgaaaattgctgatgtcaaggagcgccaggagatggccagttctctttcagatgcaaaaaaagagatccagaaatttaaggaaaggtctgggttgtctgatgcagactttcagatggttgcagatgcgactatccgtatcgtagatactcatggttgtaagatttctggcttgtcatatcagagcattcgtgaggaaagcgcacattcctatgtggttctggttaagagcagtgaccctgaaaagatcgctgaaatgaacattgatcttgcttttgcacttgcagattatgatcaactgactgataagaggttcagcgcttggttcaaaggacaggaggctgaacaaaatgccagttttagctga

SEQ ID NO: 432562 - DNA, 195 bp, Serratia marcescens
atgaaagaggtgaccataacacgccagcagtaccggaacgtctgcgatgcgctgctgaacacagccaatctgaacgagcagcttttgctgctctcaaccgccgacaagcgttcggaaagagttcatcgccaagccagcaagctattacaaaaaattcgccagcaacttcaggaagccgtgggagaaaaagcatga

SEQ ID NO: 432563 - DNA, 1026 bp, Serratia marcescens
atgagcatgaacctgatggcgcaggctatgagcatcaaagtaggcaacccactgcgcaagttggtgctgatcaagatagctgataacgcgaacgacaagggcgagtgctggccttcatatcagcatgtcgctgaccactgtgagtgcagcaaaagcgctgtacgggcgcacattgaggcattgataaagatgggtttactcaccaaagagaaccgccttggcgtgaacaatgggaaggggaatacctcgaatctctactatctgaccctggacaaccctgtgccgtcagaaagcatagccccctgtgccgtcaaaaagcatagccctatgccgtcaaaaagcacaggggtgtgccagcaggtgacacagggtgtgccgtcagaaagcacaccccctatgccagcagatggcaccagaaccagtcactcttttgaaccagtcattgaaccaaaagaaaacccccccatagccccccagaacgatgctggagcagcgaaccaatcagctgaggctggggaagttctcgattttctgaatgaaaaaatcaacggcaggacgccaaagcgtgccgacacgttgcgtgaaattgccgagcgcctggcagaaggcaacagcgccgccgaactgaagctggtggctgaacaccgcgcaagtctgctgctgagcgatcccaagatgggccacatgctcagcgccaagatgattttcgatgccgtccggttcggtggttatctggccgccgccaacgcctgggatcgtcagcgtaaccacaaagccgccatggccgaagcggtcgaacagcagcgccaggagccgatggccggtgaagcgccggagattgatttcgatgatgcgtttgatcgcctgctgattgagggcttacagcctgagaacccggcagagaaacaggcgctacagcatgttcagaaacacggtttcagttccaagattgaagaaaacgcacgccgtgagtggcgggtaattttggctaaggcgtatgcccgcacaggaggcgttgaggtatga

SEQ ID NO: 432564 - DNA, 201 bp, Serratia marcescens
atgaaccagcagcagattttgttcgcaaaaaacgtcattgctcaccgtaaaactgaaatcgcacagcttgaaaagcaaatagcgaaccctcgttctcgtcattccaaaaacgaagagcgccggaaagcaattgaatgttttaaagctgatatcagtaactcgctaaagcgcctatttgatgccggcgtgatcagtatctaa

SEQ ID NO: 432565 - DNA, 162 bp, Serratia marcescens
atgcggcatatgatccacgcggcaacaaaaatcgaatacaagactgatgaaaaaaacgtctggcgattttcaagcacgaaacaggagtggatacccgctccagaaatgacggtttcagtttttgaaaacattattaaaaccggcaacggctacgaaaaataa

SEQ ID NO: 432566 - DNA, 534 bp, Serratia marcescens
atgaaggtcaccgaaaccaaagttttgagtatcgaaatcactgaagtcgaacgcctcgaccctatccgcgtaatggctgaaaactacgagccaggtaaaggccgtatcactatcacctgcttcggcaaggcatggacttctttctggcctgcaatgggtggggatactgttcagcagtttttaatccgcgtatcgaatgactacttgatcggctgcctttcgccaatgatgcgcagtgaagtggatgacgacaacgaagcgaacctggagtttgtgaaggccgaaatctgcaagctgcgccgttctggtgaaatcgacaacgcaaaagcgcgggacatgtgggaatcagcagagtgcagtgatgacgttaaggctgattgctgctcctggggcaatggctccgtgcttcttgatctgctgggtgatgacccctactacgcaaaatggccgaccgtccctaaccacgaataccaataccttgagcgcatcctagatgccgtgcgtgaagcgttgaagcaattggaggccaaatga

SEQ ID NO: 432567 - DNA, 552 bp, Serratia marcescens
atgaaagagcgcccagtgatgccagcaaatgaactgagcctcgacggcaaaagcattctggatatgtgctgcggctcccgcatgttctggttcgacaagaaagatgagcgcgccgtattcagcgataagcgcagcgagagccacaccctgtgcgatggccggaaactggttatctctcctgacctgatcgccgacttcactgcgctgccgttcgcagacggtagtttctctgttgtcgtgttcgacccgccgcacctggagcgcgtaggtcccaatggctggcaggggaagaagtacgggaaactcgaccgtgaaacatggcgcgatgaactgcgtgccgggttcgccgaagctttccgcgtgctgcggccacacggcgtgcttatcttcaaatggaacgaaacccagataccggttagccagatcatcgccctcacagacgagaagccggctatctggcagcgcaccggcaaaaacgataagacgcactggatcatcttcgtcaaatcgggtgacagcgctagggaggcggggcgtggcaaagctgactaa

SEQ ID NO: 432568 - DNA, 429 bp, Serratia marcescens
gtggcaaagctgactaaggcacagcgcgcagagttgcgggagaagttcggcggccggtgcgcttactgcggttgcgtactgccagagaaaggctggcacgccgaccacgtcgaaccggtgatgcgtgaatctgcgcaggacatggcggcagcggccaaaggcttatttaaactgaaggccaccggcaaggtctggcacgaaaaccgcgactgcatagagaacctcaacccggcttgcgcgccctgcaacctgttcaaaacgacctacagcctcgagacgttccgcgagcagatagcagcccaggcggaaagagcgcgggcgtatagcgtcaacttccgcacagctgagcgcttcggtctagttgaagtgaaagacactccggttgttttttggtttgagcgggccgaggcccaggagaaagcacaatga

SEQ ID NO: 432569 - DNA, 255 bp, Serratia marcescens
atggcaaagctgaacaaaaaagagcaagcgtggctggacgagctgcaagaggttctggaacgttgcccgtccgatcgtcttggcttcttcaccatcggcgataatgacgtttttgtgtatgacaagagcctggataagcagatggatgaattacaggaaagtggcagcagggatttcggccagatcgttaacgatcttgatgcgggtttcggggcgctggtatttccatccagcgttcactctacagcaggttaa

SEQ ID NO: 432570 - DNA, 696 bp, Serratia marcescens
  misc_feature (508)..(517): n is a, c, g, or t
atggcagaaaaacatgatgaatgggttcatgttgttgatgtcggctggaagggtagtattcaagataatttggtaaaagcgacccagcgcaatatgtctggttactatttcggtatattggatggggctgaaacccataagaacaatattaaagaggggctgctgtttgatcatcagtgggggcagcgccttggtgatgatatgtttaacgagttccgtgccggttttgaagtttttatgggggcctcgcatggcagcctaaagagatatggtgttgacatcgataattttgttttcgaccataacgactcagagctcgctttcttctatgagcaaatagcgccattccaagagcgtgcattgcatcaattcaatggtttttcaaaaatagagcgtgtttattcgctatctgatcatgagatcagcaaagcggttaaaaagttttactttcgtggcgtgatgttgccgagtcgggttgaacgtgaaaaattttcgttgatcaaacacnnnnnnnnnngctcctttgggcagagtaaacgttcccccctgtcttattttaagcgcttggtgagaaatcctcgacacaccattggttctgcttggtggaaacctctggatttccatgcaaatggcgtatggtatttgaaatatccttattttttggtgaaaaaaataaagtttaaaggggctaaataa

SEQ ID NO: 432571 - DNA, 189 bp, Serratia marcescens
gtggtggggggggagggcgggattgttgctctgctgggtatgttgttactggtgtgggcggggctgaaattagttgcgcgcgcctactggcgcgacaaacgggctttcgcctgcggcaaagccacttccggagaagcgttggggctgtgtatagctctgttgccgatagtgttgcactgccagacgtaa

SEQ ID NO: 432572 - DNA, 708 bp, Serratia marcescens
gtggtgggttactcgctgattatcctgcctgaccaggagaaatggagcggtgacggggcgggcatcaaggccatcaccggcggcgatgcggtcgccatcgaccccaaataccgcgatgcctacgccgcccacattccggcggtgatactggcggtgaacaacaacccgatgcagttcagcgaccgcagtggcggtgtctcccgcaggcgggtgattattaccttcccggagacgataccgccggccgagcgtgacccacagctgctggacaaaatcaccggcgagctggcggtgattgtgcgtcacctgatgcagcgcttcgccaacccgaacgaggcccgcaccttgctccaggcgcagcaaagttcggacgaggcgctgactatcaagcgccaggccgacccgctggttgatttttgtggctacctgaccgtactgggcaccccggaagggatgatgataggcaacgccaacattaccccgccgaacccgcgccgttacctgtaccacgcctatctgtcgtttatggcggccaggggctaccagcacgtgatgaacctgacggcctttggcctggcggtgccgcaaacgctgagagagtatgagaaaacactgctcaagcgtaaaacccgactgggcatgcaaaccaacgtggtgttgagtgaagagtgcgaagcggactggctgccgaagtgcggggcggtgtga

SEQ ID NO: 432573 - DNA, 246 bp, Serratia marcescens
atgaaaaagttattcgcaatgatgatgtgcagcgcgctgatgctgggcgtagccggcgccaacgccgctgatggcatgagcaaagacgcgatggaaaaggacggcatgagccagatgtcgcacgacggcatggcgaaagatgggatgaagaaagagtgcatgggcaaggagtgcatggcgaaagacggtatggccaaagacggcatgaagaaagacgaaatgaagaaggacgcgatggggcactaa

SEQ ID NO: 432574 - DNA, 231 bp, Serratia marcescens
atgagacgagatttaaacttagccggggcgtttatggatgcgcttaacttcaatgagaacggcaagggccgccgcataaagaccgttgatttcattcaagctgcaaaccggctcggtacacacctaacgcctgaagaggcgaattactacatcaagcaccagtccggccacgttttccggctgattgacgaggggcgttatcagcacaacacatacctctatctgggttaa

SEQ ID NO: 432575 - DNA, 900 bp, Serratia marcescens
atgaacaaacttgatgctctaaagttttttatcattgcctctgaaaccctgaacttccgcgaagcagccataaagctgtcagtttcaccatcagtagtaacccgaacagtcgctgagttggagaaacagcttggtgaacctcttttcaaacgcaatactcgttcgatctttctcaccagtttcggtgagttatttttaccccaagcgaagcgcctgctggaagattctgaaaaactatttcagacagcgaaagatgataataaaattaagggtattgttcgtatcacattacttcgatttccaaatcatgaacaaatcttgtatgaactattgactgcactacgtccatatcctgagttatttatcgactggcgtttagacatgatgaaacttgatactatcgagcatcgtatcgatataggtatacgtgtagggcgagaacctaatccaaactttataattaaaaatatcgggcaagttgaacatattctggttgcgtcccctgaactcattgcgcgcctgggagcaccaactgatttagaagatcttcgacagcgttatccattcagtggtttaattaatcctgagacgggaaaatcatttgagtttatgagtgacgcagtgaatacttttgtccctcgtcatattgagttttatactacagacccatacgccgagattcaggctgcattggccgggaaaacggttgtacaatccagcgattttatctgtagggagtacttagcaagcggccaacttgttctcccactgcctgaactgcgacaggagaaatggcaattttatttatatcggccttaccagctgattactcccaaaagggtgactgtcgttttttcgctattagaaaaaatattacgcaaatatttcgcatcaaaataa

SEQ ID NO: 432576 - DNA, 573 bp, Serratia marcescens
atgtcaattcaaccagtagagttaaacaaagcctatcgtttattgcaggtcgggccaacgacgatgatatcggctaaaaatgatggcattgaaaatgtcatggcagcggcttgggtgggattagtaggcaataacaaagtaatggcttttataggtccacaggcatttactcgcgggcttgtcgaaaaaagtggatattacgttgtccagatcccagtagtaaatcagatggaaatggttttatatgctggaggccacagttattctgacacaccagataaaaacagtaaaattccactgttttatcagaatgagtttgatctgcctttagttgaaggttgcgctggctggctagtctgtaaagttatacccaatgaagaaaatgaaaagcagcacaacttgttcatgggggaaattgtcggagcatggagtgatgaccgcgttttcagaaatgggcactggatttttgatgatgcgcctgatgaattacgtactgtccattatgtagctggtggacagttttacgctattggcaaaggtactaaatttaattatggtccgggaaaagactaa

SEQ ID NO: 432577 - DNA, 846 bp, Serratia marcescens
atgtccacaagtcatgaaatgaacaataccgttgttgcctgcgtggacggttcgtcatcaacacaggccgtctctaaatatgcggcctgggcggcctccgcgctgaagatatctgtggcccttcttcatgtactggaaaaaagtgaccagcctgtggtttcggacctgacaggaaccatcggcttagacagtcgggaacattttacagaagagctggttcgccttgagggcgaacgtaaccgattgttgatggcacaggggaaatccatcctgaaaaattgtgctgagctgctgacagatacggggttaccggcaccacagcaattgcaaaaacatggcgcgctggatgagattttggctgaattgggtgatacacgtcttatggtgctggggcgccgcggggcatccaatccggtcggaagccatattgagaatgtcattcgtctgcaaaaaaatcctgtgttaatcgtacccgaaaccttctctgtcccttcacgcgtaatgttcgcctatgacggaagtgaggcgagtctggaaaatttgcgccgactttctgtaagtccattatttttgaatctgacctgccatctggtgatggtgaatggaaattcagaatcgctggatgcagctcagtctctgttgcaaagagctggcataacaagtcaggcaagtctgctgaaagccgataccgtggctaatgcactgtgccgctacgccggggaacacgggattgatcttactgtcatgggagcgtacggacattcgcggctgcgcagattctttatcggcagcaacactgaagagatgctatctaatagcagccagcccctgctgatgctcagataa

SEQ ID NO: 432578 - DNA, 603 bp, Serratia marcescens
atgaacacgtcaccgtggaacaaagaccgtatcatcggacaaaaaagaccacttcagatatctcatatctgggggatccgaatccggcttgaactggaaggtaaaacgcgtgatttagctctgttcaatatggccctggatagtaagctacgaggctgtgatctggtcaaactcaaagtatctgatgttgcatatggtacctctgtttcaagcagagcaacggtgttacaacagaaaaccggtagccctgtgcaatttgagataaccaaagggacaagagaagctgttgctgcattgataaaacttggcaatttgcacagtaaagacttcttgttccggtctcgtgtcggaactaaccagcacatatcaacccggcaatacaatcgaatctttcatggatgggtagaaaagcttggtctcgaagattcgccttacagcactcattccatgagaagaacaaaaccttacctgatctacaagaaaaccaagaatctccgggtgatccaacttctgttgggtcataagaaactggaaagcacagtccgttatctgggcattgaagtcgatgatgcgttagagatctctgaatcgattgaggtctaa

SEQ ID NO: 432579 - DNA, 894 bp, Serratia marcescens
atgtctgacaaacagctacctgcggttaaacttgctgtcggaatggcgatgataggaacggttggtgcttttgccgtggagtccggactttcgccagtttcggtagtgttctggcgctgcgtttttggcactctctttcttggtttatggtgcatcatccggggttacctgccggacaggtctctttctcttaaacgtcttacttatgcctccctcgcaggggtctgtatggtgcttagctggatagctttttttgccggattcacacttacctcaatagccacaacaactattgtctatcacatacaacctttctttgttgtactgattagcgcggtgtttcttagggagctgatctcacttaaccaggtcctatggatggcaggagcatttacaggtgtcattctggccagtgggcttatcgctcccttcggtgtcattaatattcactgggttctgggagtcgcgcttactctggttgcagccttgctgtacgcgatatcaacagtcgtggggaaaggactgggacagcaacgaccggaaatcaccacattatgccagacgatagctggaattattctgctggccccctttaccgattcgtttcgttcagttccttctgagtcgtgggggtggttaattggcataggtgtactgcacaccggtgtcgcctacgtcctgatgtattcggcttatccaaagttaaccaccccggtaattggcgtgctgacttttatctacccactggttgctatcattgttgactgggtgttttatggccatcaaccaggggtcattcagatgacaggtatgatactgatcgcactatgcacacttggtgtaaagctgggctggcatttcccagtcgggcgacaacagaagataagtttataa

SEQ ID NO: 432580 - DNA, 858 bp, Serratia marcescens
atggctaaccttttagatattgatctgctgcgtgcctttgttgctgttgtcgaaacgggcagtttttcccgtgcgggtgaacgtatcgggagaagccagtctgctgtgagtatgcagatcaagcgtcttgaacagtccatcggtaagcgccttttacatcgagggacaaaagctgttgccctcaactccgttggcgctgatttcctggttcatgccaggcaaattttaaaactgtcagatgaggcctggacaagtgtgacacgcccagaagagactggctgtgttcgcctgggtgtgcctgatgactatgccgcttttttattacctccggtgcttgaacaattctcggcggaacatcccctggtgacagtagaactgatatgtgagccctctctttccctcacaaaagctattgcggatggaaaaattgacctggccattgttacccgggtggaggaacaaccggttgaagtgatacgtaaagagccttttgtctgggttgcatcaccaacacatgtcgcctggaaaagtgatcctgtcccggtagcactatttgctcccgggagtgctgcacgtaccaatgtcattcgtgctctatctgaaaacggctatacctaccggaatgcttattcgagtgccagcttgcttggtcttgtagctgttgttcaggcggggcttgcagtggccggtctggctaagtgcagtgtaccgccatccctgtgcattattggcgtcaatgaaggcctgcctccactgaacgatctggaagttagtatcttacggaagccaggagaaagtgggcctgcaacagattgcctgtacaactttctctatcgttccttaacggactaccgttga

SEQ ID NO: 432581 - DNA, 519 bp, Serratia marcescens
atgttaatccgtagggccagttcctctgatgcagaagaacttgctattttagccgagcgaacattcagaaagactttccaggatggtaatactcaggaggatatggatcttcactgtcaggcaagctattcaacggatatccagttgaaagaaatcctcagacaagactggattacattagtctgcgaatacgagagcaaactgatagggtacgcccaactaaggtgggaagagtttcctccctgtgtaaatagcatccacgccggagaaatcctgtgcctgtatgtcgataagccctaccatggtaaaggatttgcacaagcacttatgcagaagtgctttgctgaatttgaagcaaagggagcggatcctgtctggttaggtgtctgggaacataacccaagggcaatctctttttaccgtaagcttgggtttaccgaggtgggcgagcatatcttccaagttgggtcagatccgcagaaagatatcattatgaaacgctcaacttgggttggttga

SEQ ID NO: 432582 - DNA, 462 bp, Serratia marcescens
gtggataatcagcatctgagttttaccaacggccagtttaccgtcacaaccgatcccgttttttttcaactggaagccattcacggttacctctcgcaatcgtcctgggctcctagtattgatcctgaaacggtcaggatatcaatccagaatagcctttgttttgcgcttctggatggaacaatacaaatcggcttcgcccgtctggtcacagactatgccacttttggttatttgtgcgacgtctacgtgttgaacgattatcagaaaagtggtcttggtcgttggctgattgaatgctgtcacgcccatccattgatgtcacgtctgcgacgaataatgctggtcactgacagcgcgccctggctatatcagaaactggggtataaccctttgaaccggcaagattttgtctggcagataaatcgaccagacatttatcgtaatgccgggaaaaaataa

SEQ ID NO: 432583 - DNA, 603 bp, Serratia marcescens
atgaccaaaaaagtcaatttaatgaccgatgcaaattctatcgtcaacactgtgaatgaagccgtatctcagcggattaagctgtatcgcaagcaaaagaaaatatcactcgatgaactctcccgtcgggcgggcgtcagcaaaggagcgctagttgagattgagggatgccgtgcgaatcccagcatagccctgttatgccgtctggctgccgcgatgggcgtttcggtggctgattttgtggatgtcagctccaaaccgaccgtgcatctcattgctgaagatgagatccctgaattgtgggcaggtgaaaaaggtgggagagcaaggttgcttgctgggtcgggtggccctgatatgaccgagctctggatgtgggaaatgcagcctggggaaaagtttgcttcacccggccacgcggaagggacgcttgaactgttttatgttcagacgggtacgctcacgctgggcgtacaggaccacctatatcgggtaaaaactggctgttcggcaacggccagaacggacgttcctcatttctatgaaaaccgggaggaaagtccattggttttcatcatgacagtacatgagaaagtatcctga

SEQ ID NO: 432584 - DNA, 696 bp, Serratia marcescens
gtgttaacagtatctccgtcaattgcccctgaaatttatcgtattgctccaggttttcgggcactcagtatctgcgtaaaagctgtgccagtgcttaatcctgacactggagaaacggcgctgcgggaagcatgtgaagcagttctggccggtgaacctgaatgggcagaatctcatctggccgcatgggccgaagtttttcaaaagtttggtgctaaacctaaacgcactccttgctcagctgatgcgttacgtaagcgcgtattacgtgacggaacgatgccagcgctcgatcccatcgttgatctatataatgccgttagtctccgctacgccgtaccggttggtggagagaatatctctgcctatcagggttcaccacgtctggctgtggcaaaaggaacagagccttttgataccgtcaaagagggtgaaacggccgttgaatatccttcacaaggcgaggttatctggtgtgatgataccggcgttacctgccgtcgctggaactggcggcaggggatcagaacccgcttaggcgtggaagctcagcaaatgtggttcattctggaaagtctcccacagatgccgctggagacgcttcacgaagccgggaagatgctgaccgacggccttgaaagaatgatgcccggtctgtggtttgaagttgctctcatcgaagaacaacaccagtaa

SEQ ID NO: 432585 - DNA, 894 bp, Serratia marcescens
atgtttaccggtttgtcggcgtttccattaactccagtcaccgccagcggcgtggatgaaaagggtttcagccatattctttcccgccttacagaagctcgggttgattctatgggcatcctggggtcaaccggaagctacgcctatctgacccgggagcagcgcaagcgcgtagcaactctggcaaaacagcatgccggggacatccctgttatggtgtgtgtggggtcggtcagtaccgatgccattctgcatctgggagatgatgcacaggcagctggcgcgaatgccctgttgctcccggcggtcagttaccagtcactccgtgacgaagaagtcttctcactatttgagaccgttacccggcacgtgtctgtaccggtgtgtatctatgataatccgggcactacgcattttacctttacggacgaactacacggtcgtctctcatcacttgagggtgttcgctcggtcaagatccctggcgtcccggatagccccgctgcagcgactgagcgggtgaatgcgttacgtcaacatctgcgccctggcgtaacaatcggtatcagtggcgacgcttatgtggggctgggattaaacgccggttgtgaagtctggtactccgtgtgtggtggtctgttccctgagatggcgaaacaaatcactgaagcagcggcggcaaacgatcatcaacgcgttactgccctgacaacccgccttgagccgttgtggtcactgtttcgtaaacatggcggaagtattcgcgttattgccgctgccgctggtgtgcttgggcttaccgacatggattgcctgcctcgacctctgcaaccgttgtcagcaggcgatatcgcagatattgcccatgtgataagcatgctggagctgaagtga

SEQ ID NO: 432586 - DNA, 3702 bp, Serratia marcescens
atgaaactacttgataaaaagtattataacctcgaacctaattctgagtaccttgaggactcatttattttaggattggcatggaaaaaaactgacagttttgtgagaactcacaattggtatgcagatctattagcgcttgacaagtgtgcatttgatattagtgatgaagtcactaaatggtcaaatgaagtcaaaaatgccacttttgccaaaagtgatattgaattaatactcgctcccaagggtgctaactggttctttaaaaaagggaggtggattacaaataaagaggatagaaaattaagaccattggctaatatatctatcaaggagcagtcttttgctacagccgtaatgatgtgtattgctgattcgctagaaacgagacagaaagattgttcactaagtagccttggctatgctgagcatgtgaaaaataaagttgttagttacggaaataggcttatttgtgattggaataatgataaggccagatttcgttggggtggaagcgaatattacaggaagttctctacagattatcgaaatttcctacaaagacctatctatgtaggaagagaaactgtaaacaaagtcagtggaattgatgatgtttatattgttagtttggatttgaaaaacttttttagctctataaaaatagatcttctgataaaaaaacttaaagaaatatcttctaaacattacgattgcaatttttcagataataataatttctggagtttggcaagtcaaattttgaattggacatggcctaaagactctttgtctttgcttggaagtttggatttaaaaaaaatcgttgggctacctcaaggcttagcatcggctggagctctggcgaatgcatatctcattgattttgatgagtctataatttctaagtttcgtgatagtagccgtattatactgcatgattactgtcgatatgtagatgatattaggttggtgatttctggagaagcgctaaataataaagaaattaaggaatttgttcatgggttagttcaaggtgttctcgatgaaacattgaaacaagataagttagatggagagccttatttagaggtcaatgataaaaaaacatcaattttaatactttcagatattgataacggaagcggccttacaaatagaattaatgaaattcagcatgaaataggagcttcgagtattcctgagcgtaacgggctagataataatataccagcacttcaacaattattactgactgagcaagataatttcttcgatgatgctaatgattcattcccagggtttaacaatgataaatcgataaaagtagaatctttgcgtagattttcggcccatagactggaaacaagcttaactaaaaaaagcaaactgatctcacctgaagagagaaagcaatttgataatgaatctgagctgattgcaaagaaattatttaaggcatggcttaaagatccatcgattatggttatctttcgtaaggcaatagccataaaccctaatctagatgcttataaaaccgttcttgatgatatttttagaagaataaaatcaaatcgtgataagtgtgataaatatatcatgatatatcttctttctgatgtatttcgtagcgtcgttgatctctgcagaaatatacagcaagagtacatatctaattatcaaaagttgatgagcgaagttacatcatttgctcaaaaactactttcttgtaaatctgacattccaagttacgcatatcagcaagcacaactctatcttgcagtaatcaacaagccgtttatagctagtaataaagcttctcctgatcttgctagactccaaaacgtcttgataaaaaaacacttagaaccattaaatattagtgatggctacctatttgaattatctgctcagatcagcaaagattaccaagcaaatgctgtctttctactttcacatacaaaaaataaagaagcagtagattcaatcataaacaattttgctttccgtggtggtgaattttggaacgcaatttggaaagaaatagttaggcagaaagataatgatatagctaaaaataggattaatgaatttagatgggccatacctaaaaatgagtcaaaaccaaatggctcggagcataatctttcatcattaatcagcttcaaggaaaacccgtttaaatatgaacatgcgcttcttaaactgggtatagcattagttgatcttctagatgataaggagaaaaaagcatggatatctaatggtaagcagtattccccacatgaaataaaagtaaatttatcagatgtatcaacatcttggacagaactatggcgtcctggtgttaatatttcatgttcgatagataaaataggaaaaatacctacagacccgcgctatgcaagccctgagtggttagtagcttctccccccccacaacaacatgatgcacaaaaattatattgggtgtgtagtgtgctaagaagtgctgctttgggtaacgtggattacacccagcgaaatgatttaaagtttaatggcgaaaagtatgatggtatacgttctcagttttacaagcgacgtatgggaatgttacatacaccagaatcaattgttggttcatatggaactataactgattggtttgcaagctttcttcagcatggattgcaatggccaggtttttcttcttcgtacataaatcaagacgatatattgtcaattacctgccttgatgagtttagaaaatgtatggtagaaaggctaatttatttagaaaagcaaatatgcacttcatccaatgtcccaacattacctactgttgtcactagacctgagttagcatctaaccaatttagaattgttactgtgcaacagttatttcctaaggataaacattttcacccttctgacgtaacactggataattccgatgtgcgttggaagcatagagaacacctcgcggaaatttgtaagctaacggagcagactttaaatactaaacttaagacagaatctagagaccataccagtactgctgatcttattgtcttttctgaattggctgttcatccagaggacgaagacatagtaaaagctctggcatttaaaactaaagccatcatattttgcggatttgtcttctgtgaacaagatggcaaaattgttaataaagctcgctggatcattccagactcttccgactcaggaactcagtggcgtattcgtgaccagggtaaatatcatatgacagtagatgaagttactcttggtgttcagggatatagaccatcccaacatattatttctattgaggggcatccagaaggaccatttaaaataactggcgcgatttgctacgatgcaacagatataaagcttgcggcagacctgagagatttaactgatatgtttgtcattgtggcgtacaataaagatattgacacatttgataatatggcttcagcgcttcagtggcatatgtatcaacatgttgttattacaaatacgggagagtatggtggttcaagtatgcaagctccatacaaagagaagcatcataaactgatctcccatgctcatgggactggccaaatagcaattagcactgctgatatagatttagcagcttttaggcgtaagctaagtttatacagaaagacaaagtcccagcctgctggattcaatcgaaaacattaa

SEQ ID NO: 432587 - DNA, 1812 bp, Serratia marcescens
atgtttaacaccacgcattctggtcagcggctgcgagttctgaatttaataggcagtaaaggtgaactggcattacaggtcggtgaggccgaaccatttggtcttatcaatattggtgattcgccatctctttacaaaatgtgtgaagaggatacgacatttgattatcagagagatgattttgcgaagtcattatttcatacgttaaatgataaagattctcgactgcatattttgatcggctcgcgaaaatttactgaaggctggagcagttggcgtgtctcgactatgggtctactcaatatgggccgcggtgaaggttcgcagatcattcagttatttggtcgtggcgtgcgcctgaaagggcgcaattattcattgaaacgaagtacccctgccgagcgtcctaaagggttgcatctggaaaaattagaaacgttaaatgtattcggtgtacgcgccgattacatggcaacctttaaacaataccttgaagatgaagggatcacaccaagtgacgagatccttgagctgaattttgaaactcgtccaaacatacctgcaatcaagcttaaaactcttaagcttaaagacggctataaagataatcaaaagctcggttttaaacgtgtttatttccctgaactgtatgaagtccctgctgactttcaggggaaaattaagcagccacatataaaactggacttataccctaaaatagagtcgattgatacaaccagaaaaggggatagcactcccgtaaatgtgcgccatgaagcgaaattagattataaagtcattagtgcatttgattttgatcggctttatctagctattcaaaattataagctacaacgtggctggtcaaatttacggctggataagcaacgtttgatcgacttttgtaccgataagacaaaaataggaaatagttggtatacccttttgattccagcttcagagcttgagattaagcaatatgcagatattgctaagcaggaagacatcatgcttcgtctgctgactgattataccgaccgtttttacaacgcattgaaaaatgcttatgaaggtcagttttatgaaatcacacaggtgaatgaagatgaccctggaatggtcaaaatgtaccattttgagatcgaagaaactgatgatggtttggcttatgccagccgactggagcagttacaacaactggtaattaacggcgaaattggtaaagctaaatcctggaatgctccaggcatgattgctgtaaccttcgacaagcatctatactacccccttctttcaattgagaaaaattctgatttaccgctgaaaatgcgcccaacagcatttgatgcgccaagcgagataaccttcattaaggacttacaagaattcattgaaacacccaaaggtcagaaaatcatcggcaataaaagtttatacttgctgcgcaatgctgataccaaaagtaaaggtttaggtttcgctactgcgggtaacttctatcctgacttcttattgtggctagttgacgacgaaagcgggaagcaatggctaagcctgattgacccaaaaggtattaggaatctgaatcttgacgatgcgaaatttggtttatataaggaaatcaaagagcttgagagaaaattatctgatgataaattaagcctaagcgcgtttattgtttctgaaacaagattcattgatttaataaatacatccgaatctaaagataaaattgaagaacgtaacgtgctctttctagaggacactggttctatttatctggagaagctttttaaaaaaatagttgcctaa

SEQ ID NO: 432588 - DNA, 1188 bp, Serratia marcescens
atgtccagtgattcggtttccgcgcccgccgtcggcgcggcgctcccctgcccgccgcggctgctgaccgccattatcgtcttcgccgccatcgcgccgggcattctgatgaccgcccccgccgtggccgcccagctcgccgcgcagtggcagctcggcccggcgcagatcggccacctgttctccaccgaactcggcgccatgagcctggccacgctgccggcgtggtggtggatcgggcgcatcaactggcggcgggtcgctacgctgtcggcgctggtgtttatcgccggcaacctggcttcggcgctggcgcaggattttaccctgctgctgccgctgcgctttatcgcctcgctggcgggcggcaccctgatgatcctgtgcatcacctgcgccgccggcaccgccaatcccagccgggtctatgccttctgggtgctcggccagctggtgctgggcgcggtcgggctgctggtgctgccgccgctgttcgcgcacttcggcctgatggcggtctacctgattctggcggccatcatgctgtgctgcctgccgctcatcccggcgttccccaacggtttcaccgccgcccgcgccgcccgcagcggccccgccgcctcgctggcgcgcaagctgtgcgccgtgctggcggtgctgaccttttacatcagcctgagcgcggtctggacctttatcggcggcatcgccgccggcgccgggctgtcgccggcccacagcggccaggtgctggccgtcgccaccttgctcggcatcgtcggcgcgggggccgcggcgctgatcggcgcgcgcttcggcggcgggcgcccgatcgtactggggtacgccctgctgctggccagcgtggcgctgctgacgggccagcccctgctgctgcgcttcgccctggcggccctgctgttcaaattcacctggaccttcgtgctgccgttcattctggcgcgcgtcgccgggttggataacgacggcaagctgatgaacggcatcaacctggtgatcggcggcggcatggccatcggcccgacgctggccggctctctgatcgaatcttccggcggtttcaacgccttgctgttcggcgcgctgggctgcgcgctgctgtcgctgctgttgatttcgctggcttcaccgcgcgcatcgcgccgtataacaggaggagaaaggtga

SEQ ID NO: 432589 - DNA, 1713 bp, Serratia marcescens
atgcagaaaaaaacgttggcggtggcgttgagcggcgccttatcgggcctggcgcagggggcggacgccgatcgccccaatgtgctgatcattctggtggacgacatgggctactccgacatcagcccgttcggcggcgagataccgacgcccaacctgcaggcgttggccgaacggggcgtgcgcatgagccagtactacacctcgccgatgtcggcgccggcgcggtcgatgctgatgaccggcaacaccaatcagcaggccggcatgggcggcatgtggtggtatgagagcaccgccgcgcagccgggctatgaaatgcgcctgaccgaccgcgtgaccacgctgccggagcgttttcgcgatgcgggttacgccaccatgatggcgggcaaatggcacctgggctatgtcgacggtgccaaaccgacagatcgcggcttcgagcgcgccttcgcctttatgggcggcggcaccagccatttcgacgatgcgaaaccgctgggcaccgtggaggcgttccacaccttctacactctgaacggcaaacgcgtgtcattgcccaaagatttctattccagcaaggcttatgccgatcagctggaacagtggatccgcgatacgccgcaaaataagcccgtcttcgcctatctggccttcaccgcgccgcacgatccattgcaggcgccagatgactggatcgccaaattcgacggcaaatacgacgccggttaccagcaggcctatcagcagcgcattcagcgcctgaaagcgctggggctgatttccgagcgcacgccgatgccgacgctggcgctggataaggcctggagcgcgctgacgcccgagcagcaaaaatatgaagccaagaccatgcaggtgtacgcggcgatgatcgcttacatggacgatcaggtcggcgcggtgctgaacaccctgaagcagaccggccgcgaccaaaatacggtgatcgtgttcgccaccgacaacggcgccaaccccgccagcggcttctactacggctcgaagccggagtattggcggcagttcgacaacagctacgccaacctcggccgcaagggctcgttcatctcctacgggccgcactgggccaacgtcagcaacgcgccgtacgccaattaccacaaaaccaccagcgcgcagggcggcatcaataccgatttcatcatctccgcgccgcggctgaaggggcgcggcggcatcgaccgcacgccgatggcggtgtatgacatcgccccgacgctgtatgactatgccggcatcgacgccaacaaaccgctgaaggccaaaccgacgctgccgatggtcggcgtcagcttcaaacgctatttcagcggcgaggctgaccgcgtgccgcgcgcgacctacggcgtggagctgcataaccaggccgcctatgtggacggcgtctggaagctgcggcggttggtgaaggccgggccgacggcccagatggcgccgtgggggctgttcaacctgcatgacgatccgctggaaacgcgcgatctggccgccgccaacccggagcgagtcaaacggctgagcgaggcgtatcgccgctttgcgcagcagggcatggtcattgaagccaaaggcgcagcgatcgactacctcggcgtcgacgccagcaccggtgactacatcggcctggatccgctgacccacaaaccgttgccgcaggcggcgccatga

SEQ ID NO: 432590 - DNA, 543 bp, Serratia marcescens
atgaacctggcccagctgcgcgcgcagcagatcccggtagagagcgaaccgcgcgcggcggcgccttttcatctgttggtgaagccgatcggcgccggctgcaacctgggctgccgctactgctactatccgcagcgccagcaggagcggacgcgcaagatggacgacgacctgctggcggaatttatccgcggctacatcgccgcccagccgcgttacagccgcgagatcaacttcgtctggcagggcggtgagccgctgctggcggggatcggtttttacaagcgcgcgctggcgttgcaacgccgctacgcgccgccgggcgtgcggatcagcaacagcctgcagaccaacggcaccctgctgaacgacgcctggtgccggctgttccggcagcatcactttatcctcggcgtcagcctggacggcgatcgcgaggtgcaggacgcccaccggccggacaagcgcggcggtgccagctatgacgccgcgctgcgcggcattgcgctgttgcagcgccatcagatcgattcaacctgctga

SEQ ID NO: 432591 - DNA, 2382 bp, Serratia marcescens
  misc_feature (2351)..(2360): n is a, c, g, or t
atgattggtacaaccccataccatgctaaatattttgcacatgaactttctatcctccactcaaacaatggggtagatcgtctatcccaatcgttgtttgacgcaagtgttgacctaaatccacatcagatagaagccgcattgtttgctatcgaaaatcctttaagcaaaggggccgtccttgctgatgaggttggcttgggtaaaaccatcgaagcgggtttggttctctgtcaatgctgggcagaaaggaagcgaaaactactaatcatctgccctgcatctttgcgtcgccaatgggcaagtgaactacttgagaaattcaacttaccttctcatgtactcgatgcaaagactttcagccagctgcaaaaagaaggtgtctataaccctctaaacaacaaatcgataacaataatgtcgtaccactatgcggccaggttagaagataaactggtggctgaaatgtgggacttggtggtgattgacgaagctcataaactccggaatgcacatcgagaaagtagcaagatggggcaagcattaaaacgtgcgcttgatggcaggaaaaaattgttattaacggcaacgcctttgcagaattcgttaatggaactgtacggcatgtcaacgcttattgatgagcatactttcggcgacccaaaggccttcagaaaacaatatatgcagacagacagcgatatagtggagctgaaagggagactgtcgcactttatcaaaagaacattacgtaaaaatgtacttgagtacgtcaagtacacggaacgtaaagctatcacaatcccattctatccaagtgaacaagagtatgaactctatgagcgtgttcaaaatctgctggaacgtgaggatagctacgcgctgcctaagcgacacaggcatctgacagggcttattctcagaaaactgctttcgtcgagtacgaaagcagttttgaataacttacagatacttaagactcgtctggagaaactaaagcagaaaggcatcgttgaagatgagctagatatcattcagcagattattattgatgatgatcttgaagatgacatcgttgaagatgacgaaatattaagcgctgatacagagcgcaaaacaatcgatctagctgcacttcaggctgaaatcaatgagcttgagactctcatcttcaaagctgaacaaattggtgttgatactaaaacaaaggagttactccttggcctggaacaaggttttgcgcagcttgcagaaatgggtgcagcaaaaaaagtcatcatctttacagaatcgatgagaactcagcaatatcttgctcacttcttagaaaaccatggttacctgggtagagtggttacctttagtggtaccaacaacacaccgcaggcaaacaaaatttatcagcaatggcgtgaagaatatcgtggttcttctcgcattacaggatcggcgcagattgataaacgttcggcattgatcgaccatttcaaagatcatgctgaaattatgatcgccacagaagcagcggcggaaggggttaacctgcaattttgctcgttgctgattaattacgatttaccatggaaccctcaacgcattgaacaaagaattggtcgttgccatcgttacgggcaagagtttgatgtggtggttattaactttcttaaccaaagaaaccaagcagatcaacgcgttctggaattgttgactgagaagttcaatcttttcgatggtgtgtttggggcatcagacagtgtattgggcagcattgaaaacggcgtagactttgaaaaaaaaattcagtccatttatgagtcatgtcggacacctgaagagattgaggccgcctttgaaaaactgcgaaaagagcttgaagacgaaattaatctcaagatgcaaaagactcaagagcagctactcgagcattttgatgaagatattcacgatgttctaaagatcaggcttgatgaaacacaagagcgcttagataaggttggccgctggttttgggcggtgacacattaccagcttaaacattgtgccaattttgatcatgagcatcaccgtttcaaattgtgccgaccagtcaatgggttaccagtagggcagtaccaattactgcgcaaaagtgttaaccaaaaaagcgaattacagaggctagagcatcatagttttgcgtatcgcatcaaccatcctctgggtgagtatgtgattgatagcgccaaaaggctagatacgaagacggcagaagttatcttcaattacagtgaccatacaacgaaaatctccgttgctgagcaactaaaaggacaggcgggttggttgacgctgaacttgcttactgtggatgnnnnnnnnnntcacagagcaccgcaatcgtaa

SEQ ID NO: 432592 - DNA, 402 bp, Serratia marcescens
ttgcccaatgagctgctcttactcaaaaacagacaaatcgatgcccaacttgctgaagtcatggagcagaacaatgccctctttgaactagaaagagataagctggaaaaatgggcagaagatgtgatttatgctgcggaagaagcattacgcgatacgaaaatgcatatcaagtctttgaagagagatgcaaggctggcacaatccattgaagaacaaaaacaaaaccaggaaagactaaagcaactggaacgacagcagaagcgccagcgaatggaaatttttgatattgaagatgaaatttcagacaaacgtgacctgttgatcagcacccttgaagagcgaatgaagcagaagacagagattgcagaattgtttaccattcgctggaaagttatttaa

SEQ ID NO: 432593 - DNA, 192 bp, Serratia marcescens
atggctacgaccctcaccccgactcacccgacattctgctttttgtttgcggccgtgcgccgttctgcgctgacggcttcgccccgtatggtgcgcaccgtggcggatagcgaacgcaacgcccgccgcctgctggcccgtgattacgtgttgtcctttgccggtcgtctgccggttaaggcggcagcatga

SEQ ID NO: 432594 - DNA, 264 bp, Serratia marcescens
atgaacaccctggccgaccgctattaccgcgatacccattaccctatcccgcatgccgattttctgcgtctccagcatgcgcacgccaccggcgtgctgttcctcgacctgctggacaccctcgacctcagcgggcagcgccccgatgccacgcaacaggcatcgtttgcctcggtcattgctatgttgaccgaccagctcggccacgtcgtcaacacctgtgaatcccaaatccttgcccgcatggaggccaccgccgcatga

SEQ ID NO: 432595 - DNA, 336 bp, Serratia marcescens
atgaacacccaatcctgtttaccgattgaagtccgtaccgccgttttccgccgcgccgtggcgcaggcctatctggacacctgcgccttttaccgggtgagcctcgggtacacgctggacgagctgcagatgacgattgccctgcgcctggaagggcactttgtgcgtcagtacggcgcagaggacggcatggacatggcgtgcaccatgctgagcgacatggtgcagccggacgttctggtggccgcgccgcgcctgaccgcgcttgggcaaaagatgatggacgagctgtgctgtgagcgcctgtcggcggcacagcacgcgaccgtacactga

SEQ ID NO: 432596 - DNA, 264 bp, Serratia marcescens
atgaacaccctggccgaccgctattaccgcgacacccattaccctattccgcacgccgattttctgcgtcttcagcatgcgcacgccaccggcgtgctgttccttgacctgctggataccctcgacctcggcgggcagcgccccgatgccgtgcaacaggcatcgtttgcctcggtcattgccttactgaccgaccagctcggccacgtcgtcaacacctgtgaaacccaaatccttgcccgcatggaggccaccgccgcatga

SEQ ID NO: 432597 - DNA, 933 bp, Serratia marcescens
atggtcagccaggttctccccggcacgcggcggcgtgtagtccacgctgttgacggtgcgcagccagtgctcttgccggtgggcgctaaactgcccgctgacggtatcaaacaccccgttacgaaaaccaatcaaccggcgggccgggtcacccatctgcggcaccatcagcttgagggtgtccagaatgctgttgataccggcggcggagaacggcgcgcgcaccttctggaaaagtgcggcaatctcccggctcagctgtcgctgtggcagcacctgccaggcgccgcgcgtatagcggcacagctcttcccccaccggcggcaccgccagggtattgccgtagtgttcagccagcagctcggccttctcgctggcgctcatggccttcaggtcagcatcgctcagcgtgtcgaacgggctgggctgcggcggctggctgaacgcctggagctgggcgcgcgtgggctcagcaccttcccggccataaacgtcgttccagtcgccttccgtgggcggcagcgccggagtgccgccgatgagtgtggccgcctcggcggcgcgtgcctgcccggtgccgctgcggtcattatcggccgccagcagcaaccgtgcatccgggtaatggctgcgcagctgctctgccaccgccgccaggttgttggcgctcagcgccacgcacaccgtctcaccgctcaggcggtgcacggtgagaccggtggcgtagccttcggtgagccagataaccgcgttgtccggcccattcaaggtgtggcaggcggctttcacctgcccgcctgccagcatgcgcttgtcaccattggcgttaatcagctgcacgttgaccacctcacccccggcattatgcagcggaagcaacaggtcaccgggctggaaggtgataccgccgacgcgcagcggctggccgtgtaa

SEQ ID NO: 432598 - DNA, 264 bp, Serratia marcescens
atgttgaccgtttccacccccactccatctaccccgtcaccggtgcttcagaacggctacaccccacgcgagcgctttatccgcctgccggaagtgctctacaccactggtctgtcccgctccaccgtgtacgagatgatgagccgcaagcagtttccggtacaagtttccctcggcggtaaaaatgtcgcctggctggcctccgaggtcgagcagtggatggacgaacgtatcgccaaccgtcaccaggggagcgctgagtga

SEQ ID NO: 432599 - DNA, 1518 bp, Serratia marcescens
atgagtagccaaaacaaaactttcgcccaatggcggcaacaggccgccgggctgcaaattgaaggccgagcctatatcgccggtcagtatcaggattcagccgatggcatgaccttcgtcgatgccagcccaatcgacgggcgcccgctggccaacatcgccgattgtgatgaagccacggtcaatcacgcggtggcggccgcggaacaggctttccaagccggtgactgggcgcggcgcacgccagcgcaacgtaaagcaacactgctgcgactggccgatctggtagcccagcatcaggaagagttggcactcttggaaagcctggataccggtaaaaccatccacgaatcgctggatatggacatgcaggatgtgcagaccgccatccgttattacgccgaagcgatcgacaagatcgccggtgaaatcgccccgactggcgacgcgttccatggcatgatcacgctggcgccgctcggcgtggtggcggtgatgacgccctggaataacccgctgatgatcgcatgctggaagatagctccggcgctggcgatgggcaactcggtggtattcaaaccgtcggagaaagcgccgttgaccggtatccgcttcgccgagctgacccgtcaggccggtatccccgacggagtattcaacgtggtaaccggaggcgcgcaggtaggcaaaacgctggcgctgcacccccgggtgcgcgcaatggcgtttaccggctccacgcaagtcgccaaacagctgctgatttacgccgggcagtcaaacatgaaacgcaccttccttgaaggcggcggtaaaaatgcgcacatcatttttgccgacacgccggatctggcacgcgcggcgcgcttcgccgcgctggggttctgcgccaatcagggggcggtgtgcgcttccggcactcgactgctggtgcaatcttccatcaaagctcagttcctggccttgctgttggaagagttgaagaaatggcagccgggccatccgctggatccggccaccgcaatggggccgttgatcgatgttcaacatcaggccaacgtgttgcgctatatcgaatcggcacgcgctgaaggcgcaagcatcctcagcggcggccaggccgacaataccctgctgccgggagggtatgtactgccgcctacgctgatcgacaacgccacgccggagatgaccgcctcacaaaacgagatcttcggaccggtcgcctcgttgatgacttttgaagacgaggagcaagccattcaactggcgaatgacagcgaatacggcctgaccgtcggcttctggacgccagacatcgccaaggtgcaccgcgtcgcgcggcaactcgaggccggtaccgtgtgggtcaaccattttctgacacgcgacattctttcgccgttcggcggtttcaagcaatccggcatcggtcgcgatctgtcgctgcacgccttgccgcagtacggcgaaatgaaggccacatggattgcgctgcaagatatcgccgcccattga

SEQ ID NO: 432600 - DNA, 798 bp, Serratia marcescens
atgtctctggttgacagcttacttaaaaccctcgatttctctccgcgcggccaggtgatcgctcgcgaagccgacgcctggggcgaaatcatcgtttccgatcacaaggactaccgcacgctgcggtttgacggcatctgcgaacagagcaagatgagcctcagcaaccccgcgcagccgatccacaactacatcaaagcgatgctgatggcggtagcctggcaaccgccggcctcggcgttgattttggggttgggcggcggcagtctgctgcgcgcgttgcacgcgctcgatccggcgatgcgtctggacgtcgtcgagctgcgcgctgcggtgatcgccgtcgcgcgccgctattttacgctgccggccaccgacaccatcagcctgcgcaccgccgacgccatggacttcgtgcgcccgcccgtcgagacgcgctacgatctgatcttctccgatctctattcggcgttcgccatggatccgcagcaaggcacccagaccttcctggaaaactgcgccgcgcggctgaacgacgggggctggctggccgcttcacccacatggtattatcattcagttatcattctctggaggatcctgatggaaaagaaaacggcgcggctaacggtgctgattgacccggacaagaagaaagccctggaggaactgtgcctgcaacaggacgtcaccccttcccaggtggtgcgccagctgatccgcgattatctgcacaagcatcaggtggactatcccagccaaccgactcacgccaatccgcgtgtcgaaagcaattga

SEQ ID NO: 432601 - DNA, 645 bp, Serratia marcescens
gtgaaaagcattgccccttacctcgactacatcaatctgatgacctacgacatggcttacggcacgcagtacttcaatgccaacctgtacgattcaaagcgttggccaaccgtggcggccgccgatcgctacagcgccgatttcgtggtcaagaattatctggctgccggcctgaaaccggcgcagatgaacctgggcatcggtttctacggccgggttccgaaacgggcgaccgaggcgggtatcgactgggacaagccggacgccgccaaacatccggtgacgcaaccttacttcagcgcgcgagaaaccgccctgttcagcgcgctggggctggatctcagcaaagacacttactttaaataccacgatatcgtcagtaaattgctcaacgatccgcagcatcgttttcgcgagcactgggatggcgacgccaaagtgccttacctgacgctgcaatccgccgaaggcaagccgctgttcgcaatctcctacgagaatccgcgttcggtggccatcaaggccgaatacatcaaaagtcagggattgggcggtgcgatgttctgggaatacggcgcggatgacgacaaccggctggcgcagcagctggcggaatcgctggggattaagggcgaaaaacggtga

SEQ ID NO: 432602 - DNA, 441 bp, Serratia marcescens
atgaacaagttaatcacaatcggattggcaactaccttgttgggactctcgcagtcatcgctcgccaaggacattcaagatccggtggcatttatcaaacagatgccttatcaccaggtcgtaaaagaactggcattgtcacgctgcctggcacaggtctccgattcggataaagcattctctcttgatgcagccagaacagcgaatgcgatgagagaatggatgccattcgatatcgaatcaggtgatgagaaaatcaatgttctcatcgacaaatataaatccagaatcaatgagtttcacagtgaaactaaagacaagagtcaaggcgtcaccttgaactgtctgcggttgtaccatagccctgaattggacaagctttcccgacagctcatagcaggcaatccagatcgcacgtggaatcaagataacgcgaaataa

SEQ ID NO: 432603 - DNA, 372 bp, Serratia marcescens
atgatcaccttctcccccgccattccgatcctgcgcatttttgcggtcgataaggccaaagagttttatttggactttctctgcttcacgctggagtgggagcaccgtttcagcgaagatctgccgctgtacatgcaggtgacccgcgccggattgacgctgcacctgagcgaacactatggcgacagcacgcccggcgccgctattttcatcccggtacacgatatcgacgcgctgcaccgggagctcacggccaaaaactaccgctatgcccggccggggttggaggttgtcgactggggcaaagagctgaacctgaccgatccgttcggcaaccgcctgcggttttgcgagcagagtggatcggaatga

SEQ ID NO: 432604 - DNA, 861 bp, Serratia marcescens
atgaagctacatcagttaagcttattctgtgcaattgtcgaaaatggaaccattgccgctgcggccaagaagctgaattgtgttccatccaatatcactattcggttgaaacagcttgaagagcagttgggggcgaagctatttaatcgagaaaagaaccgcttattgataacgccacaggggcgcatactttaccgcagtgctaaagacttattgttgcgtgctgtcaatattgaacatttattcaatagaaatactgcagcaaacggtgtttttcttgtcggtgctctggagggggtgctgtcctctcacatgccttcatacatcgtcaatcatcgaatgaaataccccaatatagaattgcatatcaggtctgataactctctcaatctggagcgagagttactcgaaggggcactcgatctcatcattaccgatggtcccatagagcatccgttgctttccagcacgttggcgtttagagagcgattaatgttgattgtgcccccgtccttgccggcaaccatcgatcttggctttttggaaacactggatctttatacatttagaaaaagctgtagctatcgacacctgattgaatacctactttcgagtaaaaaaatcagacctaatatgatattggagatggagtcgtatgatgttatcaccgcctgcgtaagtgccggtttggggttttccttggtaccggaaagtattttagaaaagtgctttccaactcagagtaaaatacaggccatggagattcctgagcttgaaaggaatgatttattttttgtatggagaaagagtgatgacgcatcaatgctggtctctgactttgtatcaggtgtgttctgctag

SEQ ID NO: 432605 - DNA, 816 bp, Serratia marcescens
atgaatatgttgatcgagcagattcgcagttttttttacagccgaagatgtcgcttgaaacccactgattttggcattttggatgatggaaagaatagacgagtcaaaggattacgtagagaggagttggccgagcaggcggggttgagcgtagaatattataccaagttggagcaggggcgagtgagcaacccttcgttgcagacgctgtccgttctggcggatgtactcaggttagacgcgtcggaacggcaatatttgtacttgttgtttaaccgagagcggcctctttcctctacggaaatatattctgacgcagcaacgctgcagttttatattgagtcctttgtgttgacgcctgcctattttctggatgtacggcttgacatcataagtccgaattttttagccagaaagctgattaccggcacagatgaaagtgtacatgaattgaatctggcgcgagtggtttttctggatgatgaggcaaagaaccgctacgccacctggcgtgagaaggctgaagatacggcggctatgttgcgttttgcgatagctcttttcccacaggacacgtatctttttgaactgcatgcggagctttatgaacgaagcgatctgtttcgcctgctctggaatcagcatcgcgtcctggaaaaaaccaacgggtatcggccgttgttttatccggatggcacacggcttgaaacttcttacgagacctttacgcttaaccaaaatcctttattgcgcctggtcgtctattttcctaatgatatggcgactcgcgaacgccttgctgccttgcaacaatag

SEQ ID NO: 432606 - DNA, 171 bp, Serratia marcescens
atgtatcaatttaatcattacacggccaaagagttggcgctagcctatttagcgggaattaatcataaactgactccggatgagtttatattggaagtgaaacggcaagagcaatgcttcagcaaaatattaaacaaacaatatcaatcagatgttgttataaccagctga

SEQ ID NO: 432607 - DNA, 555 bp, Serratia marcescens
atgtctacgttaaataaacgaatccttttcattacctataacatcggtgtggaaaaagatgaactgcttatcccattacgtcgccttgccgctaaaggtgcagaggttgtgcacgcgtcggcggaaagcttacgcgtgcagacttttgtcaacgataccgataaagacgaaattgttaatgccgatcgactgctcagcgatgaaattaaaaccgctgatttcgatgcattagtcatcccgggcgggacggtcaacgccgataatattcgtatcgacacgcacgccatcaggttggtcaacgaattcatcaccgccggcaaacccgtagcggcggtttgccatgccccctggctgctggtcgaagccgaccgcctggcgggcaaaaaactgacgtcctaccatacgatgaagaaagacctgaccaatgccggcgcccgctggagcgacgcccccgtggtccgttcggacgaaaatggctgggtattgatcacctcaagaaacccaggggacctggaacctttctccctggcaatcgcaaaagaattaggcttataa

SEQ ID NO: 432608 - DNA, 1035 bp, Serratia marcescens
atgatgaatgaagcattcaaagcgcaacatgccggttccgaacccggttttcttaccagaaacaacgtgggtgaatttaaaacccaggactgggatgagaatgctcgtctgcaggtcactgattatgttgttgaacgcatcacctttgatagccaaggggtggaaattgtcggcaatctcttttcaccggcaaaatcagcttaccgcacccccgcaatcgccgtgatggggccgatcagttacgtgaaggaacaggcaccgttgcaatacgccagccgcttggtcaaacacggttttaccgtactgacctttgaccctcgcggttttggcgaatcgtcaggtgaaccgcgcggctatgactggggcgccaataaaaccgaagatttgaacgcagcggtcgcttatctttcgcagttggacagtgtggatgaagaaagcatttactcgcttgggctgtgccaaggcgtcaactggaccattgatgcggtcaattccaatccgttaatccgcgccactgccctgatcgcagggcagtatttagtgccggcaacctggatgctctaccttcagtcgcaagaggcgatcgacaatcgcgttggcatggcgcttaaggcccgtgaacgctttgagcaagccggtgaagtagaatacatcccggtggtcagcacagaagataaatcggcttatctgaccgcggaagccatatacaatttctacgctccctgggcgcagcatgacgttctggccaaccaccgtggccgctgggagaataaaatgactcgcatgagcgaagcggggatctgggcacgagacagcagtaaagcgatcgccgatctgcaaaaacccgtgctaatgatccacagtgaacgcgccgcgagcggagaacaaatcccgcgacagctgtttgacagcattggcagcagcaataaacagctagtctggtttggcggcagaaaccaactccagttctatcaggatccgctcaccgttgatgcagcagtaccgcacgtcgccaatttctttaacaagttttaa

SEQ ID NO: 432609 - DNA, 576 bp, Serratia marcescens
atgtcccacccacgcaaaacaaaccaggaaacgctggcgccgctggccaccctttatcaggaaaccaaaagattacagcgtaaacgcggcaactggtcatacgtattcgaagacgctgtcgggctctacgacaccgttagcaatctgtgtcccaccaagatactggagttaggcacggccatcggctttacctcatgcgttatggcgctcgcagctcctcaggcagcgatcgacactatagataaagatgacgtgaacgttgaacttgcccgacacaataccgcctggcttagcctttcatcgcggataactgtgcaccacggcgatttcaacaccgtcatcgatacgttagacacagaatacgattttgccttcttcgacggttttgcaccggaaatcacactgctcaagaagatacatcatcgtctcgcatcacagggcgttctggcctgttccaatttatctctctgcaacgatgccagagtcatggcgtttttgacttctgccgaaatctggcgcgaactgccgcctatcgagcaagccaacacgcgcatcttcagaaaacgctccggatga

SEQ ID NO: 432610 - DNA, 738 bp, Serratia marcescens
atgcaaaaagttattattcataaaatgctggagtggctcgaagccagcctgcagagtgacctgacgctgaatgctgtttctcagcgcagtggttattccaaatggcacctgcagcgagagttcaagaaagtcaccggcaaagatttagggcattacattcgcgttcgccgactgtcaaaagccgcactggcgctgcgcttaacccgtaactctatctataatatcgccaagcgatacggattcgacagtcagcaagctttcactcgtgctttcacgcggcagttcggcctctcccccagccgttaccgccagcacgaaaaatgggacatgagcacgctgcatcccccattgcaaatcgacagcggcatagtgccgcaaactgaatttatgtaccttacccaccggcgtctaagcgacctggccaggcgttattcctcgatttcatggcgcgttcatcctccggcactcgacgcacctcatatacggatgatgttgtcatgcttctgcagcgaaaaatccgctgtaacaccgggaagatatgccgtgttccgttacgccgggccccacaataagctactcgatttcgtcctctcgctgtatgactcaattctgcccctcaacaggttaagtcgcagggaaggttcagatctcaaactggtttatgctgaacaggcgacaacgagcgatcccggcacttttcgctgcgattatctgatcccgatcatcaggctggggtaa

SEQ ID NO: 432611 - DNA, 732 bp, Serratia marcescens
  misc_feature (614)..(623): n is a, c, g, or t
atgtttataaccaaagtcattgaggagctgctcgcctgggtcgaagaaagtgggttcaatgagaaactcactgttgagatgctgtcagaaaaaagcggatattcacgcgggcatatccaaaaagcgtttaaagatgaaacagggatgactttcgggagctatgtgaggggcagaaaactcattcgcgccgcatttatgttgaaagcgacgaacctctcgatttccgacatcgttaaagagcttaattttcaatcatatcaatcatttgaacgagcatttcgcaagcaattcagaacctcgccgatgcagtatcgcaaaagtaaatcgtgggacgtgtcctccgccatcccattgttgtttctcgaaggcattccagagcatcgctatgtacacctgccaaaatttttcgacgattcaggtgatggcgttgatgcagagatatatcacttccatcctgccgtttccgcgctgcgactggcggcaattgataacatgaaaaaaacggatagcggcatgattaactttttcaattttggcgcgagcaccaaaaaagagaattacgtcagcatctatttgaagacaatctatattgcggaagaagacagtcttggcannnnnnnnnngcggctattccttgtaggggctagaagacagtcttggcaacgtgcttgcctctctggccgacgcccaggaaaaaaaagatatgcaactttttgcagaattcagttttga

SEQ ID NO: 432612 - DNA, 1167 bp, Serratia marcescens
atgaaaagccagaatgacctaacaatgccagagcggcgcaagctattagtcgccggggccggtattgccgccgcctcgctgattccgcacgtatcagcggcgagccaatcctctcaggtcgattcatccagacaacccagccaacgcaatactgctccgggcaaacgtaaactcgggaagctggaagtttctgccgtcggtctgggcgtgcagaacatgagtcgcaaatacgacacttccgttccctggcgtcccgagatgatcaatgttatccaccgggcatttgatgaaggggtgacgtttttcgacgcagctgaagcctacggcccgtttgaagtcgaaaaaattctcggggaaggcgtcgccccgttcagggacaaaatcgttatcgccaccaagtttggctggaacattgaccaacagtcggggaagcgtctgccgggccttaacagcagaccggagcatatcaggcaggtcgtcgacaatatgctcaagcgcctgcgtaccgatcgcatcgatttactgtatcaacaccgggttgatccacagatccccatcgaagatgtcgccgatgtggtgaaagatttaatggatcaaggaaaagtcctgcactggggtctgtctgaaatgggcatcaacacgttgaggcgcgcccatgcaacattatccgttaccgccgtgcaaagtgaatactccatgctctggcgcggccctgaaaaacaggtgcttccggtgtgtgaagagctgggcattgggttcgtgccatggagtccactcggcgtgcagtttttaacgggctggattgatgagaatacccggttcgctgccggtgatttccgcgcgacagaagcgcgtttctcgcctgaaaacttgccacacaacttacagctggttgaactactgaaatcctgggcaatacgaaaaaatgcggcaccgggacagattgcgctggcatggctcctggcgcgtaaaccctggattgttcccatccctggcaccaccaataaagaccatatgctgcaaaacacagcggctaccggcgtatcgctgacttatgctgagatgaccgagctcacccgctcactggatgccattactatccaaggtcaacgtctgccggatgccgtgcaggtttattcagatgttgaagcaccgatgaaaagttaa

SEQ ID NO: 432613 - DNA, 255 bp, Serratia marcescens
atgaaaaatataataacctttctaatagtatccattgtatcggtaggagtacatgcagatactttgaccgaacaggaagagcaagatgcaaaagattttgcacaagcgctaattcaatcgaagggatatgattgtgataaagtaacaggattcagtaattccaatttctcagggcgtgttgatattttctgcgatgattatcaccactataaaataaccaaacccggtggccattggaaagtagaagccaagtaa

SEQ ID NO: 432614 - DNA, 1011 bp, Serratia marcescens
atgctcgtaaccgcctttcatctttttcaatggtctgaatctttaggcctgccgctaccatttggacttgatgtaatgggtatctttggaaacgggtggatcggcgttggaatgttttttgtcatttcaggttattgcatggcaagctcaagtggaagggcatttttaggcggtttttcagcaaaaaaatatggcttatattttttaaaaagatacttgcggatagccattccgttttatatatcaatagttttttggtttgttttaatccgtggttttggggttgcgataaaaccaacgggatttcatgatataatatctcatgtcttgtttattcacaacttctcagaggaaacattcttctcaataagcggggtttattggtcgctcgctgttgagatgcaattttatttaattctccctgctctggttgttttatttaccactgtttttggaagggtgcttttgctggtcagcgtatttataattagcattttggttaatctttacagtgaaagccaattgttaacgtggggtattccatcttacctttcacttttcgttttggggtggctttgctcaatatatcaaagcgaaataggttcatttataagaaagttgaacgctcaatggatattagtcgcggcatttgcattacttcttttctacaaaggacatggatttaacaacaaggttaagctgtatgaggtgctgatttcatcagtttttgcattgttaatggtatcgcttattaatcgattctcaggaaagagtgtgcctaaagttatgcgcagtgtagcatttgttgggaaatgttcgttttctatttatttgtataactatattttctggtcgctggacagaaccgacttaaccccggttaaattgtttgtggcttttgctttcgtgctaggatttggcatcttaatgtatctgtccgttgaaagacaatcagagaaactaaggagaaaaaccataagaaaagcagaggttaaattcgcagtgcggtaa

SEQ ID NO: 432615 - DNA, 1446 bp, Serratia marcescens
atgattttagatgctgttatttttgatttagacaatacactggctccaactgataaattagaggatattcgtgaaaggcgggcatatcatgaaatgactcctgatgtacttgcgagaataaaaccttacaagaagacagtggaattactagagttcattaaggaaagaggaataaaaacagctatagtaacgaattctggtagggaatatgcagagatacttttaaaacacttaaacctccctgccttcgatgctctagttacttatactgatgttggtagcgccggaatgaagccaagtcctaaaggaataagtttagctttggatttgttaggggtcaaagcatctgaaaaagtaatatacattggtgatgattataaagatattgtcgctagttattatgctggggttaagccaatcgtacccacttgggcatctaggaagccggtatctcaagttcccgctgctgtactcagcaccgacttcattaaagatgaatgtaacgagtgtgataatattgtcctgttagcagagttgagtgcaaagctaaatactttcgactttccaagaaaacgcttatatttcgttccactggatgaatctgccaatgttataactttaaaggatgagttggctacaatttgtcttgggagatacttttccaagaaaagtcttgttactgtagaaatgcatgataagcatgcattgtcgttagaaatagcaagaaaagacttggttgagaattatacgcctccggattactggagtgatatacttgctcatgcggttgataatataccgcaatttttcgcagcgaagaaaccttttgatattgttactgttattccgtctaagaaggaaaaaaaacaaaggctcgagcttgtattggatggcgcagctggtaagagtaaggttggctctgaatttatacccgatttatttgtttttgaagagggtgcgaaaaccttaaaaactcttccacgtgatgagcgggctatagaaattgaggggagtttatttctaaatcctaaatatgaaggtagactaagaaataaaaccatcttggtttttgatgatgtaattacgacaggatcaacattacagcgtgcttattctatattaaaagatgaaaatgctaagcataccctgggtgtttgtttggcaaaaacagttagcatttctgaaacagaacgactttgccctcgctgttctagccacatcctaagacttcgtaagaactcgagtactgggattcgcttttggggatgttctggttataatgatgaaaatgaaaaatgtgattatacggaagatgttgttataaagagttgtggtaaatgtggtagagatatggtaagaaaactaaatcgtaaaaagggtacatacttcctctcatgcacaggttggaatatggaacccaaatgtaataactctgagagcgaatga

SEQ ID NO: 432616 - DNA, 987 bp, Serratia marcescens
atgcaagtaatatcgccggatacgcaaaagatcttggctctgagcgccctacaaggagtgggcgctaagacattaaactcattagttaagctgaaagattttaaagatatgcctctattggatattgcaaaactattgaatgtaaccgatatcacgataagcatgattgacaattgtgttaattttgctcaaaaaaatatcgatcttgctaataagtatgatcataaaataatctctttttttgatgtgaactatcctcttttactaaaaaaaacagatgatgctccagcaattttatattgtgccggagatgtcgagcaattaaacaaaaaatgcttggccgttattgggacgagagagcccactgaacatggagttgttattgcgagaaatataacagaatggttcgctagttcaggttggaatatagttagtggattggctaaaggagtggataccattgcacataagacgacattgcgtagtccttctaaaacaattgctgtaatggctcaggggttggaaaaagtataccctgcagaaaataaacacttggctactgaaatagttactaatggtgggctgttaatctccgagtatccctataacgctagtacttacaggaataattttgtccaacgtgaccgtattcaagctggcttatcatctggtgttataatggttcaatcagatataaatggcggtagtttacatgcctcgcgagccatattaaaatatggtcgctatttgatcgtccccaatcaatctgatagagatattaataatagcgagccaaaaattcaagcaaatatgctttttagtcgcatgaataaatccgagttgcttgatattttaaaaacaaataaatttgacattagtaagataattattatgaagaataaaagtgagtacacctttgtagatgatatattaaaaaatatagattcgaacgaaggctcttcaccgaatatgggctttggtttttga

SEQ ID NO: 432617 - DNA, 612 bp, Serratia marcescens
atgtgcctcgctgttagagggaagaacgaccggatacttcagtttagactggtactgttttcagggaggagatcatcagcaatgaaattcagcgatatatgggatgaccacttacatgttgtgcaggagaaaactggtgcaaaattggcattacctctttctcttcgatgcgatgctttgaacacatccttgcgtgaggttatctctcgctgccgagattatactgtcagtcagtatcttgtacattacttccgttcaacatcaatggccttacgtggagccaaagtgccaggaaataccctgacaaccaactttagcaaagctagggataaaacagatatcgattggggaaacggtacaccagctacatttcacgaacagcgttcactatctgaacgattatataataaccaaggaattgatactatgaaactactagggcatagaaatcgctcccaaactgataaatataacgacgacaggggtaaaaattggattatcattacttgttttatcaaaaaccaaagcccatattcggtgaagagccttcgttcgaatctatattttttaatatatcatctacaaaggtgtactcacttttattcttcataa

SEQ ID NO: 432618 - DNA, 534 bp, Serratia marcescens
gtgagtgttttttactctttggataggcttggcagttttcagccaggtatgaggattgatcttcaggctacatcattccacattacaaaaatgcagggctttgctcagcaaaggtttggctcgggcgttagtcgtcacggaaatgcttttgctctcaatcctaataccagagttttcaacgattcttcatcacaatgcgagcttgtctttgaactatatcgccgagcacattatccaagcaaaccatcacgctatctatccatgtttggatgcgagaccgtgagggaagctgcatactttcgggggcaaacccaatgcggcattgatgtcggtattttcgaagttcattcaaacggaggcttccaccgcgccgacatgaacctgcttagctcaaactcccctccgcttgagatggagtacagagctgagctctattggtcgggaaataccgaagaaatgtatccggggtacaagcctttttgggaggttataatccctctgcctgtaactatcggtgaaaaagttaacgaatag

SEQ ID NO: 432619 - DNA, 138 bp, Serratia marcescens
atgacgacttgctggggtaccggcggccttctgctgcaggagctcaaccacagcggtaggcataggactattcccacatttaatgcctttaagtgcatcacgcaatttcctctggtcggtttcctcgcactggcgtag

SEQ ID NO: 432620 - DNA, 525 bp, Serratia marcescens
atgacaataagtgattctatttctatcgggagcttaattgtttcaataggaagcgttctagttgctattgctggcgcattttatgcttacaaagcatacagtgcagccaaagagatagcatttccgagcaagaacgctcatttgaaaactcaattgataacgccttttagtaatgaactgacaagccttaataagttcatttcgcaaaacatcgaccgtaaagtttacttaaactttcgcgtggaatcgcatcaagcggatttcgatgagtacacttatcctgaaggtggtagtaaaacgacaacattatcagtttggctagagtgttttgagccgttgaatgaaggtgaagagccgtcaatagcaaaatgttcaagcttatgtctaacctttgatggaaatgttgataaacatatcttttgggatatagggagtcatcttgtaaaaggttatttcaacataattggacatggtatgaagcaaggacattatggagctgtattagtacccgttaaaatctcgtaa

SEQ ID NO: 432621 - DNA, 633 bp, Serratia marcescens
atgaatgccttaacggtcatgtctgggcctccggattttaacgtaacaatatcgcctgctttaaaagcatcactcataccttctccttttaggttggtacaaatggtactcacagacaaacaagaaatgttctgtcgcgagtacctcatcgatttaaatgccacgcaagcggctattcgggcggggcacagcattaaaacagctaaccgcactgcgtccgaaaacctgtcaaaacctgacattcagttaaggatctctgaactgaaggttcaacgcaatgatctggttggcataaatgcgacatatgtcctaaatcgcttggttgagatagaccagatggacgttctcgacatactcgacagctctggcgaactaaaacctgtgtctaaatggcctaaagtttggcgtacaacactttccggcctagatgttttagagatggcttcagaaggaaactcggcggcgattatcaaaaagattaagtggcctgacaaggtgaagaatcttgagcttcttgggaagcatatcgaagtaaatgcattcaaagagatggtagaccacaagtcatcaggtggaaccatgactccaaagcccaccgtgattcaacccatccccgttgagccaaaagcatga

SEQ ID NO: 432622 - DNA, 1101 bp, Serratia marcescens
atgaatggcgaagctggagtaatcctttgtgctcgtgagttcatgaactcactggaagagtcgagcatgcaggaggttaagcaggcgatcctgtcagtgccatggctagcagccaatttcgatattggtgaaaagtacatccgaaccatcgataagagcgtgaattatgtgttctgtggtctgcggcataacctcgacagcatcaagtcgaaggcgcgtattttgctttgctgggttgatgaggctgaatcggtcagcgaaatagcctggcagaagctgagccctacagttcgtgaggaaggctcggaaatttgggtgacgtggaacccagagcgcgacggtagcgccactgacaagcgtttccgcaaagatgttggcgatgactgcatcaccgttgagatgaactacacggataatccctggttccccgatgtgctggaaggtgagcggctgaacgatgaacgccgtcttgactcggcaacatacgcctgggtgtggaaaggggcctacctcgaaaactccgataagcaggtacttgccggtaaatatcggattgctgagttttccgacagcctctggaaagaggcggagcgcttgttcttcggtgcagacttcggcttcgcaaaagacctgaacacgttggtgcgttcattcatcctgcataaccgcctctacatcgaatatgaggcatacggtcagcatactgaacttgaccacatgtctgagctatacgacaacgtccccggcgtgcgtgactggcccattaaggccgactcagcgcgcccggagacaatcagctatctcaagcgacagggattcaatatttcagctgctgaaaagtggcagggaagcgttgaggacgggatcgctcatctccgtggctttgacgaaattatcattcaccctcgctgtaagaacgtggcgcgggaggtaaggctttggtgttacaaaactgaccgcatcaccggtgacgtgttaccaaaactggcagatggcaatgagcactgttgggatggtatacgctacagcctagatgggtatatcaaacgcaaatctcagattattggaatgatgatacctaagcgtttacaaaatagatga

SEQ ID NO: 432623 - DNA, 630 bp, Serratia marcescens
atgcattcgcgcacagattattcaaattatctttatcattggattaaaccatctaaaccatttaacacccaagaagaagcctacgaacaagcttataacataatggaggaaatttttgacgctggttacttgaaagcttcaggtagagatacgtataagaaaattgaaagtgtttgtttcacggaatcaccagcagagataatgaaatcacagaattcgaagtatcaacctttcgggtttgcatttttaaaatcggatatttttgatatgggaggccggcatgtcatataccagacgaaagatgaggccaaatttctgccagcgtcattgcactggcgacatgttacctacaatccacaagatgtaggacctagtaaaccgaatggcattgatttcacatgggaaagggagtggcggcttaatgttaagaagttggacattcttgattgtcattcagtaatcctacctaacgaatattggatagaaaggctgaaagaggacatacaacgttggaaggaatttcccgcaagaatgtggcgagatattggagttagtactgatccggggccatacccgaaatatatccgagactatatagagtgttttaatgctttatacacagaaaaatag

SEQ ID NO: 432624 - DNA, 522 bp, Serratia marcescens
atgactgacaaattaactctcgcagtcaaccatgcgttgaacgatgcgcggatggcgcacgcccgtatggggctgctgacaccaacaatggcgctggatagcaaacgcagttccgcctggtgcgaatacggctttcctgagcagatcacttacgacaacctttattcactgtatcgccgcggtggtattgcgcatggcaccgtggaaaagctggtgggcaaatgctggcagaccaacccggagatcatcgagggtgataaggccgacgagaagcgcgctgaaactgcctggcagaaaaaactcaagccagtattcacgaaccggttatggcgcgcttttgcagagactgaccgccggcggcttgtcgggcgttactcttgcattttgctgcacatccgcgacaacaaaccatggaataccgaagtaaccagaggccgaggcctcgaaaaagttacggtagcctgggctggttcactaaacgtgggcgagtggggtcagtccagaagtacgaaattgttctga

SEQ ID NO: 432625 - DNA, 594 bp, Serratia marcescens
atgggcgcgtgcgcagatatcccctacaatcacaaggacatagtcagacttgcactggctatgtacgatcacagctatttcttctcactccgccgtcacctcaacattaactttagccgagacttgaacgggagcggaatacagggcctattcatcacaaaacaaagcgatgagatggagttaatccaagtaatttttgactgcacctacagcaaaaatgatgatttcctctacgaagctgacctcattactgatcaacgcaaggactatgagcccactgttaacaagggcaagcaccgattcgttgccaaaaaggccgagctaaagatcgactggaatagtgatgaaatccacgagtggagatcggatattgaacgactcacgagatcgcacgacactcttgacgactggttaaagaacggctcggagatgttagtacgttgcgcctccggatttttttgtcgtaaacccgcaatcctcaccttaaacgacctcaaacagtatgttgcaatgggggtaactctagaagacctaaagactcgactcaagtgctcgaaatgtggcaaacgtggagccaaagtcacagtgttttga

SEQ ID NO: 432626 - DNA, 591 bp, Serratia marcescens
gtgcagttcacagcggataatggcctgacgagaccgtatagcccgttcagagaacagcgggatgacgatcggtgcagtgttgaaacgagaaagcacgaatgtagattacggtgctgcagatgcgaaaaaagcgccaaaaggcgctttttttctgaattggtgggtcgtgcaggattgattcggcctgtggcctcaccctgcgggcaacgctgcgcgttgtcgtatcgctgcgcgatgctcgaacctctacggctcttcatccttcacgactcggtaaactatgcctgcaagaagataaagtcagagttgggggcgcagaaacgaaaaaagcgccaaaaggcgcttttctctgaattggtgggtcgtgcaggattgattcggcctttggcctcaccctgcgggcaacgctgcgcgttgtcgtatcgctgcgcgatgctcgaacctctacggctcttcatccttcacgactcggtaaactatgcctgcaagaagataaagtcagagttgggggcgcagaaacgaaaaaagcgccaaaaggcgcttttctctgaattggtgggtcgtgcaggattcgaacctgcgaccaattga

SEQ ID NO: 432627 - DNA, 1512 bp, Serratia marcescens
atgtcaaccgcaacgccttcacgcctcgagatgcgcaatatctcgatcgccttcgccggtttcaacgcgctgcaggacgtggacttcacgctgcagggcggttcaatccacgcgctggtcggcgccaacggcgcgggcaagtcgacgctgatggcgatcctctccggcgcccacgatcattatcgcggcgagatcctgatcgacggccaggcggtggcgatccactccccgctgcaggcgcgccgccacggtattcacgtggtgcagcaagaggtcgacgtcgcgctgatccccacgctgtcggtggcggaaaacatcatgctggactggctgaacgaaccgggccactggctgaactgggcggagctgcaccgccgcgccgcgcagctgctgcagcaatgggcgttgccgctcaacccgcgcaggcggctggcggactgcacgctggcggaaaaacagcaggtgctgctggcgcgcgcgctgtcgcaccgctgccgttttctggtgctcgacgaaccgaccgccccgctcgatcgcgccgagagcgagcgcctgtttaacgtggtgcgccgcctgcaatccgaaggtatcggcatcgtatttatttcccaccgcatccacgaactgagcgacatttgcgatcggctgacggtgctgcgcgacggccggcgcgtcagcgaggacgccatgcgcgggctgagcggcgaacagatcgtcgagaagatgctcggtcatcggctggacgatattttcccgccgccgcgcccgccgcacgccgaacgaacgctgctgcaggtgcaaggcttgcgcgatcgccacaagctgcgcgacgtttcgctgcggctgcatgaaggcgaaattctcggcatcgccgggctggcgggagccggcaaaaccgagctgtgcaaagcgctgttcggcgccagcgccgtgcagcttgagcgcggcgaactgcgcgggcagccctgggcgccgcgtgcgccgcatctctcggtcgaacaggggctggcgctggtgccggaggaacgccgcaaagaaggcattttcatcgatgaggcgatcccgatgaacctgagcgtcagcgccgacgacagcttctcgcgctggagcctgttcagccggcgacaagagctgcgctgggcgcgcgagatcatgcagcgcctgaacattcgcgcctcgggcccgcaacagcggctggcgcgcctgtccggcggcaatcaacaaaaagtggcgatcggcaaatggctgcgcggcgacgccgaggtgctgatcttcgatgaaccgaccaagggcgtggacatcaaggccaagcaggagctgttcagcctgatcgacggcctggcgcgcgccggcaagggcgtggtttacgcctccggcgagttcgccgaactggttggcctgtgcgatcgcatctgcgtgctgtgggacggccgcatcgtggcggagttgaacgccgccgacatcgacgaagaaaccttattgctctattccaccggaggaacccctgcgtga

SEQ ID NO: 432628 - DNA, 756 bp, Serratia marcescens
atgatgagcaaacgtcacgttatcggcctgctggctaccacttcgctgctggcgggggctttgacccctgcggcgaatgccgccatcgcgctggatcgcacccgggtggtgtttgatggcagcgtgcagtcggtgagcctgagcgtcagcaaccagaacaagcagctgccgtacctggcgcagggctggctggaagacgcgcagggcaacaagatccagagcccactgacggtgctgccgccggtgcagcgcatcgagccgggcaagccgagccaggtgaagatccaggcgttgccggcggcgaagatgctgccgcaggacagggagacgctgtactacttcaacctgcgcgagatcccgccgaagagcaacaagccgaactcgctgcagattgcgctgcagacgcgcatcaagctgttctaccgcccggcggcgatcgcgccggaacgcaatgccgcgccgtggcaggagcagctgacgctgaccaaacagggcgacaagtacatcgtcaataacccgacgccgtattacgtcactatcgtcgatgcggccaggggcaaaggtgcggccagcccgcataattttgaaccgtttatggtgccgccgaaggggcagataccgttgacggtgagcgcctccagcgtaggcggtagcccggtgctgacctacatcaacgactacggcggccgtccgcaattggcgtttaactgtcgcggcgggacttgtacggtggcgccggagaaaaaatcgtcttaa

SEQ ID NO: 432629 - DNA, 1443 bp, Serratia marcescens
atgtcatatcagcgtaagcacaataccggctacatattgcgaatttgcggcatcgccgccttgggcggcattctgttcggctacgataccgccgtgatctccggcgcgatcgaagcgctgaaaacctatttcaatctcagcccggccgaaaccggttgggcggtctccaacgtggtgatcggctgcgtggtcggcgccttcgccgccgggccgctggcggcgcgctggggccgtaaaaaggcgctgatgctggcggcgctgctgttcaccgtttccgccgtcggcgcagccttggccccgaccttcacctggttcgtcatctaccgcatcatcggcgggctggcggtcggcattgccgccaccgtgtcgccgatgtacatgtcggaagtgtcgccgaaggacatgcgcgggcgcgcgctcagtatgcagcagttcgccatcgtgttcggtcagatcgtgattttctacgtcaacttcaaaatcgccagcctcgccagcgaagcctggctggtggaaatgggctggcgctggatgttcgcctcgggcgtcatcccctgcattctgttctgcatcctggtgttcgtcattcctgagtcgccgcgctggaacgtgatgatgggccgcgacgatcaggcgctggcgatgttgaccaaggtttccaacgccgcccacgcgcagaatctgctgaaagaaatcaaagactcgctgcagcaggatcaacagcagcggcatcggaagctgaactacggcgatgtgcgggtgcgtttcatcctgttcgtcggctgcatgatcgccatgctgcagcaggtgaccggcgtcaacgtaatgatgtattacgcgccggtggtgctgaaaaccgtcaccgaaaacgcgcaggaagcgctgtttcagaccatctggatcggcgtgctgcagctggtcggttcggtcatcggcgccatgctgatggatcgcatgggccgcattccgctaatgcgttacggcacgctgggcgccatcgccggcctgctgctcacctcgtacgcgctctacacccaggccaccggctatttcgcgctgttcggcatgctgttcttcatggtgttttatgcgctgtcctggggcgtcggcgcctgggtgctggtgtcggaaatcttcccgaaccgcatgcgcgcgcaggggatgagcatcgccgtcggctgcatgtgggtcgccaacttcgcggtgtcgcagtcgttcccgatgatcaacgaccacccttacctgttctcgcatttccacggcgccttcccgatgtggatcttcgccgcctgctgcctgttcagctactggttcatcggccgctatattccggaaaccaaaggcgtctcgctggaaaaaatggagcaggtggtgctggccaaacgccaccgccaccccctgcccgacggcaagccgctgccgctggaaaacggcaaatcctga

SEQ ID NO: 432630 - DNA, 165 bp, Serratia marcescens
atgattactgcgattaatgcatttaacagatgtaaggcgcatgcgttgacaatgttggtaattatgtattcgcggttcgttatgggattgtttaaacatcttcatatcatgataaccatgaaaaaaattgcacagaaaaatcctagtgaaaaatccgaggaataa

SEQ ID NO: 432631 - DNA, 1533 bp, Serratia marcescens
atgagattcaaggtgctgcctgcaggaaacatgccctctattgaacaacctagctgtgcctatttaatcactgataattgggatgactggtttgagttttcaacaatgtatacattggtttatatagacttaaacaaggtaaaaataactattggctctactaaaatcggccagattaatatgaccaaaggtcaaagcagaccaaacattcccgaaactttcgaaaaactagatgatgattttttctccgttggtcaagatgatagtttttacgaaacgttgaacgaactcggagaagatattcgaaatgaaatattatcctcacttaatgacattgctttaaatgaggatatctataataaagcaataaatgagcgagtcaccagtatatctcttctgagatccgtcagtcacacatctattaaaggacagtttcgccgacttgcgaacgggggggctcgactttcaaaatatacatttgcttataagtcacctgtaatgaaaggcactaactctgatcgcattaatttaagcttcgacgtaataccagagagtaatccaccaacaaatattcatgtgctaattggccggaatggtgtagggaaaacgcatttaatgaataatatgattagttcattgattgacgaaaatgcaaccccaaaaaaagttggtgaattttcatctaaagatcagttagctggtgagcttttctctaatgtagtatcagttacatttagtgcttttgatgaaacagaacctttacctgaaaaaaaagacaaatctacaggcattcagttttcatacgtaggacttaaaagagtaaaaaaaggtgatgagaaaaaccttccacccaaaagtcctgtaatattaaaaaatgaatttgtgagaagcatgctttcttgcatagctggaggaaaggttgagcgttggaaaagggccgttgataaactggagtcagacccagtatttgccgacattaatgtagcatcaatattaaataagcaagacgaaaatgagtttaaagatatagctgggagagtatttaaaaatttgagttccgggcataagatcgtattgctaactatcactaggcttgtcgagacaatggaagaaagaagcttagtttttttagatgagccagaagctcatctccacccaccattattatcagctttcataaggtctctctccgatttgttaattaacaggaatgcagtatctataatagcgactcattctcctgtagttctccaagaagttcctcgaagctgtacttggaagttatggcgtagtggctatttgtctaaagtagaaaggttagaaactgaatcatttggtgaaaatgtgggaatacttaccagggaggtttttgggctggaaaataccgattcaggattccataatcttcttaatgatgccgtaaataaattaggaagttatgatttggctgtgcaacattttgatgggcaactcggaattgaagctagaggtattttgcgggctttattttcaattaagagcaaacaatcatga

SEQ ID NO: 432632 - DNA, 840 bp, Serratia marcescens
atgaagaaacttttaaaaccgaatgatagcgcattagatgtatttcaagcatgcatagatcgcattcgcgataaagatttaaaaaggagacttgttgcatgctctcaggaaatacaagattcctctatagagtttgatgcaaaagcatcaaatgcacaattacatacaatcttacctaaagacaatattgccaccgttgttacagttaacgaaatgaaggccgtgtacacaaatagaatggctaaaaaattagctcctgggcgtatattttatgacaagttgatgtcaattcccgatcatggcagatgcccgctatgctctcaaagagtggtctcaacattagatcatcacttacctaaagcacattttccatcattggcagtttcaccttttaatcttataccagcatgtcaagactgtaacaaaacaaagagcgaagatatcccaagttgctcggaagaggaaactttgcacccatactacgatgatgtagaagcatttgtttggattaaggcaaaaatacgggaatctattcctgtagcgattgagttttatgttgacccacctgaagagtgccctccaattttagccgaacggatgaagtatcactttaaagcatttaaattggctgttctttatgcatcacatgcagctgaagagctggcaagcattgagtatattgcaaagagggttcacgatgaaagtggtagtatggggttaaaaaaatatctggcagaagctgcagcaggaaggcaatcagtaagtttaaactcttggcaagccgcattctatagctgcctctcggaaaatgagtggttctgtgaggttagatttagataa

SEQ ID NO: 432633 - DNA, 1683 bp, Serratia marcescens
atgaccgataaaaccgccattaacgcaccggctatcgccgtgctgcccctgttgctgatctggatggtggcgatcctgccgttttatcaccccaacatgggcggcggcggcctggcgctgccgcaaaacattctggcctggagcgccatggcgctgaccacgctgctcgtgaccgccagcgtctgccttggccgcgcccggctttcgctgacccctaccgcacgcctgttgctgctcggcatcgccgtgctggcgctgccgctgctgtatacccgcgccgagtggcgcgaagacgcactgtggcgctgcgccggtttgctcggtggctggctgttctatgtcgcctgcctgcagctgcgcctcaccacccgacaacgcgatctgttgctgtacggcctgctgttcgccgtaagcgttcaggcattgctggcggcgctgcagctgttcgcccccgcgctggcctgggtggcccccaacggccgccgggtctatggcgtcttccaacagccgaacgtgctgggcagctttatcgccaccgggctggctttggcgctctggctgctgcttgcccccctttccacgccgacgcggcggcggcaactcccgctgctcgccctgctggccgctttctccgccctgctggtgctgatccagtcgcgcgccgcctggctgggcggcgccctggcggcggcgctgctgctgtggcgttttgcccgtcagcgcccaggcgcaagccgctgggccggcggcgcgctgctgttgggcgtggcggccggtctcacggtgctgttcaccggtcttggcctggatagccgcgccggcctgatcgggcgggagctttccaacagcgcgcgcctgaccatgctgcatgacgtcagcgccatgatcctggccaaaccgctgctgggctggggctacggcggctttgaatacagcttcgcgcacttccgtctgcaggaaatgccctggcgagaagtgctggaagtcgccgggcatccgcacaatgaaatcctgctgtggtgggttgagggcggcctgccggcgctggcggggatcgttatcgtcctcgtcgccggcgcgctgttgctgaaacgcgcctggcaacgggatcgcgaacagccgggcggtgcgcgcgtcgggctgtttctggtgctgttgccaatgctggtgcacacccagctggaataccctttctatctgtctgcgccgcattggctggcgtttctgctgctgctggcgctgctggacggccaaaccggcgagcctcgcccactgccgttcgccaaagccctgagcctgccggtggcgatggcggcaatcggcatgttggtgatggcgatcttcgcctggcaagggcgcatggcgctcacccaatcggaacgaaccatgctggcctccatcgacagcatcgagcagatgccgccgccggccgcctggatctaccgggagcgcaaaaccttcgacgagcaatctcacgcgctgctggtctataaccaaacgcgcgatgatgccctgctgaccggctatcggcagtgggccaatgcctatctgcagcgccgtatcgacgccaacgtctatgccacgctgatcatgattttgcgttatcagggcgctcaggcggaagcagacgcccgccagcgggaagccgctttcctgtttgcgcgggatgcgcggtttaggtaa

SEQ ID NO: 432634 - DNA, 1122 bp, Serratia marcescens
atgaaacgtgcctataagttccggttctatccctcaactgagcaaattcaacttttagctcatacatttggctgcgtacgtttcgtttataacttcatcctgaattggcgcaccgatgcctttcgtcaacggcaagaaaaagtcagttatgcccaagctagcgcacgattaaccatcctcaagagaacacctgaattcgcttggttaaatgacgtttcatgcgtcccactccagcaatgcttacgccaccaacagactgcttttaaaaacttctttgaaggtcgaacttcatatccggcctttaaatccaaacgccacaagcaagtcgctgagttaaccgccagtgcttttaggtaccgagaaggacatctatacatagcgaaaagcaaaacgtctctgaacatccgctggtcgcgtaaactgccgtcgtccccttcgacagtcactgtgagcaaggactctgcaggtcgatacttcgtcagctgtctatgcgaagtccagccggagccattacctgttacgtcatcaatagtgggaatagatgttggtctaactcgtctattggtcacggacagcggatttaaagctgacaacccacgcaatacagccaagaatgccaagcggcttgcattgctacagcgccgattaagcaggaaacaactgggttcaaaaaaccgcactaaagctcgccaaaaagttgcccggttgcatgcaaaaattgcggattgccgcctggacaacctgcataagttgtcccgcacactcattaacgaaaaccaagttgtgtgcgtcgagtcgctaagcgtgaaaaacatgatgcgtaatccacagttggcaaaaagcattgctgatgcaggctggtcggaactcatccgacagctcaggtataaaagtgagtgggctggccgtcgtctcatcgcggtcgacccattcttcccatcatctaagcgctgttcctgctgcggatacaccatgcaagttttacccctgaatgttcgcttttggctgtgccccaaatgtcagagttaccatgaccgcgatatcaacgcggcccgaaatatcaaagctgccgggctggcagtgttagcccatggagcgacggtaaatcctcaagtcgcgtga

SEQ ID NO: 432635 - DNA, 1110 bp, Serratia marcescens
atgtcatctattgccatctttaacaataaaggcggtgtcggaaaatctacaatgacctatcacttggcctacgccttagcagagtcaggaaaaaaaacattgatgatagatctggatcctcagtctaacttaagtctttttgtccttgacgatgaacagatagaaaaaatttgggatgcagaagatccatttattgaagattatgagaaagcaaaatctgattcttcggatattgaattcagtgaaatacataatgcaccacgatcaattcactatatacttaagccatctgaagatggtcagtcagaagaagacgaactgcctccaagcataaaagttaatagtaacttacatttgattcctggtagactgacattacatctttttgaaaacaaactttcaaagcagtggagtgaagcattcttgggtgaacctcaagcccttcgcgttatcacagccataagaaggatttgtaaaatttacactgagaaacttggcttcgatgtgatattgattgacacatctccaagcctaggaattctaaataaagttataatatctaattcagatggttttttgattccatgtgctcctgatatgttttctggttacggaataaagaatattgggaatgcaataaagacatggaaaaaagactttgatacaatgatgtcattacttcctagttctaaaaaaatgtatcttcctaacaaattcgtaaaactaattggttatacgatatataacgcaaaaaaaagagaggatgcatctaacccccttaaaatagccaaagcacattacaactgggcagaaaaactgccaaacaaaattttgaatcatatacctgaagaatgctatgccccaatctctaaagaaacaataaagcagtttattggtgggaactccataatatatggtcacgccacaatgcctgcgaatgcccaaaaatataaaaagcctatgtggctgcttccctcaagcgactccattcatgatgcccaagatagaagcactatcaatggacggcgggatgagtatctcgcaactcagcaagtgtatacatcttttgctaatgaggtccttttacgattagaggagatcagcaaatga

SEQ ID NO: 432636 - DNA, 663 bp, Serratia marcescens
atgaatatgaaaaatgaagatgtcattaaaaaaatccatgaacatattcatgattatgagatattctcagatagaattgcatcatatattacgagagaccctattctaaaagagcatgttcacagccataaaaaaagaacaaaagacatagagcatttgaatgagaagattactagaaaaaatgaaaaactaagagaagcaggtgaaatagaaataaacaaagaaaatgtaatggacttaattactgacatcgtaggaataagaatactccacttacatcaaggtcagtttgatgccatacacaaacgacttatgaagtatgttgatgatggtgagttagctttgtatgaaacccccaaagcctatacatgggatcctgagtatgcatcattctttagagatgaaggaataaatacagaacaaaaagaaagtttctatactagtgttcactatgttttcaaagccaaccctacaagtaagataacatgcgaggttcaggttagaaccttatttgaggaagtttggggggaaatagatcacgctgttaactacccaaaagaaagtgaaagcatttttgtaaaggaacagctaaaggtttttgctagaattgttggtgcaggaactagaatgtcacactcaatttttaaaatagataaaaattag

SEQ ID NO: 432637 - DNA, 1368 bp, Serratia marcescens
atgtccgataacaccctcaacgccgctccggctcagcgcactcagctgcgtaaaaccctgactttggttccggtagtgatgatgggcctggcttatctgcagccaatgaccatcttcgataccttcggcatcgtatccggcctgaccgatggtcacgtcgcgaccgcgtacgccttcgctctgctggcgatcctgtttaccgccctgagctacggcaaactggtgaagaagtttccttccgccggttccgcctacacttacgcccagaaagccatcagcccgcacgtcggctttatggtgggctggtcatcgctgctggactacctgttcatgccgatgatcaacattttgctggccaagatttacctggaagcgatcttcccaggcgttccgtcctggattttcgtggcggtgctggtcggcttgatgacgattttcaacctgcgcggcatcaagctggtggctaacctgaactccatcatcgtggtggtgcaggtggcgatcatgatcgtgttcctcggcctggtgatcaacggcgtttaccacggcgaaggcgccggtacgctggtcagcagccgcccattctggtccgataacgctcacgtggtgccgatgattaccggcgcgaccatcctgtgcttctcgttcctgggcttcgacggcatcagctcgctgtctgaagagaccaaagacgcggaaaaagtgatcccgaaagccatcttcctgacggcgctgatcggcggcatcatctttatcgtggtgtcttacttcgtgcagctgtacttcccggacatctcgcgcttcaaggatcctgacgcgtcgcagcctgaaatcatgctgtacgtggcgggcaaattcttccagtcggtgatcctggtgttctcctgcgtgacggtattggcgtcaggcatggcggcgcacgcgggcgtttcgcgtctgatgtacgtgatgggccgcgacggcgtgttcccgactcgtttcttcggctatgtacatccgaagtggcgtaccccggcgctgaacgtgctgctggttggcgccatcgcgctgtccgccgtgtcgtttgacctggtgaccgcgaccgcgctgatcaacttcggtgcgctggtggccttcaccttcgtcaacctgtcggtgatctcgcagttctatattcgcgacaagatgaaccgcaccgtgaaagacacgttcaactacctgatcctgccggtgctgggcgcattgaccgtcggcgcgctgtggatcaacctggaagccagctcgatgacgctgggcctggtctgggcggccatcggtctgatctacctggccttcgtcacccgcagcttccgtctgccggtgccgcaagcgagcgaagacgccgcctaa

SEQ ID NO: 432638 - DNA, 432 bp, Serratia marcescens
atggaaattatcaccgacccgaaccgccgcgccatcgactggcagcggctgtgtgaattgctggaggccgccgggctgggcaagcgcgatccgcacaccctgcggcgcgtttaccaacacagtcagttttgctattgggggtttatcggcaacgagctgatcgccaccgcgcacgccatcagcgacctgacctcggtcgcttatctggccgacgtggcgatcgatccgcgctttcaggggcaagggctggggcgccggttgatggatcgggtgatgcaagatttggcgccgctcggcaagattttcatctattccgtgccggaaaaactggccttctataaaaagtacggctttcatgatttgaccaccggcatggtgtatgcggacggcgcctcactgcaacggttgcaaaacggcggttatatccgctga

SEQ ID NO: 432639 - DNA, 897 bp, Serratia marcescens
atgatttttgctatcgatgatgttgatcttttacctgatgaagatgtggttaaggttatagatcatcttttgaggagtctagaaataagctcagtcaaaaaatggctctctatcaggagggtaactttggaaaattacactggagacactaaaaaaagagttgaggaattttttccggacccttacgacttccctaaaatttcattacataagttaatcaatcacagaatcactaaaggttttgctgaaaacagtaatcctaaaaacccgtttaaccctcttttatgcgatgaaaccataaatcccatttgcgaaggtaatatgcgggaaggattagcccttttaaagacattactagaaaatgttctcccaaaaggttttgatccacgaactagtgagaaagttattcaggaatatttatccaaatcggctgtagatacattatgtcgctcacaaaaactaattgatcttcactcgctaacattcaaaatatgtccattccctcttgctgtagatatacttgcctgtattagacatcactctcatgagccaataatctatggtgcacttactgattgttgtacgaaaagagattttttatctaataacttgataggtgaggaagaacgaatagctattgtccgcactcaagattttaatcaaattataaataaacttattgaccacaaacttgtaattaaacattctaaagaatactactcactaacagaaaaagggaaaatactctcaagtttctcaacgagggcttattacttcaaattccagaaaaataataaccaatcaattattgatgataatacatattggtctttatcagaacaccaaatagcacactctgatatagtcaataactttttaaccattacgaaaagatag

SEQ ID NO: 432640 - DNA, 255 bp, Serratia marcescens
atgaaaaagtcacgattcaccgaagagcaggttgtctttgccctgaaacaggccgaactgggtacgagcgtgtccgaagtctgccgctccgatgccacgttttacacctggcgaaaaaaatacggcgggatttccccttctgagctgaagcacatgcggcagcttgaggaagagaatctcagactgaagaagctggttgccgatctcagcctcgacaaggtcatgctgcaggatgtactggcaaaaaagaactga

SEQ ID NO: 432641 - DNA, 231 bp, Serratia marcescens
atgcagtatgtgaaatcggtacgcctgcaccaggcacggatgctgatggtgcgccaacaaatcaccgccgccgccgcgagttacgccgttggctatgaaagcccatcgcaatttaatcgcgaattcaaacgtctgtttggcctgccaccggcagaggagataaaacgcatgcagcgtcacttcgccattccgcccgcgcagcctgcgtcggtatttgtttcatcgcactga

SEQ ID NO: 432642 - DNA, 798 bp, Serratia marcescens
atgcattacgagattactcgcccaataagaaatccatactttcttatagaagggcttggcgagacttcttttattccttctatttggcgaaatctcctccagaatcatccgcgatcatttcaccatttcaatggtattaacttgtatgagtggtcgaagattatctattcacaattcgacatcgaggaagtggataggcgaataaacgaactcataaaacgaggtgagtggatatattcagcacaagatatggaggattcagatgatcctttagtaagtctctttggccgcgttcgattggatttgagtatgggccacaattccaatctggctgacctacttaatactctactgcagcactatggactgttttcgccgtatttggatttaagcagtgatttgcgagtggcaatgttttttgcgagtcatcgttttgttcccaatgctggcaatgatcattaccagttcgtcggaagtaacggttcgaagtccatcctgtacttgtttaagcataaaaaaaatgaaatggcggtgtatgcacacgatcgagttcttcatggtttacagccacttagaccagagaggcaatcatgtgtaatctgccgatcaggtccgtacgcacttaatcttgcgggcttatatcttgttggagcgattcgaatcgatttcgaactgccggagtctgaacgtttatcgtcgcatgtgctctttcctgatgaacatgaggataattttctcgcggccctaatcgaaaattgcaggcatccagaaagagtgaccacttttcgacatcgatag

SEQ ID NO: 432643 - DNA, 756 bp, Serratia marcescens
gtgaaatccgataagaattattatgaaggtacatgtgaactcatttctggcgaggggaggatctatactgagtttaatggcgatgttgcaacaagacaaataactataataaatgatttgtattattcatcctcatctttggaagattggcacgaagatataggttttttactttatgatggtaagaaaagtgagcttgatctttctgagtcaaagttgataactagtcttgaatttgaaagtgaatgggataaggcaatcaccactgatgttttgaatgactatgtcagttttagttatggtgatgcatctattcctttgtcaaaatctaaaatgatcattcatattgtgaataataagggtaagtggcgaaaaggctttgttgttcctctttcaaaacgctatccagcagtaaaggaagaatatttaaagtggttctctgaaaaaaaggatttttttctcgggaatgtacaattcatctgtgtgaacgaaaatgagcggatatatgttgcaaatatgttggctcaggatgggctaaagaaaagtaaagatgataatgctcagtatgtttcatatgaagcacttaaagaatgcctaagtttggtttctgattatgcattaaaagaaaggcttagtatacaattgcctatgattggtgcaggattgggaggtggtgattgggatgctattttttccctaatcaaagagcgcttagcaagaaagaaaataaaatgcaacatcgttaaattaggttga

SEQ ID NO: 432644 - DNA, 573 bp, Serratia marcescens
atgaataccgcattgatcgctttggattacatcgttgatatcacccatcctgagggaaaaatcgcgcgttctgcgcagcaggtcattgagcgcgacgtcatcgtgcgggcaaacagcgcattagcgctcgcgcggcgcaaggattggctgcgtattttggtcaaagtcgggttcgccgccggttatatcgatcagcccaaacaatcccggatgttcggccaggcacatcaatttggcgctatcgcattggatcaacccgggacggcttttcatcccgatttggcgtcagagctgggcgaattaacgatcgtaaaaccgcgcgtcagcgctttttatggcaccaatctggacgcgatactgcgcgcccgccgcatcgagcggctggtaatttgcggggtcagcagcacctgggcggtacaggcgacggcgcgtgacgcgcacgatcgtgattatcaggtgtgggtgctggaagaggcctgcgccgcagccaccgcgcaagaacaccggatctccatggaaacgctcgcgacgatcgccgatatcgtcacgctggaacagctgggcgaacgttga

SEQ ID NO: 432645 - DNA, 1014 bp, Serratia marcescens
atgcagctgcgtgccgaaatcaacctgcggctgctgctgcggggcgcgtggatgttggcgccgctgctggcgctgactctggcgaccggaaacgtcgactggctgaaggcttcggtggttaccatatcgctgtttatcgtgttcgaaagggttgagttggcgccgctcggcgtcatgctgcatgcggctgcgctgctgtcggttttcatgacgttgctgtacgccatgcgggcgccggcgaccttcattttggcatgcgtttttgcggcggctgcggcggtggggatatccgcctgcggcggcaaattgcgatccttgggtaattttatctttatcccggccctttatctggcgtgcgagattgcagaaggcggcacgcacgcgccaatgatccaacgcgcctgggcactgtttccctatctctgggtggccgctttgccggtgttggcgctcgcgctgatagagcaccggcaacgggcttatctgccgtttgaaaatgcatggcgtcattaccttaaactgcaccgcagcgaaggatttggcgcccgggtcgcctgcggtgaagcgctgttggccgtgatttttgccgtcgggctgtctgccgcgctcgtcgaatggcggcagctcgattatggtcaatgggtgatctggtcggccgtcagcgtgatcaccggcgatatggcgaccacgcgcaataagcttcgtcagcgggcgtcgggtgcgttgatgggggttcccgccggcattttgctggggtatctcataccgcatagcgatatgggctacgaactgcttaccgtggccacgatgctgacattggtctcttttcatcgttatgccttaggctttggcgtgcgttgcgcctgcatcgcctgtgcattgattatcgccggaaaagcgccggaaatcgcggcggaaagggcgtttaatgtgctgctcggcggcggtatcggtttgctgttcgctttcctgatggatggcgcgttgctggccagtcccggcgcgcgcaaatag

SEQ ID NO: 432646 - DNA, 135 bp, Serratia marcescens
atgcgaacgtttctcattgggttcgacatattacgatgcatgctaaggagcaccgctatgactacctggaccaaacctgagtttgttgacctgcgtctggggctggaagtgacgctgtacatttccaaccgttaa

SEQ ID NO: 432647 - DNA, 252 bp, Serratia marcescens
atgttacgacatctcagtaagaacgaagacgagcgcctggcggccatcgatgcgctggcggggttgggcgccggccatgacgacgcgatccatcaggtgctgacgatcacctgcaagctgttacaggccgagggctgcctcatttacctgcacggaacgcgcaagatttggatccgcgagcacattgacgtcgggttcgaggagatcgaatgcgtgaagcggggatcgcgtttcccatctcgatcaacgtga

SEQ ID NO: 432648 - DNA, 1041 bp, Serratia marcescens
atgcagcacgatcagctgctgggcgtggactacgagaaaaatcagacctacaaggcctattcctaccgcggcaaggtctcgaagaccttcaacatgtacgacccggtgtatggcgaaacgccgatcaccgacagcaccacctacagcgacgcgtcaagcaacctgcgcgccacgctgttcagccgttcgctgtacgccaaggacagcattcatcttaccgatcaatggatcgcggtgctgggcgcgcgctatcagtcgtattaccagaacaacagcaacggtttccagaaaccaaaaaatacgctcaatgacaaagacgaccagtttttgccgcaggcggggttggtgtataagctgacgccgagcctgtcgctgtacggcaattacagccgttcgttcacgccgtccaccgccatcgacgacaatggcaacgtcgccacgccggaaaccggcaccacctatgaggtgggcggaaaatggcagatcaccccggcgtttgacgccacgctggcgctctatcgcattgatgaaagcaacatgtcgatctttatcaacggcgtgacccgcagtatccccaaagcgcgctccaccggtgctgaactggagttgaacggcgaagtggcgcccaactgggatcttaccgccaactacagctacgacaaaaccgagatcgtcgaagacaacctcaatccggccaacgtcggcaaccggctggtcaacgccccgaccaacatgggcggcctgtatctcagccaccgcatgacgctgccggtggtgcccggcgaggtgcgcgtgggcggcggcgcgcgctacgtcggtcgccgcgccggcgatccggagaacagtttcaccatgccggcctataccgtggcggatgcctttgtcgcctgggacagcaagctgcttgggaaacatacccagctgaaactgaatgtgaaaaacctgttcaaccgcgagtactatgcctccagcgccggtaatttacgcgtgattgagggtgaaccgcgcagcctaagcctgcaggcgacggtcgatttctaa

SEQ ID NO: 432649 - DNA, 291 bp, Serratia marcescens
gtgctgtttagcacacgcgaaatcgcgctgaaaaataaatcagcgaatcagcgtgctgtgcctggagggaaaaggctgtggctgcagaataccataataacgtccaactcaattcacctgaaaccgtcaggcatcaggaaacgtttcttattcgggtatgcacagctcagaaataactggagaggggtgctgcccgccgataacggcaagcaacaaatcagaagagaattggtcagcttgccttatttgttttattacaactacaactgtccaattgggtttctccactga

SEQ ID NO: 432650 - DNA, 1668 bp, Serratia marcescens
atgatgtcattaaaaactattagagagcaagttctgaattttttatcacaatccagcccttcagtaatggcaattaaaggtgaatggggcgtagggaaaacttatggttggcaaactttactacttaaggctcaaaaagaaaacatgctgtcagctaagagatactcatatgtttcattatttggtatctcttcactggataaattaaagtacacgatttttgaaaactcaatcacaaaagattcaattggcaccgagcctaatttagaaagtctaagaactaatactttgggcatgttagaagtgctaggtcgaggatcttggagtaagcttaaagaaatgccttttataaaatcagcggcacctgccgtggaagcattttcttttatgtctatctcagaagcgctgatttgcattgatgatttagaaagaaaaggtgcaagccttgatttaaaggatgttctagggttggtgtcgctattaaaagaaaaaaagaaatgcaaagtgattttgttgttgaatgcgggcactgatgcgacggatgattacgagacctataaagagaaagttatagatattgagctggagttttctcctacgcctgaggagagtgctgcgattgcatatgatgacagaaagccctatcacaaagagttgtcagcattcacagtctctttaggtattaaaaatattagagtgttaacaaaaattggtaagtacattgatttagctattggatgctttgaaggaaccgagcctgagcttaagacacaattattgcagactacagctttgtttagttgggcatattactgttcgacgcatgatgaggatattccgagcttagattttatagagtcagcggagagtatctattatattgactccaaaaaaataagtgataaagaaaaactttggaaaaatattctattgggatactcatttacaagggttgatgctttagaccgagagatcgctaagttggtaagacaaggatatttggatcgtgaaaaatttacaattgctatgactgatgtcaatcagcaaactatcaataacaagaaaaacaatagctataagagtgcatgggatatctttcataatagcttcgcagataatcagcagttagtaactcagcaacttttagatacttttattttaaatatctatcaagtcactcctagtgatttagatggcttggtagatgtttttagaacacttggtgaagacgataaagcatcaaaggtcattgacgaatttatatcgaagagaaggggggatgttgaattgtttaatcctgatagcttcgatttccatcgtaagttagaggatagggaaataattaatagattcagagttatatattctcatgagaagccaaagaaaacaatcaaggaagttcttgagagaatttccgggcagaatgggtggaataatgaggatgttgaaatactttctgattcgacggaagatgagttttataattactttaaaggacttaatggccataatttaacgtcacatgtatcaacatgtttaaaatttggcggtttcagcaatggcagcgagaaaatggagttgatagcaacaaaaacaaagtctgctctacataaaattgcagctgaaagcaagcttaatgagatgcgaatgcgtaagtttgggatgtag

SEQ ID NO: 432651 - DNA, 687 bp, Serratia marcescens
atgaaatcacaaacagcaaaaaatttttctgaatttgtcgatatagtggagagacttggcaatgactcggagctgatgctattcagggggcaagcagaaaaaggtaatttactgccaagtatagcgcgaaaaaatccaaaaaccgactcaacaagtgctgagcaagaattaataaaagagttaaagcgaatgggcgcatcgattctacctaaaaatgatcttgatgattgggatctcttagtaatagcacaacacttcggcatgaagactcggttattagattggactagcaatccacttgcagccttattctttgcatgtaatgattggaaaaaaggggatgtttatgtttatgcactggatgcaaatcgatatctgaaagagccgcaaaaaggaccatttgacacaggaagaacacaggttataaggccaaagttaaataaccctagaattatcgcgcagcatggttggtttactgcacataagtactcaaaatcctctaagaagttcgttcccctggaaaaaaacaatgaaatatcagagtcagttcaagaaataaaaatcccagaagataccagggaaaaactattaaaatctctagacagacatggtgtcagtagccgaaccttattccctgatttggaagggctctgtaaatatataaactggaaaaacgagacaaactaa

SEQ ID NO: 432652 - DNA, 207 bp, Serratia marcescens
atgatccactatcggcaggcagaatccttcggtaatctcgccatgttgaccaagtcctcatggctgattgagggcatggcttattccatgagtggcgacccgcgctcactgggcgcccccttcgaagaatggcgtactcaattcgagatgtggcaggcttcacttggcaatcaatccgtgttgcaagcggcgaaaaatataaaatag

SEQ ID NO: 432653 - DNA, 138 bp, Serratia marcescens
atgggcaaaatggatcttcccgtcatcatcggcatcctggttatgctaaccctgtggctcggcgcgctcttcaacatcggcgatctcagcctcaccatttcgcgtctgtttcactggttcgaaagccagcgtggataa

SEQ ID NO: 432654 - DNA, 1032 bp, Serratia marcescens
atgaaagctattgttacaggtattacaggtcaagatggcgcatatttggctgagttacttctgagcaagggatatactgtttacggtacatatagaagaacgagctcagtaaatttctggagaataaaagagcttggcattgaaagtaataagaatctccatttagttgagtatgacttgaccgatcttagtgccagcattcgtctactacaggaaacgggcgctaccgaggtgtacaatctggctgcccagagttttgttggtgtttctttccaacagccagtaactaccgctgaaattacagggattggtcctctgaacttacttgaggccattaggattgttaacccaaaaattcgtttctaccaggcatctacgtcagaaatgtttggcaaggtgcaagaaattccacaggttgaatctacaccgttctaccctcgtagcccatacggtgtagctaagttgtacgcacactggatgacagttaactaccgagagtcctacgatatcttcgcgacaagtggtattttgttcaatcatgaatctccacttcgtggccaagagtttgttacgagaaaaatttcagatggcatcgcgaagattaagttgggactattggataaaattgaactaggtaacctagacgctaaaagggattgggggttcgctaaagattacgtcgaaggtatgtacctcatgctgcaggctgacaagcctgatacgtacgtgcttgccactaatcgtaccgaaactgttcgtgattttgtttcactgtgcgctaaagcagcaggtatggatatcgaatggttcggtcaaggcgaagatgagtttggcgtagataagaataccgataagacgatagtaacaatcaatcctaaattctatcgtcctgctgaagttgaacttttgatcggtaatccagttaaggctcaaaatgatttaggatggaagccgaagacaacacttgaagagctcgccaaaatgatggtagaggcagacctgcagagaaacactaaaggctattctttctaa

SEQ ID NO: 432655 - DNA, 981 bp, Serratia marcescens
atgcgtggtgtagcagtattactggttcttttttttcactccacagaaaattttgtcgctaaaaacttgaacggtccggtattcaacgcaggacagtcaggtgttgatttattctttatcattagtggatttattatattttactcggcaaagaacaaagttggctatcctggcgcgatttcttttatgaaaagtcgtttattgaggatagttcctaactattggttttatacatttgtttttgctacgttgttgattttatttccagataagtttgaccgctcgacatttgaagtaactcattttgtatattctctcctttttattccaatgaaagataatattcctcctctcgtctcattgggttggactttgaactacgaaatgtatttttatattgtattctttttctcgattgttttactgagcaagctaagattttttttcgtttcagtgttaatcttgtttgtatatctatcttcttactctatggagttgaatgatttttataagaatgatgtagtttttgagtttcttctaggcgcaatactctatctttattattcaaagggttatcaccatagttttaagatgccttggtatgcattctgtatcatattaatattgctgatttgtgttatgagcgtagccgataccaatttacggtttgtaaattttggcattccttgcttttttattatatttttatctcttcatgtgaacttcaatgaaggaagcattttagaaaagattggtggatcatcttattccatttatctatcgcatgcgatctctatgccctttattattaaagtcttgatggttttaggtcttaacttctacctctctgtggggctttctatcgtcttttgtttgtttgttggttgggttgcatatcaggttttggaacgcagagtattggatccttcctggtggaattcaaaggaagtaattcaattttttatatcattaaggaaataa

SEQ ID NO: 432656 - DNA, 864 bp, Serratia marcescens
atggagcagcagttgctttgctataaaaccctgccggaatggaacagcgaaacgctgccggaagcctttcgtcagcgccacaacacccagagcggcacctgggcgaagctcaccgtgctgagcggcagcctgacgttcgccatgatgaccgaagacggcgccaccaccgagacctggcagttcagccctgaaagccagccgccgtttatcgagccgcagcagtggcatcgcatcgtttccttttcggacgacatgacctgccggctggcgttttactgcacgccggaagattactaccacaagaaatacgaactgacgcgcactcactcggaagtggttgaggcggcggcgcgcatcgcgccgggtaaggcgctggatctgggctgcggcggcgggcgcaattcgctctatctcaatttgaaaggtttcaacgtcaccgcctgggacaagcacgcgccgtcgatagcccgcctcaatcagatcatcgacgccgagcagctgacccacctgagcgccggggtgcaggatctcaatacccaccgcttcagcggtgactacgacttcatcctgtccaccgtggtgatgatgttcctcgagcggcagcaaatcccgcctatcgtgcaaaacatgcaggacagcaccgtgcgcggcggccataacctgatcgtggcggcgatggatagcgaggattatccctgcccgctgccgttcccgttcaccttcagcccgggtgagctgaagcattattatcgcgactgggagatcctcaaatacaacgaagacgtcggccaactgcacaagaccgacgccgccggcaaccgcatctcgctgcgcttcgccaccctgctggcgcgcaagctatag

SEQ ID NO: 432657 - DNA, 234 bp, Serratia marcescens
atgatgaaaaacgtaatcgacagcgccgatccgcgctggctggcgattgtcagccgcgacaagcacgccgacggccgctttatctacgcggtgaaaaccaccggcgtgtattgctcgccttcctgcccgtcacgccaaccgaatcggcaaaacgtggagctgtttgacgacgcggagcaggcggaggcggcgggctatcggccctgcagacgctggcgcgccacgtcgggttga

SEQ ID NO: 432658 - DNA, 168 bp, Serratia marcescens
atgacggaaagagagaagctgttaagcggcctggagtacaacagccgcgatgaagaactgatcgggatgtaccatcgggcgagggcgttgatcaaaagcttgggggcgctggactcgcatcaggcggacgagaaaaaccgcctgctcggcgagctgttcggcgcctag

SEQ ID NO: 432659 - DNA, 1224 bp, Serratia marcescens
atggcgggagaactcaataagctgagtgataagcggctcagaaacctacaaggcacgccacgccaaaagatagagttctttgctgatggtgctggtctgagtgccaagctttcgaaggttggtgggatcagctgggtgttcacctaccgattggtaggcgcaaaactgcaccgacttaccttgggtaactatcctgatatgagccttaaacaagctcgtgactccagggacaagtgccgctcttggttggctgatggcaaagatccaaaaatgcagtttaatctgactatggaagcaagccttaaacctgtaacggtgaaagatgcattgcaatattggattactgagtatgccaccgataatagggctaatgttgagaggcacaaggcacagctcgaaaagcatatttatccttacattggcggtatggcgctttctgattgtgaaacacggtactggcttaaatgttttgaccgcatcaaacgtgaatcgcctgtcgccgccggttatattttccaaatgtgtaagcaggctctaaagttttgtcgagtacgccgatacgcagtgagtaaccatttggatgatttaactatccctgacgtaggtaaaaaacaacaaaaacgagatagggtgctaactgatagtgagatagggcaattatggaatttttctaacagtgatgaattgttttcatcatattattcttcattgttagttatattgattgtttttggctgtcgttcacaagaggcccgtctatccgaatggaaagaatgggatttagagcaatggctatggactgtgccaaaagagcatagcaagtcaggtgagaaaatcattagaccggttcctgtgcagctacgtgaatttattacagaacttagcagccataataaacagagcggctatctgttgggtttagtgaaaaagtcagaagcagtaagccagactggtagaaatatgcataaacggctaaaccatgcggagccttggactttacacgatttgcgtcgttcttttgcaaccaaacttaatgagttaggtatcgctccccacgtggttgagcagctgctggggcatacgatgcccggagttatggcgatctataatcgcagccagtatctaccggagaagttggatgcgctgaacaagtggatagaccgtcttgaggtattggcgggaaatcatgaaaacgttattcttttaaaggctggtggaaaatga

SEQ ID NO: 432660 - DNA, 771 bp, Serratia marcescens
atgagaattgataaaaaacaaaatctgcctgaatggtttaagttagctgactatgactgctataaggtgatgtcagacgatgaaatagtgcatcaattatcatgtcgttgcaatgctatgatggttgaggaatataagaacgatggtttctttggggatagattaaaaaatggattatatttcaatgtggatgaccatataattccattttgggtgagggaagattatgataaatctatgttcttaagcaaaagctcatcaatctccccattgtctgtaagagatgttaaatttattgctagagacttgaaggataataatgatattgatattaatgatagggttgatgatgaattcatggactcctatcagcatatatcagcaatgagtgacacttcattttttttcgatggcttttattgtaaggtagacatcttaaagcaagatgccattattatgtctgagtttttggctcttgttaaaatgtggagaaagcaacttggaataccagagccaataccattaataaaaaatggatggcctgtaataaaggataagataatttcctattccgtattcccattgattgatttaatgatgtgggaaaaagctacgggtaataaaataactaatggtgttttagctgtgtccctcttccccgatggtgactatgactctataaacattgctcaaaccataaagccatttattgaatcaattcttgactacaaaagtatagagaaaatcgagcatgaaatatctaataagtaa

SEQ ID NO: 432661 - DNA, 285 bp, Serratia marcescens
atgcctaaagctacctttacatcacctaccccagcacaacgccgtaccatccttgcggaatacggcttcatctacgataagcgcatccgtgaacgcgaatgccttgagataaccagcttatcccgcacaacacgctggcaatttgagaatgaaggcaagttcccgcctcgctgccactttggtcgtaatagttgcgcctggcttctcagcgatgtgttgtggtgggttcgtaatccgccagccgtggaaaacgtcaacaatccatatagccgccgttccgcttaa

SEQ ID NO: 432662 - DNA, 600 bp, Serratia marcescens
atgaaaaaaataaatgcccttggcgggcagggattcgatcagcctgaaaacagccggatagatatttctgtagcgacgatgagcagccttcaaatggtcgattacatcaacgcggagcgaaaagggaaggcccaggcggaaggaatggatttcccctgcaagaaatatcgcaagctggagcatcgaagtttaatggctaaagtgccaaaggtacttggcgaggcagctgcaaaattttttgcagttgatgttttcatcaatggcaccggcggcaaggttgagcgtgatatttatcgctttcctaaacgcgaagcctgtttgatggcaatgagctacagctatgagcttcaggcggcggtgtatgactacatggaggaactggatcaccagaaaggcgggtatctgggctacaccattggcgagctgcaaaacattgtggcttctgctcgccagtattccgacgaggattcaagtgatgcaggtcggcgtctgaaaaagcggcaaggcgatcttattttgctggaaagggctgagcacttggttagcagcttaagccagctttcgctaaacctgccagggagcgctccagatgctgaataa

SEQ ID NO: 432663 - DNA, 195 bp, Serratia marcescens
atggcaaccggtgcaaagaacgcaaaatcacaaatgacaactattagaatcccgcatgaagtaatggacgatatagagctgctgaaagaggatggagaaagcacggctggttttctcgtaacggcagccaaaggcgagatcaagcgccgacagcgcaagcaggcccgccaggataagccgtcagactcggaatga

SEQ ID NO: 432664 - DNA, 192 bp, Serratia marcescens
atgtttaagctcaagattaccgtcactgaccatcagactgatacggtcgaggtatttacgccgggcaaccgctacaaaacttattcaggtgcagaaaaagcggcatcaggctaccgctacgcttttaaaccagatggggttaacgcggttatcacctgcgaagcggaaattttggaggtggcccatgcttaa

SEQ ID NO: 432665 - DNA, 195 bp, Serratia marcescens
atgcttaagtatttccaagtatcaggctacgccgtaaataagcgcggtaacaccatcggtattttttacgatgtgcaatcagcagatggcctgcaggccgttatcgaggctgaaaaacgggcagaagaagatggattccgctatatccgcctgacaagaacgatttttcaggaggtgcgccatgaatcagcatga

SEQ ID NO: 432666 - DNA, 204 bp, Serratia marcescens
atgaatcagcatgaaatggagtttaattccgctatccgcagaacagatcaacttatatcacttcttatggtactggaagataatgttgacgctttagaacagacggagatggaaagtttaatttcccttgccaaagatttatctatacggatatcagcctggcttagtgatgaacagaaagttagggaggctaaccatgcgtaa

SEQ ID NO: 432667 - DNA, 177 bp, Serratia marcescens
atgaacaatccaatgcctaacagccgctataaggacaagagcggtcagtttgtcacggtaaaatcctgtgcctttaaccgcgttgagtatattcgcgaagggtatccggctccttgtgtcgttccagtagttcgttttatgtctgagtttaagtttgtgccggaggcatcagcatga

SEQ ID NO: 432668 - DNA, 1767 bp, Serratia marcescens
atgaagaatgccccaaatttaaaacacctgccgaaggataaaggcactgaggcggtaatctttgccgggacgaaggcttgggaactggcaaaggcttatcagggagggaataaaaacggcgacgatgtaccgccgatagttctcgatcaccaacagctcagtgagctggataacctgaaaatcatcgacaagggccgcatgtatgcccgcgtttaccaggcggggctggtggatcagtcaaagctaacgctgattgcgcagaaactggcggcggcaggcatcaagcaggcgcggctatacagtgaagccggtgaactggtggaggattggacggagagccttgaacggctttcatcggaaccggtggttgcatatagcggtggtgttactgacctgtcacgcatggggccgagccagcggggggatgtgctcaaggcacactacggcaacgcacttgctattcatggcgactctgacaccgttcaccactataacggcgttgtttggtcgccaatttctgacaaggacttacagcgggttatgtcctcaatattccgggaggcggagatagcgtattcacagcccagcattaaatcggcagtggatacgatgaagctgagtttgccgatgatggggactaccgcccgtaatctgatcggtttcgtcaatggcgtatttgataccaaggccggtgaattccggccacaccgccaagaagattggctgctgattgccagcaacgtcgaatttagcccagccgtagagggtgagacgctggcgagccatgcaccgagcttctggcggtggctctgccattcagtagcgaacaacacccgcaaagctgaccgcgttctggcagcgttgtatatggtcatggcgaatcggtacgactggcagctattccttgaactcaccggccccggcgggagtgggaaaagcgtatttgcagacatctgcgaaatgttggcagggaaaaacaatacggcatcggccagcatgtcatgtctggagaacccaaaggagcgggaaatactcgtaggctgttcgttaatcgttatgtccgacatggcgcgatacgcgggcgacggcgcaggcatcaaggcgataactggcggggataaggttgccatcaacccgaagtacaaaacgccgtattcgatgcgtatacctgctgtggtgttggcggtgaacaataactccatgactttcagcgaccgtagcggagggattagccgccgccgagtcatatttaatttcacggagattgttcaggagaacgaacgtgatccgttcctggcggaaaagattggtgctgagttgccggtaatcatccggcacttacttaatcgttttgcagaccagcgacaggctaagcagctattgcatgagcagcagaaatctgaggaggcattagcgattaagcgcgaaggcgattcgctggtggacttctgcgggtacttaatgacgatggtggagtgtgacggcatgtttattggtaacgcggaaattattccgttcgccccgcgtcgttttttatatcacgcctacatggcctatatgtcggcgcatgggctgggtaagccagtatctttaacccggttcggcaaggatattatgggggcaatggcggagtacgggaaggagtacaaaaaagcgatggctactcgtggcgaaaacaaggggcgaatccagtccaatgtgtcgctgatagaagatgcagaggagtggcttccggctgctatgggaggccattccacagagcagtga

SEQ ID NO: 432669 - DNA, 267 bp, Serratia marcescens
atgagtcagactgaaaagcgaaaatcgggcatcgaaattctggatatgcatccggctttgccaggcatcacagttgaagtcgtgaaccgcaaaacaaaagaagtggtcgccgtgcatgacgttatcagctatgtcgatgtgaactattggcacatctacagcaatgaaccaataaagcgattaatgccatgcattaaagttaatggcgaggccgtgccatttgaagcccctgtagggcacaatttggttactgtatttttcaaatga

SEQ ID NO: 432670 - DNA, 294 bp, Serratia marcescens
atgagcgataaattaaaggctgatgttgaacgctccaaacgtgttattaaagaaattaaagcgcacaaagattattatggaattaatgacctcgataccatgcacacaaacgattatcgccgggtgcttgatgaaggtgcgttattctggattgaccatcatgattttgtgcgcagcacattttcggaggagatatttgcaactaaccgcgaacaactcgatgccatgattgaacatttacagggctatcgcgagaaaatgccgatgccgccaaagcgaatgagtgaaaaataa

SEQ ID NO: 432671 - DNA, 513 bp, Serratia marcescens
atggacttcgattttgatggtatggcatatcctgatactttcttaatttcaggaagtgaatttaaaggcagtcgaaagacaggaggaaatcaggtagacattccatttactgacgaaccgcatatcaatcttggtgacattctggttcagaaagttggaagtcgtgagcttagccttaaagtaattgatctttcaatatcgaaaaatggatcgctaaacgtaggtactagtcaccctcatatacttacactatctgttgcaaacctttccgccgacgaacaaaaacctaaaaaaagcatgagtacatataatattggttcagtacatggcactcaagttcaaattggcgaaaataactctcaagtcacaaatatcagcctacaagaattagtagaaaaaatatcatcatctgacgacagcgaagccaaatctcttctcatgaaattactggagaacaatacggtggctggcatcgtcggcgctggggcatcagtactttttagcctgctataa

SEQ ID NO: 432672 - DNA, 627 bp, Serratia marcescens
atgccattcaaggatgcagacgtggataatctcataacattcatcattaccatttccggggcagtagtgggcggagcaattgctgggcattactcctttaaagcaacaaaagatgctcatgaaaatcagaagagaattgcagatgagaacgaaagaaacataataaccagcttactccagtcaattcatgacgagatcgagacggttttcgataattatcatgaaaatatgggtgtgaaattagaatccttagaagaaaacactccattgcttttttactaccctctcgtaagcgactttttccctgtttataatggcaatacatttcttcttggccggataaaagacaatgacttaagaaaaagcattatcaaaacatatactcttgcaaaaggattaattgattcgtatagaatgaacaatgatctacttcaaaaatacgagcattgggatggggtctactctgaaacacaactacaagtacataaggataaagcaatcgtgcaatatggagcattaatagcatatgctaaggccctaaaattacagcatttcaagcttaaagaaaacgttaaacagacagttagaattcttatgaagaatggtgtattgaacgaagcaaaataa

SEQ ID NO: 432673 - DNA, 1179 bp, Serratia marcescens
atgaaaaaattgcttgaactccgccagaagaaaaccgaattagccacccaaatgcgctccctgctgaccaaggcggaagaagagaagcgcagcctcaacgccgacgaatccaaacagttcgacgaattgcgcacccagaccgacgccattcaggccgatattgtccgctatgaagcgattgccgatgaagaacgcagccagggtgacaagtccaagtccgcgaacgatggcaagaaagtgaccaatgccgagttgcgccactacatcatgaccggcgacacccgctccttatctaccggcgttcctgctgacggtggttttacggtcattcccgacctggataaagagattatgcgccagctctctgatgaatcggagatgcgccaaatctgtacggtgaagacgaccagcagcaacgaatataaaaagctcgtgtccgttggcggcgcggcggtagctcacggtgaagaaggtgaagcccgtagcgaaaccgcgacgccgaagctggaagaggtcagtatcaaactgttcccgatctacgcttaccccaagaccacccaggaaattctggatttcagcgacgtagacattttgggctggcttaccgaagagatcagcgacacctttgttgaaaccgaagaaaccgacctggtagccggtgacggcagcaaaaaggcaaaaggcttcctgtcctaccctcgcgcggcaaccgcagacaaaacccgcccattcggcacactggagaagatggacgccgcaggggcgaccgtggccgctgatgaacttatcgacctgctgttcaagctcaagaaaaaataccgcaaaaacgccgtatgggtgatgaactccaacaccgccgccagcctgcaaaagctgaagaacggcaacggtgattacatttggcgcgacggtatgcagaaaggcgacccggatatgttgctgggtaaaccggtgcattacctggagaacatgccggatgccgccgccggtaagccggtgctggccgtgggtgacttcaagcgcggttatttcatcgtcgatcatgaaaccggcacccgtacccgcccggacaacatcaccgagccaggcttctacaaggtgcacaccgataagtacctcggcggcgggctggtggactccaacgccatcaaggtactggaaatcaaggcagcgaagtaa

SEQ ID NO: 432674 - DNA, 552 bp, Serratia marcescens
atgaaagaaaacgattttgaaatccgcaccgcgacgctctccgccgacgataaaaagctggtgggttatgccgtgaaatggaatagccgctccgaagtgctgtgggacgagtttgtagagcagttcgcccccaacgctttcaaagatagcctggcgtccggtgctgatgttcgcgccctgtacgagcatgactacaccgcgctgctgggtcgcaacacttccggcaccttaatgttaagcgaggatgctaccggcctgcgtttcgagctgacgccgcccgatactcagttggggcgcgatgtgctgacgctggtagagcgtggcgatatttccggcatgtcctttgggttccgggcgctgaaagaccagtgggacagtacccaacagccgtatgtgcgtaccgtgctggctgctgagctgcgcgaaatcacagtaaccagcttaccggcctaccgtgaaaccgatattcagatcgccaagcgttcattactgacccagcaccctgagctggtggatttgcgcgcccattgggcttatctggcggggttgtga

SEQ ID NO: 432675 - DNA, 1218 bp, Serratia marcescens
atgtggccgttcaagcgcaagactgaaacccgtagcatgagcattgacgagctgttgtctatactgggcgtccctaacaccaactcgggcgaatacgtctcacctacaacggctgaggggcttcccgccgttctcaacgccgtggccgtaatcagtgaggcggtggcgtcgatgccgtgctacctgtaccgggtaacgcacagcaaccagcgtgaggcgcgtacctggctggcagatcatcctgttgatacgttgctcaatgaacgcccgaacgattgccagaccccttaccagttcaagcgcaccatgatgcgccattgcctgctgaacggtaacgcctatgcggtgatccaatggggcaaagacgggcaaccacaatcattacacccgtatccgcctcatgccgttgtgccgaagcgcctggacgaacaccgctacgcctacaccattaccgagccgttcagcggccgggtgcgtacctatctgcaagaagaagtcctgcacctgcgttatgccactgacgatggtttcttgtctcgttcgccgatcactatctgccgtgaaaccctggggctggggattgctcagcagcgtcacggcgccagcgtgatgaaagacggcatgatggccgcaggcgtcattactaccgccgagtggttcgacaaggccaaaggccagaaagcgctggatgccctggagcgctacaagggggccagaaatgctggtaagacgccaatccttgagggtgggatggattacaagcagttggctatgagcaaccaggatgccgaatggttgtcctctcgccgcttcaccattgaagacattgcccggattttcaatatcagcccgatatttctgcaggagtattccaacagcacctacagcaacttcagcgaagcgagccgcgcttttctcaccatgaccatgcgcccctggctgaccaactttgagcagcagcttaaggccgcgttgctggtggcatcgggcactcccggtattcgctaccaggtggagtttgataccgccgacctgttacgcgccaatccgcaagaccgcttccaaagctatgagacggcgatcaagtccggcgtgatgtgtccgaacgaagcccgcgaacgtgaggggatgccgccacgcgaaggcggtgacgagttcagccaggcatggaaacagaccgttgaggttaagggtaagaacgataaggagaaagcatga

SEQ ID NO: 432676 - DNA, 348 bp, Serratia marcescens
atgaaagccggacgtttgcgcgacaggataaaaatccaaaagcgtgaaagctatcgtgaccctcagaccggccaacagctttggcgggttgttgaaattgccacggtctgggccgaggtcaagggtatcagcgggcgggagcttgtcaccagcggggcctttaccgggcagcttaaatccgccgccactctccgaatctggatgcgctatcggtcagatgtggattatgactgcacgatacttcaccagatgcccggcgtgcggggtaacgaatacggcatcaaggcgattatccccgatgccaaacgtacccgacttgagctgttgtgtcagggaggtgtcaagtga

SEQ ID NO: 432677 - DNA, 303 bp, Serratia marcescens
gtgaccaagccagaaatcagccttgacgagatcaaacgccattgccgcattgagctggacttcgacgacgatgacactttgcttcaagggttcgctgctgctgcgctggaggtctgccagacgcatatcggtaaacgttttgatagcgacctggagttcaacgccgcaatcaaggtgggctgcctgatgtacatcggcctgttgaatgataaccgcgagatggtgagcgatgccgagttgaaagaagtcccgtttagcatcgcctgcctgtggaacgtctaccgcgagcctggagtgtactga

SEQ ID NO: 432678 - DNA, 417 bp, Serratia marcescens
atgccctggcacccacttaaacgttgtagctaccccggttgccgtaaccgcgttaagtctgggcgttgccctgaacatcggcaggaggctaacaccagccgtggcacgcgcaccgagcgtggctattcgaaccgctggggcaagtaccgcctgatgtatctcaaggcccacccgctgtgcgtggagtgtgccaagcgtggtatccacacgccagcaacgattgtcgatcacgtcatcccgattgacggcgaacgcgatgtgttgttctggcctgccagcaatcaccaagggttatgccatagctgccacagtcggaagaccaccacgcaagaccctgtgaccaaacagcagcgccgggcaggacagttccgagcattggaggcgcaagccgccgagaccgggtggggggaggtttga

SEQ ID NO: 432679 - DNA, 357 bp, Serratia marcescens
atggcaagaccaccgaaagcccccagttatctggatgaaatcgccagccagcaatggaaagcccgcgccaaacagttggccgaacgggacgacctgaccccggcggattggggcaacctcgaattattttgcgtcaactattccatgtaccgccgcgccgttgccgacctggccgagcgcgggttcagcattgtgaacagccagggcggggaaagtcgcaatccgtcgctgagcgccaaggctgacgccgagaaaatcatgatcaaaatgtcggccctgctgggctttgaccccgtatcccgccgccgcaacccggtggaaactgacgaggaagacgaacttgaccgcctggcatga

SEQ ID NO: 432680 - DNA, 1662 bp, Serratia marcescens
ttgaccgcctggcatgagtacgcagaagcgataaaaagcggtgaaatcccggcgtgtaagcggcttaaacaggcggtgaaccggtatttttccgacctgaaagacccgctttacgtgttcgatacagcggtggtagagcgctttatcgctttttctcacctctgtccgcacgtcaaaggccccctgcgcggccagcctattgcgctggagccgtggcagcagttcgcctttgctaacctgctgggattcaaggtggtggcaaccggccgccgcaaataccgcagcgcctacattcaggtaccgcgcaagaacgccaaatcgacggtggccgcgatgttggctaactggttcctggtgatggagcacggccagcaggatatttacaccgccgcagtgagtcgcgatcaggcccgtatcgtgttcgacgatgcccgccagatgtgcctgctgtccaaaccgctgcgtaagcgcctggcaatccagcagcataagctggtttacgccaaatccaacagcctgttaaagccgctggcggccaaggcggcgacaatcgaagggactaaccccagcctggcgatagtcgatgaatatcacctccacccggataacggcgtgtattccgcgcttgagctgggtatgggcgcacggcccgaaggtgtgttgttcgccattactaccgccggcagcaacatcgtatcggcctgcaagcagcattatgattattgttgccaaatcctcgccggtgaagaggagaatgcgtcgctgtttgcgctgatctacgagctggacgacgagaaggaagtggacgagccgagccagtgggtcaaggctaaccccaacctgcatatttccgtcgatgccgccgcgttggccgataccattcagaaggcccgtggcatcccttcgcagtgggtagagatgctgaccaagcgctttaacatctggtgccagggggaaacaccgtggatgggggaaggtgcctggaaagcctgcaaggcggaatacacggaattcgacctcgaagggctggcctgttatgccgggctggatttgtcctccaccagtgatattaccagcgtgtgctacaccttcccgattgagcgcggtgtgcgcctgctgacgcgccactatatccccgaagcccaattgcataaccccgccaacaaaaaccgcgccttgtaccgccagtgggtaaaacagggctggctgcgtaccacgccgggcgattgcatcgactatgaccgtatccgcgatgatgtgcttgccgataccgagcgtttcagtatcgagctggtgggctttgacacctggaatgccacacacctgcgcacccagctacagggggcaggcctcgatgtggagccgttcccgcaaacctttatgaagttcagcccggtagcgaaatcggcggaagtgttcgttaaccgcaaggtgattgagcacaacggcgatccggtgctggcctgggcgatggctaacgtggtgatggaaaccgacgccaacgccaacatcaagccgaacaagaagaaggccgccaacaagatagacccggcaatcgccttcctcatgagctttggtacttatcagctccagcatgaagaatttgcgttcgacatgagcgacgagcagcaacagcgccttgcggcgttcgacggtatttaa

SEQ ID NO: 432681 - DNA, 615 bp, Serratia marcescens
atggcttttattgaggttccactgagaacagtacgcttccacggcccgatggtagacatctttgggccgaagtttgagtatcgcgcccataacgtgccaaaggcgctcgaggcgatgaaaaatctgttggacggctttgagcgctacatgctggaggctcacaagcgggggctgacctttgccgtctttgtgggtaaacgcaacgttggccaggacgagctggagctgacgaaaggcacggaagatattcatctggtaccggtgattatcggcagtaaacgcgcaggcttgttccagaccgtgctgggcgttgccttgattggtgccgccatagcgttttcacctgctgggcttggtgtgttttcggcaacgggtgggtggacttctatggcttatgcaggtgcagcaatgtcccttggtggtgtggttcaaatgctctccccacaaatgggtggcctacgtatgcgccaagaccaggacaacaagccgagctatgcctttggcgggccagtgaacacgaccgcgcagggtaatcctgtcggcgtgctgtacggcacacgcgaaatcggcggggcgatcatttcagcgggcatctactcggaggatcaacagtaa

SEQ ID NO: 432682 - DNA, 360 bp, Serratia marcescens
atgatccctgtctctcttcagacactggctgaggtattgagcgctgaaccgatcggcgccgattgccaaattgtcgaggtgacgacagacacccgcaaggtgatcaccgatgacaacccgcgtaccgaagagccgcgcgcgattatcaacgatatcctgaccggattgctggatgccgggcaggcgctggtgatccacggccgcgccgaagcggtgaccagcgccatcatgcaggcgcaggagcaggatgtggtgttggtggcgggcaaaggccacgaagattatcagctggtgggcaaccgccgcctggattactccgaccgcacgacggtcgcccgactgctgggggtgctggcatga

SEQ ID NO: 432683 - DNA, 1041 bp, Serratia marcescens
atgaagtgtttatcgcggcttctggtaaagggcgcttttagcggcagaggactggaccactctgcccttaaaaatgataatcgatatatgaaaattgatattccatataaagacatcggtatcaacgaaaaaaagctatttttaacagcccatcgaattccgcttaaatataaagtttacaaaatccctaagcgccactccggtgtgcgcatcatcgcccaacccactcccgaagtgaaagaaatccagcgcaagcttgtaggttttcttcgaaccaggctgcgtatccataattgcgcgacagcctacgaggcagggaaggggatcaaggaaaatgcgcttaagcatgtaaaaaaccagtacctgttaaaaatggacttagctaacttctttaacagtattacacctgacatcttccagaatgcactggctcatgactcagtcgaactcgatgaaaccacatggacaacacttgttaatgtctttttctgggctcccggcaaaaaattaaccggcaagctcgttttaagtgttggtgcgccttcatcaccgttcatttctaactacattatgaagcgctttgacgagcaggtatcagatttatgcgaaaaatcaggtgtgacgtacacacgttatgcagatgacatcacattttcaactaaccaacagaatattttattttctttaaaagaaaatattggctcacttttgcaggccaatggttataaaagcatcaatattaatgagagtaaaacagtattctcctcgaaggcccataatcgacatgtcactggtgttacgttaactaatgacgggaaattatctgttggtagggataagaaaagatatgcctcgtctttgatcttccgattcagattagctgaactttgtcatgatgatatcctctttcttaaagggttacttgctcattattttcatattgaaccttccttcagattttctatggaaaaaaaatatggcaaagatatcatccatgcactaatgaaatatcagggggatgtacatgaaccggacaattaa

SEQ ID NO: 432684 - DNA, 1644 bp, Serratia marcescens
atgaaccggacaattaaaaaaataaaaatgggggctgatcataataactcgattaaagatcagtacaaaatgtataaatgttacaaggatggggtattcgtcgaaatcgatcctgaacaggccaaatactatcgccagcgatgcctgaacaatcttaaacaagcaaaattcaatttgagtaagattcggctggtaaattacaagggattcaatgagttaacgatagacttgaacaacaatgttattctcatagcagcaaacaatggttatgggaaaaccggtgtgcttgaagctatttacctttcgttatcctggttcttccggcttgtctatggttctaaccaaggctggcgttttggtgataaatatgtcagccgtttaagggaaaatgatggcatgctagtcactcttgatatttatctgcagaatcaggaaaaaaaatcgttttacaaaataactagtgctaaatctcttggtctgaatctcataaaaagcgaatacgcagattttaaagagcttgctgagatgtatgcggagtttatgaatgaaagcatcgtacctccgatgttttcctactattcggtagagcgcgggaaaaactacccggaaggcggttttgcatcatcactcgagacgacgcaaaataggctgctcgacaggctatatccggactcatctctgactatttccgcaaatatcttttccggatttataaaatgggcgtctgatattaaaattaaaaaaagcgtccagctggcagaaagtactcagggcagcatttattcccatgaagacgtcagcaccgtagaaaaacatcttcatcacatccacgcatccgaccttccagacgaagttaagcagaaactcatcacagaacaagaagccaaactgaaatatctcagagaatcttccggtgcccgaaacacaccgaacatcattaagatggaaaaaataatcgatatgatattccagctcggctgcgatttcgttgatgatataacatcaattaaattaaaatacgatgaaaaattggatgcggtcgatttagtatgtgtaaaacgtggctgtgaaatcagcgcctcatacctttcacatggtgaaaaaagcacgttatctttgctttttgatgtcgcattaaaacttatccagacgtgtggtatcgatgaccccttcaaggggcatggcatcattttcatagatgaaattgagctccacttacatccttcttggcaacagtctctgattcttaagctaagaaacgcattcccgaatgttaaaattattgccacgacgcatagccctaatatcctgaataccgttgaagaaaaagccatcagaaaaatcgaatatacggaagataaatttagcattgatgtacccgaattctcatttggcgctaaagcatctgatgtgcagcgcgaaattcaggatgtcgatgaaagatcgcctgttattgagccgacaataaatctaataaaattcaaaaagatgatgaaggagaatgtatttgattcatcagaagctgaccagctgctcgagaaaattcttgaatggggagatgggcgtgatccggatgtcactaagttaaaaattgatctggaattacgacgtaaacgcaaggcgaaaaaggaacaaaaggattaa

SEQ ID NO: 432685 - DNA, 729 bp, Serratia marcescens
atgcgggggttcaggaaaggtcgccaagaaaacgatatgatgaacgcgtatctggaggatgatccttggggaagctggaaagacggattttatgagtcgttaaccaaaacacagcgagatgcgctcaaatcagaaatttttcaggatcaagctggcctgtgtgcatattgtgaaaaggaacttataaaagaaggtgttaataagccattgggttacaaggttgagcactttattcccgaaaacagtaagcatatcaaagaatgtattgctgaaggccatcacggcccatttatcaattactccttgaggtggaccaacctttttggctgttgttatggcggtgaagagcctaactcagcaagctatgtgcaaggactttccgctaaagtcgagaaaagttgcgacgtccccaaatcccattataactggtatggtctgattctggatccttcaagagatctccctattgaccaaacatattttgaatttgatgaggacggtgtggtgcatgtagctgaagaatgtcccaaggtacagaggctaatagcgtctcaaaccattcaaaaactaaacctcaattgcagcagattagtgaagttacgattagcaacgcttgaaaaactgagtacccttgcaggtgaagaggattcggaactgctgattgaaaaagatgaaaacggattgtatggcgagtttatttcactgcgaaaatggtatctggcctgctaa

SEQ ID NO: 432686 - DNA, 807 bp, Serratia marcescens
atgactgagactaaataccttaaacttgttttaaatgaaattggatatagcgtacataatcttaatactatagctgttgctctctcaaatctgcctgccaattcagttccaaaccctgagttaaatatcaagtgggaacctaaaaatttagaaaagtcctgcattgctgcacgtagatttgcagttcgttcttctttggtgtttgcagttgaagctctattcgaatatatgagcaacattagtgatgatatcctgtggaagaaactcaattttgatttggatttcaaaacaaaactttctactaatgactcaaaagcgagaagattttctgagttttgcaaatctatacctggaatagaaaaagaatggtatttgctagttgagcttatgtgtcattggcgcaatcaaatagtccatgccagcacttcaaatgctggattatcttcttctgacaagagattcttggtgacgaaaatttcttttttatatgataatttttatcattttgatgtaatgaaaacattagaggactatgatgcggataaagttacactgaaagaagtgacgacactgattacctttttaataaaatgttgcaggaaaatagatgagtattatatttcttctatttctggtttaagcaaccaagtatataatgaagtattagacaacgatgaccaatttaacctattgagaaaacaggtaagcagtgccaaacgcactcgccaaattatgaagtatatcgaagttaaactaccttatctctcggtagagaaaataacagcgctcgcgaatgaatacaaataa

SEQ ID NO: 432687 - DNA, 5052 bp, Serratia marcescens
atgaatagttggattttagcgtcagttgctgtcgagcttgtagctaattcttttgaaagcgaagcgaattctaaacatcgatgtttccgagtaaaaaaccttctcaaagaagaagctcagcaatttgtcaaactgtgggaaaaacgcgcaaattccattgagctagaggatgtaaagcttattgctgcaagttccttgggtggagagattccctcttcttatattgctgaagaaggtaagtctataaccttctatcgtaatcacaacgaatccgggcttgtttatttagaaacagaagatcagagtgatgctcaagggcttcaaaattttttcactctcagagatagcaactttcttgatgccagttttgacactgcggccggcagttacaactcagtatttaaactaatatcagcaatggcttggaaaagtttaggcaaaactagtgaacccccttcgatgatgctctcgcggcttgaggaaattatcaagctcatccatccagaaatcgaaccgatcccggtacgtaagttcatcaaatacagctataatgtggctctggattggagtaatgatgaatatgctgttgatgaagaaaaagctaatgaattgataggtagcctattatggcatctagatatatttccagatcggaattggcgtaatgcagattcagaagggaaatcacgccgacgactagaattgaatatacgctactctgacctacgaacaacaaatggcgaagctgatccattagctttaatcgagcttattaagcggaaacaatttattaatgaaaatggtgacaagtaccccatcaaggagaatggtatatggcgaagtctttgcgagaaatatgttaataatcaaacgaatgatacactttcccagattccatacggaatttttatgcagcttttccaaaaagacagtgctggaatacaattaggagaaagagtacgtttagaacttgagcactcaaacagcgaaagattatctgaattggaagaaatggatgttatccatggactgaatcagaaacaacaaccagatgccgaacgatttctgtcaactgtcgccaaagaaggactcaccgctttagcagatctcatcagcttgcggacacgacggatgatcgagcgagttgcttaccctagacctcacgaatgtgagaatcctatcgtagaaacagtgaggcaacttcagcgctttaaacaatctactgatactggaaatatcgtaactataagtatagagttcgcaggggacagggatgtgttaacgccttcagtagggctgtttagtttcctctatggttcaacgttaaaaaccatatcagaagcaagccaagctgctgattgtcagtatgaatttacggtcgataatgagcttttccttcctaaaaaacctttacattcattctgttcgttaggttcggaagacgacgtaaacgatgaaattaactgggaaccagttccattgcgctggattgcaaggaatgaatccggagagattgtcgacatctcagatgtggctaattggcgaccaagctctatgcaacatatggtcctcttctggctattattggcagagccagattctcccagtataaaagggataggtggttgcttagccagtgatgaaataaagttgaacggcactcactggcttattccatttgttatgggaacgaccaatgtagctaatatcccaacagataaaaaatatatatctatagggcagaatgaaattactgaccaattcatcaattcaaaatacgagctgcacgaaaatataatctctgagggtttatccattgatgctataaataatcactttgatcgctggtccactcttttgaaagaggttagagacacatttgtaccaaatggaatccgaattccaattatcgactccatcttaatggcagattcaatttcattcagtgataccgacaggatctatttccccacccatcctctcaaacttcgttggatatctagctatttagatgaatctcggaaacttttattaaactctctatcgaattcattaggtttcgcaggccaagatggtgaaccttacctcgattggttggaaagacgctgcccacgagagataccacccgtggcaataaatactgatggtgaactactttacgcaagatctgaaaccgcatggttcgagcactttgcaaaacttgaaaatggtagccaaggctttggtgatgatcaagaagctctatcagcaatttgcgccaaagtttgtagctatgtagatgcccatccatataagaaagatggtctttcaatattactcattttacctccttcagatcttactgcatcagagctcattgaacatcttttccgaactacactcaaaggaggcaacgtggaggttacaattgccgctcctagaattagatgggaaaaaattgctaaggcagtagaaagcaccggagtctcaaacactcttgaaaggcgaaaaaaactttttcctgcccaaaatgttacgtttatcgaattcgatacaggttcatctctggaaacagcaatttcagaatgtaatttcgatattggtattgtaatgaacgtacttgatagagctatgcaacctcagcataacacggaacctcttacacaagagccaggccaattcgatgttctttttgatcgaacaacgaggatagattcaaccggggaagatggagcaacgtccattgtgatgagacctcgagcgcctgacctcgctctcgactcctggggaacccttgtagttcgttcaaatcgttgccgaccaatatctccattgcaaccagaaaatacagacttcattgagttacgcctcaatttttctggactggcatctttattcaatacaatgcatcaacattgtcattgggttatcacattggagcggcatatttcacgtcgccagattgaatcaattgaagctggtgcccctgatgttctgagtatacaagatggcataggagctaatggacttgggactcttgttgtatcttctcgaaccgggcgtgttttagtcgagtctaggctatctagaaaactacgaaaattagttcatgatgccggacaggcagataatttggagcatcttgcatctgtcatctatgatgagactcgctggacctccccacaccttgctctaaacgcaatgggagtttcacgagttactgaagagattctcggcctagccgtcgcaagagctttagctgatcaaatgtatccgctcccgaatagcgaaggtttcgcagtatggataagtctcgatgagcatgtcgaatggtttggaggcagaggctctactcgtgccgatatgtgccgcctcaccttctccatggacgagtctgaacatgttggattggacgtactagtaattgaggggaaactaagacagtcattcgatccacacggaattcaacaagccaagcagactcgtcaatttatggctgatattttagacactgaagggggtaataactctctatccaaaatagatggaaaattctggagagaaaaagtattttccgcaattgatatgtgtgctgaccaggctcgtattacttttagtcatataggttctagaacggatgaaagtaaaggtagtttgctctcacatataagaactatgtttagaaatggtacttactcgctaaaatcattaaactcgatgtactccatttgtctttgggaaaatcaatctcatgaaattgaatatcaaagggttgatgacgttatggtagtccgtacaactaatttacacatcctccctttattaagaaaatcttctttaaatgttcctgttaatgaccttactttgagctctatccaagataatcatttaatagctaatgatacatctcaaaatcctaacaatgttggcctagagcatcaagaaattaaaatattgaataacgctactgtcgctgaagcatcctcatctgtcaaaagagtctcgatgtcgcgtgagcaagtacaaaggatgtatgaggaaattttatcctgctttgatgcttatggaatttctgttcaatccgccaagcttgaggataaacccattatcgaagggcctgcatccattcttttcaaagttagaccgagaccaggcgtagatcccaaaaaaatctacgaaaaagcagatgcattaaagctacatctacaacttgaaaacgagcagtctgtttacttcggaattgataaaggttatgtaactattgatgtacctaaatctgaagaacagcgttattttgttgatgctcatgatatctggtctgattggcagaggccacttgaagcccttgcgactcctcttggagaagatcgttttggacaagtggttgatttaaatttctcatcatcaaattcaccgcatctactaatcggtggaaccacaggtagcggtaaatcagaagctctaaataccattctgtatggactagtgaaattttactccaaggaagaattaagattacttctcgttgatcccaaaggcactgaactaaatatgttcgcccgtttcgatcacctagaaggtgctattggttgggatgatcaagatgcaatcacacttctgaaaaatgctgttgatgagatggaaagaagatatagtgcattcaaggaaaaaaaggtccgcactctttctgatttcaataaaatatcctcgcagcaaaataaaattccttggtggatcatcgtactcgacgaatatgcagacttgacgagtgatcctcaaatgaaaaaagagattgaaaaccaactcaaaagacttgctcagaaggctcgtgcatccggtatacatataatcattgccacacaaaaacctagtggagatgtgataagcacaaatttgcgcgccaacctccccgctcaacttgctttaagagttaaaagtgggatagaaagtcgagtaattatggatgaaacaggggccgaatctttaaatggcaaaggcgatgcctatctaaaatccgaaggccgtataaaaagagtacagtgtgctcgagtcgcttctgataaatcggagtaa

SEQ ID NO: 432688 - DNA, 1290 bp, Serratia marcescens
atgtcagatataaaggcaccagttgtttcattaaaggtctttgggggagtattcgatatcgacggtgccgggcaatatcccggcatcgagttactcaactttgttatttgctcacctagtggactagagccaacggaaggtaaaatattaattcaacgtgcagcacatgatttttcgagaagactcattcgtgatgaaacattacccgaagaagaaaaacgtaatgttctcttggacatgcattcggagcaagcaatatcaaagcttctcaggtcattagaattagaactcccaaatttagtaaaatcgaagagttgggaaaggacacactttttcccctttactaagtcgctagtgcattgggatgcaagaacgagaaggggtaaagagcaaatactattggagagaagatatttccgtggcgcggggacatatgcatttattatcttgagaacagataaggacctgaaccgtctcgaacgaattcgaaaaggattccaatatctctacccaaataatgatgaatcaccactcgaaatgctcgcaaagactctacaagatgctggtatagctgataaaaagcctgttgccgatgaagtggcatcctcaacatcgactgaactgatacatgatgactgggaagagctttatcgtaagggggtagataatattctcagttatcattctgcttccgtagttgatcgcgttcgttccttagtgacttggacaggaatatggtcggtaataatgatggctggccgagcagaagctattatcacttgcaatagatccggattcattctggattgtgctaatacacatcctcagcttagaagagcatcacaaaagaattataaaaaccaattaagtaatatagacaaagctgcaacattgaaagcaactgagttagggggtgaactaagtactcaacagttgggtaaaattagaggtttttttggcaatacagtcgtttcatgtggtatagggaatgcttggaaaggacgcagacattttacactacgtctcgaatcgatagatgccttggttatggctggcattccttgtggaaaagagatcgagtttgaacacttcatgactgactggttatatcgtcattgtcgcctaattattggaaggaacgcagctagttctgagaatcttctcaacgatcttgatgcaactatatttgaagaaaacgaacgttcactagcagagcagatgcttaccgccggaatgctcaggatgtactctgatgcaacacggatggtttcttatgggggtgataaatga

SEQ ID NO: 432689 - DNA, 1875 bp, Serratia marcescens
atgcaggaacaacgacaccccagaacaaacggaaatgttgccagaatgaaccggtatctacctttttcggtctcacatgagcagatatacgaggaatatcagacagatgaagattctctatcgttagataccgaggccctaaaatatattctttcagcactacatgcaggagctcggtgtatcgtacttacaggtgatgccggccatggaaaaacacatttatgccgtaagttactcagtaattacttgggctacggggttgcagaaagcaggaaactgctactaactcagtgtgatggaaggtctatcattccccccattgagcccagtacccaaaccgctctaaggattcacaaagacttctcggagatagaccctgacagtgcggcaaaattcctagaaaagtacggtaattctcagggagagtctctagtgctttgtgcaaatgaaggtcggctacgtgctattattagctcacaatcagctgacaaggtttgcgtcgaactcaggcacctctttaaacaaacctttgagactggcctctcatccactgataaccatctacacatcgtcaatcttaatttccagtcaattgctgcccataaactcaatggctccgaaagtttagtgagaagaaccttggggcattggatcggagatggcagacgctggacatccagctgtaattcctgctctttagaacttacctgcccaatccgtaaaaacagagaactgctaggagatgatgacacaaactctcatatccgcattaataaattagagagattcttctcaacagtcgaacgattgggacatgttataaccatccgtgaaatgttgatgctgatcgcctatatcgttacaggcggactaacttgtgaggatgttaggagaaaaaatagccgatcaccggaactaggatggcaaagtgagtatgcgttctataacctacttttttgtcgccctacagaaattccagaagatagacttttcagaggaatccccatcctagaggacatttctaagttggatccaggtaaaattgcacgacgttcggtcgatgaaaaattactgaatggagaagaggtttatccaacgggtcaattagacttattgtacagtatcactattgggaacaataaaaagatcatcgatgccgcaaatggaatagatgaagtaatcggcaccccccaaagccgaaccgacctgtcaagagaggctgaatatataaaacgggtcgttgccggtcttagaagacgctcattttttgatggcaatactgatactaaggatatgctttcacgattaggcttcaagtatggagacgattttctagaaatgctcgaaggtgagatgaaaccacaagcaaaacttaggatgaaaaatcttgtagttgcaggattacatggtattcaaggacttcgcctctcatcgacagcaacaacattatttttagttgaccctgccttcggaagagcaagtgcagatgctgcaatcattgcccgccagattcccattcgagatattagtttactctcggaaaaagccgcatggggtaaccaagaaacgaaatggttacttacagattctgttgattggttggatagaagaatagttatccgtatagatgataaaaccgaagaaccacttaatattgccctcgacttgatggcattcgagtgtgttattcgttcagcatcaggtttcatctccgaaggtttctatgctcaccagatgaagagaattagagcttttctaggaaaactggcagaacgaggccgcaccggcaacgcacaaatatccttatttatgaatggggaagtcagcactgtatccctagatatgggcgtcatccaagtgagcggaggagcttaa

SEQ ID NO: 432690 - DNA, 399 bp, Serratia marcescens
atgaagcttattgtcatcatatgttttctactattgctgctttgtgtattgattcagtacctttactatcgccgaattcgtacagagtttgataatttctatcaaaattatgttgttagcaaatttctcgttcccccttttgttgtttttgctgataatctcggctttattggcgtctcactcaaagctcagtggtttctctggctattaaacaatcgtaagataaaggtgggtcgtaatacctatctggacagaaaaacctacgaatttgtacagaacactgcatcgaaaagattacaacgttggctccgtaatgacttttggctattaatgctgcaaggtgcgatcctgatattcatgtgcattatgatttattgcattaataaagcatacagttag

SEQ ID NO: 432691 - DNA, 225 bp, Serratia marcescens
atgcagcttacgggtcccgatacgtgcctgacgtactcttattgttttaacaaaatcgacgatccggacatcacgaacccgctgcttactaagccgtgtattgtgctgatactaggcttgtcggctgtgtcccaggaactggcaggcccgggtaatggttatttttgggggctgtttttgcgtgaggacttgcctagccgcttttttatgacactgatcccataa

SEQ ID NO: 432692 - DNA, 1857 bp, Serratia marcescens
atgggcggatttcgcaataaacggacgccggtaaaaaggaaattgccgacaggaacaatcaaccttagccaaagtgtgaccacatttggcgttggcgcgctgattgaggttcgttcacaacaggggcgacgtaccagaacggcatctgcgatcattagcggtctggatatgtggcgagaggataaactcgccaacattgccgaacccgatctatgccgcttattaggcgttactgagctgaaggctccgccagcggaaacatccggccttgcgctgcctgcgcgccgttttccgcgctggctggagtgcaatcaatgtcaccgcttaggtatcgtgggagaacagttcgatgagcaacctgatgggatcccggtgtgttcaagtaacgactgccaaggatggggggtgccaacccgtttgctgagtgtatgctacagccacgaagaagggcaccattgttccgattaccatattgatgatttcccatgggtgtactgggcacataaaaaaattaagagcggggtctgtggagctccgagattgcggattagaacggtgggggataaaacaggtctcgacggtctgagcgtcatctgtgcctgcggggctgataattcgctcaagggcgtactgggtgacaaagcattgggtcatattccctgcaaaggcaatcagccttggctgggtatgagcgacgcctgcacacgaactttgcgtgcgttactgcgtggtgcgtctaacgtctatttcccggttacagcgtcaacgatttctattccgccaaactccagccggctgatgcagctgctgaacagtacgcgcttttcagcaattgtgaccttatatcgcttgggtcgccagatggcgtcggaaacagcgggacatctaagtactttcccggatttttccgcgttttcatcacaaaaaatagaaaatgcgcttgtatcgtttaatcagattagcagctcgcgttcagaacaagaacgtaaaagagaagaacgcgaggcactcatcgctgactatcctgatcctgtgaacgaagagaacgatcctcaagatgattttgaagtcgaaattgtggggggagatgcgttagatgcggtatgtaacgggcttttcgtgtttataaacaccgtctctcttgtgcatcgtttgcgcgaagtgatcgccttcaggggatttacccgccttgagagtagtatcacgacaaaccgcttcacacagcgctgcgcgcctattgctagggagagaaaatcttggctgccggcgatagagaaccggggagagggtatttatattgagcttaacaacgctaccctgactgagtgggagcaacaacccgatgttacgcggcgaatcggcttgttgatgcaaaattaccagcgctcatcgcttgaaggtgcacaggagggggattatcaacctgatgccagactggtgttgatacatacgctctcgcatctattgatccgccagttatcgcttgaatgcggctatgccagcgcgtcgctaaaagagcgaatctattgttcaccagaatattgcggtgtactgatctcaacttcatccgcggcttcggatggtaccttgggtggattagttcgtcagggtaaaccttataactttgcctccacattaatcaatgccttgcggtcggcagcatggtgctcatctgatccgctgtgtctcgacagcgaggggcagggcactgaggctttgaaccttgcggcatgccatgcatgcacgttgatctccgaaacgtcttgtgagctgcgaaatgtttttctcgacagggggcttgtaattggcacgattgaaaaaccagaggtaggctttttatcagcgctcttgctgtag

SEQ ID NO: 432693 - DNA, 3072 bp, Serratia marcescens
gtgaataatatacatcaacaagcgcgtgacaatttcctgtcggaagtgaaacggcaaatgattggccctttctgcccgtcagaaattatcacagtagcgccatgggatttgtatcacactgggatgatctggcctgcagggagtaaaattcagctcgatgagtgtgaggaggagaagcaagaggatgacgatagcgtcgaaggatttatggatctcgttaatgcagctaggcagagtgcaattggtttcactttctttgtcagtgattcggctacctcgttttcattaatgctagaatacgcactttatacagaaagtatcaaagataaagagccaagctggcgcagagtaccattttatcatgaactgaacgttaatatcgaagatttaacctacggaacgcatgatgtaattttaaacgatgatcatgtcgttgtaagagttcgggcaaaaaaggctaaagatcgtatttctttaaccgtcacgctgatcaaccaaaaaccgatcacctccctctatggcgaaggtattttatatcaggccgagctgagtatcgctgcagaagcattattatcagcaccggtattagaccatatcgtcaatcacgatcctgaatactggcaacacgagttgctctatcgtgcctctgccaattttgctaccggccacggttgtgcagttcactgggacggggaatatcctaggaacatctcctcgtgctggcttcctgtgcatgaagtgcttaaagcctcgcctgaaatagaagatttaagtggtacaccgctactcaatatgaaatttattattgagtccgatgattcaacgttactagaacatctggcgctgatcccagaaaaatatcgcgcttggatccatgaccagaccactcgggtagaggcaattgtgaatgcgttcgtgggagagaggcgcgaaaaaattcacgctgtggcgatgcaaaatttgcacgaatgccaaaagcagagtgacagaatagtggaaggcattcgctgtttaagcagctcggtttcgttgatgcgcgccttccgtcttgcgaaccagacaatccggaagagcattgagcttagcacgttgagaaaacagggcgtaatgaattttgaaccgcgctggcgccccttccagctggcgtttttgcttctgtcgctgccttcgtccattgatcgtgaccatcccgatcgcgaagttatggaattgatttggttcccaactgggggggggaaaacggaagcctatcttgggcttacggctattttaatgtttcaccgttatctgacggctgaatcgccccaagaggcagctggtactgtggtgatgacgcgatacacactgcgtttgttaaccatacaacagtttgaaagggccgcgctcatgatttgtgctgccaacatgatacgaggtgaacaagccgatctccgatcgtttaaaacgtttgatatcggcctatttgtcggcggtggcgcaacgccaaacacgctggaaaaagctggtaaactccttcaggagaagaccgacgatccagaaactaccttgccagtgcagagttgtcccgtttgcggtgcgatgctctcaacacgtcatcaggcgattcgtgatggggttttgctgacttggtgcagcgactcctcctgtattcatggttcgccagatttacctttgcccctgatctttgttgatgagcaactttatgactcgccgccgacatttttgattgggacggtcgataaatttgccaatatgccttttacgccagacatggcgcgtctgcttggccgggggattgccaccgcgccgttacagcttattatccaggacgaattgcacctgattagcgatgcgcttggcacggtgactgcgttgtttgaaacggctattgatgaaataaccagcgtagatggcaaacgtgtcaaaatcattggctcgacggcaacaatcagacgtgcagaagtacagatccgaaagctgttcaatcgtaaagtcatgcagtttccgactccatgccttgatgcggataactccttcttctaccagagcgataagcaaaatccaggacggttgtatgtcgggttgcatgcgcagggccgttcaccgaaacatactctggctaggcttacgggtaactgtttgcaggcggctgagtatgtagaaaaaagtgcccgtgactatttctacacgctggtaatgtacttcaacagcctcagggagttgggtggctcactgctgttattgcaggacgatattccccgttaccttgaggtaataagaaaggatgagaacatcgaccgccgcgttattactaggtttactgagttaaccagcaaactgagttcggctgaaatacctcagattcttgatgacttaaatgaacgctggcctgccagtaccaccagtcaaaaagaaccgattgacgcagtgcttgctacaaatatgatttcggtaggggtggatgtatctcgtcttggggtgatgttagtcaatggtcaaccgaaaaatacctccgagtatattcaggcatccagccgcgtcggacgcgatacaggcaaagccggcatcgtatttaccttgtataactggactcgtccccgtgaccgttcccactatgaaaaatttcagaccttccacagcgcattctatcgtcatgtcgagtcatcaagtgttacaccgtttgcatcgcgcgcgcgcgaccgggcgctgcactccgttcttatcgccatggtgcggttaacaattcctgaatttgcgggcaataaaagcgcaatcaggatacatgaaccggcgctgaggcaacgtgtcagggcattgattaatgtcatttgcacacgggtgaaagagatagaagcagaagaggcagatgatacgcgccaatatcttgaagatattttatatgactggatggaaaaagcgcggatgactagcaagctcagctggacaggttaccacactgacagtaatgcgcttttgaaaaataaagtgaatggggacgatccatgggaaatgcagcgctcagtgcgggatgtggaagcgcaggttaaggtcagcatgttggttcaggagtag

SEQ ID NO: 432694 - DNA, 2280 bp, Serratia marcescens
atgtccgtcagaagttacttgaattattttattagcgatcttggtaagttagcgcgccagagtcggtatgatactgacgtgcttcatgctatccttgacgagctctcgtgtcgaaaaaaatcgctggcgcgcagagagctgaccgacgagatccataaatatctctcctgccagcctccacccactgttgcgcagaggcagaccgttagttgtagccaggtgtcttctgctgcgaaattgccgaaattagaactgaatcaaatcgaaaaagagcgcttgaccggcaagttcaataccagtgaaatcccaaatgcataccgtcgcgctattcttaataccacgcatattcataatcttcgtaaagagaacctgctcagaatgcatctggctggtatatgtggaaacgatgccgccgcgattcgcggcataattgaattctttcttcatggtcatactgtcgcacatacagagcggccagaggagaataaaaaggttactacattaatcaaatcaaccaatactcggaaacgaaatgaatttaacgacgtaaaattcacagataatattgtggagataaacgccggtcagagcagaaaagcagagagtgaaatttgtgccagtaaatctgatttttatcaagcaggtctggataaatgtattattctgagcgcaccacctggatgcgggaaaacctatagcatcgtagagcggctggaaaatcatgtgatggccttgagtgaaccctacgatgctaaaaaaatcttggtgctgagttttactagaaatgcagtcaaggagctgaagttacgtctggataaacatagccagagtgataaaaccgtgagcctagacctcattcgagtgatgacgtttgatgccttagcctacagtattttactggtcagtgacgtggtatcgtcagacgacgatttcgacaacaatatccgtagggcgaagtcgatagttattcaggaaaagattgctgacgttgaggtgctaaaaactgttaaatggatttatgtcgatgagtatcaggatctggtagggtgtcgtgctgattttaccattgaattgatgaaattagtcttaacgcggggcggtgcagtttcgcttttaggcgatccttgtcagcaaattatgaatttccagctcaggaaccgcaacgatacaaccaatggtggttttctgcacgaatttaagcgcctggcaggcaaaaaacttttgcaatacagactcaacgaaagctatcgatttatcactgcagagcaaaaggagcgggtaaaaaaattaactgaccagcttatgtctgagcaaaccacagaaatcgccagccatgactatgcgcagatggttacgctagatgcaattaatgaaggggatgcagtcctatgtatgcgcaatatcgactgctatttaatttcacaggtactcattcagcgggggttttcagttagattgcagacaggcggtgataaatcagagctaccaatatggctctatcgaatttttactggctggcgtcaggaaacaatgtccgtagagctttttcagcagaagtgtcagacaattttaggctgtaatggcgaacaggaactggactatctttgccgcgccggtatagtgatgaataacaatatcctggttgtcaggttggttcagaatgcagaaaaatacagtgccagagttcccatggcggcagcaaatcaaattatagtctctacagtgcataaagctaaaggcctgcaatttccgcgtgttttcttctacagcaataatacgcattttgggcgtaatcgagacgcgatgaatgcgttctatgttgctgtgacacgtgctgaaaagcacttctgtatcttaaacgacagcgcaatcaaaacggtacgtcctgcacctggcggaatgtacatggccgatcaaagcctgttgctggaagggttcaacgagatcgatttgaaatcgcttattcctgaacctgaagcacttagcacagcgtacttagataagttacttaggggagagaaccggtattttgtcagccgtcgtgaaacgcaggtttggttatttttcgaagtggataatcaaacgacgatgcgtctctatcggatgccaaggctagaaagaattgcttggatccagagtggtgaacggtattatttgaatttttcgatggctgaagtgtcgacatttttttatcctggtgactcggaatggattgagaaaattgtcgggccagcctgcttattaccattgcccatatttaagggcttatgggaggtatag

SEQ ID NO: 432695 - DNA, 975 bp, Serratia marcescens
atgccaacgctatttaaaacaacagctatagccaggatcgctggcatcctggccttattattttccttttccgcccaaagtgagggcgattgctatgcgatatggcataatccgctaagaattgagcaatccagcatcaccgtcccggcaggcgctaaagtcggcgatcttatcggccatggtgaatcttatttttccgtcaggctgttggctaatgccatacagttctcctttggcgagcccggcgatctggtgttgcaagcctacacccgattggcagcaacagcgttaagatactataacatccccgtctatcagaccggctggcagggggtcggcatcgccatgtcgctcaatgatcaaccggggctttgggatatttatgcgccgcgtagtacccccgtgggctatgttcttggcggcaacttcaaatattatctgatcaagaccggtgacataccgcctggcgccatgcccgcattttcccctttcacctataactacacctgtttgagagcaaccaacgccaggcggctgggtgatacctattttcctgccgtcaacatcgcggtggaaggttgccgcctcagcacgccgtcgaaacaggtttttctgggaaaaatcaatcggcgggcgctcacgggaatagggagcgtgtcggggaataccccttttagcatcgcgatggaatgtaatgctaataccaaggtcgatctggaaatacgtggtgaaatggctaacggcaatcgccaggtattggcgactacgccatcgaaagatgcggccaccggcgtcggcctgcagatactgcgcaacggcattccctttgaactgggttctaaggccggtatgttgaaccagacattagtgggcatcaatgagatcccactcagcgtgcaatactatcaaacgagagaaaacgtcacgccgggtgaagtcaatgccgtcgcacagttcaccgtttcttatcgctag

SEQ ID NO: 432696 - DNA, 198 bp, Serratia marcescens
atgtcgacgcgctatcaggccggcgatattgaaccgcgcgcgttcgcgttcgatgccgccagccactctctctatgttacgaatgtgttcattaataccgttatgctgttcgatttcgatgatgattcgggggagttgaaggccaggggagaggccgcgacgatctctaccccgacggatattaagttttttaattag

SEQ ID NO: 432697 - DNA, 885 bp, Serratia marcescens
atgtcattaataaaaagcttctccgtcggcaatggcgatatgttctatattaggcataacaccgataattttacgatcattgattgccatatcaaccgcgataatgcagagagcatcatcgcagatataaagaagcaggctgccgacaagggaataagccgttttatcagcacgcatccggatgaagaccacttcggcgtaattgagcttcttgatgccgcattcaagatatacaacttttatgtagtcaagaataaggccatcaaagcggaagaaaccgtttcctttaaaaaatattgtgaattgcgagatggagataaagcattttatatttcaaaaaactgtaaacgtaagtggatgaaccttagcgacgaagcaagaaaaagcgcaggcctgtctattctttggccaaaaacagacaacccgcattttactgacgcattgaacgccagcgagcgcggcgaaagttacaataacatttctgctgttgtccgctataaactgaacgatggtgcaagcgtgatgtggctaggagatttagaaactgaatttatggaaaatatcgtcgatgatatagaattacaggaaaccaccgttgttttcgcctctcaccatggccgagattcggggaaaatccctaattcctggctagataagattaaacccaaagtgatcattatcggcgaggctccctctcgtcatttgcattactatacgggttacaagacaattacacagaatcgtgccggtgatgtcactatggagtgtgtcggccgtaaagttcatttctatgtttcctgtaaaaattatcaaaatgataagtttgataacgaatatgctgacaacgtagaactagggcgctatatcggttcagttaacatataa

SEQ ID NO: 432698 - DNA, 183 bp, Serratia marcescens
atgacgttgggcgaaattgattaccccatcacgtgtttttttattttatttaagattaacgcaatcacagttattaacgcgttgtgtttgtgctactctgcgcccgccgttataaagtactgctattcacctcttttgtgtgaatcgttcaaacttaactgcttcattattaaaacgagataa

SEQ ID NO: 432699 - DNA, 1029 bp, Serratia marcescens
atgcaacagaccatcctgccgccgcagtgcgacaaccagaacattctcaatatcacgatgaatttatatctttatccggcggtgcttatcgcgcatcgcctgggtatatttgagtttatcgctgaatctccctgcacgttaacagatatttgtttcacagcgcatttggagagacgaccggctgaagcgttgatgacggcgttgcagtctttaaagttaattatcgccgacggcggaaaattgactctcgctcccgaaaccgaaagctttctgctaaaaaagagccctcactactttggttactattgggatttactgtatgagaacagtgaaaccttctcgttaaaaaatatggagtgcgccattcggaaaaacgcctcgcaggcctatggcgaaccggaagtcttcgccacgcacgagtttgatgcggaaaaagcgcgccaattcacgcgcgccatgcacagcctgagtatcggttccgcctgcgtttggccgacgcggcttcccttggcagcgcatcgcgtggcgttggatatcggcggcgcttccggcgcacacgccatcggcctggcaacccattggcccgagctgaagggtatcgtgttcgacctgcaggaaataggcccactggcggacgagtacgcccggcaatacggtttaagctcgcgtatcacccactgcggcggggacatgtggcgagacccttaccccgccgccgatctgcatgtgtactccaatgttttccacgactggacgccggataaaaaccgttttctggcgcagaaaagctacgatgcgctgcccgtcggcgggagaatagtgatacacgaggcgctattcgacgatgccggcggcccgccaaccctcgccggttacaatctgctgatgctcagttggacaacgcagggccgccaatactccggcagggaaattggcgacctgctgctcgacgtcggcttcgagcctgctcaagtgctgccgtcgctcggctactacagcatcgtgacggcgcaaaaaacccaggcttag

SEQ ID NO: 432700 - DNA, 249 bp, Serratia marcescens
atgaaagtctttatcaaaaaatggggcaacagcgcaggaatgctggtgccctcagcgctaatgaacgagctggaactccaggtaggtcaggaaatggacatgcaggtcatcgatggaacgttggtcattaaaccggttaagaaacgctattcactgcagcaattgctcgatagctgtgacggtgaagcgccggccgccgcagacgacaactgggaacacatgccgccggcggggaaagaagtatggtga

SEQ ID NO: 432701 - DNA, 351 bp, Serratia marcescens
atggtgaagcgccccgtttttcagcgcggagatcttatccgggtcagcctgaatcccgtggttggccgtgagcagcaaggcgactttcgtccggcactggtgctttctccccgcgagtttaatgcgctgggcatggtgctagttgcccctatttcacaaggggctaattttgcccgtacagcgggtttcaccgtcagcctgagcgggagcggcaccgcaacgcagggcgtcatcttgatcaaccaggttcgcatgatggatctggccgggcgcagcgcgcaattcgttgaacgtgctcctggcgaagtcatcgccgacgcgctggcacggcttcaggcaatcatcgactaa

SEQ ID NO: 432702 - DNA, 1107 bp, Serratia marcescens
gtgtacttattcaaatattacagaccggacttcttctttgataaagctatcagatataacgaattatatttctcatcaacagagcaactaaacgaccctaatgacttaaaaacctcatatttctttgaagatagagttgatctctggcaaaggcttttggaaagcgaggtgtctttaggtgttaaaaatttaaaagattttttggatttggacggtgatcgtcttgcaaaaaaattgtgccaaatatttttaggctcttctattgatggttccatagaagaacttcaaagccttttcacaaaatacaactctaaagtagcgactgctataagcctacatattaaaaaaagcgatttaattgatcatggattattcgaggattcagaggaatcaatatctagactggtatccctctgctctaatgaaattagagagagggtcctaaaaggattgcgggtaggtgtctatagcgtttcattttcaatcaatgccttagagccaatgatgtgggcacattattctgctggtttcaaaggttgtgttgttatctatcatgcaccaaaaaatatcattcctctaaagaggaatatctattccgatgaatatattaactatcctatagacagcgttgaatacagaaaccatgaaaagcacataccgattctacaaagtgttttgacagatgatcttgcgattaggaaaactcttttggtgaaaaataaattttggaattatgaaaaagagaagaggattttcctcactaaaagatatttaacacagagtcttggtaggtttaattttgcattgtctaacgacaattctgaccgtatatatcatcacgccccatcattgatatcaggcgttatttttggccccaacttcgataagcagaaaaaggagtcgatagaattactccttcgtgataaccggagacataccccttgcgacccattttatttgtttgatactgaacttaccagttctggaaatataaaaatagttcgatgcaaggaagttgaatccagtttcaacaccggtaatacaggtgaaatctcaattaaagaaacacaagaagtattgattaagtttggtattataaatacatga

SEQ ID NO: 432703 - DNA, 1269 bp, Serratia marcescens
atgtacgcgcttgctgatgtgaacagcttctacgcgagctgcgaaatgttgtggcgaccagatctgcgagggcgtcctgttgtcgttctgtcgaataacgacggatgtgtcgtagctaggagtaaggaagcgaaggcgttagggctaaagatgggagagccctatttcaaaattaagcgggaatttgagcgcgcagggggcatcgcgttcagcagcaactatgagttatacgcagacatgtctcagcgtgtgatggctgttttagaagaaatggcgcctcgcgtggaagtgtattcaattgacgaaagtttccttgatctgactggcgttcgtaactgcattgatctggatactttcggtcgtcaggtgagagccaaggtactgcgcaacacagggctaactgtgggcgttggcattgcccaaaccaagacgttagccaagctggcaaacttcgcggcgaagaagtgggacaagaccggcggagtagtggatctatccaatgaagggcgccagcgcaaattgatgggcctcgtgccggtcgatgaggtctggggtattggacgccggatatcgaaaaagctcaacatgatggggattgaaaccgcactgcaactggccgacgcgagcacgacgatgatacgcaagcatttcagcgttgtcattgagcgaacggtgcgagagttgcgcggccagccgtgcctcgaactcgaggaatttgcgccgacgaaacaacagatcatctgcagccgcagcttcggtgaccggatcaccgagtatgaccagatgcatcaggctatttgcatgtacgcgacgcgtgcagcggagaagctgagggaggagcatcagtattgccggcatgtcagcgcgtggctcaaaaccagcccatttgccatcaatgaggaatactacggcaacaccgcaagcataaaactgagcacacccacacaggatactcgcgacattatcgccgcggctatgcgttgtctggatgcgatttggcaacccggtcatcggtatcaaaaaggcggcgtgatgctgcaggatttttacagtcagggcgtggctcagttgggattgttcgatgagtacaaaccacggcataacagcgagcaactgatgggggtacttgatcggatcaataactcgggcagggcccagctatggttcgctgggcaaggggcacaccagtcgtggtcaatgaagcgtgagctactttcaccggcatacacgacacggctaagtgaccttccacgcgctcgggtgtactaa

SEQ ID NO: 432704 - DNA, 783 bp, Serratia marcescens
atgggtatcgcattattcgataacagcacagacctgagcggtaaaactaattttattatgcctcctgttcaggatggtttattggcctggggacacttgggcggaagtattgacaaatcattaataaaccttgcgcgctatcaacctgcatttactgtagttggcacccctgaggttcatagtaattatttacgttttaaggggggtagggactttttaagaacctctgttttccagcgtcgaaatcacacgctattttgtattgctcgttcagatgacacgtttgctactgatgagcacaagccaatgtttattggtacattcagtggccagaacgttgaggctcctaattttgtttctcacggtttgtcattgttcgtaaacaataacgatccaggtgcgccaatgggtaagttgactgctcaagcaggggtatttaacccagctgcaccagcaacatccacaccgctttcagttaacgttgttaaggacatgtccaagttttccattatgtccgtaacgtgtaccaatacgagcattacagtaaaagattggattaccgggatcatggcaactaacccattccctgccggcactattcctgcgctttcaaatcgggcgtttgcggttggcggcccggcaaatgaaacgcagtcattgaagggttacaacgatatggcggcgttcatcatctatgaaggggtgttaaccgaagttcagcaaagccttgttgctggtcgccttcgatccttctgcggcaacacggccataccactgtactag

SEQ ID NO: 432705 - DNA, 1926 bp, Serratia marcescens
atggctaccacaccaactacaaatccaataccaagcgaagatattagggacttgaagtttaactcagggaaaatagatgaggtagttaactctggaagcccaacatataaagacaggtttggaaatgaccgttatacaattgaaggtattagaaagacgttatcaccactgggtaaaggatacactctggcagaagctaatgatgcaattgcttctggtgaaataattaatggtgctgttttttatgtttggtctgatgatagctttaccattgcggacgagtataagaatgttaatggggttgcaacgccaaccggaaaggcatttcgtgatttagttcgtgttgatgatggggatgcaatttcccatgttgatgcaaacggatatccttcagcatttattcaaaacggaaatatctatgctggtgatttggaaatttctttattcagcggagatggaatataccttgtagacaagaacgggtatgcagtagagctgcagatctcttcagaaaaccctgatgcagatagctggcttgagcagcaaacagagaaaagtgaggtattggcacgccagagccgcgaggcggtggcttctcgtggtaataacgcgattcgcccgctggcgcagatagtccacgacatttattacgggcagtctctacagaatggaaccgagggatggccacgtctgagcactgtacagccgcttgataacctgatgtttggtgattcggttatgccggcgtcaccaactgctgcggtatttactccccgcaatggtgcggcgttaaagccattgatcgctacgtgctgcgatgccaacggcaacgcattgactgattcgcaagtagctgcactggcgccaggaactatcgcatatggtgaaacgcctgttgaggggtgtctaaattcatggcgtcgtcatcacctcgatcgcctcgggctttcatctgaacctaatcgcctctttgttggctcggcaacgggcgtcggcggacggacgattgcgcagctcagcaaaggcgcaagcccggaactatataaccgcttctacaccgctatgactggtgtgaaagctgtcgctgatgctgaaggaaaatcgtatcaagtcggctgcatcgttcatatgcatgggcaacaagattacccaagcgctacaaaggagtatttcaaaacagcaactctacagttgcgtgatgacatgtacacggatgttgcgtcagtaaccggtcaatcgcgaatgccagcatttatcatcgaccaggccggggcgtctttcacgcgtgatgaacataatatggctgtcggcatggcacaaatcgaacttgctgatgagaacgaaaatattttcttggctggccctacgtacccctacaccgataaaaacggacacttggattcaaacggttatcgctggtttgccgaaaagctgggcgagatttcgttccgggtatgtgaacttggccaggactggaagccgctgcagccaatcactgctttttaccgtggtgttgacgtactgttgccgatgcatgcaccggtgccgcctttgcgttttgccgcaccttatgttgtgaacgcggcgcaagaatacgctgacaaaggcttcacggctatcgacagattcaatggttctgacacgccgatcagcattttgtctgtagaaattcgtgggctttcaacaatccacatcacactgacgcgcgaaccgctcggcacgctactgatccgttacgcggacaaggccaatcacaacggcaacggaatggtttgcgactcaagtaatggacttagcgaaagcaagtatgaataccttcctgatagcgggatgtatccatctgcaaatatacctgaattagtagacaactattacgacctcagaaactggagtgtcgcctatcaaatcacagcagaagaggcataa

SEQ ID NO: 432706 - DNA, 540 bp, Serratia marcescens
gtgcgtaaaaatctgtggctattagttttttgtattttcctatcttcatgtgactcatccccatcacaagaggatattgagaataaagcgaatgccggtgattctgccgctcagatagagctttacaaaatgtatagctcaggcagagctagtggtggaaaaaatgatagtgaagcaattaaatggcttaagatggctgctgaaagcggcaatcctgatgcccagtatacactcggaactgcgtactctaatggttgggaaggattaactaaaaatagcaagctgtctgctcaatggcttgagtcggcagttaaaggtggaaataaaagcgcgttgtttcttaccgcaatgaattatatgtatggctggggagttgaggaagaccacgtaaaagcttatgcctatctgttggtggctcagtcgtttagaaataaagcagccatttctgaagaaactaaattcaggtattctttaaataaagcacaaagagtggaagcggaagagttagcctctgatttcaaagaacgctacttcaagtaa

SEQ ID NO: 432707 - DNA, 150 bp, Serratia marcescens
atgaaaaagctgctagcccttgtcaccaaccaatacttcctggcatgtgtcgcttcaaccatggtgtttgtagcaacgggagaacaaaaccaccttaagaacagcatcgactatggcctacaggctgtcttagaagccaaaggtagatag

SEQ ID NO: 432708 - DNA, 525 bp, Serratia marcescens
atgaactatccaacggtatctgttaatggtgtatcggtacgagtagacgaggaagggcgttatagtcttaacgatctccacgcctccgctgtttgcagcgctcaggccaaagaaaatcaggggccaagtcagttccttcgctccaaaaaggttaaagatttcgttcaaaccttagccagaatgcaaaaatgcactctggaagaaaatcaaccagttaaggttattaacggcggcgtaaaccagggtgtatgggccgtggaaattgttgcaattcgctatgccgcatggctaagcgctgagtttgagattcgcgtgtaccaaacttttcaaacgctgatgcgccgtggttttgatgccatgtcgcgcctgaacaaaatcgactgcatcatcaagaccgaatccaaggaaataagccagtgcgccagccaaatggcgaagtggggtgtcggcggtcgaaaacgccttcttcacactgcccgagaacgtattgctgatgaagtgcagatgtacctgcccggcttttga

SEQ ID NO: 432709 - DNA, 237 bp, Serratia marcescens
atgtacgagttagaagatttggtggatgctttaggtaaagcactaagcaatcaacaagaacgttatctaaatgttggtgtgtttacaaaagatgaacctgaaaatattatcattgaagcccgtaaggtaaagcttattcaagagcgtggacgagaaatctccgtaacttatcctttgaaaaaggcatacaacgaccgtgatgtggagttaatagttgccaagcttatcgtaaaataa

SEQ ID NO: 432710 - DNA, 711 bp, Serratia marcescens
atggcgaaagcattaatccctctatcaatagctataatcacaatggcagtatcggcttgtgacaataaaaacggttccacaaaaaaagaagatgagctaaaagtatttacatcaggtaataagatattttattcaggtgatattagcgagtctggatatgaaaaagttcacgccttggctaattcagatatttctacccttgtcattaacagtcgtggaggtgatattgttcctggtatgaagctaggtgaactagtgttcgataaaaagtggaatgttcaggttcaagattattgtttctcctcttgtgcaaattacattttcccagcaggaaaaaccaaatacatttcaaagttcagccaattgggatggcatggtggggcaacacaacagtttaatggcgacattgtcccaaaagaaaaggatgatagagaaagatttatccagacacttaccgggcttattgaaattgaaacagctttttttaaaaaaatcaatgtcaatcaaaagtctactgtatacgggcaaattgcttttaatcatcttgatatgcttaaagcacacagcattaactgtaaaggctggagctacacaattgatggcctgtctgcatttggaataaataatattgtactgacagatggtgaatggactccaggcacatcttatgaaaacagctgcatccatatctatgataaagtaaaattgtag

SEQ ID NO: 432711 - DNA, 261 bp, Serratia marcescens
gtgagcgaatcagaaactaacaagtcaaaaatcgaagttcttaatgattatctctctcaattaaaagagatgaagcattatgcgcaaagcaatattgaaaaattatctgcgcagtggttggcttttgatcaaggtgaatacaaagataagactaaatcagaaaatataaacaaaataattagcaagcaaagtgactgtcttgatgaaatttgtctggttattgaggattttgaaatacagataaataaagatagcgattaa

SEQ ID NO: 432712 - DNA, 492 bp, Serratia marcescens
atgaagaccaaattgaaagtttttttgcttatttcacacctgacttttctgggagcgggtactggtttaggaatctatctactgccgatactgactgcccaagaaaatgcctcgctaaatgaaattaatgatgtgaagaagcttgcaaaatataagggtgaatttaatcgcaatcagaaaggcagcgatgtatttcactgggcggaaggtgaactttatgtaacggacagtgaaatcgcgttcaagggtcaggtagctcccggcccggactacaaaatttatctgaccaaagcgcaagctgtagataaaaactcctttttagaaatgaaaaaagaggcagtgcttattggagagcttaaaaattttggtaacttccgaaaaagcattcctgacagtgttaacgtcaatgagttcactactgttcagatatggtgtgagcgtttctcgaaatttataggttctgcagtatatcagcatgaatctagagaatag

SEQ ID NO: 432713 - DNA, 333 bp, Serratia marcescens
atgagtatgaactggaatgaatatagaaaaaacctgctgaaaaacgttggctcgctcggggatgaaatccccgaaaccctaaagggctatcagactatcgctgagtctgccaatcgtcagggcgtgctggaccagaaaacacaggagctgatttccctggcggtcgccgtgacgacccggtgcgacggttgtatcagtatccactcacatgccgccatgaaagccggtgcatccagagaggaaattgccgctgcgctcgccgtggctatttccctaaacgccggcgcagcagttgtatactcttcacatgtgatagagtccatcagtcaataa

SEQ ID NO: 432714 - DNA, 444 bp, Serratia marcescens
atgaaaaattttattagcggctttattcgctcagactacgatatgattattcttcgcctgtctgttattgcaatatttatgctcttcggcacctataaatggtttgattttgaagtgatggccctcgaacctcttatttcctcaacatggctgaatatcctgtattccctctttggtgtccacggagggagctatttcctcggcgtagtggaaaccatcacctttctaacactatttattggtttcttacgacctttcgccggcttactgggagatatcatcgttatcgtcacaggtattaccacgctgagcctgctgcctcaattgggtaaaattgacagtttcatcataaaggatgtattgctgattggtgccggggcggtcctgctgaaacatgacctgaaaagatattttcatatcagggctttaaaaccctccctgtaa

SEQ ID NO: 432715 - DNA, 561 bp, Serratia marcescens
gtgtctacttacgaaaaaatacttcatctgacagatacattgatccagcaacgcggatttttaggtttcagctatgccgacctggagaaagagattggtatcagaaaagccagcattcaccatcatttcccggggaaaaccgatttgggtttagcctactgcgaatacaaaatcggggtgttcggccagcttgatgccgctctacatgaggttcctccgggtgtgctccgcctcagggcatatcttgatgcgtttgctggttgtgccgagagaggggaaatgtgcggtgtttacgccatgctatctgacagtcaccagttcagccccgagctacaaaaggctgtcagcaagctggtacagacagaaatgctcatacttaaagatatcctcgcctccgggcaaaaaagcggcgaacttaaatccgtcgtcccacccgatgagctggccatcattgtctgcacagcactgaaaggagcactgatgctgaacaggatcccccctcatgatgcctactcaggagccgtggccgctttactgatgatgctagatacccgtgtctga

SEQ ID NO: 432716 - DNA, 261 bp, Serratia marcescens
atgaatcacattctccgcactaccctggccgcgcttacgctcactctggccggatatgccgccgccgccgatgagattaaccgtcagaatgctacaggcctgattgcgtcaggccatatttctgccggtaatctgtcaacaccaggagaggtagccgatgcacttaaagccaaagcagaacagtccggtgccaaatacttcagaatcacttcgcttgacggcaaaaataaattttatggaaccgctgttatctaccgctaa

SEQ ID NO: 432717 - DNA, 1029 bp, Serratia marcescens
atggaactgactcaagacgtaatggtcaccaaaaaggtatcgtggggcagcatcgtcggcggtgtattaaccgtcatgtccatttcattgatgttgtcgattctcggcaccagtcttggactggctattgtagaccctctcggtgaggatgccgataatggggcgagcatgaccatgctgttttggacaggtgggtccattgttgtcagcctggctgctggggcttttgttgcaggccgactggccgctaatgatggcttcattcatggtttcctcgtctgggccacatcgttgattattaccagcatactaggcgcaatgttggtgggtagcgcagtcaaagctaccggcagcgccatcggctcactggcctctgcatctggcagcattctctccggagccggctctatcgcaggaagcggcattcaggaagcgggtaatctggggggtaagatatttgagggtctggatatcgataccaatgtcgaacctcaaaaacttcaagctgatgtgaaggaggcactgcgcaagagtaaaattccttccttgcagccggagtttgtgcagcagcaacttaatggagccaaagaagacatcgcctcagcggttaaacaattggctactcaacccaaggacgcagatgccatcattaagaatgttatggataaattgcaggaacgaggcaaatccatcactaaagatgtcgatcgcaacacattaacaaaagccttggctgataattctgatatgacacaagatgaaattaacaaggccgtagataatatcatcgaagcaaaagaatcagccgataacctgctgaatcagaaattcgaagatgtccaaaagaaaatcgaggacgccaaacaacaatatgatgaatttaaacaaaaagccctggaacaggcagcagcagcagcatctgcgctggctaaatctgctttctggactttcatcgcgttggtaattggcgccattatcagtggattcacgggacgccttggcgcgaaatcatctagaaaacacgcctaa

SEQ ID NO: 432718 - DNA, 579 bp, Serratia marcescens
ttgaaaaaaagaaagtatttaacacaagatgaaatagatcggttgcttgaagcttcacgcaggggaaattttcccaagcgagatgagtgctttattcaaatgtgcttcatccatggtttcagagtcagtgagctctgtcatttaaaattctctgatatcaatctcaccgataaagtcgtacatgtaaacaggttaaaaaacggccttaagacaacacaccctctgcttgtatcagagttaaaacttctcaatgcctggctaaatgagcgcgcaacgtggcgaggctgcgaatccccctggatttttctctcgcaaaaaggagggccactttctcgccagcaagtacacaagatgttaaaaaaattcggcatcttggcaagtatcgctgtttcactcaatcctcatatgctgagacattcttgcggttacgcactagcgaatagaggaacagacactcggctgatccaggattatctggggcacagaaatattcaacatacggtgttgtacacgtcaagtaatcatgttcggtttgctgaagtttggcaaaaggagggggctggaaacaagtcaaattga

SEQ ID NO: 432719 - DNA, 549 bp, Serratia marcescens
atgcgtaagatccgtcttatcaacaccttgattgccgcctctctgatgactgctggcctggctcatgcagcaactactaccgttaacggtggtaccgttcactttaaaggtgaagtagttaacgctgcttgcgccgttgatgccggttctgtagaccaaaccgtccagctgggccaggtcaaaactgccacgctgagcgaggcgggtaaaaccagctctgctgtaggcttcaacattcagctgaacgattgcgataccaccgttgctaccaaagcggccattgcattctctggtgttgctgtcaatgctgagaacccaactgctctggcactggaaagctcctctgcgggtggtgctaccaacgtgggtgtgcaggtgctggacagtgcaggcaaagcgctggcattcgacggtgcaaccttcagtactgctgccactctgactgacggtaccaacactctgccattccaggcgcgttacatcgccaccggtgctgccactcctggtactgccaacgcgaacgccaactttaaagttcagtaccagtaa

SEQ ID NO: 432720 - DNA, 540 bp, Serratia marcescens
atgctcaaaaccagactgggactctgcctgcttttcattgctcctctgtctatcgccggcaacaagtggaacgtcacgcttcctggaggacagatgcgctttcagggggagctcatcgctgaagcctgtacggttgaggcgggtgacaggcaactggttgttcgcatgggacaggttagcagtaaccgtttcaaggatgcaggggatgacgccgatccggtgccgttcagtttgcatctccaggattgtaatcccaatgtcagcgatcgcgtcggtatcgtctttcacggcgtagccgatggcaaaaaccctgatgttctgtcggttggcgaaggcgaggggattgcgtctggcgtcggcatcgccctgttcgatgaacaggggcaactcatacccattaattcagaacctcagtcttggaaaccgctgactaaaggaacgcgtatcttgcaatttgttgccaaatatcgggcaaccggcaatacggttatcggtggtgctgcaaatgcccaggcttggttctctttgacataccaataa

SEQ ID NO: 432721 - DNA, 672 bp, Serratia marcescens
atgggttcactgctggctttggcagtcgtattttgtactccgcatgctgaagcgggcgtggctcttggggcaacacgcgttatttatccggcagaacagaaacaggtcactctgggtgtgagcaacaataacgataaagacacctttcttattcaatcctgggtcgagaatgatgatggtcaaaaagaaggccggttcgttataactccgccgctgttcctcatgcaggggaaaaaagaaaatacgctgcgtattattgatgcaaccaataacgccttgcctaaagaccgcgaaagtcttttctgggtcaacgtcaaagccattccctctctggacaaggcaaaacagaaagaaaatacgcttcaactggcgataacgagccgaataaaattgttgtatcgcccacaaaatctcagtatggcgcctgatcaggcccctggaaaactgacgtttaaacgcgatgcgaacacactggtactgaataatccaacaccctattttctgaccgtcacggaattgaatgccggcacacgttctttagccaatgtcatggtcccgcctatgggggcggcaacggtgaaactgccgggcgatgccggcagtgcaattacatatcgcacgattaatgattacggtgcgctcacgtctgtgatgaaaggcaccttgcagtaa

SEQ ID NO: 432722 - DNA, 2592 bp, Serratia marcescens
atgaaaaaataccacatccgggaacgggcgctaaacaaagcaatgcttacgccgctggcattgctcttggtggcttcgacattttccgcgcgcgcagacaactacttcaatccccggttcctggctgacgacccggcatcggttgccgatctctccagtttcgaaaaggggcttgatgcgccaccgggtacctatcgtgtcgacatttacatgaacgagggttacgtgacgacgcgagacatcacctttgataaaagtgatgacggtaccaagctggaaccgtgcctcactcgctctcagctggcttcacttggcgtcaataccctgactattccagatattgccgtaatgaagagcacggcctgtgtgcctttcacacggcttattgctgatgctgcaagctcattcgatgtcggtcgccagcgtctttccatcagcattcctcaggctttcatgggaaatcaggcgagagggtacatagctcccgagctttgggataatggtattacggccggtttgctcaattacaactataccggcagtgaagtgcgcagtcacaatggcggtacccgcaattacgcctatctcaatctgcaaacgggtctcaacctgggggcatggcgcctgcgggataactcaacctggagttacagcagcggcacgggatataacgaaaatcgctggcaacatgtcaatacctggcttgaacgtgacattgtgccctggcgcagccggctgacgatgggtgatggctatactgcgggtgatatctttgaaggtatcaacttccgcggccttcaggttgccacagacgataatatgctgcccgacagtcaacgcggctttgcgcccgttatacatggaatagcacgtggtaccgcacgcgtatcggtcaagcagaacggatatgaaatatatcagaccacggtacccgccggcgccttcactatcggtgatctgtatgcggcaggaaacagtggcgatctgcaggtgacggtgaaagaggcggatggctccgttcaggtctttaccgttcccttctcatccgttccgatgttgcagcgtgaaggacaggtgaagtacgcggtgactgcagggcagttccgcagtggtaatgaacaacaagacaagccgaagtttttccagggaacggcgctttggggattacccgatggctggacggtctatggcggcacacgtgcctcaaacgactatcgtgcctttaacctcggggtggggaaaaacctgggctacctcggggcggtatcttcagatattacgcaggcgaatgccaccttgcctgacggcagcaagcatcagggacaatctctgcgttttctctataacaaatcgctcaatgagttagggaccaatttccaactggtcggataccgttattctacccggggcttctattctctggccgacaccgcgtggcgacgcatgagcggttactccgtggttagtgaagacgggatcgtgaatatcaaaccaaagctgacggattattacaatctgaactacagcaagcgcggtcgtttgcaggcgacggtgacgcaacaggttggacggacatcgacgatatacctgactggcagtcatcaaagctactggaataccagccgttcagatgaacagctgcagattggttataacagtaccattcaggatatcagctggagcctgagttatagtctgtccaaaaatgcctggtccgacgataaagaccaactgattgctttcaacattaatattccgttcagccactggatgcgctcggatacccggtcagtattccgaaatgccaatgccagttacaacacgtcgacagacttcaagggacgtacgacaaatactgccggcctttacgggacgctgctggaagataacaacctgagttatagcgtgcaatcgggctataacagcggcggtaatggtaacagcggcgcaacgggtaacgccgcgctgaattaccgcggcgcttacggcaacgccaacgtcggttatagccacagcggtgactataagcaggtttactatggcgtcagtggtggcgtacttgcccacgaaaatggcatcaccttcagccagccactcaatgacaccatggtgcttatcaaggcgccgggagcgaaacacgtttctgtcgagaatcaaacaggggtgcgtacagattggcgtggttatgccgtgctcccctatgcgatggactaccgcgagaatcggatatccttgaacacgaatacactggcgaacaacgtcgaactggaagaaccggtactaagcgtcgttcctacacggggagccgtcgtgcgtgcggacttcaaggccaaagtcggactgaaggttcttatgacattgacaaacaacggaaagccagtcccgtttggctctgtagcctcttacggagatggtcagtcaggcagcatcgtggcagatggcgggcaagtttaccttaccggccttgcgccaaaaggtaccgtcaacgtgaagtggggcaatagcgaaaatgagcgctgcacggcgacgtacagtttgccggcagacagtcaaaaccaggctttgagctatgcctctgccatttgccggtga

SEQ ID NO: 432723 - DNA, 525 bp, Serratia marcescens
atgagaaaataccttccaatcctgtgtttgttgccgttggttgcgggatatgcccatgcggcggacagtactatcaccatcacaggttatctaaaagacaatgcctgctcggtctctgttgactctcaggattttacggtggatttgttgagcaatgcggccaagcaattcaaccgggttggggccgtcacgccatccatacctttcaagattgtcttcgacaagtgcggcagttccgcgacggcagttcgcgtggggtatgtcggaacctctgacagcgacaacacaaccctgttaaagattgatgctggaacaaacgccgcaagcggtattggagtgcaaatactggatcgcgacaagactccgattccattaaatgcggctcaggactccctgaagtggacgacattgacggcgggccagtccaatacattgggcttttatgcacgcttaatggcaacgcgcgcgcccgtgacggcaggaacagtgacagcgacggccaatttcaccttagagtttcagtaa

SEQ ID NO: 432724 - DNA, 504 bp, Serratia marcescens
atgatcattatcaagaacatgatgctggcgggggcgttgctttttactacaacattcgccgcgcatgcagctgacgtgaccattacggtcaacggacgcgtagtggccaagccctgcaccgtatcaacgccttcggcgatggtagacttgggtgaccttttttctttcaattttacacagcccggttcgggctcggcctggcatccggtaacgctgaatttgaccaattgtccaataggcacttcgagagtcacggcaacattcacggggacaacggacagcacgggatattacaaaaatcaaggtggggcaaccaatcttcaattggagctgcaggacaccagtggcaataacctgaacaacggcaaaaccaaggcggttcaggttgatgattccacacagtcagcgagtctgccattacaggttcgtgcgttatcagttaaaggtaacccgaaacaaggcagcattcaggccgtgattaatgtcacgtacacctacgcctaa

SEQ ID NO: 432725 - DNA, 948 bp, Serratia marcescens
atgacactggtttcaaaactaaagaaagtgttgaagaaaaaagaagttgctgccctcgtggcttctgtatgcctaatggcatactcatccggcgctaatgcttttacttgtaaggttagtgcaaccggtcaaacagttggatcgggttcagctaacgtttatgtaaaccttacgccatccattggagtagggcaaaacctgattgttgatttatccagccagatacaatgtaagaacgactctacaccgccaaatattgatacggattatgtaaaactcacgggtggctccgcatatggcggtgtgcttgacaactttaacggaactgtatactggaatggtaagacttatcccatgcctttaaatacaaatacagataacgttgtaatacgccaaacctattatcaagggctaccttttaaactatatttaacggctttgggcgctgcaggcggaaaagcagtgaaatcaggtgagctgatagcggtaatgaggatgtataagatagctacttttggtggtgggtatccaagaaattttacctggaatatttatgccaacaacaatgttataattcctacaggtggttgcgacgtgtcatcgcgcaatgtgacggttaccttgccggattaccccggcacggctgctgtaccgctgactgtccattgcggacaaaaccaacagctggcttattatctgaccggcacaactgctgatacggcaagcaccatatttaccaatacgtcatcttcaaatccggctactggcgttggcgtacaactgtctaaccgtaatggcattgtagctaccaataagaatgtctctctcggtacggtcggtaccagcccccaaagtttgggactaacggcttcctatgcacgaaccactgggcaggttgtggcaggcaatgtacagtctatcatcggagtgacgttcgtttacgagtag

SEQ ID NO: 432726 - DNA, 654 bp, Serratia marcescens
atgcttcatcgagaaagcatggttcacattttgcgagagagcctggccgacagagtcaacataactgatgctgtctccagcctttccgagataattcgcctgattgtgctgaaaggccccgccgatatttatataatggaagcctatggcccgactgaaaattataaaagctggaatgacttcacacattttatggccacgcattacccgtccgtcacctgcctggtttggtcttcaaaaccaaccatgtttttaagaaaactcaacgcttttgagggagggcagccatgttggcagatccccaaaagaatagacattgattcatttgtacacttttttacgcgaattttagatggcgagatgccttcacccagcactcgcacttgcataggtcccccgatgtctaacctcacgctcagtgaaatcgtcatcattaccggtattatagagggacacagcatcaagagcttggccagaaaatatgatgttgcatataaaacagttagcactcacaagcgaaacgccatgatcaagatgcgtatatcatcgaccgcgcagctacgcagtcttttcatcgaggggtacattttgcggggtgataaggctcgatgccttccaattgaaacaaacgccaatcaaccctttttattataa

SEQ ID NO: 432727 - DNA, 1548 bp, Serratia marcescens
atgaacagacgtaaatttattttctcttcagtgtgcctgggggcggggatgggtatgacccgtgcaagtttttcccaggaaagcactcagccaatgccgcctgttaactaccggcctcaggtccactatgcaccaataacgggcttcatgaacgatccgaacggcctggttttctatcgcggagagtatcatcttttttatcagcataatcccgttgcagcagccatgggcaacgtccactggggacacgcagtcagcaatgacctgctgaattggcgcacgttgccgacagccctggcgaactccgctgccgggcaggcattcagtggcagtgccgtcaatgacgcgcaaaattcaagcgggctctttgataacctttctggcggcttggtattggtctatacacgtgcgggtgcaacggttcagacacaggaaattgcgtttagccatgacgagggtaaaacatttaccggttacagccgtaatccggttttggacatcgattccgatcagttccgtgacccgaaagtcttttggtactctgcagagaagtgctggatcatgacggtcgttgatgcacgaaaacatcgcgtgcttttttatcgttcggatgatctaaaagcgtggataaaactgagtgaattcgctgatgcagggctgctgggtgtggattatgagtgtccggatcttctttgcgtgcctgttgagggtggcggcgaaaaatgggttttattcctgtccatcaatccaggagcgcctcaggggggaagcacggtccagtattttgtgggagactttgatggccagcgattcatacccgtcgacagggcgactcgactgatggacttcgggaaggattactatgctttccagagtttttccggtacgagcggtgttcctatcgggctggcctggctctccaactggcaatatgccaatttcgttccgtttacctcgtcgcgtggaatgatgacgctccccaggaggattgggcttcggcaaatcaagggtgattggcgtatcactcagcagtttgttgatctgtccccccttgtgcaacgtgttctggttgagaaaccgcatctgacaggaagtgatatcttgttgagccatcccgtccccgcaggagaggctcttgatattgaactggatattaatctttcggcgggtgccgtattcaccctgagattttccaactcgcagggagaagccctggacgtcggatttgatggtggagactttggcggattgtttattgaacgaggcaagacagctggattctcgcaccggtactttgtgaacagtttttcgtacgcactggcaccgggaacccgcaacacagatatgcgactgattttggaccgtacatcattagagcttctgggtgataagggcgccgcgtcggggaccgcattgtatttcagtacgtgtcatttcgaccggttgacgttactggttgaaggcggagaagcaaccgttaatcagctgaaagtgcgaacattacgcgccataacaagtgaaagtgaggctgctcaagggaacttatag

SEQ ID NO: 432728 - DNA, 504 bp, Serratia marcescens
atggagaagttattcgcaaagataatgttttcagccagatggatcatggcaccggtctacctggggttggctgccggcctgttcattctggcatacaagtttttcctggagtttatggtgctctttaaagaggcgccatatatcaacaatgagcagcttattctccatcttctatcactggttgattttgttctgataggggggctgcttgttatggttgttttctctggctatgagaacttcgtttctcgtttgaacgtggagggcgcaagcagcgagctgtcatggataggcaggatggacgttgagtcactcaagaacaaggtgtttgtctcggtggtctccatatcaaccatacatttactcggtgtgttcatggaatcaaagagcatccccgatggcaaaattttgatgtatatgggcttacacctgtgctttgtcttcacggcgctactgatgcaagtacttgagaaaatttctaagaagagcgatgacgccgactga

SEQ ID NO: 432729 - DNA, 1164 bp, Serratia marcescens
atggatgcgcctgaagtatcgcgtacaacagcatggatgcgagtggggatcctcacgctatcagcctttatattcaacaccactgaatttgcacctatcggtttactgagcgatattgccaatagtttttccattccgagtgaacgggtcggcctgatcatcacgctctatgcatggattgtcacgattgcttcgctgacgtgcatatttgcgataggccaggttgaacgtcgtaggttactcacaggtatttttatcctgttcatcgcgagccatgttctcactgcaatcgcatggaactttagccttctggtgctttcacgtgcgggcgttgcactttcccatgccattttttggtcgataacggcgtcattggcgataagggtagcgccgccaggtaaaagggcacaggcattaagcttactggcagggggaaccgctttagccatggtgcttggcctcccattggggcgcatcattggccaatggtttggttggcgaatgacttttgccgggatcgcggcgagcgctgcctttgcattaatcatggtgctgaagtttatgccggaactaaagagcgagaatgcggggtcactcactatggtgcctgagctgcttaggcgatggcctctggtatttatttatattatcactgtcattgttgttacggcccacttctcgacgtacagctatattgagccgtttatacaaaatttggcgggcatgtccgagaatgtcacgacgttaatattactaatcttcggtgtatcaggaattgcaggcagtttactgtttggtcgatatggcgaacgctaccccatagcatttttgaatgctgcgctgacgttgttactgataagtctcgtttttcttttcccttcatcgaatagccaggttagcctgactctgttatgtgcgttatggggtatggccataatggcgtttgggctctcgatgcaggcaaaagtcttgaatctcgcgcccgatgcgacagatgttgcaatgggttttttttccgggctttataattttggtataggtagcggtgccttattgggtaacctggttattgaagggtggggaattggcgctataggctttgtcgctgcatcaatcgtctttttggccatgagccttagctttttgctaagacgttttcattga

SEQ ID NO: 432730 - DNA, 657 bp, Serratia marcescens
atggaatattacatgttagtcttggtgaaatttcttatcggatttcttatcgtgatgacgcactttaatctttcgggaaaaactcaactttcgcaaatgactcccatagattttatcggaaacttcgttattggcgggatcattggcggtgttatctacagtgatgcgatcccattgtatcagtacattgccgtactcattatgggggtcatcttgatatcaatgcttaactctgtaagcaagcgaatacagttttttagatcaattacgattggtgagccgattacaatcattaaggatcatcgatttttgatggaaaatatacgtaacaaaagaaacaaaatagatatattaggggtgttatcacacatacatgcacagggtatacactcgttgctggtcatcaagtatgctcagatcgaaccgggtggccagataactctggtttgtgatgaggataaggtgccatcgtgtattgttatgaaagaaggcgaggtgcaggaggaagcccttgaaaaaatcggaaagactccagagtggttactgcacaagataacaacatgtcaggtagcagttgaagacatttacctggctgagtattgggaaggaaatgtgagctttattcttatggatggtgaggtggtaaataatgtttga

SEQ ID NO: 432731 - DNA, 759 bp, Serratia marcescens
atgaaatatcgcaatgtagtacccgtcattcttcttatcgctactggcgcgctttttagcaaatgcgccatttcagatgattccatctttacaattatggatgacccaacatctgcaaaaaaacccttcgaaggcaatatcaatgcaggttatcttgcgcaatctggtaattcgaaaagtaccaacctgacgatgagcagtaatatgacctggtacgattcttcaactgcctggtccatttggggtaatgccagtaacgcctcttccaatgacgttcgctcctcagaaaagtactctgctggcggacgaagccgctacaacttaaccgatcgcgactatattttcggccaagccggctggttaagcgacagatataacggctaccgagcacgcgatacattcaccactggctatggacgccaattactgaatgggcctgttcacagcttacgcgtcgaggcaggtcccggtatacgtcatgatgtgtatacaggtggaggtagcaagactaacgcactgggttatgtatctgcaacttacaactggcaactcaccgaaaatgccaagttcattcaaggcctgtctgctcttgggagcaaagatactaccgttaactctgaaactgccctggaagttgctattagcgaaagatttgcattgaaagcaggatacatgatgacctggaactcctctcccccatcatcagcgccaaatcataccgatagacgcacacaaataactttaagctataagatgtaa

SEQ ID NO: 432732 - DNA, 132 bp, Serratia marcescens
atgttaagcaaaataaaaagtgtatttacgacttcaccaattccctttatcgtaatctcgatgctattggggctgcttttatttttgtttattcattggatgattctcgatatcaccatcgattttaaataa

SEQ ID NO: 432733 - DNA, 882 bp, Serratia marcescens
atgtttaacgaggaacaaggcgcgagcgcggtgactcagtcactggtactggcgcagtgctgtgatgtggtgttggtcgacgatggccatcaacaaatctaccagtttagtggcgaggaaaatgtcctcgatgctcccgagttggtcgatgcggttcaactttatctgaatcacagtttccgttttgatcctactgtaactcaggtggtcaatatgctgctttcccggcaagaagaaacgatacagctggtcggggaagagagaaatgccaaggttatgacgtgtacacctgatgacgtgaagggacagcctgttgccatattgagccaaacggtggccggagtcatcggcgctgcgctggatgccagtctggctggcaagacggtgtattgggtcggcggtatcgccggctacaagaccgaggagctggaagacctctactggttttcggctgacatgactgagcggatgcagtccccgcggctggcgcgagaataccgcaactttgaggaatttgagtcggttgccagagcaaccagggatgttgagatgaaccaggggcttcggttgcttgagcagtacttcccgctgccacaaaagctgcaggtgatgcgtgaacatgctgttactgacgaaagccaggcgcaggtgattgtgtcgacggcgcaccgcagcaagggactggagtggccggtggttatactgaacgaggattttgccgatattacggatcccctgatggctgaaagcgaacgtactgatgaaaccaatctgctgtatgtcgcggtgactcgtgcccggcaaatgttaatactgaatgaattgctccagatgttgatggacagcgagagtaatgacctcgccggaggtctggcatgctga

SEQ ID NO: 432734 - DNA, 1032 bp, Serratia marcescens
atgaaaagtgaagaaaaaatgcacgatgagtgggagttcttgctcgaggaatattttttcaccaaacaactacgtgcagcaacggaatggagttataggaaagtaacactaacatttacgcgttttattggcggaactataacacccgctatggtgacgcaaagggatgtgttgctttggcgtcggcatctgttaaaggagaaaaacctttcggtacatacctggaacaataaggtggcccatctgcgggcaatatttaatttgggtattaaaaaagcgttggttcagcacggtgagaacccttttaatggaacggtagttcgatctgacactaagaaaaaacgaatattgacgaagtctcaattgacccgtctttacctcgtgatgcaacagtatgaacagcgggagaaggagagaaaaccagtgaagggtggaaagtgtgcactctatcctacctggttctggatgacggtattagacacatttcgatataccggtatgcgtaacaatcagatgatccacatccgcctgagagatgtgaacattgagcaaggttggatcgaacttcgacttgaaggcagcaaaacacatcgggagtggaaagtaccggtggttcgtcaattaagggagcgaatagagctgctcatgatgcgtgcaatcgagcgaggtgcggatcagcatgacctgctttttgatgtcaaacggttcaccagtccacggaatactcattacatctatgacgagaaaaacgttctgcagtcatttcgtagcttctatcgtcggttgtccagggagagtggcttcgatatttcctcacaccgtttccgtcacacacttgccacggagttgatgaaatccccggacagaaatctaaaactggtgaaggatctactgggtcaccgtaatgtcagtaccacaatggagtatatcgaattggatatggaagtcgcaggaaaagcacttgaacaggagcttgttttacatacggatatcactgctacgagaagcttacaaagcttgacacaggtatga

SEQ ID NO: 432735 - DNA, 2100 bp, Serratia marcescens
atgagtaggacctcattcaaacaacgggtcagccaactggatctgcggttgcgccaccgggtttcgatggtgcaccagaccgagtcgtcggaatgcgggctggcctgtctggcgatgatctgcggttattacggcaaaaatatcgacatgatcgcgctgcgccggcagttcaacctgtcaacccgcggtgcaacgctggttggactgaccggtatcgccgagcaattggggttgagcacccgtcccctgtcgctggatctggacgaactcggcgcgctaaaactgccctgcattttgcactgggaattcaaccattttgtggtgctggtcagcgtcaaaggccaccgcgcagtgctgcatgatccggcgcgcgggcgccgggccgtcagcctgacggaactgtcgcacagtttcaccggcgtagcgcttgaggcctggcctggcagcgaattcaccgccgacagcgtccgccatcgcattcatcttcgcacgctgatcggcagcgtgcatggcctcaagggggcgctcggcaaaattttttgcctgtctctggtattcgaaaccatcaacctggtgatgcccatcggcacgcagctggtgatggatcatgctattcctgccggagatcgcgggttactgtcgctcatctgcgccggattgatgctgtttatcttgttgcgggccgccatcggcatggtgcgggcatggtcaggattggtcatggcgacgcttatcaacgttcagtggcagtccgggttgttcacccatctgctgcgcctgccgctcggttactttgaacgtcgtaagctgggggacattcagtcacgcttcggttcactggatacgctgcgcagcactttcaccaccagcatcgtcggcgccatcatggacggcatcatggtgatcggtgtgctggtgatgatggcgctgtatggcggctggctgacctgggtagtgctcactttcactgcgctttatgtgttgatgcgactgctgacctacggctattaccgtcagctgtccgaggaggcgctggtgagagaggctcgggccggctcgtattttatggaaacgctgtacggtatcgctaccgtcaagatgcagggcatggcagaacgccgcatcgctcactggctaaaccttgaaatcgacaccatcaacacggggatccgcgtcacccgaatggacatgctgtttggcgggatcaacacctttatagcggcgtgtgaccagatcgtcattctgtggttgggaactagcctggtgatcgataaccagatgaccctcggtatgttcgtggcgttcggcgcctttcgggggcagttctccgaccgcatcgggtcgctgacggaatttttgctgcagctgcgcatgatgagcctgcataacgagcgcattgccgatatcgccctgcatccgcgggaggagcgtaaacccgatcacccttacacggcgggcctgcaacctttgggattgacgacccatgccctgagctatcgttacgacagccagtcaccggctatctttgatggcctggacatcagtattgcgccgggcgaaagcgtggctatcgtgggctcgtccggtgccggcaagaccacgctgatgaaggtgttgtgcggactgtttaccccggctgcagggcgggttgaggtgaacggcgtcgatatccggcagctcggcatcaacaactaccacaaaatgattgcctgcgtgatgcaggacgacaaactgttctccggctcaatccgcgaaaatatttgcgggttcgcggacaagatggatgatgcctggatggaagcctgtgcccgtgccagctatctgcatgaggtgatcatgcgcatgccgatggggtatgaaaccccgatcggcgagttgggggaagggttgtccggcgggcaaaaacaacggctattcatagcccgggcaatctacaagaaaccggctattttgttcctggatgaggccaccagtgcgctggataaggagagcgaagctgccgtgaatcaggcaattaagagactcaatatcactaagctgatcattgcccaccgtgaaacgaccattgcgtcggcagatcgggttatccatattggataa

SEQ ID NO: 432736 - DNA, 678 bp, Serratia marcescens
atgcaatcgaacaggttgtggttgcgcgccttgtcgtgctcctgcccgcggctgaaccagtacagctgttgcggcaacagcccggcagggcaagcgtccacgcacaggccgcagcggatgcaggattgctcgggttcctgcggcgtcatttcatccaccgtcggcgccagaatgcagttgctgatcttgacgatcggcacgttcagcgcgggcagggtaaagcccatcagcgggccgcccatcaccaccatctgctgcgcctgcggacggaaaccgacgaaatcaagcaggtgctgtaccggcgtgccgatgcgtgcccacaggttgccagggcgctcgaccgcctcgccggtcagggtcaccacgcgctcaatcaacggttcgccgtcgacgatcgcccgcttgatggcgaaggcggtgccgacgttttgcatcagcacgccgatagcggaggagtgcttgccgtgcggcacttccttgccggtcaaaatcttggtcagttgcttggcgccgccggacgggtatttggtggggatgacgcgcagggcaatgccggtctggccgcgcaacgcctgtttcagcgccgcgatcgcctctggcttgttgtcttcaatgccgatcagcgtgaccttgggctgcagaatgtgttgcaggatctgcgtgccttcaacgatctga

SEQ ID NO: 432737 - DNA, 666 bp, Serratia marcescens
gtgtctttaccctcgctgacgcaagagctgttacaaccgttttccccctaccagacgctggcgcaaacgctgctgccgctcaccctcgaatcggacgatggctcgcacgatgtggcgcacctgcaccgagtctggaagaactgccgccgcatcagcaagctggaaggcggcgaccggcgcattctctgcgcggcggtgctgctgcatgacgccgtggcggtggaaaagaattcgccgcagcgtcacctggcttcgcgcatggcggcgcagcaagccacgctgacgctgacccggctcgaatgggcgccggcggacatcgcggcggtggcccacgctatcgaagcgcacagtttttccgccggcatccctccgcaaacgctggaagcgaagatcctgcaggacgccgatcgtctcgacgccattggcctgattggcgtagcccgctgcttctatatcggcggccgcatgcgcagcgcgctgtatgacgctgcggatccgcgggccgaacatcgtcaatacgacgacaagcgtttcagcctggatcacttcgaaaccaagctcttcaagttgcaagacggcttccagaccgccgccgggcgacagatggccgagcagcgcaccgaacgcatgcggcgctttgtcgacgatctgctggaagaggtgtaa

SEQ ID NO: 432738 - DNA, 1041 bp, Serratia marcescens
atggacagtcaaacaacagtaattgatagctcggaagcattttggggtaaagttgaagagtatttacaccgagatgaacgaagcccagggcaagacttcggttttgatatcgtttttgcgggttggccgagtttgcatatcaatgtcaaaggtgaaaaatttcactcgtcattgacgagttcaatggtggccggccttacttctatgcatgagtccttccaaagggcttacgcggttacgaagtatggatccccaaatttgcaacgattgactaacgaagataagcaatctcttgatatcatattcaagataacggaaggttctactgactcagatactgattggtcaggtacgatcaaccacgctattgaattgttgaagggtgcatttgacggtatgagtggtgttcaaaagatggcagtgttgatagctctcattacagccttaacggctgggggttgctattaccttaaccagaacacccaaagtgagatgatagctgccaatgcggttactcagaatacccaaaccgtggttgatggtatgaatagagcgtacgaactagctggtcaagtaaaagagcgcggagaaactgtgttgagtcgtgaggttgaagcttacggtgaagctggtaaaagttcgttattgaagtctgtcgcaaatgatgcagatatagttaccgtcggccgagagacttacactggggcacagctgaaagattataaaggtcggcaaagtgttgaccgtgaaagaaaagaaagttttgataacttctatataaagggtatgcagcgtgccggcctcacgagctctgagctaaatctggcagtggttcgagtaagtaatgatgaatcctttacgatgaaagttgcagaagacattgcccgtccagaagaacttgagaaacttgcacatgcaatcgtaagcggtgaaataattcgcataagttatctcgaagtcgtagaaaacggtcatgttgcgagaggccaattcaacttaataattgatgaacaacagcagcaaacacagaatccaagctaa

SEQ ID NO: 432739 - DNA, 537 bp, Serratia marcescens
atgaaaataatcaatatcgtcatcgatgacgaaaaccgctatttcgccgccggcttgcggttaagcattgcgaaatatgcgcagcagcataataaagtcgcgcattttctgccgccgggcagcgatgagcggcctgacattgtattgacttctacggcccggcgtgcccggcgttgggccgtctattcaggggggcatgtcgtcaccattaaagaaagacagacccttgtcgccaggcgtgcaagccgggtgctgtaccgcaccgacgaccagcaaagcctgtttacgctgctgtctgacacgctggctaatccgaggccggtatgtcgatttcccgctaagctgttgactccccgcgagcggcaggttatcggctatttgcggcgtgggtttgaccaatcgcaaaccgccagggtaatgggggtgagcgttaaaacggtgcacagccataaacgttcggtgatgggcaagctgatgttaaaccgcagccacgattttatttattggctgctatccccagaggcagagtattcctaa

SEQ ID NO: 432740 - DNA, 771 bp, Serratia marcescens
atggcccgttccgctgatttcgaggtcattcctcatatagagcttaggaatccaccaacctatgcttatctctcttttacgtttctctatcttttgccgaattcgcaggtagctaacccgtgttttgcccaatataactgccagatgggtttgtcgatataccttgggagctcaccgcgtgtaggtgtggcgttggctaatgctaacgatagctgcaacacggcggattgcaacatcagcacgagaacggccaaaaccatgggggagctcgcgccgttagtcaagaagttcgggcgcaatgggacgaaatcgaccagggatattaattacctgggcccctatcctgatcttagattctgtttccattggtcacttaacggttattatcaaggttatttcggctgtggcccccagatacccatgacgaccacctgcgatattcttgacacggatgcagtcgttgactttggctcattcagtaacgatgtcacggcccggcaggccaccggaacaatcaagataaattgttccagtgaggcttacgtacgcgttaattttaattccaatgttaccaatataccgttaagccaggatgggcggatgacagccagcctgaagtttagagacctgatcgccggcgtgggtgataattatgtcaaagtaccgggcggtaacagagaaatatttattgacggtgacctcagaaataacaacacctcacataccggcccgttttctgtgcctgtggtggcgatagtggaaattctataa

SEQ ID NO: 432741 - DNA, 513 bp, Serratia marcescens
atgagaaacgttccgggcttggccgccttggcttgcatgggattgctggccagcggcgctgcgcaggcaataagtgtgaattttaccggtaagctggtgacggcgccagactgcgtcctcaacacgggtaaagacattagcgttgattttgcggaagtggtgagcaataaagtggatggcgtcggctacaaaaaaatggagatcccctacaccatttcctgctccggtggttcgccaaatagtggcgagcttaaggtcatgctggaatatacgaccgtgccgtggggcgattacaacgcgatccaggctcaacctatcccgcaatttaataacttcggcttacgcattgtccagggcaccggggataccacctatgtgcccaagaccaagctgacaataaccgatatgaataacccgaccaagctttacgccgtgccgatcggcaagccgagctcgggcctacccgaggggagtttcaacgcgacggcgaccatgactgccatgtatgagtaa

SEQ ID NO: 432742 - DNA, 219 bp, Serratia marcescens
atgaacccttatttataccttctcacaatgcaggccttcgctttttggttcctgcttctcggtatgggcaacgttcctgatcccagaacgtggtttaaggacaagggcaaaaacttcatttcagcgttgccattcctgttcgtttccatggtgttgctggcatgcttgtttgctgttttttcgagatatttttcagaaatcgggggggcttcactatga

SEQ ID NO: 432743 - DNA, 1569 bp, Serratia marcescens
gtgaaatttgatatatttatgaagtttaaatggcagttgataagctgtgtattactttcgttaatatctgctttctccattattaatcttatttcggttattaattcaatttctcatggtttagttaagcaggatcttaattataattttttggctggcgttggagttctggtctttctttgcattataaatgtcataactcaaaaaatccttgcgataacgagttcgtcacttgtctcggagttacgctctaggctttcgagaaaattatctgaaattcaatatcacatatcaattaaaactccttcttcagtattttcagttttaatcgatgatttgaatagagtttccgctctgatcttgctgacgcctttgttcttatataattttttaatattctttgcttgcttcatttatctttacttcatatcacacatgctaccttttttattttttatttttttattacctccggtcattttgtcggtgtatttttttaaaatgactgaaaaaaagttcgacgtaatgagagcttctgaagaagcactacatttgcactattctgtaattcaagatgccaaacaagaaatgacaattaatcctggcaggtctgaacacttccatcgaaatgttttactgcctgatataaagatatctgaacgcttaatgaagaatgtgtacgagttgtggggaatgaaccaagcgttatcacctgcattaatctatggctctgttttaattgtgtcgtatgttagcagcatatatttaaaccttcagccgcaggatatcgtcagttttaccaccatcgctttttttatgatagggccactgacatttttattacaatctagccagcaaatcagtgctggcttcggtggagtgaggcatctaaaaaaaattggtatagaaatagaatacagtgaaaaaacaaaaaaaataagcatgcctcacagttatgagggttggagaagcatctctgtatccgaagtgagttataactatggggggcgaggtgtaaagagtactagctttaagattaatcgaggagaagtgatattcattgttggagataatggtagtggcaaatcaactattgcaaaagtattatgtggattactgccgtcaaactcaggaactatatcagttgatggcaatatcgttgatccattaactacagagtatcgatctttattctattgtattttagatggtttcaccatttttaatcatgttatagatgcttctgcaaaatctatttctgatgaagaaatatataattggctaaaatttcttggtttggaaaaatacgttcagtcaaataatggtattctatctaatttagacctttcgacaggtcaaaggaagaggatagcattattacaatgttttgctgaagaaagaaacatatatgtacttgatgagttcgcctctgatcaatcaccaggctttagagatttcttttatttcgagatcatacctcttctcaagcgaaaggggataactgtaattgttattagtcatgattctgattatttttcagtggcggacaaattaattaccgtgagttag

SEQ ID NO: 432744 - DNA, 1035 bp, Serratia marcescens
atgctggccactatttggtccgaactgctgggtcaggcgcagataagccggcatgactcattctttgccctgggagggcattcactgctggctataaaaatgattgaaagcgtaagaaggcagggatactcaatgaaacttaacgacgtatttgagtatccggcattagccaagctttctaataaaataatagaggtgaggactgattatcatgggggggctattcctgtcaggagttatgggcggggaatgccattgttctttgttcccactacatcaggtgattactcatattcttattctttagctgaaaatatcgatattgatagacctgtttatgtactcccttggccgtcaatacatacttttgatgagcagaaaatagggggggttgttaatgacatgatcaatgctttgaaagtcattcaacctggcggtgaatatagcatcattggatactcatctagtggagtaatagcttatgctatcgctgaagaattgattaggcgcggtgaatcaatagctcatgttgtgctcattgatacctattatcctaggtatcttaactcattgataaccaatgttgaaacattgtttgttaatgatgttattgacaagaactctgatgatttagagtttattgatgaacttttaaggctcaaagaaaagtataaacttagagaaataatttctttgattcgtgaaaaatatggcgaaattaaaaatatgtcagtggatgtcgaggcgagacagtgggaattaagacaccatatggaggttgaaatagcattgtatacaccgtcgtcaatatctgttccagtatatttatactatgcaacagaggattacacccccttatctattgaggctagatatgttgaatatttaaaaaatatacctacagacttaggttggaaggcgatagttccatcttggtgctttaatgctatacctgtaagtggaaatcatatttccttgattgctaataaatctaatcgtaaacagttagcctctaaactaagcagcatcttataa

SEQ ID NO: 432745 - DNA, 609 bp, Serratia marcescens
gtgtatacaggcattgtgcagggcaccgaaacggtgatagatatcaaacttggggaaggatttaagacgctggcagtgagtaacaacaatgccttattcggcgatgcttttgttggggccagcgtggctttgaacggtacctgtctgacgctgaccgacgttcaggaaacgttcgtcacctttgatgtctccgacaaaacaaattcgctcaccacgttgcaggacctcgtggtcggagatgaggttaacgtagagcgctcgcatatcaccggccaagaaaacggcggccacagcctttacggccacgttggtggaattgccacggttatcagcgtgaataattccggtggaacggtcggtgttaggcttgaacttccggcggatatcatccgctattttttcgataagggttttattggcctacacggggccagcctgacggttcatgatgtcgaccaggaaaggagccggctcagcgtaaacctcattccggaaacgctgcgtctgaccagtttgagccagttggtacccggctaccgggtcaacgttgaagttgaccacgccacccgggtgatggtggacgttattactgctgccatgcggttatga

SEQ ID NO: 432746 - DNA, 183 bp, Serratia marcescens
atgtttcgtgccaatctggctacgacaagaactgctcagggcccagagtatatcttccgcgtgctgtatcaattggtctttgagtatggagtgaagctgcggattatccagtccggcaagccgacacagaatggatttattgatagccttaacggagacttcagcgatggattcctgaattaa

SEQ ID NO: 432747 - DNA, 231 bp, Serratia marcescens
atgggccaggcttcttggcgggtttaccatttccactatctgttcaaacggcaaatcctgatgctcctgcgcagcaagcaccctgtcacgcacctgcttcaacagggctgccgtattcaattcctcggacagatcaatacggatcgccagcgtatttacaaagaagccgatcaatgcttctgtttcatggcgcccccggttggcgctcggggtaccgatcaccagatctga

SEQ ID NO: 432748 - DNA, 168 bp, Serratia marcescens
atggtgctgcgtcaacaaaaagacatgctcatcgtgagccagcgcaagcagacgtgcacgcaccaacggcccctgaacgaggtcaaaggcagtgtgggcctcgtcggcacaaaatgtggcaatggctacatccgactgtccccgcagatcatggtactgcagcggtaa

SEQ ID NO: 432749 - DNA, 642 bp, Serratia marcescens
atgcaggccgctttcgtcgtcctgatattgcccggcgtagcgcagcggctgctgatattgcgcgccctgccgcttcgccgcgccggccaccgtctggccctgcagcttgccgaaggtgtcgtattgcccagaccagcacaggttgcccgccgcgtcggtcacttccagcggcgcgctgttcagatcggtgtgataccagtaaatatccgccgagcggctgtcgcccgcctgctccagcgccgccagcgggctccacgggctggccggatcgtagctccagctgcggcggctgccgtcgtcgcgctgctcctgcagcaaccggtagccctgccacaggaaacgggtcgtctgttcggttttgcccttgtagcgcaccgccttgcggctgcggcggcccagcgcgtcgtaatggtactgcgcctcgaattcgccctgcgggccgcgaccgtgcgcctgcaccagccggttgtcggcgtcgtagcggtagtgctgttcatacaggccgttgcgccggctgatcaggttgccccaggcgtcgtaacggtaaaacagtttttgccagtgcgtcaggcggttgtcggcgatcggcgccagcggcaggtgcgcgtcgatgtcgttctgcgggctgcgctcgcccagtag

SEQ ID NO: 432750 - DNA, 894 bp, Serratia marcescens
atgaaaattaaaaacaaagctgcaataatatattctctgataattctattctttgctgcattatactattttacttggtcagtttatccagactcattcataaaaaataacgctctgaattccacacccattcataatgctataaacttagcgttttcgtataatggtgaagctcaggtagattatgataatatttcaaacgaggatttttcaaaagagacattgaaagcaaaaaaagaatatgacagaataattagtcaaaacattaaacttgaaagtatactatcccagcaagaatcacagctaaaattaataaacgtaaatctgtcaaaagcatgggctaggaatacacaggcgtatgaggatgaagcgtctctaaaacatcacaaggcgctgaatattaaagaaagtgagcttaaggctatgttgtcacagaaggataaaattcaagacagccagtttaatattatgttggctgataaaaatatcgaaatatctgaaattaaactcaggatagcaaattcagaactcgatgctttagaatatgttttgtcacatgttggtgatttcaatgatccaaagctcgtttctgaattaaatgccaccaataaaataatagatgacacaagatccaaattaattataaataacaaagaaataatcaaaataagaaataatgtacaagatttgttgagtaaacgtcaaaaggaagatctcaacttttgggatttcgctttttacagcattggaatatcaacaacgactacatttggtgatttagtagccaactcaagattaatcagaatgctagtttgcatacaactgttgttatctattttggtgctagccaacgtaactcaaagtttcttgtcaaaaaataaaaattcacgataa

SEQ ID NO: 432751 - DNA, 2958 bp, Serratia marcescens
atgagcattgagacaagtgtcacggatcaaaaattttcaatactcttattggggctaagtatgagcagagaaaaggctttcgaaaaattcaaggaagttcaggaacggtatattgctcgaaaagatactctttttgaagcaaatgaagctgaaagccgcttactggtgatagatgagatcctaaatatactgggttggaataaagaagaatttacgccggaagcgtattgcagaacagcggggtatgccgattatatactgagtacggatagaacgcctcgccttgtggttgaagcaaaaaaaatcggcgtgaccttcggactccccaaaaacaccctaaccttaaacgaatactctgtcgcctatcttaaaaaagcattcaataaaaaaatctctgaggtgatcgatcaggcacaaagatactgtgtcgaaaaagcggttcaatatgcattgatcacaaatggtgcagagtggtttgtttgcccaatgctgccaaaagcaggtaaaacaactgactcaatgaaaggcgtttattttgggaatatctttggagatgagttttcatttgatctcatgtataacctcatctctagggatagcacagaaaagaataatctggacagctatctctcagaactgaaccatgtaccgtcagaagtgtgttacatgctaaaagatcatgtccatgatttcatttgggatagcaacaaagacaatcaatggattgatgatttttatgaaaactttttttcccagataacagaaaacaatcagcgaaaaatgctagagcactgctttgtcagtgactctaagttggatcagtttaaaggggaaataaaaagagcgttaaaagattcaaaacccagttttcttcctaatgatgcgttagacctctcaccttctgaaggtaaagaattcatcctggagcatcatactggtaaagttatcatcattactggtgccgttggatgtggaaagaccactctggtaactaaatgtttagtagaagcaagacagcaaaagaacatatatgcaaccccgatcatcatagatttgataaatgacgtatcaaaacatagcattgatgtgaaaaatatcgtattcaattatctacatgacaagataaaaaacgagtatgaaagcgagtttacattagatgaactacgcatcacgtttgctcatgaaattaaagtgttaaaaaacggcccctacaaagatatatttgccaaaaactcagaaatgcttatggtcaaagaagctgaactactggagagggaaagcgccaaccggcagaatctagtattaaaaatattccaaaagcgtgtcaaggaaaataaatccgttattattgtgattgataatgtcgaccgggcttctgagtcttttcaagaggaaatttatgctttatctcatttaataacccaagcatcgggtgcaacagtcatcatcacactcagggaattcaccttctttaagaataaagataaaggctttctggacgttaggccagaagacaagatcattcatctcaaatcaccggactttaacaaactaatttcgactaggataaagtatattaaagagtgtctgaacgaagactttaggattagagactggagaaaaaaatatcagcttcaagatttcttagataaaatgaatttctacgctgatgtgctgaggaaaaatcttcaattgtcaaatgagagcatgccaattctagaaatattatcttccgtgtcttggcataatatcagaaacttttatcaattgattaaacacgtacactaccaattgggaaacgagtcagcatggcgtaaaagggatgttatctccacactcacctaccatcccgatcacacggaaaaagcatatataccgaatgtttacctgccctatcaaaacgtaaaccagtgttatttcctgaagttaagaatactctattttctgaatgatgctgtttcccccggcgaaattgcaaaaggaattagccttgaaaggataatccgatttgcatcactttacgggtataaaaaagactggattagcaaagcaattgagagttcggttaaagaaaggattattgaatgtattgaactaccctctgacagtgacttcaacatagagtacactgttagctcagtccatacatttcgtatatcgcctttaggcacttgtttgatactcgacatctgtcatacatcaatttacctgtcgttaacatctctttatttgcctttccatgaaaaaaagccctataacgaagcaaaacaagaactcaccagactgattaatgcgatttataatgataagagtatcaacaccaatcatgaaatcattgatctagtcgaagaaagtcagataccagttataatatcaaaatatttgtcatcagagtatttaagagaaaaactgactttatcattattgagaactcaaacagacgtactcttaaccgaaaaaagcataaaccgactggtggcatcgttcagtcgtaacataggtaacaacgacgagtttaccgctaaccgtgagaaaagtgatcacggtaatttatccttcgatttcggtgatggaattgaaaaaaacagtatatccggtgaagagatagacatcccaccttcattcaagccattatctcttgaaaatgtcatgtcctgcggaagtgagtatatccctctcatctttgtcgccctagtgatacgttcctatcttggttttgagaccagcattggtacagagattacagaaacaattaacgattacatagtaaatgatgacaataaaaagtatacaaataatgtttcacgcgcgctgcgttctaactctctaatcaaacagaaatggttattgattaggacggatttgcatcctaagttcaggaagttttcactgagcagtacttggcagtcagaatggattgaaatattcggtgaagaaccaccagaaatcgaaatttga

SEQ ID NO: 432752 - DNA, 1080 bp, Serratia marcescens
atgagcattatctcagaaaaaatagcatctagaataaaaacattaaagcaagagtttgctgtaaataaaaacgtagaacaccagggggttaagggtggtttgaatgaagtagagttgataaaaataataaaagacgtcattccaagaaagtatgagatttcaagaggtataattgagaactcgcatggtgagcaatcaaatgaaagtgatattattatttatgataatgaaatcttaccaccatatataaataacgaccttgccttcgttcctatggaagcagttagatataacattgaggttaaatcaactttaacagcgaaagagctagagacaacaattgaaaaatttagaaaatttcggtcaattggtgggaagtctcctaccgttctatttgcattttcaagtaatgccaagaaaagcgaactgagcagatattatgataacgatactaatttcttggcaaatccagccattagcgtactctgcatttctgataagtgttactactacaaacatacagagattaaatatttaaaagaccaccttagcaattctgatattcttaaaagtttcatgggcgatgataatataaaaatgtcaaacttcccagatattattcaagacactttaaaaaataatgattttctgtctggtttaacgatatctcaatttgctttattattgcaatcttctattcaagccaataaaatagtttccgattttgatacggggaaaattacaataaacggcattaattttaatgaaataacttttaaaatacaccaatggattggagttgagtgcaacgataatgatgttgagttatcacttttttctggagtatcaaatacattatctaaagaatcatttggtaattacttacttaacgaaaggaaagctgatcccaaggttttttcgatatgctgtgaggatatgtggggtaatttaagttgtcaaaaatttgataaaaacggtctaggtgacgactttaaaaatttcagtttcagttttgaaagctcagctgaagaaagtaaaataacattttactttaaacaaaactcaccacaggaagaataa

SEQ ID NO: 432753 - DNA, 1011 bp, Serratia marcescens
atgatgattaagatgaaaacgctggcggcgggagggctgttcgcgctgctggggctgtgttcgagcgcggcgcaggccacctgcacgtttttattcggcagcgcgacggacggagaaaccatcaacttcggcaatgtgatcgtccagcgcgatgcgccggtaggcagcgtagtggcgtcgacttcttcaacttcgttgagtagtctcggtaatttcttacaatgtgatggcactgcgacgcagactatgcgctggtcagccgaaggcaccactaccgtcagatataacggcgagcagctgtttggcgtggatgttacggggttggcgatgcgggtggttatgccagcaggagcttatggtctgcgatttaccggtgactttccccgagacgttgcctggaatggatgtggttggtcatcaacgtggcggcgctattgcggtgcatcctggggcggcgcgacccgttttgaactggtgaaggtcgccaccacgaccggcagcggcagactaacgataccggggcgcattcgtgccagtgtggttaatcagacttatgtctataacttcagctttggccaatcgaatgtgaataccgtggcctgttcggtgaccaatactgccattaaggtgccgatgggcaatatcaagcgcagcgagtttaccggcgtgggaaagagaactgcgtttactcaattttttattcccctgcgttgtgatgtcggcactcgtgtcaatatcacgattgatgcgacggctgacgcttctggtgtggcgggggtgatggcgatcgatccggtcagcaccggcaccgccgccagcggggtggggattgaagtgcgggacaaccatggagcaccggtacggttcggtacgcaaacgttgctcggcaactattcaggaaccggtggccaggtatggtttccattcactgccaactattatcagactaatgatcgggtaaccgccggtcaggccaatggcactgccaccttcaccatgacctataactga

SEQ ID NO: 432754 - DNA, 1149 bp, Serratia marcescens
atgctcggctatctgctggcacgggcggggatcgacgtgacggtgctggagaagcacgccgacttcctgcgcgattttcgcggtgacaccattcacccgtcgacgttggaagtcatgcaccagttgggcctgctcgacgaactgctggcgctgccacaccagcgcgccgaatccctgcacgccgaagtcgccgggcgcgacattaagctggcggatttcactcgcctgccgacgcgctgcaaatttatcgcctttatgccgcagtgggagttcctcaactttttggcgcagcaggccgccgcgttcccccatttcaggctgctcacctcgacgcaggttcataagctgctctacgaccgcggccaggtatgcggcgtgctggccgacacgccggaaggcccgatccgcgtacgcagccagctggtgatcggtaccgacggccgcaactcggtggtgcgcgagcaggcggcgctcagcagccgctccttcggcgccccgcgcgacgtattgtggatgaagctcagcaagcagccgggcgatccggcctggtcgatgggccataccgggccgaagcagaacttcatcatgatcgatcgcggcgactactggcagtgcggctactcgatcgataaaggcagtttcgacgcgatccgccgcagcggcctggagaaatttttgctgcacctcgccgaggtggcgccattccaggacgatcgcctgcaggagatcgtcgagtgggatcaggtgaagctgctgagcatccgcatcgatcgtctggatcgctgggccaaaccgggggtgctgtgcatcggcgacgccgcgcacgccatgtcgccgatcggcggcgtgggcgtcaacctggcgattcaggacgcggtggccgccgccaacgccctgatcccgccgctgcgccagcatcggctgcagctgaagcatctgctgagcgtgcagcgccggcgcgaattgcccacccgggccatccagtttttgcagatcaaaatgagccagcgcaagccgggcgaacgccgcgcggcgggcggttcgcgcctgatcgcccgcgtcggcaacagccgctggctgccgcgcctgttcggccgcatcatcggcctgggttttcgccgcgaaacgccgcggcatcttgaaagttaa

SEQ ID NO: 432755 - DNA, 174 bp, Serratia marcescens
atgaaaaagacactaggcccgttgccgcagccgcaggccgaggcgcaggccacggcgccgctcagctatccggtgcgggtgcataacgcggtgagccgcgcgcagtttccgccgatggccagcgccaccgagtatgcgctgttcaacgccgtggtgctcgatttcgttccctga

SEQ ID NO: 432756 - DNA, 288 bp, Serratia marcescens
gtgggccgcgatgtcaccacggaggtggccggcagcctgctggaaaagatcggcaaaatccgcagcagcatagcggcagcgcgccagtatatcattgccccggtggtgtgtgtggggagccagcaaatcaacgtgatggccttgatgctggaaacgctggaggtggtgcagcagactgccgcccacacccacagcaacaccggcgcaccgcagaacgcgcaggcaatcagcgccgccggcacgaagtccagccagctgaaaagcaaatacgcgccagtgattgggtag

SEQ ID NO: 432757 - DNA, 1197 bp, Serratia marcescens
atgcccattgtgtttatacatggagtgaacaatcgcattgaggacagggattacgagtccggtatcaatatcaaacgagagtattttcgaagtacgttcgctcctttattgaacatgtcaatccaaccacaaaatattttttttccttattggggggggcagggtgttgattttcggtggaagcaggcttctttaccccacagttccgatgacgtcgtagcgctgggagcaaatagcgccgcactcgaatcctggctaggcgaagtacgattccagaagaacagtgaaacgattatcttgggcgaaattagtcgtaatgaaggatttacctccgctctagacttgttctgggacattgtttctgttgcagtttccgacgaccatgctcaggaaatcgctttgtattacgaagcttctcttcgatatgctaaagatgaaccagcccctgaatgggcgcttgcgacttctcctttagataatgaagatttcgcctgtcaactcttcaggtctatagagagctacattcaaccaaaacagataactccaggtgtagtggctttaggaatgggtgactgttttacgtcagtgcgggaggccatgcggcgccttggaaatgcacctgctgatatagctggtaccgttttagctaaactaggcagaaaatctgcgcatgaaagagcctcacgatttcttggtgatatattcatttatttaacaaagcgagatgatacgggaccaactagcatactagctgacgttctggagaaacttcaggaagcgaacgctaccagaacggaagatgatgacaaactcgttgtagttggtcacagcttaggaggtcttcttgcctatgacgctcttactcatttcctgcccgacatccatgtggactattttattaccgtcggctcccaagtcgcattgtttgaggaaatgactctttgtaagactagtgtgctaggtgtacccgctaaccctcccagagatcgcttagctaaaccttcgaatattggccgttggctcaacgtttatgacacaaatgatgtgttctctttccgagttgaaggcgtgttcctcgatgttgaagattataagttcgatacagggtatggtctgctcggtgcccatggtggctattttttaagaccgagcttctacaagcgacttgctaaaagagccttggaggtcaaggagtag

SEQ ID NO: 432758 - DNA, 1185 bp, Serratia marcescens
atgggaattgttttcgaatctcaggctttcaaagaggatccaaatgttacagcgactcatgttctcctcgtcggatgcggtgaatatcctggcttggcaatctcggaaaatgatttaaagcctctacttcctccgcgtatctcagtagaagcaatggccaactggtttctttccggccgagacgcgatgcctgagggacgtgaaaagccaccagagaaggcgttccataatccccacgcgccattaggctcgcttgccatatatgcatcccctgcagaagattacacattgccctcaggagagaccgtagcttgcactagaccaactattaataacttgaaagctgccgcgcaccaatggttgacccggctaggtaataatccgcatagccgtggaatattctatttctgtggacacggtctgagcgatggaaccgtccaatatcttgtcgcagacgatgtgatggagattgatcatgacccttggggcgcgctctttcatgttacaaatacctgccaggcagctatccggactacccctgcaacactggctttctggattgatgcttgtatggagttcagcgagcaagtactgaataacatcagctcaccaaatcctctaattaatggttcccgttctggtccacctaagacgcgagactggtcattgattggtgccacgagtatgaatcggaaagcctatgctcccgagcgtggggtcgcgcgtttcactgaagccctattgctcgctcttcaagggcattgtggtacacagtgcgggatggaccaggattttagtgttgggtctaatgatatacgtatcgcaacagctgaatttcttagcctgtcacaacatggcatggaggatgacatccaaaccttaggcggttttcaaggggatggcttaggcgacactgcacttcatgttctacctagtagcccacgagttcatatagaaatgtctatcgatccacccggtttcggagtgctcgctaccgcatatatggaaaattctgctaatccacgcgaacagaaagctttcagggatggccctgtaagcttcttgaaggagcgaggtgagtggacctacggtacgacatttaatcgaaacagatttccagaccaaactcacaatagattgttaacatcagctgtccttcgttggcaattcaaagtaccggagtga

SEQ ID NO: 432759 - DNA, 1641 bp, Serratia marcescens
atgcaacaccttttggttagcgttagggtaggccctaatcaggccttaccaattgaaatttatacccctgaaggttctttaattgatagtggggcagtttcatccaatcaatccaaactttttgatttacctatgcggcaaaacggagatgatgatcggatatttgagagggtttatgtgttcgcgaaacttcctggaggtgcgactattcaagaggtcgcggatctagatgtttggggaggaaaagttgttctagatgttgcaaagagtagcccttatgagtggctggaatgggtgactccatttcgctctttaagccatttaagtaacaaaaatatccaagaaacgaccgggctttccatctatcaatcccgccggataggtaaagtatgggcgacgctatgggagtttagggaaaagagttggggggctaaaaatgttaattttgaacgactcaaaggtgatcgaggagttcttcaactaactttagacgttccatgttgcccgcatttattgcaactaggaggtgaagagttatcatggcgcatgatatccctaccacccggtaaacgagtgaatattgctctaacacctcgaatgcatgaaacacggggggatgcactcgacattacagtaggacaagagcaacgtgaaaacgaacttatcatgtcctatctttcacaagggtgcctacctgaagtaacgaagttggcagagcttatggaaatatcagaccgtttgttatttgataaattcaacgatcctatttccgctgttgcaggggggtatgttttacttaagactaataagttggaggaaagagagtcatggttagataatttgaatagtcatttcccttatatcgccgacatcaaaattctgaaggcggcattggctcgagaaaaagaaggtatacttgaaaaagacatccgtcaaatgctccttgattcaatggaagttggtctaccgattttttcgcttggcataactttattacacgacggtatggcagcaatgcatcggggggcagatgaaacgcgaaatttccacagagcgtttctggctgtccaggcttatgttcgtgccggattttcaaaaggagcctacttcgctttttatgggaaaagtcctgcagagccactttggattcctatctatggtaccgagcaagcaggggccgctacaccagtgagtctcggctctagcccacccgtattcatgggacgacctaagggatcaccccgttcggtccggtatggagaaacctcagtcacattgccttctgccccagtaagtatgatgacactcgatgttatcgatgaatataataaaaaacagctcgatcatgttgagtcaggccatagacttaatacagtggacttgccagagtttatcctcaagcagactaggatctcagtaacctcggcgctgccttcacgtgtattaaaaaggcttcccgattaccttgttgtccccgaacctaatgaaagtctcagtgatattgtcgtaagtaagggccctcaatctaaatcaagtcttccgccagaacgcaagggcaaagcaaaatctatacgaaatgctaaagattggaagtctgcgcggatttctcactcaattcttgtgatgaatgaagatgattag

SEQ ID NO: 432760 - DNA, 312 bp, Serratia marcescens
atgaacaagaaaactaagcgtactttcacccctgagttcaggctggaatgtgcacaactgattgttgataagggatactcgtatcggcaagccagtgaggcgatgaatgtcggctctaccacatttgagagctgggtacgccagctcaggcgagagcgtcaggggatcacgcactctgctacccccattactgcagagcagcaacgtatccgcgagctggaaaagcaggttcgccgcctggaggaacagaatacgatattaaaaaaggctactgcgctcttgatgtccgactcactgaacggttcacgatag

SEQ ID NO: 432761 - DNA, 747 bp, Serratia marcescens
ttgtgcagcgaaatacgccaagcatggaaccagagtcggggctctgctggcgcacgcactctggctgaaatgctgactcagaacggcgtcccgatgagtcgttaccgtgccgggcgtctcatgaaatacctgaatctgagcagttgtcagcccggaaaacatcagtataaaaatgcccgtcagaaacatacatgcttgccgaatttactcgagcgtcagttcgctgtgccggagccagaccgtgtatggtgcggagatattacgtacatctgggcaggaaatcgctggtgctatctggcagttgtcatggatctttttgcccgcagaattatcggctggaatctgtcagcgaatgccgatacagcgttggtaagtagtgccctacggatggcctatgagatacgtggccaaccccgggaggttatgttccatagtgatcaaggaagccaatataccggccttaaatatcaacaagttctctggcgttacaggataaagcaaagcgtcagtcggcgagggaattgctgggataacagcccaatggaacgcttcttccgtagtctgaaaacagaatgggttccgacaaatggttacacagggagtgatgaggcccggcgtcaaatcggcggttatatcctgaattactacaatagcgtcagacctcatcattacaacggggggctaacgccggaagaatcagagaacagataccgttcttactataaaaccgtggccagtattacttga

SEQ ID NO: 432762 - DNA, 1680 bp, Serratia marcescens
atgagtattcagctggttctctcccattatctagcgggcctgcgtgagcgcaatgagctcgatgttctgctgccagaactgcttaaggccatggggcacaatgtgctcagtcgcccacagattggccccgcgcaggctggtgttgacgtgctgtcgaccaaagcgggtgccgacggggttgatgaggtttttgtctttatcatcaaattcggtaacgtcggacgggccgatttttacggtgggccgcagtctatcgacccctctatccgggaggcctgcaatgacttcctcagaaaccgtttaccggaacggctcaagccgctgcgcaagcggattgttctggtatccaatggcgtactgctgcaggaagcccaggccggtttttcagcccttacggaagacatcgcaacacgtccgctttgcagtcttgaattctggggcaccgatcagctcacaccgtgcatagagcagtacctcttcgatgaaacattactgctggctcggggaaaatctgacctgcgcgccgccctggccggccttgaggagtcaaactcagcgataaaccggtttatccgctttgttgatgcctgttttgaaatacaggccgaggagtcagaacagagtgcggagacgcgaaagaagaagtttttaaggcgatgtgccgccgcgtcgatgggctgggcggtcctgctggtctggggaaaaagcgaagacaatttaaagcctggggtcgttaccggcgaatacctgatactgcgtatgtgggccgaggcggtaaaactggaattgtacgccgacaacgcctttatcgaccgctttgaaacgctagttacgctgcatatacaggctctggtggactactttgaaaaagtaatgccaaccctggagtcaccgcgcgccgtcctccgctggcgcccggatcgcgtcttctatctggagcttatgtttgaggagttgggtcgcatgtctaccctcttactattgctccagcaaaaacctggagaggagactcttcgcacgacgattcgcaacgccatcattcatctggtcaatcagcattcgggggtgctacttcccctttatgacgggcacggcatcgacctgaccctgctcttctgcgccctgatgggtgagtcagactgggacaatacgctgattatcgcaggagaagttgtggcccgacttcaccatgcgctgagaacagaatgttatctgccggtcgacaccgactcgctggaagatgctattgccctcaacagtaacaaggctgagagtcgtgatttcttccagacctcaacgctggtgccggcactcgcgacggtgacttcattgctcggtgatgaagaagccctccagacgctgcgcgatcagctactgcctctgatgaagggggtaacgcttgagcgctggttcccgaccacaacacttgaaacactcagcggctcaacactggagatccacagcgtcggtatttccagagcattgtctggcctcaggccttcagcaaaggaggaagccgaggcgtcaattaaaacctttggcggtgcagccgtcccatcagacttcaggtggtactgtaactggcaagtcctgatcgcgttgtcagctcgactgtaccgacacccactacccacgtggtttatcaatgaatacagcccaacaggcccttccgctgattag

SEQ ID NO: 432763 - DNA, 903 bp, Serratia marcescens
atgactacagatcagttttatgaaatctatcgccagctcgctgcattacgaaccgatgccggcaattgtccttccgttatagctgaactgaccctgctgtgccgcgaaaccatcaggacctcgtcccctgaagagtgtcttcgcgccgcagataactgcctgcatgaaatcggtcagtctgctccgcttttcgcactcgccctctcctgctggctgaccgataaagagtgtattggactggcaaaagccctcgcgcatgaggcaagcgtgtgccaccttcaggcagcaaccccacaggcgtacgacctgtcctccattgatgaggcacgcgccatactgacggcgtcccggctctgcgccctgcatgtttcccccgccgtctcactcggctgggctttaagcctggcaaccacttacccagccggcgtcacggcacttaatgcagccggcgtactcctgcagcatcacatagaagaatatccccggaccacgcagcggctgcttgccagccctgaatccccgtttacctcgcttgagctggcgaataccgcgctggcacagctggaacaacagcaaaaccatctgaacggactaccggtgcttcgagagcttgcgatgacgcctgagatgcgactgatgtatgccagtctgaaacgcagtgagaacagggagattcaacgacactcggaggagcactccatttttggtcagttcgtcacaaagcaatatttcaaatacgccaacaaaactgccgtcgagttttcgatgggtgacgacgccagagaaagcacgatggaaatgacccacttccaggtagaagtcgagttgcccctcacctggcgcaccgatccactttccggtgttctgaccagaaacaggctgtggaaaggagagctggaatga

SEQ ID NO: 432764 - DNA, 2145 bp, Serratia marcescens
atgacaacgagtatgatatctcatcttgtaatagtaccggatgacacgcgtgcaaggcgaacgactttctttcagggtttctcagatttttggtatccggactatttagcaatattaaagcgtctaacccaatttccgcatgaccttggcgacatatactttactggcggagaatacgtactgaccaaggccataggtagcccgcttcaaatacagacgttacgcgcagaccttgttgaacagtatttatccgattgtgaaacccggcccctcatcgtgtggagtacagcatcaacggtagatgtagttaaatctgccatcggacaaaaaccaataactcatatctcaacagcccaacaagagggtgttatacatgttgactcgttgaaccacgactctgttctggcactaatttctggaattgtagatgcgttggcagaagaacacgatgaatttagggagttcaaaaaatttgctgagcgcaaaagaggggaagccacacaagaaactctcactgtcaacgcaaaagggcataactgtaccgaacctatgctagatgttttactcagttatggagtacaaattgacgttacgccaattaaacctgcaggcgatagttctgaacacattacagggatgctggagctggccgcactgattgacggattacgtccagagaaaataaactcgtcaccactcagaaaaaatgatgtaattattcactgcccctcggtttacacttatctgtatcgtgcagatagtgctctctggcaacagctcaacaggcaacttaataaccctaagcgtaattttctccggcgcggactgataagaagcagcggttatggcaactacactcttcagatggacgagaaagatcttttcaatccgtatgaggacccaatattaagaccgttgctatgtgaccgacaaatcgagttgaaaattttcacaacgatcatcgcaattgtcgccgtcaaccaattctccccggcatttagacttccaaatgatgtaatgcttcatcatgacaagcttcgggacattggaaaacttctttgctcaaacgacagaaaatggcgtgaaaaactcaacacaagaatgcgggaatatggccaactgcttaagacagacattggtgatgctctgttagccaacatattcagtgaaagagagaaatgtttagccgtatgcgattttccagttgaatgggtaccggttgatgaactccccataatgttcagatacgagttatcccggataccttcaaccccgggcaatgtcgctctggacgtattaacttcccgaccgaagtccatattcagatataaggacttatgtaacgtcctcataatcagatcctttgctgacaacgatccgatcaagaatcatctgtcggatatagtgcaggcaagagagcaaacccaaagacttcctggcatgcacattcagatagtcgatgttaatacacgtcaggaaattgtcgacgcgctgaacgcatttacaggattaatggttattttcgattgccatggtggtcatggcggtgaaacagaatcggcttggttaactataggaaatgaaaaactaagtgtctggcatctttatcaggaagcaaagatcccccctatcattgttctggcagcatgtagcacccatccagcagagggctcgcatgcctctgtcgcgaatggttttctcgaatcaggtgcatttagcgttatcggaacgtttgcgccagtcgactcttctcacgcagccgtgtttgtgacccggcttctggagcggatcgccatttaccttccgttagtattaaaacggagagcgtattcctggcgtgaggttgtgacggggttgctgagaatgtcatatgtgcgtgatgttctggaaggatttcgggacagactcggccttcttaatcaacaacaatacgaagagattcatattcaggccaatacgctcataaatactcatgaggacaaaaattggtttgagcatttcagatctctgatttcagatgaaactgggttagacaaagacactgaaacaaaactctgggatgagcacttccagtttgtagagactatgctgtttgttcaactcggcagaccagaaaatgtaatgatttctatcgaggacgagtaa

SEQ ID NO: 432765 - DNA, 2649 bp, Serratia marcescens
atggcttctgcaagacaagattttgatcggtttgttagctggatttaccaatctgaggcaatcccatcagatgtccggcaactggctagcctgtgtcttgcaaactttgatgctcttgcaggaacttccagaaatcgcagccagcgctccatctatctggcgcagttgatgcgtcagcaactggcgcagacccccgaagagcctcccgcaattgaagccaatactgaggtaggtgaatggccgtggtcacgcctgcataggctgaccttaggccccttccgcggtttcagaacaccagaatcctttgagctcgataaacagataacgctgctttacggcccgaatgggagtggaaagaccagcctttgtgaagcgttggaatatgccttactgggggatgtagaggaggcaggaaacaaacgcattgctgcacgaacctacctcgcgaaccttcatgcaggccgttctgctccgcctgttcttaaagctctcgacaatcggggcctggagcttgatgttgtttcaaatccagacacatttcgcttttgcttcgttgaaaaaaaccgaattgattccttctcacgaatagccgcccgtcccaatactcaacgtgccgagcttatcgctacactctttggcatggaccagttcagtgacttcgttagccacttcaatgagagcattgataaccagctcatattgactgcgaataagcaggccgtgcttgaaacgcgccgcgccggactgctgacagatagacaactggtggacggtaaagccgaagcattcaggacactcatcaatgaagagtcagctttagctgaaagctatgcaccaggaactacgtacgccgacctgaaagctttgttcggtagcgaagacgcgcctggacgcctgcagcaactggacaccattctggaggccgcttcacccgccattgttggtattaacggcccaacccttcaggaaaactatgacagggctgagacacacaagaatgaattgaaccgcatcgccgccgatctaaaagctcaaagcgatcaggtatcattcaaaggactttacgaagccgtactcgccctacgcgagcccgtgggggatcgctgtccggcgtgcgataccccactcgctggtgagaaccatgtcgcaaacgatccgtacgaaaaagccacaaccggactgcaacagcttgaagcactagccctgctccaggaaaatcaaaaagcagcggagattgacgttaaccgcatctcccgagaactcaggctaatcctcaaaaaaatagagcgattcattggcgctgagcccgtgacaccggtaggggccttcctcgctgcattgcccgatgaacccgcgggattctggtgggaagctattgcgcctgataatgccgggattaatccgtccttagcacaaatcatcgaaatagcagatcagattgcggcgcaagatactgcgacaaaagcgtcccaacagggacgccagcagttaattgaggaacgaaaccggcttagggatttccagcttcgcgtacaggcgcaggaccaaaaacgtcaacaattgaaagagaacattgacgccgcaggtgctcgtattacagggtttgatgaaacaaacgcctctttaattttggaagtagcgcaagagcagcaggacatcgtcagggacacgccgctaaagacaacgtatgaccttttccttgaagcaataagatcgtaccgcaaccagctgccagggcagctcatggcgggacttaacgagtcagccatgacgctctacaactcatttaaccgcaacgatcttgacacagataagctcgcagcgctccatttgccattaacaggcgaagaaaagatagaaatttcatttcggggtgcccctgaacgccgggtagatgcactgcatgtcctgagcgagggccatgttcgctgccttggcctcgccattctgctggcgaaggcgaggagcattgcatgcccactcattgttttcgatgacgctatcaatgccatcgaccacgaccaccgtggcggcatacgagaaacgatttttgaaaatgacacctttgaagacactcagcttatcgttacctgccacagcaacgaattcatcaaagatattcagcaacatcttcccgtaagacggcggaataactgccgcgtctaccttctcagacatcatgatggcaattatcaacctcgcattcgcggtaatgtggcgagcgcaaactacattgccagagcaagggctggccgtgacgttcttaatgacagggaggcgttagccgcttcccgacaggcattagaaatgctttcagaaaaggtatggaaatggcttagcagtcatgatcagggcgttctcacattacaaatcacggcggcgggtgccgagccccagctccgaaacctttgcgactcgctactgaaaagacttagaagtgctgctactttccagcatgccaataaagagccattaattgcagcctatggcacgattctgggcattccagaacagaatctggtttggacatatctgaacaagggaacacacgaagaggaaaatcgtgatgactttgatggagagcatgttgagtctgttattgctactcttgaggccttggattcgctggatttgcgcctcggaagatag

SEQ ID NO: 432766 - DNA, 1074 bp, Serratia marcescens
atgcaaggtttaaattatctatcggaagtggaaaaactaaaactatttaaaaacattcgaatcggaatgagttctgaggaagagtttgatgttttccttacttctgttgggaatgataaaaataaagatgaaataaaaaggcgaattaacggtttatttttagaggacgaattcgctttattgtgcttttttatggaagtatgtacaagtttagcatctttaggccaatcaccagtaaataacactggcattaaggtaccagattatctggccagttttaacatgcccaagggtaaggaattaaaatgttttattgaggtaaagacaagcaatgctttagaaaccaaaaaaatctcaggatcttttttaaataagtacagtgagttctgtcacagatttcgataccctttatttattgcatcacgtatacatcaaaacaatcttcttttctggatattgcaaagtgagagtgagtttatagattctgggcgaaaagtagaggtgcgtgatttaacgaataatagtgggtgtattctcttagatgattggtttatttccgcaattagtgccttaaaagtgacaattcattttagcgagcatcctttagtatctcaggccagatatgaggacaagggatatttacatcgaattacagtatcacaggagtatggtggacagatttacgagtttaatcttaatgataaagaatttgttttaaatgccttccttgatgagtttcagtctaatgatgtttattataaagaaaaaaacatattagtaagagaaatacctgagcattctggtgatctattgagcagcttattactaaggatgaatatgcgagtaattgattcagccagcccagacgacagatttaatgcaagtagaatgttggtaaaaatagaatcaggctacagttcttacataaacaaaagttatttgaaaaacataatcaatatattaaataaaaaatcaaacctaagcggcgccggggttatttttgcaccactgggacttggcagtgaccaagagagaaaaaagaaaatgggcgaactacttaggctttgtaaatga

SEQ ID NO: 432767 - DNA, 1170 bp, Serratia marcescens
atggataaattgtcagagaaattgccgtttgatgcttcgaagcttttcgaagcccttatgtatcagttagttgttgcgcttgagtactgccataagctggagaaggggaaacgcctctgggtcgaggtgtacggcgatgtaaccttggaggatgtggctcaggtggaggtcaagctgtatgccgataccttgagagatggccaccagaacatctggaacaccttgaataattggttgaataaagcgtttgaccataaggcctacgaaagcctgatactcttgacgaaccaggagtactcaccccagtccaccctgaccgactggaactgctccaccgctggcgaaaagctcgctctactgcttgcgatctacgacggtgctgagcagcgctttgccgcctccaaggcgactgagccatcggaaaccctgcagttgcagcggtcggtcatggatctggcaatcagagacgatttgctggaggtgctggagcgcgcggtattcatcaccggctcaccttcgctcaacgagcgactccatgcctataaggtggagaaactcagggtcatacgggagtcgaagcagcagaccttcatggatgacatcctgggctttattgggagctcgcggtacatcaatactggctgggagatcacctgcgaggagttcaccgccaagtttgttgatctgaccaagctctacatgaaacattcgagcatctttccggaggtcgataccgacgctctgaagcagaagattaatctagatgaaattgctgaccggcctttcgtccagaaaattcgagagatcggtggtgaagcacggatcaagcaggccgccctgcaattgctcattgcgggtgaggtcattgatgagctgtacagcgacaacttggcctctgaatttgacgtcaagcgctaccagaaaaaccaccttgatcgtcatttggacggacgcctaagtgcgatggttgattgcatggatgagacctgtcccatccagttgcggcgccaatcgctgaagttcttctacaagcagcacgccgaaactgtggtgcagttaaacacctttgaagatacgacggcggactttcgaaacggcatctaccacatgctggctgatgtgaaaaccgatgacgaagacaaaacgttttactggagactatggccgtga

SEQ ID NO: 432768 - DNA, 462 bp, Serratia marcescens
gtgaacctgaacgctgccgactacatctataccttgcgccggacgccattttctctcgcgcccatcatccactcgttctatgaccactgggatccgacagagaaggacatccttcttagctacctagtgctgccgctagtgacatacaagcccatgcataagttcttgaactatgccaagaaaaacagctcattgcgcacgctgatgcaggagccaagccgtgttcttggcttggaggccaggatcgaggaatacaagccaatcacccatgcttccctgctcatccttacctccgagaaaagcatcaagatcaatgacgacatgtcggtgcaaccccaaggtaagatcagggaagaaaatgctaatgcccagctcatcaagtacgcacgaaagctcgctattgtgtttaacggtgaaaatgttgtttctgtttacaggtcgttggggttgaaatcgctatga

SEQ ID NO: 432769 - DNA, 1995 bp, Serratia marcescens
atgaactgctatgtaaggtatatcggcgtcgttgacaaagacgaccggattcatgctgtggagtttactcagggtctgaacatcattaccgggaagtcttcgacaggtaagagtgcgatcctggagatcttcgactattgcctaggcagcagcgaagacactatccctgatggcaagctgaccgagcgtggcaagacatttttcaccgtcctgcaattccctacgctgactttggtaacagggcgtacagcagcttccaaacgctgcttcttgcgtgaagtcactgggacagaggcggacaacattcttgagctcatggggcacgtcgaatacttcttcgatgaacgacactttattcacaaagatcagttcttgaagagcctaggcaagttcttcggtatcacgatggagaacattgatacagacccaatgtataagcaggtcacgggggccaaaggtgcgacgccgtccgtgcgaagcttcccgtcatttatgctgcagcaccagaatctggtcgcgaataagcatgcgattttctaccgttttgatgagaaggttaaacgagaccaggcgatcgaccacttcaagattctcatggggatcgtgaaggaagattactttgatgtgtataaagatctgaccgaggcgtcctatgagcttcggcgtgttgagctgaaaataccgaaagacgacaaagcgcgagagatggccatcgcgaaattcaacagactgctgaatcagtatcaagctcttgcaggaaagcccctcttcgacatgacggcagatgaaattttcctcaagccaaaggaagcgctcaggcttatgctcgcgaccccagtttttgtggatggtctagccgacgactacgagaaaaccctcaactccttgcgtgaccagaaagccaagcttgtggccgaactacgctcagccattggccggctgaacctgctggaacggtcagtcgagcaggtcaaggggatcggcacctcgtatgcgtcactgacagtccctcgttccacgagctttgatcacacattctgccccgtttgtgagtcgcactccgacattcccgaagatcaggcgaacaagctcactcaggcgattgagtggctcaataccgagttgaggctttcctcctacgcccgagagagcttggggcaggagagtcgtgatctgagaaaggagatcaaggaaattcggctgaagctgaagagcgttcaaacctcgctcaaacctttcgaggagcatgataggcgggttgctgaagcaagctcgctcgaagatgcgccgaaaaaggccaagctgttacttgagatcgctatcgaagagttcatcgagaatccgccatctgacctcaagaagatgaaggcgtattgggcagagcaggtcaagaagtaccaggagcttctggataagtatgacgttgatatcgagctggatcggttatctcgggatatcaacaaaaaaatgaaggagatcggtcagcggttccatttcgaggagacctacaggaagggctccctgcgatttgatattaatacgtttgacctgtggcacgagaaagaggcgcacaagaaagtgtttctccgctcgatgggcagtggtgccaactgggtgtactcacacctcaccctgtttatggcgctacattaccagttcgctgcttggggggacaaatgtgcaatcccccccatcctatttctggatcaacccactcaggtgtacttcccttccaaggatgagggcgaggagttcgaagccgagaatttgcgggccgaggacaccctgggtgtagaactgcatgatgacatcgatgctgtgtcgaacatgttcacgcagatggcgcatttctgtgatgatacggcgcgtgagacgggcgtgatgccacagatcatcgtctgcgatcacgccgatggactcaatctcggacaggattacaacttcaaggatttcgtgcgggcgaaatggcgccaccgtgggttcattgcggactga

SEQ ID NO: 432770 - DNA, 1242 bp, Serratia marcescens
atggcaagacaaaccaaacctctatccgttaaagaaatcgaatctgctaaacccaaggaagcggactacgttctctatgatggcgatggccttgagctacttatcaaatccagcgggagtaaaatctggcagtttcgctacattcgccctgtcaccaagaaacgtgcgaagaagagcataggcccctacccgtcagttacgcttgccgatgccagaaactaccgggcagagtcacgctctctcctggcgaaacaaatcgatccacaggaacatcagcaagaacaacttcgtagttcgcttgaagctaaaaccaatactttccagctcgtagctgaacgatggtggaatgtgaagaaagccagcgtgacagaggactatgccgacgatatctggcgctctcttgaaagagatgtctttcctgtgattggcgaggttagcgttacagatattaaagctcacacattggttcaggccgtccaaccggttcaggccagaggagcactggaaaccgttcgtcgcctgtgccagcgcattaatgaagtcatgatctatgctcaaaatacaggtctgattgatgcggtgcccagtatcaacattggcaaggcctttgagaagccgcagaagaagaacatgccaagcattcgaccggatcagctacctcaactgatgcagacaatgcgaacagccagcatgagtctttccacacgctgcctgttcatgtggcaacttcttacaattacccgccctgccgaagcggctgaagctcgctgggaagagatagacatagaagcgcgcgagtggaagattcctgcagcacgcatgaaaatgaagcgcgaccatactgttccattgtcagatgaagcaattgcgatattggagatgatgaagccgataagtggaaatcgagaatttatctttcccagccgcatcaagccaaaccagccgatgaacagtcagaccgttaacgcatcgctaaaacgcgcaggttttggcggggtgcttgtttcacacggactgcgatctattgctagtacagcccttaatgagcagggttttccacccgatattattgaggcggctcttgctcatgtggataagaacgaggttcggcgtgcctataaccgcagcgattatcttgagcagcggcggccaatgatgcagtggtgggctgattttgtgatggcagctgattgtggaagtatgattgagggcggtatgaaaggaatgaggttagtagggtga

SEQ ID NO: 432771 - DNA, 750 bp, Serratia marcescens
atggggttaaaaatgaataacgaagaactcaaagaatcactaataactatatttaaggatcgtagctcaggcccattcctctttatcggttcaggtttttctcgtcggtatcttggcttgcctgattggaaaacacttctagaaaaattttgcgtaacgggtaaaccatttgagtattatctctctactggtgatgggacatacccaactgcagcgcggttgattgctgaggactttaacaatgaatggtggtcagatgcacgttacactgctagtcgtgagaagcatagcaagcgtgttaccgataaaacgtctgctttgagatttgaaatctgcgattttttaactaatgcaattaatattccacttcatgaaagtaagtactttaatgagatagtgctattatcaaatttaaatgttgatggtgtgataactacgaattgggactgttttctagagcaactatttcctgactacaaggtatatacaggccaaaacgaactattgttctccaacccacaatcaattgctgagatttataaaattcatgggagtgctcataaaccacgaacgttaataatgacagataatgattatcaagagtttaaccagaaaaatccatatttagcctcgaagttaataacaatatttgttgagcatcctgtgatttttattgggtattcattatctgataaaaatatcagtgatttattaagttcaatatcgtttgtattggccgagaaaatatag

SEQ ID NO: 432772 - DNA, 1476 bp, Serratia marcescens
atgaaactggcaatagtaatcggcgtaagtaattacattttacagcctgaattatctgcaagtaaaaatgatgcaagacttataaagtccgtattaaatcttagtgaagaatataccgacattctctatattgaaaatgaaacaaacacaagacaagtaaaaagcaagctatcagaattcattgcagaacactcagaaaaagaggttgatgaactactattctactttagtggccatggcttattcgatggatccgactttcattatataatgtctgattttgacgcaaggaaaataaaaagcacttcacttgaaaacagtgagctagacataatgatgaagtcattgaatccaaaactcacagtcaagattgtcgatgcatgcaactctggcgtctcatatataaaagacccaacagccctcagcaaacatattgatgaatctaaactaggtttttcaaaatgctactttatgttttcatcagaagatgcacaatactcatttgctgatgcacatctcagttttttcactaaggctataggtgaagcagttgcttactcagcagataactccattagatacaaagatattattgactacatctctgacaaattcagtcgaaatgaacaccaatcccctgtatttatcaaccaagcatcttttactgaagttttcatcaaaacaataacacaagaaaacaaaaatgctattgagaaagcactatcagtcataccagatagcataacagaggcaaagaaacatcccttaaaggaactagttgaaagagatgccgcacggtattttacggaggataaggcagttaaaatatacgaatcaataccagagctagttaaaaaagaattcaaattcaaactggagtcaaaggatttattcaatctgaaaattgaaaatttgaatagctacgacgaagttcctaaattgagtctcctttccgaatgggttgataagaacaatgacgatctttttgtaaaagcaataaaagagactaaagagagaaaagttagaaagccaaaaaaaagaatgactgccttagagcatttaaatgtaaaagtgtggggcatagatgatgatgataactacacgtggactactgaatattacatgtcacctacccatattgaatcatctctcgactgctcttttaaggttatatcaattctagcaaaatcaaaatatcctaatataaacagcacaaagttatacatcctacctttcctatccaaaaccaggttggtaattctctcatgcattgcattatataaaccttcaggttgggaaaacgaaacacgagttgatagcaatgtaaaatggactccttataatatagaactagcatcagaaggcaacctagttaattacttgcgcacattagccgagaattttgagagcgaaacattaactcccgtattaaaatcatttaacttacttagtgataaaagtggagatcaaaaataa

SEQ ID NO: 432773 - DNA, 180 bp, Serratia marcescens
atgaagattgtaatgctcgacgctgtgggccgtccggttatgcaccttgggatcgaagatctgaagctgtcggcaattgccagaaagctgaacgtgccccgccccaccttgcattcctacgtagagcgccaaggcttggtagaagccattcgccacttctccgagaagaataaagcctaa

SEQ ID NO: 432774 - DNA, 1014 bp, Serratia marcescens
atgccaaagcaagcatttgaaaagctggatatggtaaccccatatgcggacaagaaagtagacggtaacctgttgactgatttgggcctgtttgatcgtgaggtcagccagaccgctaaggttgaagtggattacctgttggctgaacagtccaaactactgaacacagttgaacgctacggcagtgacatcaatgacgtctcccgcgaccgcgccaaaaacttcactgtggaaatcccacacgtagccacctctggcaaaatcagttcggcagactttcaaggccatcgcgcctttggtgcagaccgtgaaacaaccgcgcttgagctgattgccgccgagggtgaccggcagttcgaatcttttgcccgaacccgagaaaagatgttcgcgcaagcgctgtttgaacacaaagtcgtggactcccacagtaacgagggcctgattgactatgccgacgtgttcgacaagcaacagggcaatgagaccctgaaaacgggcgcaggggttatcgcgctggagcagatcgacaacttcaaacgcgccattcgccgcaacatgggcggcatgacccgttcaatgccgggctttgtaatggtctgtgacgatgcgctattcagcgccatcaagtgggatccaacaaccggcgcaatgatcaaagacggcctgatcagccccaatttcctgtttaacaacaaggaaaaggctccgggttatgaatacttcagtgtgaacggtgttactttcgtacagaaccctaaccccgactacgcgatcggcgagggtgaaggcttcttgttcccaatgacccaccgcagcgttggcagctatgcccggaatatcgtcggccctgcaagccgaaacttcgatcaagcggcatctggtcaggttcgcgacctatacgtttacgtactcgaggataagctgaacaatccagaggtttacagcgagttcagcttgctgccggtcctgtaccgcccggacttcgtgagcaaaatcacgctgggcgaataa

SEQ ID NO: 432775 - DNA, 342 bp, Serratia marcescens
atgaaacttgaaggcactcaagccaaaagctttaccgatgtgatcgcttattccgtcgatcctgtattcgacaagcgcgaaatcgtgatcgaaacactggccgctgatctggttcccggcgatgttatcaaagccgacggcaccaaattcggcgcagctgataccgaagccccgttggtggttatccaccctgcaaaatctggcgctaaggttcacgtgatcatcgctgatcgtggtgtggtcctgaaacgcgacgccctgaatggcgcagacgcagcaggcaccgctaaagccattgccgctatcgaagcatccggcatcaaccgcctgaccatcaactaa

SEQ ID NO: 432776 - DNA, 444 bp, Serratia marcescens
atgagtcacgaaacaaactgcaccaccaactacaacagcgccgcctactactcttcaggcctcgacctgctgcgattcggtacagaggatgaaattatcgacgcgctagtatctggcgagatcaacaaggatcgcgtctaccggttccgttgcgatgaggcgacgcaggaacgaattgaggtcactggccgggcgctgaaagctgcaaaccgtttggcccgccaactgaagaaagcacgcgaagcccaaaacaacgatttggcttctgtgctggcaaccatccacccgggcgatccgggcgacctatctgattacgttttagatgagttgcacaaccagatcacgtttgcccatatcgcatatggtgtggatatcacgatgcaacaggctatctcgctggccgttttccatctggcgcagagccagcaagcagccagcgtttaa

SEQ ID NO: 432777 - DNA, 201 bp, Serratia marcescens
atgtctagccgtcaatacaatccaaacacgaataaagaagagtttgtcctgtcgttcaataatgagctgacccgcaagatttgggctaaagccaatgcaacaggaaaatccccacaagcagtaatccgcgaaatgattaaaacagcattcgtctcagaagaggaaaaacaaagtgaaaaccgtagtaaatacttcagataa

SEQ ID NO: 432778 - DNA, 813 bp, Serratia marcescens
gtgaaaaccgtagtaaatacttcagataacaccaacagcaccaaaaacaccaatagccctaaaactcagcaattcctcatgatgccttatgaactcctcagcgttcacgaggtaaacggccagccattcgcgctaaacatgaaagtggcttatcagtacataaaaggctttcaggataacggccagcacgcttatttctcccgcgccaagcttggcgaaatgttggggatcaagcttagagcaacgtccggccttctggaaaaaatggagaagatgggcctcgttaatagaatagagcgttctggatacaccaacctctacactgttaacccaatcgaacagaatgataccgctgctaaatccgttgctgaggaagtaaaaaatgaatcaggtcctactgttggaaataaagcacaaagcgttaagccttcaaatagcccaacagagagcgcgcctgaagatctacaccacaataactctattgggattggcgatagtgacagcgccgagcctgttaacgctgcacaacctacacagcttcctcctgtaatcgttgaggaacagtcagcagaggcagaagagccagttgagccagaggaagaagaggaagagccagacttcaactcatatgccgctatggcggcccctgtggccctctttggatgggtgacaacccacaacgccaccttagaacttaaagccgcctacgaggcgcacaggaacacctacggcgaatcccacagcatcccgggctatgcacatcacaccccgagttactcaacagctgaatatgacggcatggaagcattttaa

SEQ ID NO: 432779 - DNA, 480 bp, Serratia marcescens
ttggctaaacggaaattggttaccgctggaaaatacacacccgcccgcctaactgacaatgaagaattcgctctccttgagttggaagaaaaattaaaagaacgaaaggcccgcaagactcaattgtctatgtacctccccagcgtgttggatcaagtcaaagcagcgctgattatctccatgccaatggaagagattaagaagaaatacggagtccccacccgagttattatgactcttcagaagaaatacaatcccaagctgcgtaagacccgccacctaaagaaatacgacaaactctactacgctgaccagatgatcaaagaaggttgcacagaagagcagatcgctaagttcctcgatctaacaatcaagggatttagattcatctggaacgaaagaacaattgatattcctcttacaccacgtaaaggaatgcctaagcactggaaagatttcccatacacgggaattaattaa

SEQ ID NO: 432780 - DNA, 516 bp, Serratia marcescens
atgagcactaaaccagtaatgaaaagcagcaccctcgacattctgaaagcacaaatgaaaaacagcctcaacgatcaagttgaaaagtccaaagagaaagcagccgctaccaagattgagaaggccaaggccgccggggaactgttggaagagctgatcgcaaaacgcgccgcagagaacaccgcagagaacaccacgcaggccgccgggaaggctgatcgtactgatcgcactgaccgcaccattaaatcacgtgggatcgcactgtgtgccgccgctcaaggctacagcgccaacaatcgcccggtcagtctgctgaccaaagcagccaagaccgccaacggtcgccgccgtgtgtggatcaacaaagccgctggccctgaagggatgaaagttaatctgatccgcaaggctaacggctcgatcgtggctccaaatggctacaagctggcccagagcaccattgactacatggaacgcgtaggcatggtggtgactatcgaaggcgaggcgtaa

SEQ ID NO: 432781 - DNA, 321 bp, Serratia marcescens
atgagcatccgagagatcaacacccgagagattagcactatccgagatacgatcagcaccaaggtgcagtctagcgcctgtcctgtccaattgttcgaactgactcaaccggatccgcgtgttgatgcgtggttgcctctggtggcgggcaagacgcctaatcagattgttgatgcagtctacaaccaaaaaaccaccctgaagcggttggagttgatccggcatgacctgacccacaaccgaacccacaccaagattaaccgcctgattgccgcctctgtgggtatggcgattagcattctcagagaggagatcgaataa

SEQ ID NO: 432782 - DNA, 2178 bp, Serratia marcescens
atggccggtaatgtagtggtcaccacgacccggaatgatgtggtcttcagtgtcgatcagaaatcattcaatgatgccaagaagaagattaactcgctgaaaagcgaatgggagaaaaccacctcagccccacgttctacacgtgagcgagcggcacgcccaaaaggtggtgagcgcttcgacgcagcggccaaggcaaaagccgccaaagagcgaaaagaggcagcggcgacagctaaagagaaggcagcagccgccaaggctgaagcactggcccagcgccaacaaaatagagagctggctaaacagcaacgtgtgatcgacaagatgaacgcacgccaagcccgctttgctccggtgtacaacaacaccaagggcgcgatgaactacacccaacgcgctcaattccgggctgactttgccaagattaaccaagagtacgctaaaggcgctatcggtgctcagacgtacacggccaaacttggcgagcttcagaagcaaatgagagcgacggccaaacagtcccgccagtctctggcccctccaactgtgggcggtggtctgagtcctgtagccggtgctatcggtgctggtctgggtgcatatggtgtgctgggtgccggtaagtctctcatgaaaacgggcgttgatttccaaggaatccattcgatcctcaagatgaccgaagacgacgcagcaggcgcagcgcaatctatggaatacctgatgggcctctcttcccgtctgggtgtggatatggtggaccttgccgatcagtatgccaagatgaacctatcaaggggcaagcttagcaaacagacagtgcaagacgctgtaacgggcattcaggaatacggcacggccctccaccttgataaaaaccgcatgagcctagctaactttgcaattcaacaaatgtttggcaggagcaaggtacaagggcaagagcttaaccaacagcttgctgaatccatgcccggggccaaacaggcattcttaaaggcatggcaggacgcgaccggcaatgtaaacctgacccaaggcatgtttgataaggacatggagaacggtctgatcacaatggagaagattgctccccatttgggcaaagcctttggtgacatggcccgtaaaggtgacgctctgaactatgccgttaagggtatcaacgcctcttacaaccgaatgatcaaccaatggaacttgttcaagaataagatctttgaatccaagtttggtgatgcactaaccaactcattcgaaaaggcatccgcagcactggagaatctctcagacgttgcaggcgggcgactgggtgacgtgttgggtgggttgattgacggcttcgttgatatggctacctatgtgcatgacggctttgtattggctgatcgagtcattgagcattacctcaccaaatggggtctagatgcagatcagatttccaaggctttcaacttcgtgggttggacggctggggcgctgttgtttggctctggtctgttgcgtatcaccaacctcctgaagaacctgatcaagctggtgccgggcattaagtcactgggtaaagcgctggcaggtgccggtctggcctctgaggctgtggctacagcagcaggagcagcaggtgcagccgctaagggtgctccaacctctaccggtggtgtagtctccaaggcagtgaagggcgcaggcgttgtagcaggtgggcaaactgccgctactggtggcgcttccaaactcatgaagttcttaggtccagtcggcgagatcctcacggcttacgaggtgggcaagtcccagtttggtgaccagactgagaacattaccgccgcccgtgaggaaggcaagcgccctatgggcttcatcgataaggcggcccaacaggcgggcatgtggcaactgtctgaatccatgtatcccactccggcactggtgaatgacctcaagcctaacgttccatacactggacacatcgactacatgaagcaaacagcttcccccacaatggacacgttcaagtctccaactctcaatgtccaacttgagcagcctaaagaggtagacgttaaggttgatctcaatgtgaacgatgggaagatcacagacttgatcgaggcctcccttcaggatcagcaggctatgacgttcaacctgttggccggtggtggtcagtaa

SEQ ID NO: 432783 - DNA, 1767 bp, Serratia marcescens
atgaccagacacaaattatacagctatgtccgctggagttctgacagacaagccaaggggacaagcctcgagaggcagaccaataaggctaaagagttcgccaccctccacaatttggagcttgtggaactgctggacgcgggcttgtccgcgtaccggggcaagaacaccacacagggggcgctaggcggcttcatacaggccgtggagagcggagccataccgcaagacagctatctgtttgttgagaacctcgaccgcctgagccgtcaagacatactcaccgccaacaagctattctcccacctgttggagctggggctaacggtagtaaccggtatggatgggaagatatacacaaaggcatcagtaacagccaacccaaccgatctaatgttgtcgatcctgctgttcagccgtgccaacgaggaaagcgccacaaaacagaaacgtgtgtacgggaatatcaaggcattggtggagcgccacaaggcagggctaccaacaaccataaagaccgccggatcgcatgtgtggtggactgacgccagcggcgataaacatacagctgttaagccacatcctgaatattgggaacctgcccgcaaggcggtagagctgttcctagagggttacagtgctcacgccgtttgtgattacctgaacgaacactacacagcgccgcctgtacgagtcaccaaggccaccaacacccaagagaatggcggtaagtggtcctatccccttctccgccgcatgaagacacacagggcgcttatcggagagcgtacaatcacaacggataacacggtttacaccctcgagaactattatccggcactgtgcagccctacagagtttgccttgttgcaggatctgaatgagaacaacaagctaacccaaggccccaccaagactaggatcactttgctctctggtctgggcgtgctgaagtgcgggcactgtggcggcgctatgacctttatgatcggggccaacagcaagatcagatatatgtgttccaatgggaaagataagatcggcagctgtagaagctggtcagtctctttagacattgtggagcggacattagtcccggcactggtacgcggatacatggaatacgccaccggcggcggagccaagggagacgacattaaggcatcgattgaagccacacaggaggccctccaagagcttgagagtcagatcgataacatcacaacagctatcacccttggaggcaaccttgccccactggtggaacgcatgggcgtactttcaaaggagaaggattccaaactggtggagcttgaccggctggcgcgtctgtcgcttctgtctgagtctgaaggttcagcgatcgagaagattacagacttcattttacagatccgccctgctgttctggctgacgttaatcacccgctgcgcctccaactgcgtgaagctgtccgggcggtcattgaatcgtgcacgcttaccaaacgggcagatcgtggtcttgagattgaatatgtgatcaagggcgacccccaccgcatccggtacaccttcaaggctaccacatttgggaactatacagaggtcacagccgacttagacgaacacggcaagccgttagcctacccagacacagaggaaggcctgaggctgttacagacgcgccaacatatggaggcggagctgtttaagaaggtggaccagatccaagaggaaatgaaactaccgccgatagatggagggcaactctgggcgcggaggtaa

SEQ ID NO: 432784 - DNA, 1287 bp, Serratia marcescens
atggctggcttaccgaccaacagtaattcaaacgcgctgcagcagctgtatcgcctgttcgaaggccgcggcggcgagcgttcgccgcatgcgctggcgcactggcagcaggcgctgcgcctcggctggccaacgcgcaagcatgaaaactggaaatacacgccgctggagagcctgctggagcagcagttcctcgaaccgcagcccgcgccggtgagcgctgagcagctggaggcgctggcgctcggcatcgatgcctgtcggctggtgtttatcgacggccgctacagcgccgcgctgagcgatggcgatttgggcgaataccagttcgaattgactgcctacggcacgccgcaggcgctgccggagccgatccagccggaaattttcctgcacctgaccgaaagcctggcgcaggaaaccagcctgattcgcttgccggccggcaaggccccggcccgcccgctgtacctgctgcacatcagcagcggacgcggcgccaccggggaagtgaacaccgtgcatcatcgtcaccatctggagatcgggcgcggggccgaggcggaagtgattgaacactacgtcagcctgggcgaggccgcgcacttcaccggcgcgcgtctgaccgccaacgtggcggacaacgccgggctgttgcactgcaagctggcgtttgagagccagccgagctaccactttgcccacaacgatctggttatcggccgcgacgcgcgggtgaaaagcgacagtttcctgctgggcgccggtctgacgcgccacaacaccagcgcgcagctgaacggcgaaggcgcaaacctggtgatcaacagcctggtgctgccggtgggcaaagagatctgcgatacccgcacctatctggagcacaacaagggctattgcgaaagccgccagctgcataaaaccgtggtcagcgatcgcggcaaagcggtgttcaacggcatgatcaaagtggccaagcacgcgattaaaaccgacggccagatgactaaccataacctgctgttgggcaaggtggcggaggtggataccaagccgcagctggagatctacgccgacgacgtcaaatgcagccatggcgccaccgtggggcgcatcgatgaagagcagctgttctatctgcagtcgcgcggcatcgacaaacacgcggcgcagcagatgatcattttcgccttcgccgccgagctcaccgaaggcatcgccaatgacaccatccgggaacgggtgctggcgcgtatcgcccagcgcctgccgggggaggctgaatga

SEQ ID NO: 432785 - DNA, 882 bp, Serratia marcescens
atgcgcaatcgacttcccctcaacgccctgcgggcgttcgaatcctccgctcgccatctgaacttcactcgcgccggtctggagctgcgcgtcacccaggccgccgtcagccagcaggtgcgcatgctggaagaacagctgggcattcagctgttccgccgcctgccgcgcgggctggatctgaccgaagagggccaggcgctgctgccggtattgagcgacgccttcgaccgcatcgaggcggtgctgcagcagttcgaaggcgggcatttccacgaggtgctgacggtggcggtggtcggcaccttcgccgtcggctggctgatgccgcggctggccgcgttccgcacggcgcacccgtttatcgatctgcgggtgctcacccacaacaacctggtcaatctgtcggccgacggcctggatttcgccatccgcttcggcgaagggctctggcccgccacctgcaatatcaagctgttcgacgcgccgctgacggtgctttgcccgccggcggtcgccgcgcgcctgcgcacgccgcaggatctgcagcacgagcagctgatgcgcacctaccgcaaggatgagtgggaacgctggttcgcggcggcacaggtgacgccgtggcggatcaacggcccggtgttcgactcgtcaaggctgatggtggaaggtgctatccagtgcgatggcgtggcgctggcgccggtcagcatgttccgccgcgaactggccgccggcgcgctgcagcggccgtttgccgccgaggccgcgctcggcgcctattggctgacccatttgaaatcgcgggatctgacgccggcgatgaagacctttatcggctggatccgccgggaggcggaagaggaacagcagcagggctag

SEQ ID NO: 432786 - DNA, 213 bp, Serratia marcescens
atggggagtgatggttttattgtcagagcagataagtataataaattgaaatggttcatgtactctacgatctctaacccatttgttgatgttatcagggtaaacggtcggctgcatataaaatccacgttgggtttttatcttgacttcgggatcgctgacaatgatatttttctaattgacattattagtgtcaaacctaatgatcaatga

SEQ ID NO: 432787 - DNA, 1440 bp, Serratia marcescens
atgggtaataccatgaatggaaacgaaacgggttgggacagtgttaacgatcttattcactaccatgagcgcgggaatggcctgacgataaataacaaaccgtcttatgacataaatgaggcggggttgcagatcgcgcgcagcgataaaacctggaatggcgttcacgtcacgggaaaagaggcgacggtgacctattccttcccggattgggactataacgaactgaacctgggccaccgctccccggaacgtgatacggggctgagcgcgttcacgcaacagcaacaagaacaggcgaagctgtctttgcaatcctgggccgatgttgccaacatcaaatttgtcgaagtggcttcaggtcaaccctccaatattacctttggcaattatgaggggacgggacaagcgtatgctttgaaaccgttctcatataatggcaatgattacagggggttcaattctgatggacaaagttggtacaacattaagaatcactccgaaaatttgcatcctgagctaggtaattacggccgcttaaccattacccatgaagttggccatactctcgggttagatcacccgggcacttataatgcggggcaaggcagcccaaattataccaaggcagtttacgccgaagatacccggcagtttagcgtaatgagttactggaatgaatccattaccaatgcggatcatggccattactatgccgctgcgccgctggttgatgatatcgcggccatccagcatctttacggtgccaatatgaccacccgaaccggcgacaccgtttacgggtttaattcaaatacaggccgagacttctatacgctcaacgacagccacgacaaactggtgatgtctgtttgggatgcaggcggtaatgacacccttgatttctcggggtatagccaaaatcaacgtatcaacttgaacgaaggcgctttctccgacgtcgggggattaaaagggaatgtttccatcgccgctggcgtcaccatcgaaaacgcgataggaggctcaggtaatgacgtcattgttgggaatcacgcagacaatacgctcaaaggcggcgccggcaacgatgtcatttacggtggagcgggccaggatcaattatggggagggcaaggcaacgacatttttgtcttctctgatgtgaatgactcgcctgttcgggctcctgataccatttgggactttgagtcaggcaaggacaagatcgatctgtccttcttcaaccagggcgctaaaggcagtgatttcattcagtttgtcgatcatttcagcgggcaggccggtgaggcgctggtatcctatgatacccagagcaatctgagtgaattggccttcaatatccatggcggtgcaaatccagacttcctggtgcacatcgtcgggcaggccgacgtcgctgttgactttatcgtgtaa

SEQ ID NO: 432788 - DNA, 870 bp, Serratia marcescens
atgccaatatttataagttactcacatgataataaggacttcgtggataagcttgcaattcagttggtccatagaaatgtaaatgtatggcttgatcgatgggagttaagtattggtgactcgattatcgacaaagtgcaggatgctgtagatggagcaagcgcacttctagtcattctgtcaaaagcatccattgcttccgcgtggtgtaaaagggaactttcctcaggggttctacgtgagcttgaagaaaaacgagttgttgtaatgcctgtgttactggaagactgtgatatccctctttttgccagaggtaaattatacgctgattttcgaactaactttgatgatggtttaagaactgttgtcgaggggatagcaaaagtaactagtccttttctcgctagagcaaaagagccggagtatcacgttgattggtcaatcgactggggtgacgtaaatggtctgttcgcaataattcttaactttgtagagcaagcacagaatcaaccatacacatgcctcacaaatatcgaagtattgtgttcaccagtagcaacagaaaaatatgaagccagaaaagaatcaattggcgaagagcatgcacgagcttatattgttcgtgtgatcaatgagtattttcaggccagaccagactttcgtccactgttagtgaccgaaagagaaaaagtagaaaaagtcatagtggcaggatccgatgatggagaagaataccgactcagaattggggttcgtagattaggtgaagatacaggacgcgatgttctggttaatactacaacgctcattgcacaatcatatgaacacatgagttcagtgctcaagcggccggactcagaaaaagcataa

SEQ ID NO: 432789 - DNA, 282 bp, Serratia marcescens
atgacggaaaaactggctagcaccattatcccgctttatgacgaacatgccgccgcttgggaacgtctcagacccaccacgctgtttgagcggccgtggctcgatcgctttttgctgctcaccccggccaatgcgcggctgctggatctcggctgcggcaatggcgcgccgatcgccgcctattgttatttagcgctgacgcgccaaacggtgttgccgacgtcatccgcaatcagcagggcgccggtcttgtcgacagctaatcctaccggtgcgccatag

SEQ ID NO: 432790 - DNA, 1035 bp, Serratia marcescens
atggagaacaccgataaacccattacgctgaaagcgctcgccgctcgcctgggcatgcatgtttccaccatttcccgcgtgttgaacggctcgcaagatgacgcctctctggccgcctcgccggaaaccgtgcaacgcatcagacagctcgccgcagaattgaactatcgccccaacccacacgccaccagcttgaaaacgcagcgcagccaggtgattggcgtcctggtgcctcgcctttccgatctggtgctggccaccatttacgagggcattgacgaggcagcggccaaaaaccgcatatccacctttgtctccaatacccacgatcggccgaacacgcaacaagagcgcggggaaatggcgctggccaggcgggtggacggcctgatcatcggtgacgctcacctgacgtcggacaatcgttttctggcggacatcgccgcgcgaggcgtgcctttcgtgctggtcagtcggcgcgccggcgagcattgcgccgtcacgtgcgatgactatctcggcggtgagctggcggcgcggcacctgatcgagcaaggtcatcgccgcatcgccgtcgtctccggcgaacccttcgccagcaccggcctggatagaacagccggctttatccgttactgccgccaggccggcattgaaatgccggacgccaacatcatccccagccatttcgatacagcatccggccaccaggtcggcatttcgctgctctccgggccgcggccgccaaccgccgttttcgccgtcaatgactttctggcgattggcttaatgggcgctgcgcgagactgcggattgacgccaggccgcgatatcgccatcgtcggcttcaacgatacgccgctggccgctcagttgccgatcgcactgagcagcgtgcgctcgccaatgcgggatatgggctaccgcgcgatggaattgctgttgaaaaaaatgaaaggagaaacgccggcgtcgctgaagctcgagccacggttggttatcagggaaagttcgcgcggcgtgcctgcccggtaa

SEQ ID NO: 432791 - DNA, 900 bp, Serratia marcescens
atgaacgagaataacaaaacgtgtgtcagtccggtgcgggttgccgtcgttcagttcgatccgcaggtgggcacggagaaccgcgaacgcaacttgcgatacgggctggggctggcgcagcaagccgctgcggcaggggcgaatttgatcgtgctacccgaactggccaataccggatacctgtttacccaccggcaagaggcgttcgaccatgcagaagaggtgccaaacggccccagcgttcaggtttggatggacttcgccagaaagcacgatgtttatctggtcgccggcgtggcggagcgcgatggcgcacagctgtacgacactgccgtgctggttggccccgacggattcattggtcactaccgcaaggcgcacctgtggaatctggaaaagctgtggtttactccaggcaatttgggtttcccggtgttcgatacgccgatagggcgtatcggcatgctggtgtgctgggacatctggttcccggaggtgccccgcctgttggcgcagcaaggcgcagatatcatttgcagcgtgaacaactgggtgtggacgcctccgccgctgtttgatgaagccggccgctgtatggcgtcttatctgacgatgaccgccgcacacgtcaacaatgtctttatcgctgcggcgaatcgggtggggagcgatcgcggcgaacgtttcctggggtgttcgctgattgccggcaccaacggttggccgatcggcgcgatcgcgtcggcggaagatgaaaccattttatatgcggatatcgatctgtgcgcggcccgcagcgcaccaatctggaacagcctgaacgacctgcatcgcgatcgccgcaccgatgtttacgacgcgatgttgggttatcgcattcatccagcgttccctcggtga

SEQ ID NO: 432792 - DNA, 1200 bp, Serratia marcescens
atggagaacaggtcggtttcaatccggggaataaaatgcgggacggtggcgctgaatatcgcggcggccgccgcgctggcggccgcattggcgctcgccgcgcagctggcgacggcggtggggcgcacggcgcattggcccgattacacgtcgatgttggcgcagtggccggcgccgttagcctggctgaggtgggtgctgggggatatgagcgaggcgacgttctacaaacatgagctggcctctctcggcatgttggctggcggcgcgctggcctggcgggcgtgccgcaggggcagtcaatggcaggggttcgccatttcttatgcgacggggctgtggccttggctgctgctcagttcaacgctgggattggtgctcagcaacctgttatggggatggacgatccgcgacgggcaagggtggcaaccgacctttgtcgcctttgtttcactgccggccgcgacggtgctgatgtatggccggggatggaaaataaccgtcgttggcgcggtgctgggggcattgttggtgacgccgtcgtcgctgttgttggttaattttgtctttgcgccgttggcgctgccgggcgtgatcggcaacgttggcggcatggcgttgggaagcgtggttgcgtttatgctgtatcgccgcctgccgtggctgacgacccacgacaacgcgccgcagatcgtcgccgcactgcctcccgaacaggtttttgggccggtctggaccgtgcgcaggatgctggcggactttaccgaatcaccttttttcggcaacgagtgggcgagcgccggcctcattgcgggggtattgttggccaccgcgctgaacgccttgtcgcccgcttacggttccggacttctggcggaaatcttgacggctcaggcgctggccgccgcgattgctgtcgtggtctggcgccgtcagtggattgcccaaggctggtatcccacctacatcccggtggtgtcggtggcgccggccgccgtgttggcctacggcggcaccgcgacggcgatcgtcggtggagctttgctgggggcgctgttgggacctcctttggctgcggcatttgctcgccgtttgcccaaggactttcacccttatgtgggcaatgtgttgtcgatggcgttcagcacgttgctgatcgtgccggcgttggggctgttgccggggagcggcgggcattaa

SEQ ID NO: 432793 - DNA, 1371 bp, Serratia marcescens
atgtcgctaacgactccgaatgttgctttaacagacggttattttgcgggaaaaagcctggaacagctggcgcaggcgctgcgcagccggcgaacgagcgcggttgagctgacagaacacgcgttggccggcatcgccgcgatcgagcctgagctgaataccttcacccatatcgccgcggaacaggcccggcgcagcgctgccgaggcggataccctgctagcggcggggaaggatttgggcatattgcacggggtgcccgtcggcattaaggacaacattatgacggccggtatgccaacgaccatggggtccgcgcattttcgggactttgtgccggaacaggacgccgactgcgttgcggccttaaaaaaagccggcgccatcatactcggtaagacgacgacgcacgagtttgcctatggtccgaccggcgattgcgctttgcagggggcgacccgtaatccctgggacaagtcgaaaatgacggggggctcgagttgcggcagcgccgctgcggtggccgccggcattgtgcccgtcgcgttgggcacggataccggcggttcggtgcggatccccgctgcgttgaccggcacggtggggtttaagcccagctatggcgccatctcaaccgagggggtttttccgctctcgcgcagcctggatcatgtggggatcatcgccggctctcccgccgacgtcgccgccgtttacgcgatattggcgcccgacgatgcgccgtcgcctgcggccgatgtcgctgggctgcggctgcattgggtgccgccagcggcttttggcccgcaggatccgcaggtcgtcgcgctggcggaggcttggctgcgcgcagcctgtgggcggaggttgccgtcggccgtcgagatcgccccgtgggcaagcgagatgcagttggttcttgggcagatacaaaagagtgaggcctatgaggtgcacgccgagcgcgtggccgagtggccggagcgctttcaacccgaagtgttgcagcggctcatcgcttcgcgcgaggtcagaggatgggaatatgtgcgtgcgctggcgcgtcgcgaggcgctgtcgcgccgtttcgcgcgcgtgttcgaatgctgcgatgtgctgctgatgccgacggtgcccgtttgcgcgcctgcgttgcatgcgcggacgctgtttctcggcgggcgcgtctgcggcgttcgcgacgcactgctcagcctgaccagcatatggaatctgctggggctgccggcgatcactatcccgtgcgggtggctgaacgggctccctgtggggtgtcagttgatcgcggcgaaagggagggatcggttgctgatcgacgcggcgcggcagctcctggccgccgcgcggtga

SEQ ID NO: 432794 - DNA, 1941 bp, Serratia marcescens
atgacgattggcagcagctataactatcccgcacagcgcgccgcacaactggccgccgcgcaaaaactgcatacctccggcgcctggggtggccgttatccaaacccgcccgatttgtcgttcgattaccgtcggctggtagagcaaaccggcggtattgctcaggcgacggcgccagaccataaaatctgcattataggcgcaggcatcaccggcctgacggcggcgcgcgaactgtatcgctgtggcttcaataacgtgaccgtcatggaagcgggcgaccgcatcgccggccgccattacaccattaccgacgtcgcaaaccagggattggcaacccgctacgcccccttcgagatggcggcgatgcgcatgccttactttaatctggccggagaaacgcctgacgatggctgctcgctgctggcctactacgccagtgaatttgggctttcgattcaagatttccccaaccccggcacgcgatgggtcgcgtcaaccggcatttacctgcaagaaggcttggtgcacggcggcgctgaacctatcatgcaggtatgggtcaacccggatggcacgacgccgccgccgaccgctcaactgcaggcggtattcgacaagtggaagacgtttgaaaaactaatggtcgacaaagtcagtgaaacttatggttcagacgattgggaggtcatgtggcaagccattgtcgagacctattcccgcacggccttccgcgactttgtcaaggcgccggccatcgagcattgggatccggagaacccgggaaacttcggcgggctggcaatgagcgatgaagagtccaacattttttactccatcggctttggcgatggcagttggggcgccttctacgatgtttgcaccctctaccccttgcgcacggcgatattcggtttcggcagccagctgcaactcatccacgggcgttatgatccagacggtgcctttaatcccggcccctttgccgaggcgctgacgctgccggatgcctatggccgccgttttgaaggcccccgctatcgtggggtgcgcacgtttgacgactgcatgctattcctgccgccgcagggcaaggcgctgtcgttttatgagcacgccatgcagcgccaggccgggtttggcacgcagcagcgcgtgaagcgcatcgagaagcgggaaaacggcattcgcgttcactataccgtgggcgcagacaccgcaatggcgtatgaagatttcgactcggtcgtggtgacggtgccatcctggatcctggaagtcgacgtggaactgcaaggcttctcaccacaacagttaccgcaaaccatcacccgcgcttacaaaaccgcccactgggaaaccagctgtaaagtttatgcgccgttggatccgacatttttcaccgatcccggcaataaaatccctcaaatcctggtgaccgataccttcgttcacgacgtttacgcctatcaatacagcgtcggcggttatgaaacgccctgtattcttctcagctatacttgggaagacgacgccaccaagctggcgtctttcagcgacgccgctctggtcgaaaaatgcgtggcggagctggaccgcattctattgcgttcacaaaatatcggccaacctatttcgccctacattcaaactgagcacgcgcgcgtcgtacgttggatcaccgagccgaactcgctcggctgcgctaagctttaccgcgcaggaacctatgccgatgccatgagcctgctggcctacaaccgcgataccgcagcgcactccgggctctatttggccggcgagtctttctccgtcgatgccggctggacggagccttcgctgcgcggcgccattgataccatcatcaatctttgcaacaacaccggcgcgcacttcaacggaggattcaacatagaagattaccctcactaccaagtgtaa

SEQ ID NO: 432795 - DNA, 2418 bp, Serratia marcescens
atgacaacaagcaatacgaatccacgcggttcctgccgctggatcagtgcctctctggggcttatcctgttactcgccggtgccgccatgctgtacggagggatccgccttatcatgctggatggttcctggtattacgcgatcgcaggtatcgtgttactgatagcggcaccgttgttgctgctggcacgtcacagcggcttagtgatctatgccggtttttgtgcagcgacgttgatctgggctttgcacgaatgcggctggaaccccatcgcgctactgccgcgcgttctgttctttttagtgttgctcatcgtaatgttactgacctggcgctggttcgctcgtcctttttttgcacgccatcgaaaacgggtgcgtggcaccaggccggcactgctggtcggcagcacgctgacgttgttactctttagcccattcgtggccggcttgcagcctttccatggcatcgatctggctgcggcattggaccaatatcccaccgagaacatatccgccgactcggcatcgatcgcccccggagattggccgaactacggacgaacacccggtggccagcgctactcgccgctggagcaaatcaccccggccaacgttgccgacctcaaactggcttggagcttccgctccggcgcaacaggcttgccccaaggcagtaaggcgggcgagttcatgttcgaagccacaccgttgaaagtgcgcgataaactcgtgttctgcaccccacatgctgacgtcatcgccatttcgccggaaacaggaaaattgatctggcgctttagccctcatgcgaatctgaatgcagcaccgtttcttgcctgccgtggcgtatcctatgacgaaacaccaagagccaccggtgtttgcgcacatcgaattatcacagccacgctggatgccaagatgtacgcacttgatgccgataccggtcagcgctgcccggcgttcggcaagaacggcgagatagacctgaccgcaggcatgggactggtcaagccaggtttctactacgtcacctcgccaccctcaatcgtacgcggcaaggctgtgatcggcgggtgggtggttgataacgtggaacgcggcgaaccctccggcgtcgtgcgcgcattcgatacccgtactggcgaactcgattgggccttcgacatgggccgaaccgatcgcacgacacttccacccaaaggtgagttctacacgcgcggcacacccaatgtatgggcaccgatcagcactgatccggtattgggcctggtctatctgccaaccggtaatgaaacaccggatttcttcggcggcggcaggcaagccgtgtcggaaaaatacgccagttcgctgatcgctgttgatgcggatagcggaaagatccgctggcactttcagaccacccatcacgacatctgggactacgatatcccgtctcaaccgactacggtcgacttgcctggcgcacagggcgagccgccagtactcgccttgctggtaccgaccaagcgcggcgagttgttcatgctcgaccggcgcacaggcgccccgctgactcatattgaggagcggccggtatcgcaagaggctgtgtcaggcgaacacctgtcacctacccagcccttccagacagacatgccgacatttgcaccggctacgttgcgcgaaagcgacatgtggggcgctacgccgctcgatcagctgtattgccgcatccgcttcaaggagctgcgctacgagggagcgttcacgccgccatcggtacaaggctcactggcgtatcccggctcggcgggtgtcttcgaatggggaggtgtatcagtcgatcccttgcgccatattgtcgtggcgaacaacaactatatgacgatcatcaataagctgacaccgcgtgacaaggtttcggccagcgataaccaaggcagcaaaggcggcgacttcggcggcccacaactgggtacgccttacgccgtcagtgccgagccgttcctgtcgccactggccatcccatgcaatcagccaccctggggcatgatcagcgcgctcgatctaaaaacccgcaagcttctctggcgccatccgctgggcagcgcttacgacaacggccccttcggcatttcctcgcatgtgccgctgcaagtcggcgtgccgaacatgggcggctcggtggtgacccgcggtggcctgatctttatcgctgccaccgccgaccgcacgttacgggcgttcgatctgcgtaccggccgcgagctgtggaacgccacactgccgttcagcggtattgccactcccagcgtctacgcaggtaaggatggacgccaatacattgtcattgccgctggtgggcataccggcctcggcagttcgggcggtgacgcagtgatggcgtttgcattgccgaaatcgccttga

SEQ ID NO: 432796 - DNA, 903 bp, Serratia marcescens
atgagcgtatttctcacctgcgcaagactcttgatggggcttgcgccaaaaattcttggtaatgaggtgaagttgcgcgagcaactgttaaatcgtgatgcccctcaggccgcgcctattccaagcgcacttcgctcttcatgccatatcaaggaacgcgtgtaccaagagcaaagagtcgtgacgctgacgccacgtacaggaaaacgcgatctgcatgtgctctatctgcacggtggcgcctacgtgaacccactgcttcgcgcgcactggagcatcatcagcgccgtgatcggcgcgaccggcgctaccgtaaccgttccactgtatgcccttgctcccgaaaatgactatcgcgttggtaccgctttgatcgatacgatctatgacagcatcgtttccgcccgaaagggtgagcaaatcgtcgtgatgggggacagtgcggggggcaatgctgcgcttacacttgcgcttcgtcggcgcgataacgagctgtcgctccctgaccatctcatcctgtttgccccatggttggacctctctttgaaggacgctgaaatgagagagctggagagtagggacatcatgcttggcgtggatggccttcgcgaatgcgggagaatgtgggcaggagacatttccccctctgcacccagcatgagcccgctttacgctgacttgcgggggatgccgccgatgagcatattccagggcgaccgcgatatctttgttgttgacgcgcgaaagtttgcagtaaaagcgcaaacctcaggcgtcacagttgattaccatgaatactcaggtggtttccacgtattcatggggctcactttcctgccggaagcgaaggcggtctttcgccaagttaaagccgtgactaaatacctggggcaggcgtcatga

SEQ ID NO: 432797 - DNA, 630 bp, Serratia marcescens
atgtcgaaaataacgccaacagacgcggcccctttgcccccggaaaccgccagagcggccgtggggcgcccccgcgatgctgaattggacttgcggatcatgcgggcggcgctagcgcaggtagcggagggcggcttccattcactcacaatggatgcggtagctaagcggattggagcaggtaaagcttcactgtaccggcggtggaagtcccgcgacgccctgttggctgacgccctactggctttctctccgaccgatctgcccatcgatacgggcacactgcgtggtgatctcatcaccgtttacgaacacttctacggcctgcacgaccctgacattcgcgtcgcagttattgagtttctgggaaaccatcgcatcatgagcggttgggtagagcaggagatcccaggctggttgaatagtcgtcgtgttcgagtcttggaaatcattgaacgtgcaattagtcgtggtgagctgcaagttccggcccaactgaacctggatctgctcatcgacttgttgcctggtgttattcaattccgtcataccgagcgcaaccagagagtcgacaatgaactgattgttgaagtggtggatcacgttcttctccccttgttatcccggtag

SEQ ID NO: 432798 - DNA, 1341 bp, Serratia marcescens
atgaaactctgtggggatcgcgtgatctgggccgttgaatctcatatgcgtataattttagcgatacggcaatcgcagcctttagccgatgaattgatcctatgcccgcagtgcgatttgctgatggcgttaccgccgttaagcactggcactaaagcggtatgctcacgttgcagcacgactctcagcacccgctgggaagagccgcgcaagcggccgataggctatgccctcagcgcactgttcatgctgctgctggccaatattttcccgtttatcaatatgcgcgttgccggctttgctaacgaaatcaaactgattgatatccctcaggtgatgctggcggaagactacgccagcatggccacgctgttcatgctgctcgtgcaactgctccccgcattatgcatgttggcgatcattctgctgtgcgccagggtgcgtctgccgctggcgttgaaagagcggatggccaagatgctgttccagtttaaaacctggtgcatggtggaaatcttcctcgccggggtgctggtcagcttcgtcaagctgatggcctacggcgatatcggcatcggcggcagctttgtgccttactgcctgttctgcctgctgcaggtgcgtgccttccagtgcgtggaccgccgttggctgtggcaggacatcgaatcggcgccgcgcctggagcgtccgttgacggtagggcgcaccggcatgcgccagagcgtgcgctcctgccgctgttgcacggcaatcctgccggccaatcaggtgcgctgtccgcgctgccacacccatggccacgtgcgccgccgcaacagcctacagtggacgctggcgctgctggtgacttcgatcatgctgtatattccggccaacctgatgccgatcatggtcaccgaagcgctgggcaacaaaatgaactccaccatcatggccggggtggtcctgctgtggggagagggatcctatccggtggcgatggtgattttcatcgccagcatcatggtgccgtcgctgaagatgctggcgatcggctggctgtgctgggacgccaacggcaaggggaaaaaccgcgccgacagcgaacacatgcaccttatttatgaagtcgtcgaattcgtgggtcgctggtcaatgatcgacgtgtttgtcatcgccgtattgtcggcgctggtacatataggcctgttgatgagcatctatccggcaacgggtgcgctgttattcgctctggtggtgatccttaccatgttcgccgccatgacgttcgacccccggctgacctgggatcgggtaaacgaaacaataaaagaggaaccgcaaggtgacgaaaaataa

SEQ ID NO: 432799 - DNA, 849 bp, Serratia marcescens
atgttaaatgacgaatatatatataatgtagaaaaatacaagctgcaaattcaaaaatatgctttatgctgtgatgatttcagagatggggtatacagagcccctaaagacaaagcccttctaaagaaatatatttgttttaataacaaatcttttattaacggtttggtttttgatgtagatcacaaatatggagcggtcgcatgggacttagttggtttaccaataccaaatacgatcatacaaaacataaaaaatggccatgctcatttactttatgctttaaaaaatcctgtattaaaaacagacatggcaagagataagcctttaaaattggccgctattgttcagagtggatttacagaaagattagatgcagacagagcttatgctgatgttttaatgaaaaaccctctcaacatgcatgaatggagaacgacatggacaaatacttcagcatatgatttacaatacctcttagattttatcccagacaaaataagaatttcgagtaaaaagaaaagtgttatacatgggctgggccgcaacgttaacttgttcgaagatttaagaattattgcttataaagaagtattaacttttaaaaaaagtaaaaactatcattgttttttttatgacatgctatcaaaagcgactttacttaataatcatagcaaccctcataatccattatctcatgaagagacaaaacaaatttgtagcagtatttgtaagtggacatggcgtaatttttcgattcagaaattttcgacaatacaatcaataagagcaaaaaaaacaagaaaaacgcaaaaaaaattagaaatagcattggagacattattatga

SEQ ID NO: 432800 - DNA, 870 bp, Serratia marcescens
atgaaatcttgggtaaaaatgaacagttggacatcagaagacaccaaagcagtgaaaacgtggtttgatttggacaaatatcgagagtttgaaaacatttctattaatatgctttaccatgaaatatgggctagaacctatttcttcaaaccagtaatagaagaaggaatgcagaaaacggtattgaaaaattatatgcagatattggatggtgatccttttcttatcaaagagaagcaattaaattatatggatgccgaaaataaattatatcaacccccatacttttttattactactgttgatcgaatagcaaatatcagttttgcttgtatgagaaaggctttattcattagagcaaatacagaacaatataaaattgattccactattgaaaatgaatatatttccgaaaaaattcctgaacagtttcctactacgattatgttagaaatcgatcttgcgagtggaagcgatgatgagatagctgaggccctgcgagtatcattaccacaatggcgaaaagtaaaaggcgttaaacctgccccacttgatgcagttagatttggttatggggcaataaaaaaattaattagctatcgaattatccctatgcttgatttgctcgcatggtcagaaagaaaaaaagtacttctgtcagacgacagactatctcgattgctatacacggatgaagatgatgataaggcgattcgccaaggatatcatataagagatgctgatcggcctttcgcaatgaaaactgtagaaattgattttttaaggcaatttaacttttttatcaataaaaatcagcatgttaaagaaatgagggtttcggatgttatgaaactctcagactctgagtga

SEQ ID NO: 432801 - DNA, 1248 bp, Serratia marcescens
atggctctcaccgatatcaaagttaggactaccaagccctccgacaaacccttcaaactcacagatgggcagggtatgcacctgctgatcaatcctaacggctcgaagtactggcgattacagtaccgtttcgatggcaaacagaaagttttagcattgggtgtttatccaatggtctctcttagtgaggcccgcaggaagcgagatgaagccaaaaggttggtatctgatggtatcgacccttctgagaagaaaaaagccgacaaaatcgagcagagcgaagctcttacttttgaatctgttgccagggactggcataaggcttgtaaaagaaaatggtcagattcccacagcgagagagttctaaaaagcatggaagatggtctctttactgcaatcggtaaaagaaaaatatccgagcttaataccagagatcttcttgcacctatcaaggctgttgaagcttccgggcgattggaagttgcttcccgcctacagcaaagaacaacggcagtaatgcgatatgcggtccagaatgggctgatagattacaaccctgctcaggagatggcaggagctattgctgtagccaaaagaacccacaggccagctttgccattcgaacgattctcagaactcttagaacgaattgataacttcaaaggtaggaaactcacgaagttagccgtaaagctgacgttgctcattttcattcgttccagtgaactccgattcgcaagatggtcggagatcgactttgaaaatgcgatgtggactatcccaggagaacgcgagcctttaccaggggtcaaacattcccatcgaggctcaaaaatgaagaccccacatctcgtgccgttaagtcgtcaggctgtagaacttctaaaagccatcaaagaaatcagcggtgaatgcgaccttgtattcattggcgatcatgatttcagaaaacctatgagcgagaacacagtgaacaaggcactaaggtcgatgggttatgacacaaccgttgaggtatgtggacatggattcagggcgatggcttgtagtgccttaatcgaatcgggaaaatggtcaagggatgctgttgaacggcagatgagccaccaagagcgaaactccgtccgtgctgcctacattcataaagcagaacacctcgatgagagaaggcttatgttgcagtggtgggctgattatcttgatgaaacaactaagagaagaattgcaccttttgattttaataactaa

SEQ ID NO: 432802 - DNA, 528 bp, Serratia marcescens
atgagaattccaactagtcgtaaccccagattgatgtcgagcctcaacccaaacctcacgagcagtatcaatcctcaactaactagcagcattaacccaaagctgacgtcaagcatcaaccccaaactgacctcaagtatcaatcctgcgcttacatctagcataaaccccaagttggccagttcaatcaactacaagctcacgtcgagcaagtatccaaatctcacgtcaagcatcaatcctaagctaacctcatcgatcaatccaaatatatcgtctaatattcctggattatatttatttgatctagcactaaatgcggtaggatttacagtgtcgccaactccgaactattggttgttattcgatccactctgtcaatttactggtgttgctgttaattgtcggaagaattttttcattgaatttgatctggataataattttattggattctttgttcacgccaaagatcaaagctggttgcggttcaacataaataacgactgggtggggctgaccacatag

SEQ ID NO: 432803 - DNA, 654 bp, Serratia marcescens
gtgaaaaaacacgagggcatatcaaaatacaagctgaataaaatagctgcagagtctttgagaaattgtatccgtcttcattttgactcaatgttgctttatgagcacggttcgtatccaagtgcatttcagctttcagtcttggcgcttgaagaattctcaaaagcgatttgggtagatcactacatttggtcatctgaaactaatgagggctatccagacgttcagtttgagcaggcatggttaaaacttttatacctacatcccaaaaaacagtggaactttgtagcaagagaaatagatgattattctccgggttttatttcactgatacagagaagggaattagaagagaaaaagcaggatgctatatatgttggtttgtctcgtatgaaaggaggtattgacatagatagccgagtctctaccccttggagaattaaacaaaaagatgctaggcagtttatatcagtaatcaatgatgaattactaaggatagttgcgagaattgaggaggatgagttttatttcgagggaggcaaagggatggatgaggtttttgattacgaaatatataaaaatcttttgcaatggcctcataaaagcggaattagaaataataggtggaggaaaaaaaaccatctacggaaataa

SEQ ID NO: 432804 - DNA, 213 bp, Serratia marcescens
atggaacgcttcttcagaagtctgaaaaacgagtgggtgccagtgacaggttatataaactttagcgaagctgctcatacgatcacagactatatcgtcgggtattacagctcgctaaggtcgcatgactatgactataacggtgggttacccccaaacgaatcggaaaaccgatactggaaaaactctaaagcggtggccagttttagttga

SEQ ID NO: 432805 - DNA, 1539 bp, Serratia marcescens
atgacaacaattcaccttgataaaagtaagttttcatctatgtctgagttgatctcgatttatgctatcgagcgtccgaacactgtcgctttacggtacagaaacgtaattgttacttataaagatttgcagcgttattctgaacagattttggcaacgatacagtacaacaacatctcaccgcacactgctattgctattgcttcgtccaacccgttgctagccactttagctcttctcggggttattagtgccaggtgtgtcgctgtccccatcgctctatcatcttctcccgagcaaatcgcatcggtgattgcagatgcatctgttcctttagtctttttggataccgagtttcttgagggtttgccatctgttggtgtcaaggtcgctaatcttgacgaattcgatagctggttagcgcctgaaggatttgctgccacgcatattgatatatcgccggcagatccttttaatattatctattcatcagggaccacaggtgcgccaaaggggattatccatacgcatggcatgcgttggagtcaaataacagcatatgggcagattgttccgcaatgtgactccgccgtcaccttgatcgccacgccgatctattccaatacgactttagtcagtttattgccgtcgcttgcctacggggggaccgcggtgctgatgggaaaattcgacgcttatgaatatcttgtcgaagcacagaattcgcgagctacccataccatgctggttcctgtgcagtaccaacgcatcatggctttaacacaattcgacgattttgatctcagtagcttcattttcaaatcaagtacaggtgcacctttttctcccgagttgaaagccgatgtgatccgccgctggccaggagcattgctagaaatttacgggatgacagaaggaggggggacttgtgttctcttcgcaaatgaacaccctgataaactccacactgtaggccagccggtggctggttgtgaaatttgcctgattgatgcacaagggaatgtggtcaagtctggagaaatcggtgaggttgtggggcgttcaaatatgatgatggctggctatcaggggcgccctgaggcaacccaggaagccacctggattgatgctgatggcaatatgtatatacggcacggtgatcttggacgtttcgataaagagggttttttgacacttctcgggcgtattaaagacatgatcattagcggcggttttaatatatacccatcagatatagaagccgttttacggttacatccctccgttgcggattgcgcggttataggcattccctcggttgcctggggggaaacgccctacgccttcttcgtccccaaacacgactcactcagtcctgacgaagtcatcacttgggttaatcagcgtatgggtaagacacagcgtttatccggcgcacaggcaattgctcaattgccacttagcgctataggcaaagtactgaaacgtgaactgcgcgcgctctttctggccgagcaccctaccccattagcattataa

SEQ ID NO: 432806 - DNA, 891 bp, Serratia marcescens
atgaaacccgacctgcaggatcgtgttgcgattattaccggcgccggcggcgggcttggccgtgctcatgcacatctgctcgcccgttacggtgccaaagtggtgataaatgatatcgggccgggtgccgacaaggttgccgaagaaatcaattcatccggtggggaagccattagtttccaggcctctgtgaccgatgaagaaaaaataaaggccatggtcgcggaaactatcgagcggtggggaagagtcgatattctggtcaacaatgcaggcaacctgcgtgacaagacgtttgtcaaaatgacgctagatgattttcgctctgtgttggacgtacatctcatggggtcagtgatttgcaccaaggccgtatgggagcatatgcatcgccaaaagtatggacgcatcgtgttcaccacgtcctcttcgggtctttacggcaacttcgggcaggccaattattcagcggcgaaaatgggcctggtggggctgatgcaaacactggcgcttgaaggcgccaagagtaacattttggtgaattgtttggcgcctaccgcagccaccgctatgagcgaggggcttttggtgcctcaagcgaagcgtgtattgcaacctgaggccgtgagtccggcactcctgccgttggtttcgcagtgtgcccctaccagggctatcctttgcgccggtgcgggcaattttgctcgcgcctacatcaccttgactggtgggcgctttttgggcagcgatacccataccaccaatcgtattttcgcagactggcaagtgatcggcgatcgcgagtcagagcaagttcccgagtctgccactgcgcaggttcatcaagaactcatcgctgctttccgttcacaacctgaaaacaaacagtga

SEQ ID NO: 432807 - DNA, 1179 bp, Serratia marcescens
atgcgtgatgccgttattgtttctaccgctcgaacgccgattggcaaagcctatcgtggcgctttcaatgccaccccatccgcaacgctggcggggcatgcaattaaacacgccgtcgaacgggcggggattgcgggtagtgaagtggatgatgtgttgctcggttcagcattgcagcaaggcgtgcaagggttgaacattggacgcctggctgcattgcgcgccgggttacccacgtcggtttcaggtatgtcgctggatcgccaatgcgcttcgggtcttatggctgtcgctacggcagccaagcaaatcattgtcgatggcatgagcattgccgttgcgggaggggtggaatccatctcgatggtgcagactgaacggatacgtatcgagccggacatggagcttttctcgctgtatccagctgcctatatgcagatggtggatacggctgacattgtggccaagcgctacgggatcagccgtgaagcctgcgacgaatattcgctgcgctctcagcaacgaacggcagcggcacaattagaagggctgtttgacaaggaaattattcctatgcgttctgttatggcctacaacgaccaggaaaccggcgcattggcttataaagaggtattgttggagcgtgacgaaggcaatcgtccacaaagcaccctggacgatttgcgcaccctttattccgtcaaggggcccggtaaaaatgttaccgccggcaacgccagtcaactctccgatggcgcttccgcgctagtgcttatggaagccaaggaggccgaacgaagaggcctgcagccgttaggtcgctatgtaggtatggccgtagcgggtgttgatccggacgagatgggtattggccccgttgccgcggtgcctaagttgctgcagagcaatggcctaaagattgatgatatcgggctatgggagctcaatgaggcatttgcagtacaagtgatttattgccgagacatgttgggtattccggacgacaggctgaacgttaatggcggcgctattgcaataggtcatccctacggcatgtccggtgcccggatgacaggccatgcgctgattgaagggaagcgtagaggcgagcgctacgccgtagtgacgatgtgtgtcggaggaggaatgggggctgccggtttattcgaaatctattga

SEQ ID NO: 432808 - DNA, 1014 bp, Serratia marcescens
atggaaaaaagcgatgctttcaaaatattcgcaatggttggcgatcgtggctctatttctggggcggcgcgtgcactgggtgagtctaaagcaacggtaagccgggcggtatcgcgtttggagtccctctacaacgttagactcgtcgaacgtactacgcggcgcataacgcttaccgaagtgggaagtgttttacacgcacgatgcatacgcatgcgagaagaaatggaagacgctgatgccgagattgcaacctacaggagtagcccggccggtatattgcgcataggctgtaccagtgatgtcgctaaaacgctcctcactcccaacttacacgagtttctggataactatccagagatcgacgttcgcgtacgagtgggagaaagattactcccagagcccaacgttctcgatgtcgttctccattgcgggtggttatcggattctcgtttgaccgcccgaaaaatcgctgaggtaaaaaacatcctggtagcaagccaagaatacgtacaggccaacggaataccgacctctccagaggatctcgaagatcatgccatcatcggtaatttctacctcgacgcagcggcggttgagccgggccctttgcctgcttatgtgcccaagctcgaaatatctcggggccaggaacgctttacattaccgacttaccgtagatttttatcgaccgatcattcacaaatcctcgaactagtaaaacatggccgcgtcattgcgcccattaccggtatttgggcgctgccgggattactctcgggagagttagttcgcatcttgcctgattatgaaataagcgagtcgccgcaactttatgctttatatctcgatcggctggcatccatacccaagttaaaaatatttctggatttcatcgaggaaatcgttaagcgtcttataaaagactggcaaccccaggccgataagctctttccgaaacagaacctcgttcttttcccgtcgataaacttccaaaccaaaaatgacgcctga

SEQ ID NO: 432809 - DNA, 516 bp, Serratia marcescens
atgagtaagaaaattttaaatcagaagaggtttctgggagttacgaccctgaattggcttcgggccgatcttgcaagagatacgtgtttttcttattgggagggcccccatgccgatctggtctctcgcaatggattcatccgtgattataatcagcatcatttcaacgataacatggcgggttttcctgacaatatttcacgcatgcaaaatggttatttttgggtggctatggctacgccacgcaataaaagcctggatcgtctgggaacaatgccgggtttcctgcgtaagctaatttggcggcttccaaaatttatgcagcctaaagcggttcgtacggtgtgggctatggccttcaatgaaggtggcgcagtgttagccgatatgcaaggcagcgcggataacttcttcacagcgacgggtgtggtggaaacaaatgggcggctgtatatggcctctgtcgaggctggcggtatcgccgtccttgatattacgtcggtgcctaagcgatag

SEQ ID NO: 432810 - DNA, 258 bp, Serratia marcescens
atggatgaaatgcaaataattcaattggtgtccaataagtgggtatctgagtcagttttaatgaccatcacaggtctgaagaaaaacacgatcaaaacggcacgtgagcagtcatggatggaagggcgggagtataagcatctatctcccgacggataccaaaggagtaacagtatgtgtttttataatcgagaagccatcgataggtggatcgaagggttgcctgccgcaattacgagacgaaaaaagcatgtgtaa

SEQ ID NO: 432811 - DNA, 1074 bp, Serratia marcescens
atgtccacagaaagaaactatactggattgaatttagatcaggattgtatcatcccgattactaacgcattttgtgaagaacactccttaactatccgtagcttagatgacaggccaggcggttcaggtaagaggataatcattggtggcgtaggaattgaaaacgccatacttgatgtctatttcaaccaagatggtacttcaacgctacagtggaaacttggcaagaaccaagaaatcagcagatcactcgcagatgctctctacgaaaccataaatccagatgaattccagtcagttaacatgtcaatcaaaggggtcgatcgagatagcatccaagctatcatcgcccttcttcctgaagacgacaccaaaacatttagagttcaagaaagccagaatagttcaggtagcattcaatggaaaatccaatgccatgagcatggggactctctaacggtcactcatcacacaactctaaagttacagatccaagggaaaccgctatcctgctatcgaaaacttgtataccttttagctgagactcttgacttagcaggtcttgaacgggtcttaagcagaacagaagaaaacctatccataatagttagaaaggaagttgcggccgattaccttaaaaaaatgatgccaaattcttatgataacttacctctgatcactagggacttgctagtttctggccagtgtgtaaaactcgcgtcccccgcactgtctgagtactccatgctgctttttcctgagttaaggtcgctcgaaggggttcttaaatggaagctggcaagcttcggttttgactcagacgggcacgacttcggttatttctttgcctttacaaatggtgcttatgaacttaggtcatcttttcacggtcatataactgatgctacgctaagatcacacttgggtaatgcgtatacctttttccacaaacatcgccatgggctgtttcatatggagagcctcacggaggctagccggaagataggtacgatatctcagttacttacactttccgaaacagcttacaatcatcttgataacctttattcatga

SEQ ID NO: 432812 - DNA, 1332 bp, Serratia marcescens
atggcaaaacaccctgtagaacaagcacctgagctcgattacttggctaaggattttaataaaatctatccatacctcagctcttatggcatgactgataaccaagggcggtatcttcattggagccagttaaagtggcgggtgcctagtaaagatgcgcaaactatatggctggctgtaaagtttcggagggaccaagcaaaaaaaacaactggtttattcgataagaataagaacgaatttcattactgcatacacgattcgttagagccaaagctacacaaaattgttcagctaggtgctggaaaagttgctgctattgctggtactcaggcatcggataatattcaacaaaattatttagtatcatcactattgatggaggaggcgattacaagcgctcaacttgaaggggccgcaactactagagctgatgcaaaaaaaatgctcgaagaggagagggaccctataactcctgatgaaagaatgatattaaacaactaccttttactaagattggcagatagaagaaaaaatgaacctttaactagggatctaatgttggagtttcatcgtgtggcaacatcgggagggggggagaatgataacataccaggtgagtttagatgtagcgatgatatatatataggagatgatgacaatccgcttttttaccctcctgaacatgcttctcttgaggagcggttggaaaaaatttgttcgttcgcaaatgatatccatgatggcgcggatgggaaaaaattcataccaccagtaataaaggcgataactttacattttttaatgggttatgaacacgcttttcgtgatggtaatggtcggacggcaagggctgttttttattggtacatgctaaaaaatggctatgatatttttgagtatatttcaataagtaaggttatcaaggagcacgccaaagattatggtatgtcttacctttatgttcagaaagattatggtgatttaacttacttcattgactttcagttgaaaattattcttaaggcatttgatgagttgcaagaatatctaaaggttaaaacagaagagttttatgagttggtaaaaatacttgataacttcaagtataaagataagcttaattttatccaaaaggatttaataaaaaaaggggtgaaggagccaggacggttgtttaaagtaaaatccgttcaaaatatatatggcattagtgaaaatactgcaaggaaactattaagggagttagaggggatgggaatatttttacctataaaaatgggaagaactacgcattatatatctccctctgacttacggagtagactataa

SEQ ID NO: 432813 - DNA, 2553 bp, Serratia marcescens
atggcaaatcgatacttggctgactgtgaaaaattggtgatcaaggccgccggccgtgacttgtcagatgatgaactgcaggatgtgttcgggcagcttcggagaaacatcgatcgctatcaggcagagaatgcctcaatcactcttgaagaggctgctctgaaggctgctgatgaaatggtcaggggcgacaagctggccagggtgatcgaggctcgtaacaaggcgattaaccttaagatcaggactaagcttgagagctttttaaacaatagcaaagaatctcttggtgccgatcgtcctgatatagcgctatcagcactattggtttcccgcaatgaggctgcggaaggattccgcgcctcggcgtctcgcgagcaggggcagctcgaggggaagtacattgcaggatttgagcatgatttaaatcagtcagggctatccaaggctctatcctctggagagtatgaccaagagattgcggatgcactttggaaagtgggtcgtggtgagccaacagcaggcttgtcgaaagagtccatcaaactcgccgagataattaacaaatggcaagaggtggcaaggcttgatagtaaccgcgcgggatcattcattggcaagctggctggttatataacacggcaaagccatgactgggcgaaaatccgtggtgccggctatgaagcctggcgagatacaattcttccacgacttgatcagtcaactttcgatggtgtagccaatcgcgacgaatttttgcagagcgtctataacggtctggcgtctggtatccatttgagtaatcagaagtcagattggttatcaggatttaaaggaggatccaatcaggcaaagcgtgcgagccaggagcgcgttttacactttaaggatggcgttgcatggcatgagtacaacaaggcctatggtgtcggcaaccttcgcgaatctgtcatgtcagggctaaccagttccgccaggactaccggcgtaatgcgcgtgctcggcacaaaccctgaaaatatgttcagtcatttattcgaaacccaacaggcgcgactcaagaggctgaacaatcctgcggccgaggctgattttgctgggcgtcggcgcgctttggaaaatgagctttcagaaattttggggtacaacagcatacctgcaaactcagcgatagccagagctggtgcgaccattagggctgtagagggaatgaccaagcttggcggggctgtcatatcttcgtttaacgacgttggcaacgccgcgatggagctacgctaccagggtatgaatttaatggatgctatggggaagagcatcgcaggcaagctcaagggatacagcgcggcagatcagaaagaaattcttgggtacatggggatttttactgactcagtgcgcgatgagatgatagctaaattttcaggtgatacgtctgtgccaggccgcatatcacggttacagcgtaccttcttcaagctaaacctattgaactggtggacagagaacagtagaaaatctatgggtttggtaatgtcaaactggatggcacgaaactcaaaatcttcctgggcagccttgaatgaagacctacgacgggtcctaaactccagcggtatcactgagcgtgaatggaatctttatcgcggcatggaaatggatagcgtacgaggcaatcagcacatgacccccaatggcgttaaatacattcctgatgagcgtatcgctgaatatgttgccgccgatggactccaagtcaataagtccagcattgctgcggcgcgcgagtctctggaaggtaaactacgcgggtattatcttgatcgggtgctcattgccatgtcagagcctggcgccagaacccgcgcaatgatgaagcagggtacgcagccaggcactccacttggtgaagctattcgctttggaggccagttcaaatcgtttaccggctctttcatgcagaataccattgggcgagaaatatatggtcgcggctatacgccggcagaattggggcaaagtcgcttcaccagcctggccaatgctatgcgcaatggtaacggagaaaagctggggcttgcccagttgttcatttggatgacggcattgggatatgtatcgatgcaaaccaagttgttactgaaagggcagacgccacgcccagcggatgcgaaaacgttcttggctgctgctgcgcaggggggcggtctcggcattatgggcgatttcctgtttggtgagtacaatcggtttggtggtggcttggcgtcgagtttggctggccctaccgttggagaccttgaccagatccgaaacctgttcctgcgagctagagacggtgatgcaaaagcggctgacttgttgaagtttggtatcgaccatacaccattcatgaatctgcatgtagtgcgaccggcgatgaactatcttattctaaaccgtgcgcaagaatggcttagccttggatctctggagcgatatcgccagcgggtagaaaaagaacaggggaacaccttcattgttccagcgtctcagtttatgcttggaagatag

SEQ ID NO: 432814 - DNA, 1689 bp, Serratia marcescens
atgacaatttacacaactaagcctgattcatcagttaccaggccacttgcaaatttagaatcaggacttggtgaaagcctatcggctgaatttaccgagggatttagggaaggtcctctaaactcatgggctcgcgcatcgaaagccgatgcattgaacatggatcctgaatctccgcggatgacgaaagatgaagcagaggctggtttcaaaacttacggagtaaagtctatcaatgtcccaccgcaagggattagcaaggctttctatgacaatgtaatttctgaaactcgtaaccgactcgagcgagaggcaattattcagtcagccccgtctggcattgtgtcttctccgttgaagttcgttgcgaaccttggcggtaacatggttgacccgggtaaccttgcaattgggctggttccattcttcgggcaagcaagatctgcaacaatgcttggaagggctgctgagcgttttgggcagggcacggtgatgggtggggcgcaaactgcggtaacactaccatttaccgctatgggtgccgcggcggagggtgacaattacaccattggcgatgccggcggaaacttgctgatgggaatgatcgctggtggtgcacttcatgctggtggtggtttcattgcggatatggtccgtggccgccgtcagtcatcagatcctggcgctgttgacgcaggggagccagccattatccctgttgattcggctatgccagcggaagtaattccaccaccacgctccttggatatcgttccagctgagaccagtcggtcggagttaaataactctatatccaaaagcattgatgattatgcgtattcaacaggatacagcgatgttgttcctgattttatcgaacaacgccgtgctatagctggccagcagatagataacgttaatgctttgcggtccgagttgaccaggaataatcagctaacccaatctttagatgcaacattgaaagaaagaacgtcagcttaccaggctgaacgaatgaaatttaaagaggcgcaagctaaggctcgtcaggatattgctgatgaaaaagcggctctcgagtcacacaacgcagaacttcaacaacagatagataatcatgtcgaaggggcaaaggctgcgcaggatattgctgatataagtaaagggattataccggaattagccaagccgctgattgaacaacgtgcccagcagataagagagggcttgcaggaaagcccgcttgcccgtggggtcagaacagcatcacaacgatttgatgatgctgatatatcaattcgagaaaacgcaatgcgcgccgctatagcgcaggcaaaacgcggagaggacatcaatgtagatccgttctttgacctcatggatccggttaaaagaccaactgccattgagcaactttcaagacaatcccagcctcagcccgatcccgttgctgggtctgtcagtgctgcggcggagcaacaggctaaacgtgcgacacgtgaagatgccgattttataaatgcccaagaggattttgaggctgaattaaacattctcaatgcgctcgctgactctgcagacaatgcaaagctcaaagaagaacttaaaacaattcgtcaggaagctaacgataccagtctgcaaaaaggtatccaggccgctgctggctgcatgataggtaaaatgtga

SEQ ID NO: 432815 - DNA, 2697 bp, Serratia marcescens
atgccaatcgtcccaacgtatcaacgtcaatcgcaatcccagatggcgccggttaacactcaagatttgaggctcccgaaagacaatgtctttacagcgctggccgatgtaggcgcaaaagggctggatgtgtaccagcaagaaaggcaaaaggtcgatttggccgacatgcaggacaagctcaaccagttttccatgtatgccgatgatttgtataacaacccgcagaacggcctaataactctgcagggtaaaaatgccgttggacagggagaagctcgcgccgggctaatatcagataaagctgcatcgattcgtgaatctatacctgagtatatgcgtcaagccttcgatcagcagatacagccgctgggacgcagttacggaaaccgcttccggcagtatgaggttgggcaaaagcagcagtatgaagtgggtcaacagcaaggcgtactcagtaattttttgactcaagctaaagacccagcacagtttctgccagtagttctttctgctcgccaagcgataatggatttcggtgcaacccatggtcagagtcccgaagagatagaggcgaattggcaacaatggtatcaaggcgcagccaatgctgcttttagcaccgcctatacaaagatgtatcaacagaccatggggccgggtgggataattcctgtaacggatggtgcaaatagcgatcaattattctctgcgatgattcgtgccgaaagcggtggaaaccagtttgataataatggctcgccgctgatgtcatcaaaaggagctgttggcattgcacaggtaactgaagctaccgggcccgaggcagcgcagcttgctggtctgtcatgggatagggataagtggcttaatgatccgcgctacaacgcaactattgggcatgcctattttcagtcgcagatgaaacgttatggcggggattccgtgcttgctgtggctgcatataatgcaggtcatggtcaggtggataaatggatcaagcaaattggcgatccacgtacaggggagatttcttcagctgaatttgcagcaaaaataccctttgaagaaacacggaactatgtctcgaaagtggttggttccgctccaggtattccagtcaacgcctcgattactggattaatgaacactccatattggcaggccatgagtcctcagaacaaatctgcggccatggcgaaagttgctgggctatacgatcttcagaattcagcggcacgcgtcgggttacagaaccgaatgcaggatgatgtttcgcgcgttgagcttggtctcaaagttcctgagcctattacggatagagaatggattgcatcaatgccgctcagtgccacaccgcaagagcgcttgcaactacagcagtcataccagcactaccaacaaactcttgccatgcaaccggcctatcaaacgattgtgcaaggtgacgtacagcagggcatggcggcagtaaatgccatgaagccagatgttagcgacccagattttgcgtttaagcagcagcgatatgctcaagttgccagtaagtttgcgcaggtgcagaaggctagggaggatgatccaggaacgtggcttcttcagaactctccagtcatcaaagatgtctataaccaattttctcaacgccaggtcaccggtgaattctttgcatcgcaaattcaggctgagaaagagcgcctgggaatacgtagcaaagacatactccctaccgagatggtcaatagcattctgcaccagatcgataacagcaatgagcaaagcgtggcggcagttcattccattgcccagagctatggaagccaggctccggctgtaatctcgcaattacaggggaagtcggggagtgcactaagtgttgtaatgtctgttgataacgcaaatgcagctaatgcattgttccaaaacagaaagatatcaactgatgaattaaagaaggcggctggcacacaatcatcatctgttgaaagtgaatggtcagatcagtttgctgattttggcgtgtcactagcatctcaaaggggaggcttgaaggcatactcagacttcaatgagcagggcaagcggcttgcatatatttatgcatcgcgtggcatggacggggcatctgctgccaagatggcattcaaccaaattgctggagatcaatacgaatttgaaggtacttggcgtctgccaaaatcattgagcctaaatgttcgtgatattactgacggaacaaataactacctggaaaaattaaagccagaagatatagatccgcaaggttttgtgggtgacactcgcttacctgcagaagttggtagggcaatggctttgtccagaataaaaaataatgctgaatgggttaccagtgaagacgaaaaagggctttatctaactgcaggtcggacatatatcaatggggccgatggcaatcctatctttgttccattcaaggaactttctcagcttggaattgcagacagaagtttcattaatgcacggctacatgaattaaaaaaaccagctactttcactcctgcggatgggatggacaaccgcgctatcaataatgatttgtcggatgtctatcgtagcctgcgtggagaaccagcgagggagtttactggctaccaggaacagaagcctgcggaaaaccctctgggtaatgcccttcagcacaggagtggccaatga

SEQ ID NO: 432816 - DNA, 807 bp, Serratia marcescens
atgcttgactttatcaaagacatcttttccgcttttaagcaatcctccattgagagaataaagaatccatttgtaggtgcttttgttttctcctggctaggatttaactggcagattcttgcaataattttattcagtgaaaaggatgttatagaaagaattgaatatataaaaaagcactatgatgttggagacttcattttagcccccttgctaacaacggtattaatatgcgtccttttgcctttggcaaacaaggtttttacaaaataccaaagtaagccaatcagtgaaacaactgatattctcatgcaatcaaaaatagacatagcagaaaaacaactacagatagctgacatcgaagcaaaaaagaagctagcagtaaaaagagaagagagaaatatagaagaaggtatcgagtcgataaaaaaagacataaaaaatgagcttgaaaaaaacaaagaaatgacagatgaaataaatgaattatcagcatcactcaaacagtcagggatagtaaataacaatgcaaacttaaatcttcttagcgccaatgaaaagataacaagccttactgataacttgaaaaaattagaagagacaattaaggtaaaaacagaagagatagataaaatgagagcagagttagccatactaaacagcaccattgaaaatttcaaagaggctaacaaaagcatggccaaagaatacgagcatgtattcagtctacatggagacaggttgacgataaaatcctcggccctactatcacttaaagaaataaacgtagaagatatacctttctaa

SEQ ID NO: 432817 - DNA, 2787 bp, Serratia marcescens
atgcgtaacattgacctgatccgcgaagtgaccaaatcagcagccaaccgctggcctgatgtgttgccgatggtggggattgacgttcccgctagcccacgtgcgcaagtggcatgtcctgcttgtggcgggcgtgatcggtttcggttcgatgataacgggcgcggctcccatttctgcaaccaatgtggagccggtgacgggttagatctcatccagaaagtaaaccggtgcgacgccaccgaagccgctcggatggtcgctgacgtgctgggtatcgattgccgggcatcagataccggatcagaagctacccgccagaacaaggcagcaatggaggctgagcggcaacaacgtgaacaggagcgccggcaggcagaagccgcagatcatgagcgtaagcgccagcagtttaaccggcgctggcaatcactgactgtcgatgcagtggaaagcgagcctgaatatcttaaggctaaggggctgaccggcttcatcttccccacactgaaagatggccgcttgctggtggccctgactgatgaaaccggcgcagtcacggcagcacagactatcacccccgctggtgagaaacgtcaggtaacggacggcagcaagcgcggagcatcccataccctggctggtggaccagagcacccaaaagtggtgattattggtgaggggttagcaactaccctaacagctcacctgatacgtcctgacgcgctgacggtagcagcgatcgatgccgggaatctattacatgtagcggagtcgatgcaccgccggtatccagatgcgcaaatcatcattgcaggggataacgaccaccacgaaccgggcgaactggacgagcacggtaagccgaggaagaacgcgggccggatcgcagcagagaaagccgctgctgctgtcgctgggtggatatcattaccaccgacagagtacaaggctgattgggatgattatcgccaacagaacgggatagaagccgctgtactggcgtttaacaattcactgtgtcaacccaagggggagggtgtgagcgtccaactgaaagccattgagggcggtaaaaaagaccaccaagaggctgacccgctaaaacctcgcattgagagccgcaaggatggcattttctggatcacgccaaaggtagaccaggggagcggcgaggttatcaacaatgaatcgtggctgtgttcgccgctggaggtgatcggcaccggcagggacgacaaagaccaatacctgattattcgctggctaccggtgggcgaaagtacacctaccactgccgctatccctttggccgacattggcgagcgtgagggttggagaacactgaaggcgggtggggtcaacgtgaccacaaaaaccgcgctcagggcgacactggccgactggctgcagtgtggcggctcccgcgaaatctggcgtgtggcacaggctacgggttggcaatgtggggcatatatcatgccagatggggaaataataggttcacctgaaagaccggtactattcaatggccgcagtgccgcggcagccggatataccgtcaagggaacgccagagagctggcgtgattcggtggcgcgtttggctcggggaaatccgtccatgatggcgggcatcggcgcggcgttggctgccccactaattgggctggccggcgctgacgggttcggaatccacttctacgagcaatcgagtgccggtaagactacgaccgccaatattgccagcagtctgtacggtgagccagatgccttgcgcctgacgtggttcggtaccgcgctagggatagccaacgaggcggcagcgcacaatgacggcctgatgccgcttgatgaggtgggacaaggtgctgatccagatagtgtagcgaaatctgcctacacgttgtttaacggcgtcggtaagctgcaaggggccaaggagggcggcaaccgtgatttgaagcgttggcgtacagtggctctcagtaccggggaaatggacattgaaaccttcattgctaccgctgggcgcaaagtgaaggcaggacaactggtgcgcctgttaaacatcccgctggagaagtcacaacaccatcacgaaacacctaacggaaaggctcacgccgacgccctgaaagatgcctatcagcacaactatggagccgctggacgctattggattaagcacctcgctgaccaccagcaacaggccatagttgcggtgagagctgctgaggaacgatggcgctcactaatcccggcagattacggcgaacaggttcaccgggtagcggcgcggtttgctgtacttgaagctgcattacttctcggctgtgttgttactggatggaatgagcaggaatgccgtgacgcgatacaacacaatttcaacgcctggatcaaagagttcggtactggcaacaaagaacaccagcagattatcgagcagacagaatctttcctgaatgcctacggtttgagccgtttcgcaccactaccttatgacccgcaggggttgcctatacgtgatttggctggctacagagataaggggaagcatgatagtgatgccatggtgttctatacgtttcctgcagctttcgaggatgagatagcgcggggtttcaattcgaagcattttgccaaagttttggcaggagctggaatgctgacactgccagccagtggaaggggttatcagcgaaaatcaccgcgcatagatgggcggcagattaatgtgtacgtgatccatcatttgccagaaggcgaacagtcagaagagtaa

SEQ ID NO: 432818 - DNA, 357 bp, Serratia marcescens
atgaaactcatcactaaaaatccccgtctgaatgctctcgcaaaccagtatgcgattgctgtgcatcggtatgtcattcagcagaacaagggcggccagttcgattttggcatggatggggaagccctctatgttgccattatggggggagtgcctggcatccgtgacttggttgattcttaccttttggatgcattaaagctgaattgcccgcagttggatttgttagttattcaaatgattagtaaatgcctagacgatggcaacctgacaccgcgaggtttggcagtctggcagtgcataaagaaagatatgtacgcgactgtattgggcaatggggggcggcatgatgcgtaa

SEQ ID NO: 432819 - DNA, 597 bp, Serratia marcescens
atgagcaacgttatccctttccaaaaagtaaaagaagtgactgaacaaccaggggaatactatgcagaggccattcatgatggcgtgaaggtataccagaaatacagcgataacagataccacgagcaagaagtaattccgttcgctgatgtactgatacgtgctgatgatggagagtgggatgataatcgttctttggcgctacgactgctagccgagtgggggggcatcccggagaaccattccccacataatctcgtagtgctttatcgctggctggtggctgatgcttacatcgctgacttggtggccataaatggaagagaagagttccacgggcagaatggcggtatggtgacaaaccggaagattgagcgattggctatcgcgaataacattgaaggtactggtatcgagcgctacggaattgaagagagcgcaaagtttatcgttaagttctatcagcaaatgcttgaaattagtaacggcaatattgtcggtatatcggcgttcgggcgtgacacactgaatgagttacatgagggattcttgcaggcctacatcacggagggcttacctaatgaaactcatcactaa

SEQ ID NO: 432820 - DNA, 225 bp, Serratia marcescens
atgactaatacaactcattttctcaccgcagcacttattcatgacactgaatgtctgttagcaatcttacgtacgatcaacgatgtcgaagatgccgaacgccaaggattcttagtcgatgccgcagaaaatattggcagtaatcttctaagtaaattgcagtgcaatgaggctatcgaggatgccgcatcatctgattatagcgaggcgggagagacagaatga

SEQ ID NO: 432821 - DNA, 180 bp, Serratia marcescens
atgcgtaaacctatgccaaaagaacgctatcaagataagcgtggacagatcattaccatcaaatcatgcattttcaatcgtgtgatatttgtccgggctggctatcagtccgaatgcacgtatccgctcaatcgctttgaatctgaatttacctttgccggagagaaaatccatgactaa

SEQ ID NO: 432822 - DNA, 219 bp, Serratia marcescens
atgcagaatcatatcacacccttaagcgggcggaattcgctcacccagaataagttcacttggcgctttttagcgctctcccgcacagacagtagggccaagccttgccgcatttctgtagaggcatataccgagctggaagcccggcaagcgctggcccctcactttatcctgtccctggctgcccgcctgccggctcaggaggtgagccatgcgtaa

SEQ ID NO: 432823 - DNA, 810 bp, Serratia marcescens
atggaaatcgagaaaacggccaacactggtcgggggaaaacacatcctaaagaaagtcaaaaagatattaatagcaacaactttgcatctttggttccggtctctcatggtcggataggtgggcgtgaaagtaatattgtgagcgcgaaggcattacataaaacgctgggtgtaggccgtgactttaccaactggattaaaggccgtattagccaatatggatttatagccactgccgattatgtatttgttgagaatttgagcacgccaaaacgggcgagcgcaaaagccaggcaacagctcgaacatgactacctgataaccctgggtatggctaaagagttggcaatggttgaacgcaatgagcaggggcgtgccgttcgccgttacttcattcagtgcgaagaagcattacagcgcagtgcgccagaagtggccgcccggttccgtcgccagcttaaggcccgcataggtgcagccaacctgtttaagccaatgtgcgtcgcgttggatgctgcccgcgccgaacagggtaagcagacgctgcagcaccactacaacaatgaaagcaacatgcttgccaggattgtgctgggtgggctgtcggctaagcagtgggctcaggagaacggcattgacggagagccgcgtgacagtatgagcgcggagcaattggatcaccttgcctatctggaaagcaccaacataacgttgatcgagttagggcaggactacacccagcgcaaggccgaactggcacggctatcacaacgctggatggctaaacgcttgggggcagaccatgcataa

SEQ ID NO: 432824 - DNA, 906 bp, Serratia marcescens
ttgaataactgggattcgatggttttagagaaatgttgttccattattgataacatacgtgaatctggtggactgtggctagccggttatcatcagtctagagggttgagtttttcttctaagacagaatcaccacataaggctatagatctcatcaaggaatatagtcattttgacgaatatatttgtgcagttgagtcgtgtattgatgaacgttatcctattgataacctgtctctatgcaataaagtgtggagtgatatcattcagaataagaggatatccaaaagtttttcaaactcaaatataaagcctttgtcgacaatagacccaaaaagatacgctaaatataagattatttcaaaattaatggcaagagccaagaataataaaaatgaagatgaatataagtattggtattcgatatttgattttagcgatgaagaacatgataacttttgccatcaatacttactttttcagcaaagattaatgcggattatatgggggtatgtatcaggaaatcttaaagatgcttatgtaaatggtagcgaagccctggaattatataaatctgccatgagtgagttgttcaaggtcagaaatcatcatgtctttaaatttttacatttggactactttgatagtgataccttgatgctacaggaaaatatcaagaacatagataatatgaagaggtacattgttacaacaagaaatgatgataccttgcaggaaagagcgttagctgttgagttattaaagttgtttagggactttggtaatgaaagggtggtatcgggagtctataactttatgcgcgcggagttcatagaaaatgacattgataggaaaaccattcagcgttgttttgatgccctacctagtaagtttgtggcaaagtga

SEQ ID NO: 432825 - DNA, 213 bp, Serratia marcescens
atgcagttaaccctcggtcggcacagttttaccctgagcggcaacgacgccttgtttgtggccgaagccatcttgttgcagcgcaagcacccggatatcgtcttgcctgaacatcgcagtgaaaaacacggtgtgatttgcctgacgaaccggcaggcagagttgcgtcgtatctgtgctgacgaagtggttgatcacaatgcgatcgattga

SEQ ID NO: 432826 - DNA, 810 bp, Serratia marcescens
atgaaatacataatcaacaaaaccgttgtttttgattcaaatgaactgacactttacctgtatgaaaatacgcagatagtggccaggctgactaaacctgccacgcgcttacttctgacactaatacaaaacagtggagtaaacgttaaccgagatacgttattggaaaatgtatggattacctatggatttacagcatccaacgcgggattaaataattacatcagtgaattacgcaaggcattttcatcgttaggttacaatcatgaattgatcataaccattccaaaactgggcttcagatttgaatctgagattgatattctggatccggctgtcatttcatcaaaatcagaaccagcagaagagggaaaggtatcagtaattagtgaagatgcagcgctgaaaacggtcccggtaaagtcgggcggtcgcaaaagaacatcactccctcatcgcaaagtgtatttcgttttgacaggaattactttagttatcctatttgcattttttttcaaaaatatcaccaatgatagccatgcctatcataaaatagcaaaaattgataactgcaacgtttatattataggccaggcgtttcagaaaaatgatgttctctctaaagtaaatgccgtgttaaagagggaggaggtggattgcacaaaccttcagagtgatgttttctaccttgaggataggataggtaaacacaccgtccgtgccgatctaatttctgtttgtagcaagtcagataacgaccgttacaatacttgcttcaacatcaaaagccagagaaacacatcaaaatga

SEQ ID NO: 432827 - DNA, 2547 bp, Serratia marcescens
atgtcaactactccgtcatatggctgtatagggaaaatacgaccgcgaatcttggggctgttgatcgcctttattctggcggggaatgctgcctgcgccgcagctgctgatattgaattcaataccgacgtactggatgtgacggatcgcgccaatattgacctggaacagttttctcgcggcaactttattatgcccggcgattatttgtttgccgtgcatatcaataaacagacattaaccgatcagccggtggcgtattacccgccggacgacgatgccaaaggcagtgaagcctgtattacgccgcagttggttgaacaactggggttaaaagaatctgcattactgaaattgacctggtggcaccaaaaccagtgtctggatccccgcagcctggaggggatggaagtgcgcggcgatctaggcgcggcggcgctgtacctgaatattccgcaggcgtatctggaatataccgcagaaaactgggacccgccttcgcgctgggacgaggggatccccggggtgctgtttgattacaacctgaatgcgcaaagccagcgccagcaaaagcagggcacacagagctataacctcagtggcaacggcacgctgggcggcaacctgggggcctggcggctgcgggcagactggcaatcgcggctggatcaccagggcggctcgggcgagccgacccgcaccagctgggactggagccgttactacgcctaccgcgcactgccgaagctgggcgccaggctgacgatgggcgaggactatttaaactccgacatcttcgacagcgtgcgttttgccggcgcgagtctggtgaccgacgacaacatgctgccgcccaacctgcgtggctatgcgccggaggtgacggggatagcgcgcagcaacgccaaggtgattattcgccagcaagggcgcgtgttgtacgagacccaggtggcggcggggccgttccgcattcaggacatcaacgacgcggtcagtggccagctggacgtgcgggtggaagagcaggacggcagcgtgcaggagttcaagatggacaccgccagcatcccgtacctgacccggcccggctcggtgcgttacaaagtggcggccggtcggccggcggactgggagcaccacagcgacgggccgatgttcggcaccggcgagttttcctggggcgtgagcaacggctggtcgctgtacggcggcggcgtggcgggcggcgattacaacgcgctggcgctgggcgtggggcgtgacctgatgatgttcggtgcactgtctttcgacgccacccagtcgcgcgccaacctgccgcaacagggcacgctgagcggcggctcgtaccgcctgagctattccaagcgctttgacgactacgacagccaggtgacctttgccggctaccgcttctcggagcgcaactatatgtcgatgggcgaatacctggatgcacgccgcgacggtacgcgaaccaacagcagcaaggagatgtacaccatcacctttaaccagcagttccgcgatctggggttgagtgcctatctcaactacaaccaccagacctactgggaccgaccggcgaatgaccgttacaacctgacgctgtcgcgctatttcgatctggggcgattccggaatatcagcctgtcgctgaccggctatcgcaacaaatataacggcaccaacgacgacggcatgtacctgtcgctgtcgctgccgtggggcagcgatggctcgctgagctacagcggcagttacaaccgcaacgataacacccatcaggtggggtattacgaccggctcaatgagcgtgacacctaccaggtgagcgccggtactgcgcgcagcggcgcgaccgccagcggctactacagccacagcggcgatctcagccaggtgaacgccagcgccagctaccaggccgggcagtacagctcgctggggctgtcgatgcagggcggcgcgaccgccaccctgaaaggggcggcgctgcaccgcagcagcatgagcggtggcacccgcatgttgctggacaccgacggcgtgccggggatcccgatccgcggttacagctcaccgaccctgaccaacgccttcggcaaagcggtggtggtggacgtcggcagttactaccgcaaccagttcagtatcgatctgaacacgttgcctgaaaacgccgaagtcagccagagcgtggcgcaagccaccctgaccgaaggcgccatcggctaccggcacttcgaggtgatcgccggcgagaaggcgatggcggtcgtgcggctggcggacgggtctgccccgccgtttggtgccacggtgcgcaacggcaagcggcaggaggtgggcatcgtcaatgacaacggtgaagtgtacctgagcggcatcaacgccggggaagccatgagcgtgagctggggcggcgcggagcagtgcggttttaccctgccgcagacgctgtcgccgagccaactgaccaatctgttactgccttgcggcccggtggccaacggcaaggcgttaaacactgttaaagagtag

SEQ ID NO: 432828 - DNA, 750 bp, Serratia marcescens
atgaaaaccaaccatgtagtgacattcatcgccggcggcctggtgggcctgctgtgcgcccaacaggcaacggccgccatcgcgctggaccgcacccgggtgatcttcagcggcggcgacaagtcggtgagcatgagcatcagcaacgagaacaagcagctgccttacctggcgcagggctggatcgaagacgccaacggcaaaaaaattaccagcccattgacggtattgccgccggtgcaacgcctggaaccgggtgccaaaagccaggtgaaagtgcaggggttgccggccgccaatacgctgccacaggaccgcgaaacgctgttctacttcaacctgcgcgagatcccgccgaagagcgacaagccgaatacgctgcaactggcgctgcaaacccgcatcaagctgttctaccggccgaaggcgattgcggttaccaacccggaggccagcgcgccgtggcaggaaaaactgaccctgaccaaacagggcgacagctaccaggtgaataacccgacgccgtattacgtgacgctggtggacgccagcagcaaaaaaggcggtgccagcgcgccgggcttcgaaccgctgatggtggcgcccaagggcagtgcgccactgaaagtcgccgcctctgcactgggcaacgcgccggtgctgacctacgtcaacgactacggcggccgcccgcaactgagctttaactgtaacggtgcgagctgccaggcggtggcgggcagcaagtaa

SEQ ID NO: 432829 - DNA, 657 bp, Serratia marcescens
atgcgaacaaaatcccggcgatggaacggcggcggttaccaccgccatgaatggttgtatgccctggtaattatgactgcggtgatgatggtgccggtatgcctgtgcgtgatgctctggttgatgccgtcagccctggcggcggacaacgggcaggtggaaggtgcccacggcgtgctgcatgtgcgcggcgaactgaccgaaagcgcctgccggctggagatggcgagcgcgtatcaggcggtgcaactgggcaatacggctactgcgcaactggcgaaggtgggcgatcgcggtgtaccggtcaacgttcaactgcacctgcgtgattgcctacgtggcccgaccgccaaccgggatcagcatacggggaacctgctgtggagcgcccatcagccggcggtgtcggtgagttttatcgccccggcggatgctgacaacccggaactggtgaaggtgcacggcgcttccgggctggcattgcgtatgaccgacgagcgcggcagggatatccgcctcggcagccggggcgcgccgttggtgctggcgctggggcaaaacgcgctgaactaccgcatcacaccagagcgcacccgtgcgccattgctgcccggtgcctatgcggcggtggtggatttccagctcagctatgactaa

SEQ ID NO: 432830 - DNA, 498 bp, Serratia marcescens
atgaaagcaaggttaaaacggtgtttgcccggctgtgggttggcggcgttggtgttgttatacggcccgcaggcacaggcagtgacgacgataaaagtgacggtgaccatagtcgcgccgccgccgtgcgtgattaacaacaataacctgatcgaagtgagtttcggcaacgacgtcatgaccacccgcatcgacggcagctacaagaaacagccggtagtgtattcggtggagtgtaaaaacgcaccgaacaatgcaatgaaactgcaaattcaggggaccggtgccggctttgacggcgaggtgctgaaaaccaacaaggacgatctgggggttgcgctgctgcgcaatggcaatcggcagccgatcaacacctgggtgaattttacctaccccaatctgccaaagtttgaggcggtgccggtcaagcaggccggggcgacgttgagcggaggggccttctccgccggggcgaccatgaaggtggaataccagtga

SEQ ID NO: 432831 - DNA, 477 bp, Serratia marcescens
atggcgcgatatggcagtatttttctgttaatggccctcggcggcccggccgtggcggcggaaaatatgaaattttccggcaccctgatcgaaccgccgccgtgcaccatcaacgacggtggcgaggtagatgtcgatttcggcaaccgtgtcggggtgaccaaagtggacggcactaactacctgcaaccggtgaactaccgggttacctgcgggcccggtgccggggcatggaatatgacgctggaagtggtcggtaccccggcggattacgacgaggcggcagttgagagcaacgtggatgacctggctatccgcctgctgcaaaacggcaagcgctttacgttgaataatccgatccccatcaagttgaacgcgccgccaacgcttgcggcggtgccggtcaaacgaccgggggccgccctgaaggaaggcgcttttgaggccacggctaccctgctggcggtgtatcaatga

SEQ ID NO: 432832 - DNA, 528 bp, Serratia marcescens
atggttaacaaggtggcctggtgcgcaactgcggcgctgctgctatgcagccaatggagcctggcggcggagaatatgcgccttcatggcgcgctggtagcggagccctgcgtgatcccgccgggcgatgaaacggtggtgctggattttgacacggtgatcgacaagtacctgtacctgaatacccgcacccccggccagccgttcacgctgcatctggcgcagtgcgatctcagcctgggtaaaacggtccgggtgaccttcagcggcacggaaagtgccgcgctaccggggttgctggcactgaacggtgccagccaggcgagtggcatcgccatcggcatggaaaccccgcagggcgagccgttgcccattaatcagcaaggcaaggcgcagacactggtgagcggtgccaacaccctgacggcgcaggcctacgtgcagggtgaaccggacgcgctgaagcataaaaccatcgaacgcgggccgttcagcgcggtggcgacctttagcctggagtatgaataa

SEQ ID NO: 432833 - DNA, 978 bp, Serratia marcescens
atgaataaccgcgcggcggcatggcaagccgcctggcgctggctgtgccaacgtcgccgtcatgcgccgcccaatgcggacatctggcatttgcgctttcactgggcgcagcagggtgaacgcctgtatcagcaattacaggatgggcgttatcgcctggcgccgatgcaggtgttgcggcggggtggccgcagttgggtgcagtggtgtgcgcaggatgcgctgatattgaagtgggccgcgctgctggcggagccgctgttgccaaaacctgctcgttgcatgcatttgcgcgggcatggcggtagcgtggtttcggtagcggaagtacgggcagccctggccggcggagaatatgcctttgtctaccgaacggacattcgcggttattaccggcacatccgcaaacagcaggtgatcaatcaactgaaatggcatgtggccgacccggtgttgttcgatgtgattcagcaatacgtgcactacagcgtagaagacggtggagagttttataccccgccaagcggcatctgccggggttgcgcgctgagtccgctgattggcggcagcttgttgcaccacgtagataattattttaatgcgcaggagggcctgtggtatgcacgatatatggatgactttttattgtttacccgcacccgctggcaactgcgccgcagcgttaagcggctgcatgaattttttgacctgggcgggtttgaaacccacccggacaaaacccaactgggcaggattgcacaggggtttgactggctgggggtatggtttacccccacgggggccaccatagcgcccagagcgctggaaaaccatcgtgcacgacgcgcgcggctttacgagcaaactcgcaggcagaagctgtcatcgacagagactgagttgcgagtgcggacgtacgaggcacggtggagaatatgggcagagcgtatgctgaaccaacccgcagggaaaggttga

SEQ ID NO: 432834 - DNA, 846 bp, Serratia marcescens
atggcattcacactcgacaaactcactggtcgtcccaacaacgcttccaaatttgcaatagcgcttatcatgtgcggtgcgccatactccctggcgtacggatacgacttgaacaccgaaatattcggcactggcgatttccccgtatccgtgacatggcccaaacgcgtgacagactatctctttgtgtcggacgtagtcctcggtcaacccgggcgttgcatggaatgcggcgcaaccttctccttacatgcacgtcactctatgggcgacgcatacgatctatggaggctctatgacagcggggggggtggatgtatacccgtcacaggacctggtactctccagtcggccatgcaaaggctgtggactacccatgtcatgggtcgagcagtgccgtatcggggacgtggttttggtgatcttgaccgtgggcgcagcatctcgtggagcgttcctatatgcaaggcaagctcaacggggaaatggcgtggtgtattgcactacagtaccagactatctgacgaggggacccggtcgtgtgcggtctccgcgccttatgtggtcgaattaggcaatacaactgttaacgtgtcaaagaccgtggaccttgatgttgtgtgcctcggcgatggcgactgggatgtgcgggtgtccgtggctggtcccacaacggtgtccccgaccgacggattgacattgtggaccgaaccgcctcgaggtcccatccgggttgagggtgatggtcgtcattatacggttcaggccaaatttggggcaaccgtgacatcccctcgcgctgggccgtactccacatcgtttacttacacaatcgaatacgattga

SEQ ID NO: 432835 - DNA, 687 bp, Serratia marcescens
atgccccccgatagtcaccagataatttttggtacacggtgtttagtcgctgaggggccggggttcccggtgaatacgatgcaggagttcacagatggcatccgggtgcccgcttacgtagggtgcgacgatattgatcacgtccaactccgaatatgccgggtggttcccccgatcactcgtccgtcacattcaccacacttgaaccagaaacggtgccagcatctagaccgtctattccttcagttttcacacgcagggcgatcggctgtcggcctgcagcttggaagtgtaacgacagaggatccccaaacccggtttccccaatctaaaaccgccacagacgtgttatccccgtttaagggtatccgttccgcggttccgctttcgacacggacgtcggcagccgcgtcgcaccgcacagaaacgcccggcacagggtgggcaggagcattctcgccgacaccgacgtgcaacgaaacgttaatttgtcccggttcgatcacgcacgtttttgcctgcacaagacccctggcgcagttagacacaatactaccctctatcatccacgggtcccccgcggacaacaccacgcaaggagttgctggttgccaatctgcgggcagcatatctcggccaatacggttcttatttgttgccgaggaccaccactcctcgatcgtttga

SEQ ID NO: 432836 - DNA, 393 bp, Serratia marcescens
gtggagagtaataccgctctggatctgggtaacggtacctattttagtattaaggaccaggaaaggaaaatcgccttcgaaacgccggtcaagttttgggataacgtgcaaagcggcagtcagcagaccgtcacttatcaaaccgaacttcgcgcgagggaggtattaaagatgggcgtggcggctaaaagcatcgtgctgtacgccaattatcgttatgttttacgcttagccgatattttcataatctcaatggcgttattgatatacccgtcatacttcaagttgcatgtgcgttggctgcgtctgctcaccccagtcactgacttgagtaagctaaaggggattctcagacttgttgccttcctgcaactcgaattgttttgggtatag

SEQ ID NO: 432837 - DNA, 957 bp, Serratia marcescens
atgatgaaaatagggaatagggttattgctcatttggggttgtgcggcgtgttattggccggcggccggggtgctctggcgatggaatgccatcttgatagtgagaatggcattactgaagaaagcgaaaatatcggtgctttgaccgtacccgtagatctgccgttaggtagccgcttatggacgtcaaaaattatgacgcgcagcgtagtttgttgggctgagggcagtaccgagggcgagtgggtttatttctatggcaacccggtgggggatgtggtgcgccccggcattggtatggggctgatttataacgatgcggatctcggtatcgtcaaggcaggcagcaaggtgcaaaccgatatgtggcgcttgaacaacaaaccggaaaaggggcaggtcaaatatcaaatttatttggagaaaaccggcgaaataaaagagggaggcaatgatagggtagctgtgttccaactggatggcgtaggaggcattaacggtgggcaggggacaaactatcgctatatcttgcaagggatggcgggaatcaaggtctcgagctgttcggttacaatcaatgtgccgcgtgaaattgattttggcgttatctcatcgtttacggcatcgggattgatcgccaccaaacccttgagcgtgacggcggttaaaaaccaggcgtgcgatgccgatagcaaattagctgttgcgctaatcttctcttcgcccggcggcgggttggtggagagtaataccgctctggatctgggtaacggtacctattttagtattaaggaccaggaaaggaaaatcgccttcgaaacgccggtcaagttttgggataacgtgcaaagcggcagtcagcagaccgtcacttatcaaaccgaacttcgcgcgagggaggtattaaagatgggcgtggcggctaaaagcatcgtgctgtacgccaattatcgttaa

SEQ ID NO: 432838 - DNA, 171 bp, Serratia marcescens
atgttaagacatcaatgggtggcacaaaaagcgcacgaaatggcattgcactatgttgttcatgctggagtggtgtattcaccggctgtgtttatacaaaaagtgcgcgaaatggagggggtatttagccgtattttactcgcggaacaggagggtaaaattaagtcttag

SEQ ID NO: 432839 - DNA, 549 bp, Serratia marcescens
atgaaaacaataaatattgttatagatgatgagaatcgttatttcgcggcggggctggagcaaagcatcggtgagtatgcgctaacccatcagaagaccgtgaattttttaaggccggatgccgaaatacaagcggatatggtgatcgtttcctctcgccggcgtgctcagcgttggcggagaagtagcgttacccgtgcgatgacgccggttgtgactatcaaggaaagaacgataacgccgttgcgggaagcgccacaggtgctgtatcgaactgacagtcagcatcgtttgtttgagctgctgactgaaacgctgaatggcaccggcgcagcctgtttgcgtgagcgccacgcgctgacgcttcgagagcggcaagtgatgagctatttacggcgtgggttcgatcaatcgcaaaccgcccgggtgctgggcgtaagcgtaaaaacggtgcatagccacaagcgctcggtgatgagtaaaatgatgctgagacggtctcacgactttatttattggctgatttctcatgagggagaatattcctaa

SEQ ID NO: 432840 - DNA, 825 bp, Serratia marcescens
ttgttaaaattttttttaatcgccattttatgggttatttctgccggttcttatgcaacgataactcttgagtggacgttgtcagactcgggcgccttgtcatatatagtgacagcggcagagccgaggccgttagaccccgacggcattttaaagtgcggcacttttttacagtcaccgcagtgttatgtcaggtcgcgtattggttttccaggtgatacggtttcaaaggattatattcaaattaaaggggatcagaggttcagcacggtagtttccacctgggtagcgtcgggccccaagggctatatcggtaattggtcctatcttgtggagaaaaacggcggcgtcgcgccctgcatcgtattcgatttgaactccgattcaagggggggagtcggcgctgtgggaacctttgggcatacctgtacaggcacggccactccaccgccaataaagccaccgccgccaccgctgtcctgctatctgatgaacaatattgttttacagcatggcaccttggcggcagatgaggtgaccggccatcgggcccagacgacggcccgcgtttattgtaccggcgccgccagagtgaggctgaaggtattatcctaccagggcggagaagattataacgtgaagttgcgttcagacggcatcctggtttccttattaagtatcaatggaacctctggctcagcattgttggacgttccggccattgggggaaaagaagtgacgttttcatcgttattgcttgcctatgccccgttatcgtcaggaagtttttcgggctcggcggtggcggtagttgaagttatttaa

SEQ ID NO: 432841 - DNA, 528 bp, Serratia marcescens
atgaaacaacggatcgtgatgggattagcgctggcgctgtgttgcctgccgccgttggccggcgcggcggataatctgcgatttagcggcgcactggtggcggaaccctgtgtgatcccaccgggacaggagacgatagcgctggatttcggcaacgtggtggataaatacctgtacctgaatcagcgaacgccgggcgtgccgtttgccattaccctggcggactgcgatctcagcttgggtaaaacggttaccgtgaccctgagcggcaaggagagcgccgctttgccggggctgctggcgccggcggcgggcagccaggccgctggcatcgctatcgggctggagagtgcggcgggcgaagcgttgccggtgaatcgccccggcggcaaagtgcgcttgtcttcaggcagcaacaatattcggctgcaggcgtatgtgcagggagaacccgacgctattgccaaaaaggcactggtacgcggcgtatttaacgcagtggcgacgtttagtttggagtacgagtga

SEQ ID NO: 432842 - DNA, 483 bp, Serratia marcescens
atgaaacaggcggctatcgttctgctgttggcctttggccaacagagtctggcggcggaggatactgcgatgcgttttcgcggcacgctgcgcgcaccaccgccttgcaccatcaatgacggcggcacggtggcggtggattttggtcagcgggtgggggtcagtaaagttgatggcgtcaactatcggcagcaggtggattatcttatcagctgcgattcgccgggggtgcggccgtgggaaatgatgctgtccttgaaggggacggccaccgcctttgatcgggcggcggtacaaaccgataaaaccgatctcggcattcgtctttatcagaatgatacgccctttgtgctcaacaccagcttcaagattgatcccggcaacccgccgcgcctggaggctgtgccggtcgccaaaccgggggccgttctgaaagaaggggcgtttgtggcgacggcgacgctgcaggtcgattaccagtga

SEQ ID NO: 432843 - DNA, 447 bp, Serratia marcescens
atgggatgcatcacgctgccggtgacggcggcgacgactgtgaccgtgagcgtaaccgtgttggcgccattgccttgcgtgatcaacggcggcaaaccgatcgaggtggattttggcaatgaagtattgaccacgcgaatcgacggcagcaattacctcacgccaataaattactccctgagctgcacggggcaggcgagaaacagcatgaagctgcagatagcgggcaatggcgcagggtttaacgggcagctgttgcaaaccagcgtgaacggtttggggattgcgctgctgcgcggtgattcccgtatcccattgaacagctggcaaaactttacgtacccgaatgtgccggagttgaaagcggtgccgataaaacaggccggcgttcagctaccgaccggtgagttcacggcatccgccaccatgcgcgcggattaccaatga

SEQ ID NO: 432844 - DNA, 657 bp, Serratia marcescens
atggcaaggaaagagacagggctgcgtgattggagctatgcacacagcgaattgcgttactacattgccttgagcggtctggcgctgatggcgccgttgagtctggcggcgatgctatggctgctacctgcctcacaggcggcggataactgggacgtggagggcgccaacggcgtgctgtatatcgaaggggcgctgaccgaaagcgcctgccggttggagatggacagcgcgcgccaggatattcgcctgggggacgtgtcgaccgggcggctggcgcaggtgggcgatcgcggcgtgccggtggcatttgaactgcggctgcgtgattgcctgcgtagtccggcggtcagccgggatgaacgtactggcgcgctaagctgggcgcatgaccaaccggcggtgcgggtggccttccacgccccggctgacgccgataacccgcagttggtgaaggcgcagggcgtctccggtctgggcctgaggttattggatgcccagggccgggacgttcggttgggtagccgtggtatgccgctgtggctgacgccaggcagcgacgtgctgaactacagcgtagcgccggaacgcactgtggcaccgctgcgcgccggcagctatcgcgccatggtggattttagtttgagttatgactga

SEQ ID NO: 432845 - DNA, 2538 bp, Serratia marcescens
atgtttttgcctgctggtaagccgtttcgtttgcatattttgagcgcttgtgtggccttagtgcttggcagcctaatggctgatgccggtgcggtggaagaaatccagttcaacaccgacgtgttggacgtaaacgatcgcaaaaacatcgatctcagccagttctctcgcggtggctacatcatgccgggtcgttacagcatgctggtgcatctaaataagagcgatctgccggagcagcaggtgccgttttatgccccggacgacgatccgaacggcagtcgcgcttgtttgtcgccggacctggtggcgcagttaggtttaaaggccggtttgacgaagcaactgacctggtggcaccagaatcaatgtctggacgaagccagcctgaaggggatggaagtgcgtggcgatctggctacgtcggctttgtatctcagcattccacaagcttacttggagtacagttctgaggattgggatccgccgtcgcgctgggatgaggggattccgggactgttgcttgattacaatcttaatgctcagacgcaacaccaattgcaggctggctcacgtggttacagcgtgagtggcaacggcacggcgggcgttaatctgggtgcctggcgattacgtaccgattggcaggggagcctcaaccatcaaacgggctctggtatgccgacggacaaacgtttggactggagccgctactacgcctaccgggcgctgccggcgctgcgctcaaaattgacgttaggcgaggactatctggactccgggctgtttgacagcttccgtttcggcggcatgagcctgcgttccgacgacaacatgctgccgcccaacctgcgcggctatgcaccggaagtggtgggggtggcgaagagcaacgccaaggtgaccatcagccagcagggccgagtgttgtacgacacccaggtcgcggccggcccattccgcattcaggacatcaacgacgcggtgtccggcgagctggatgtgaaggtggaagagcaggacggcagcgtgcaggcgttcaagatgaacaccgccagcattccttatctgacgcgacccggctcggtgcgctataagctggcgatgggcaagccgtcggatatggatcaccgctaccacggccccatgttcggcaccggcgaattttcctggggggtgagcaatggctggtctctgtacggcggcgcgctgctgggcggcgactataacgcgctggcgctgggcatcggccgtgacctgatgttactgggggcgctgtcgttcgatgtgacccagtcgcgcgccaaattgccgcaggagaatgaggcgttgagcggcggttcgtatcgcctcagctactcgaagagtttcgacgagctggatagtcaggtgacctttgccggctaccgcttctcggaacagaactttatgagcatgggcgagtttctggatgcgcgtgaatacgggcggcgcttcggcaacagcaaagagatgtataccatcagctataaccagcagttgcgggatctggggctgagtgcatacctcaactataaccaccaaacctactgggatcggccggccaacgatcgctacaacctgacgatggcgcgctatttcgatatcggccgttttaaaagcctgagcctgtcgctgtcggcctatcgcaaccgttacaacgatgtgaatgacgacggcatgtatgtctcgctgtcggtgccttggggcgggagtggcagcctgagctacaacgcgacgctgaaccgcaacgacataaccaaccgtgcgggctactacgaccggatcgatgaacgcagcaactaccagatcagcgtcggcaatgcgcgtagcgggatgaatatgagcggttattacaaccgcgacggcgatatggcacgcgtgagcgccaacgccagctatcagcaggatcgctaccgcgcaatgggcttttccgcgcagggcggcatgacgctgacggtggaaggcggggcattgcaccgcataggcatgccgggtggcacccggttgctgctggataccgaaggggtggccggggtgccggtgcgcggctacggcagtgccgtggcgaccaaccgctggggcaaggcggtggtggcggacgtcaacagttactaccgcaacaaggccagtatcgatctgaacgcgctgagtgataacgccgaagccaccaaatcggtggtgcaggcgacgctgaccgagggggctattggttaccgcaagtttgcggtgatcgccggggagaaggcgatggcggtaatcaaactggcggacggtagcgaaccgccgttcggcgccacggtgctgaacgcacgcgagcaggagaccggcatcgtcaacgacggcggcagcgtctacctgagcggcatcaacgccggcgagcgcatgacggtgcgctggggcggcacggcgcagtgcgaggtgcagatgccgacgccgctgccgcaggagatgctgacgaccaatttactgctgccgtgccgggcgctaagtgcgggcgacggcggcaacgaacactga

SEQ ID NO: 432846 - DNA, 543 bp, Serratia marcescens
atggaatttttgggtaaaggaatgaaggcggcttgcctattgccgttactggttttctttacgggggatgctatttctgctgtgcagggacaggggcgcgtcaatatgcaaggggccattattgatacagcttgtgctatagcaacggagagccgtgagcaaacaattgatatggaggtcattccggtatcggatattgctcgagatgggaaaggaagatatgtgcctttcagcatagaattaattaactgtattctaacgcgctcagataaaaagctgcctgattggcgtcaatttcaagtgacgttcgacggtaatgtggatggtgacatgtttggcattcatggcgatgcctcaggtgtcgcactcgtgattacggatatgtttgggaatgttgccataccgggtaaacctttaccgttggcagatattctgctggggaaccagatgctgaattacggcataacgttgatggccaataaaaaaacattaaagccgggaagctatttttcatcagtgagattcaaaatggattattactga

SEQ ID NO: 432847 - DNA, 549 bp, Serratia marcescens
atgaaactgaataaaattatgctggccgccgcaatggctttgggtgtttcttctctggcacacgccgccgatcagggccacggtaaagtgaccttcagcggttctattattgatgcaccatgctcgatcgctcctgagtccatcgatcagaccgttgagctgggcgcgatctctaacgtagcgctgaaaaacggcggaaaatctaccccgcgtaacttccaaatcaaactggaaaactgtgatttgattgtggatgagaaagatccttcgaaaaataacaacaccgtcgctctgaccttcaccggtgctacctctgcagcagatgcaaacctgctgggcattaccggcacagctaaaggcgcgggtattgccatcactgacggttccggtgctgatattaaactgggcaagccgactaaagcacaaacactgcagaatggtgccaacaccctgagcttcgccgcttatttgcagggtagcaccgtcgctgatgctgttgtgcctggtgagttccagtccgttgccgactttaccttggcttaccagtaa

SEQ ID NO: 432848 - DNA, 753 bp, Serratia marcescens
atgatttttatcatcaacaaaagtgtcctctataatgaggaggaaggtacgttggcgcatatagacaatgccaacaataaagtagccttacttaaaccagccggacgtttgctctcattattcatcaggaataatggcacactgctgctgcgggaaaagttgattaatgatgtctgggtcgaccatgggcttaaggcatcgaataacaacttaaataattatgtatctggattacgtaaatcactagcgcagtgcggaatagaagaaattattgtgacctatccccgccaggggtttaaattttgcgccataaatattgataaatctgacaaattagatggaagtgataacgacctgaaatatgatagtgaggaaaaaacggcaatcgcggaaccaaaaattgaacccaccaatctccgccgtttgcttcagcgtctggtgatgattgccgccgcttgtctggtgccttttgcacttgttattttgtatcaaaatagcacacgcattagcgtttatccgttgggaaactatgagcaatgtcagatctacagcatgaagttggagagtggcgatttgaggagaattaaaaacatcattcatcaggcaggttttaactgcaagaccagggcggatgtatactattacgataacattcgtagtgcagactcacaaagcgctgaagaacagctcacgttctgcccacgcgaaattagtgctccttgtattaacagctatattaataataacaactaa

SEQ ID NO: 432849 - DNA, 828 bp, Serratia marcescens
atgggcgttaaccagtttatcgcgcagggaattatgagatatataattaataataatattaaatatcatgaagatagatcggagctgatctcgctgcatgacgacattccgccggttgtgctgacggccacgctgaaccgcctgctttccgccctggtgcgcaacaataacctggtgctttcccgcgaaacgctgctgacgcaggtatgggaggcgcacggccaggtcgcttccggcaacaacctcaacaacaccatttctattttgcgcaaagcgttctcctcgctcggcgaggaagagatcatcgtcaccctgccgcgacaggggtttatgtttacggcagctgaactgcatacgatggatagccaggcggaaagtttactggtgccggatttgcagccagcagccaaaccggctgcagtggctaccgttacgcaaaccagacgttttaaatttactgcagttgtgctggcgctattggcgttaggcagcggtataggggcgtggtgggatgcagggtatccagcggtgagtgtggctaaggtgggtaagattggcaattgtgacgtgcagtttattacttctttccacaggatcgggcctgttgaggtggatctgacacatttgcagaacatgttggaacaaaaaaaacatactaagtgtaatgaaaacggtgttcctgcgacgctcttttattacgacagcaaaatgctaacgccgaatagccctgggcgagtcaggagttactatttttattattgcccgcagagccgaatggcatcgggtaaggttcaatgtgaaaacttccatgaaaacattgtgttataa

SEQ ID NO: 432850 - DNA, 288 bp, Serratia marcescens
atggacactatccattttcgtattgatgaagaaactaaacggcttgccatgcaggcggcaaaacggcagcaaaccgacttaaccaaacttatgcgacagaaagctgaggagttggccgaagaagagcgtgattatcagaaaaacacacatgctttctggctggagtcagaaattgacaaagctattgcacgtagtgaaaacaggcagaatacctttatcagccatgacgaaagttgccagcgcattgcaacattacgcctgaagctctcaggagagtcaggtgaataa

SEQ ID NO: 432851 - DNA, 948 bp, Serratia marcescens
atggcgagcaaggtggtggcgcgcatgagcggtcacgattggcggcgtaatgatgacctgatcgatctgcgccggcaggggtatatcccctatactcaacgtaataacccggactaccgtcccaaaccgatgcgcgttgccgcgcggtcggagagccgtgaagcgctgacggtgctttccctggtgctcggtgcaaactgcgactacaacccggacagcgactacccatttgagatcatgctgccgtttgaagacgtggccaaagcaatgggagtactgcacgtctacgaaagcggccgcaaggcgtatgacgtggcgctgcatgcgctgtcggtgcttgagcagctggactacctcatcgtgtcgcgcggacaggataccgacactggtcagaacaagccactgcgcatctggctgacggagaacttcttcaccagccgcggcatccaggtggatgaaattcgccagtggctgaaccagtaccggctgtgggcgattaaaaacggcctgaccgaaacgctcaggcaaaaatacgagcgccacctggtgcgcattgcgcatctggggatcgacatcgagcgcaagcactcgctgaaaaaccggctgaaaaagatccggcggtgggtggtgagtcctgacctgcagaacctcaagcgcaacgcggagcaggtgattggcaacgaactggccaggcggcagcagagcgagcagcgactggatacgctgctggatgacaccgctgccggcatcaaaaagctggccaccgcccggcgccagaagcagaacggcttttatcaggcctgggtgcagtggacgatgggcagctcgccgctgaaggcgatgcagctggagaatacgctcaaacgtgaacagcccggactgctgaacagtgatccagaggcattctaccggctgctgctggagcgggccggcgccattccaacctaa

SEQ ID NO: 432852 - DNA, 786 bp, Serratia marcescens
atgttcgatccgcacagcggaaaactgcagcaggtacgcgaggtggtgcgcttcaccccgctgcagcaggacgtactgaaatttttggcgctggtgctgatggtgttcgaccacgccaaccgggcgctggggctgcatgagccggtgttgttgctgctggggcggggggcatttccactgtttgcgttgctgtggggctacaaccttgcggctcggcctgtcctgcaggcacaggcgactcgactctggctgtgggccgttgttgctcagccggggtataccttggttatgcaacatgacgggcgtgatttctttgatccgaatattcttttcttgttcgccgtggtaacgcaagcgcttgtgctggcatcacgaccaatgagcaaaggttcacctaacccgttgttagtcggcgtcgttctgttggctttgtggagtgtttatggtgctacagatggtacttacggtaccgccggcgttttggtgttgttggccagttatgggctgtgcgtttctcttccggggtatgtaacgactgtttggccggtacggggcctgtccatcatctcctggccacttagcgtgttgatgctcaacgctgatctacctgtctcgctgatgctggccggccttgtgttaccggcactgttgattatgggggcgtttccactggctgttcctggtgtccagggcaatcaccggcgcctattgccgcgaggatttttcttatacggctatgtaggtcacttgttgatgctggcgttgctcgcctggttggttcgttaa

SEQ ID NO: 432853 - DNA, 555 bp, Serratia marcescens
atgaataaggcaccgcgactccccgcccgcgtgtttggcgttgccgccctggtgctcagcggctggctgccggcatcgctcctgttggcggcaccggcggtacaggtggggttttcgccggaagggtcggcgcagcagctggtactgagcgttatcggtgaggcgcagcgcgatattcgcctgatggggtacgcctttacctcgccggaggtggcgcgggcgctgattgcggcgcaccggcgcggcgtgaccgtcggggtggtggtcgatgcgaaggccaaccagaacggcgccggccgggcggcattgaacctgctggccaacgccggcgtgaacgtcaggacggtcaacagctataaaattttgcacgacaaggtgatcgttgtggatggcgtgacgaccgaaacgggaagcttcaatttcagtcgggctgcacaccgcgccaactcggaaaatgtggtggtgctgcgcgacatgccggaggtggccaaacagtacctggcgcactggcaatcccgctgggcgcagggccaggactggcagtcaacttactaa

SEQ ID NO: 432854 - DNA, 219 bp, Serratia marcescens
atgaatacaacccaaaatgtttcaacgacgcagggcatcttgttaatcactgcggtcttgctgtccggggctgcgacggtctggggatatgtgcagtgggacacgctgagcgacctgccgctgtattggcgcaatgcgcttgtcccgttgccgctgctggtcttcatgggcctgaaacacctgcaggcgcggctgtacagggcggacgatcatgaataa

SEQ ID NO: 432855 - DNA, 5277 bp, Serratia marcescens
atgatgagcattggccaggtcggccctgccagtaaagccggcgactactacacccatcaggacaactactacgtgctgggcagcatggacgaacgttgggtgggccagggcgcggaagccctgggcctgacgggcaaggtggacgtcaaagatttcgtggccgtgctggaaggcaagttgccggacggcagtgacctgacccgcatggtcggcaacgagaacaagcaccgccccggctatgatctgacgttttcggcgcccaagagcatctccgttctggctatgctgggcggcgataaacgccttatcgccgcgcataaccacgctgtagaggtcgcggtgcgggaggtggagaagctggcctcgacgcgggtgatggagggcggcgtctccgagaccaaactgaccggtaacctggtggtggcgctctttaaccacgatacgtcgcgcgacctggacccgcagttgcacacccatgcggtggtggccaacgtcacgcagcatgacggcaagtggcagaccctgtcctccgatacggtcggcaagaccgggtttatcgagagcgtctatgccaatcaggtggccttcggccaaatataccgccatatcatgcggcaggaagttgaagcgatggggtacaagaccaagacggtcgggccgcacggtatgtgggaggccgacaatatggactcagtaattgatgtgttctccaagcgcagccatgccatcgacgccgccgccggccctgatgcgtcactcaagtcgcgagatatggcgacgctcgatacccgcaaggccaaggtgaccagcgacccgacggaacttgctgttgtcttgatgcaggaaatgaaggccaccggttttgatattcaggcttacatggccgaggcgcagtcaagttctctggtgacgccgtccccaacgccgctggaagcggggggcgacgcgcttgtcgaccaggcggtgggacaagccattacggcgctgtctgaccggcaggtcaacttcacgcacaaccaggtggccaacaaggccatcagctacctctccggtgagccgggcatgctggacgcggtgcgtgacggcatcgaccgcgccatcgagcgcgagcagcttattccgctcgacaaggagaagggcgtctttacctccgatattcatctgctcgatgagctgagcgtggcgcagctgagccgcacgcaccttgacgagagcgcggtggtgatcggcgcgccaaagtctgacccgcgcaccggcagcataccaacctacagcgatgccgtgcagcagctggcgcaacatgcgctggcggtgttgtcgggcattgggggcgcatcggtgaaccgttcccgtgtggcggaagtggtggaattggctcgtgagcagggccgcgacgccaccgtgctgaccgttgataggcagtcacagcagtatctgcagcaaagcgtccatctcgatgaaggccgcgtggtgacgcgcgccgcgctcggcagcgaggcgctgtttgcgccgaacagcacgctggtcgttgatcaggcggagaaactgacgctcaaggagaccgtggcgctgctggatggcgcggtacgtaacaacgtgcagctggtgttgatggataccgaaaagcgcaagggaacgggcaatgccctcaccgtcatgaaggaggccggtgtaccccgctatcagttcagtggccgtcaggcggtgccggcagaggtggtgagcgagccggacaaggcgcagcgtttcggcgaactggccaaaggcgtggtgcaggcatttgttgaagataggcaggcggttgcgcaggtgaacggtccggccgaccagcggatattgacggccatgatacgtgacgagctgaaaaataccgggctgctgggacgcgaagagaccaccgttgcgacgctgacaccggtatggctggacagcaaaaatcggggcgccatcgatacctaccgggaaggcatggtgatggaacgctgggatgcggagagccggcagcgcgagcggttcgttatcgaccgggtcggcacgcaaacgcgtaacctggtgttgcgtaacgccgagggtgaaaatcacacgcttgctgtcaaagaggtggacaagggctggtcgttgttccgggtcggcacgatggctgttgccgacggtgaacgcctgcgggtgttaggtcaggaaggacggggcaaagatgcgctgaaggccggcacggcgctgacggttgttcgtgccggcgccggcgggctgcaggtgcgcgtggccggcgagccggatgcgacacagaagccggcggaccgagcgcttgcggtcggtagcgacgtcttcagcgccgtcaaggtggcgccggcgtatgtggaaagcctcggcgcatcggtgagcagtacggcggtggtctatgccgcggtgaagaaaaacgagcttaacagcgccacgctgagtggcatcgcccgcagcggcggacacatcaccctgtattcagcgctcgatgcgcgcaaaacacaggaaaaagtcgctcagcatccggcgtaccgtctggcaggcgagcaggtcaaacaactggccggcatcgattcgcttgatgccgcgatcgccgggcaaaaatcatcactgtttaccccggcacagcaggccattcatttggccattccgacgctggaaggggatagcgtcgcgtttggccaggccaaactgctcgccggcagtctcgattttgcggccgaaggtgtgtcgatagattctattcaaaaggaaatcgatgcgcaggttaaacgcggagagctgctgaaagtcgaggtcgcgcacggcgttggggcggatttgctggtctcgcgtgccagcttcgaggcagagaaaagcatcatccggctgatcgccgacggcaaagacagtatgccggcgctgatgagtgaatcggcgagaaatcaactggcatcaagtcaaagttcgctcacgcaggggcagaaagagagtgttgacctcattctcggtacgactgaccggtttgtggccatccagggctattccggtgtggggaaaaccacccagttcaaggcggtgctcgccggtatagagcagttgcctgaaagcgagcggccgcgcgtcgtggggctggcgccaacgcaccgtgcggtgggggaaatgcaggcggccggcgtcgatgcccaaacgctggcgtcgttcctgcacgatgaggggctgaaggtcgccggcggcgagaaaccggactaccgcaacacgctgtttgtggtggatgagagttcgatggtgggcaacagcgacatggcgcgcacctacgcgttgattgccgagggcaacggccgcgcggtgatgagcggtgacgaggctcagctggaggcgattgcgccgggcgcgccattccggctggcgcaggggcgcagcgccatcgatatggcggtcatgaaagagattgtgcgccagacccccgagctgaagccggcggtgtacaagatgattgataacgatgtgcccggcgcgctggacgtggtgcgcgccgtggcgccggccaacgtgccccgacaagccgatgcctgggtgccggcgcagtcggtcgttgaatatcccgccaaggggccggataacattcatgccgcgattgtcagcgattatctggggcgcaccgaggcagcccggcgagatacgctgatcatcacccaccttaatgccgaccggcacatcatcaatgccggtattcaccaggaacgtaaagcggcgggcgagctgaagggggcgtccgtcaatctgcccatccttgagaccgccaatatccgtgacggcgagctgcgcaagctggacacctgggcgcgtcaccgggacgccgtcgtcctgctggataacacctactaccggatggccgacatcgacagtcagtcccgtaccgtcagcctgcaggacaacgagggcaatacccggcagttttccccggccagtgcggtgcgcgaaggcgtcacgttgtacaacccgcgcaccatcgaggtaagcgtgggcgaccgcatgcgcttctccaaatcggacgtcgagcgcgggcatgtggccaacagcacctggacggtcgaggtgataaaaggtgacgtggtcacgctctccgatggacaacagacccgtaccgtcaatccccgcgagcagcaacaagaccggcacgtcgatttggcctatgccatcaccgcccacggtgcccagggggccagcgaacgttttgccatcacgctcgagggtgtggaaggcgggcgtgagccgctggtcaaccgggcgtcggcctatgtggcgctgtcgcgcgccaaggagcatgtgcaggtgtacaccgataacgaagccgggtggctgaaagccatcggcaaggcgaaggaacgcaccacggcccatgatgcggtgatggggatgacgccgggcagccagaaagcggccgccgacctctacggcaaggcggtctctttatccgacaacgccctggggcgcgcggtgctgcgcgatagccaacttaccggcgacacgctggcgcactatgtgtcgccgggcaaaaaatacccgcagccccacgccatgctgccgatgtatgacgccaacggcaaagccgccggcgcctggctggcgccactggcggacacccaggggaaaagcgtcggcggactgccgacgcagggtcgggttttgggcagtgacagcgcgcaatttgtggcgctgcaggggagtcgcaacaacgaaacccgtctggccgggacgatgcaggacggtatccggctggcggcgcgctatcccgacagtggcgtggtggtgcggctgcagggggacgaagtgccgttcaatccccaggcgatgaccggcggcagggtgtgggtgaatgacgagacgctcaaggccactgcccgagagagcggcgcgtccgacagtgccatcacattgccggagagcccggaagaacgtctgcagcgtgaactgcaggcgcaggccgacaaactgggccgtgaaccgaacgctcctgatccgcagcggctggccgggcttaatgacgaacagctgcgtgcactgcttgcgcgcggcgaactgcgcgccgaagacgtgaaagaccgtctgccggaggcggtcatgcaggaggtgatgggccaggatgctgccttgctgcgcgatgccgctgtccgccaggtggcgcgcgagccggtatcgacccgcagtcggctgcagcaggacgaacagaatctggtgcgcgatacccatccagagcgagagctgaacaaagaaaaaaccctgggcggcgactga

SEQ ID NO: 432856 - DNA, 228 bp, Serratia marcescens
atggaaactaccgtatttctcagcaaccgtagccaggccgttcgtctgcccaaagcggtggcactgcctgacgacgtcaagcgtgtggaggtcatcgccgttggtcgtacccgcatcatcacgcccgccggcgagggctgggacagctggttcgatggtgaggatgtcagcgccgatttcatgacgtcacgcaaccaaccagcaatgcaagagcgggaggcgttctga

SEQ ID NO: 432857 - DNA, 399 bp, Serratia marcescens
atgttgaagtacctgctggacaccaacacgtgcatcttcactatcaagaataaacccgcgcacgtcagggagcgcttcagcctgaatacgtctcgcctgtgcatcagttcggtcacgttgatggagctgatttacggtgcagaaaagagccaggcaccggagcgcaacctggctgtgctcgaagggttcatcgcgcgcctcgacgttctgaactacgatgccgccgccgcggcgcacagcggccaaattcgggccgaattgagtcgacaaggcctcccaattggcccattcgatttgatgattgccggtcacgcccgcagccaggggctgattgtggtcaccaacaacacgcgggaatttgcgcgtgttgacgggttgcgtatcgaagactggtgttaa

SEQ ID NO: 432858 - DNA, 681 bp, Serratia marcescens
atggaatttcggactattactcgggctgctgaggctgccgcacattattttgatgacagtaaagatggtgtactgaacttattgggtgtccgccgccgggtttggattaatcgcaagattgattggctgggtttaaatctgggcgagagtgctgatgaaaaaaaactcatcaatatactcgagggtgaatttacctctgaggatgtaggggccggtgaggatattaaacaaggaaagtacatccttggctacgagctgacattcaccgcacctaagagcgtgtcaatcatggcattagttgggaatgactttcgcttgttcgacgcgcacaacaatgcgattgatagcgttttagatgaaatggccaaattgatggcgcttttggttaagccgccggttgaccattcgattcagcgaaagttttctatcattggtgctgtgattaaccatgacacctcaccagagttggatcctgatttacacactcacattgtgatacccaatataggctttcttgacaacgaaccggtatttttatcaacagatcgtcttgattttcttaatgatgtacaccccttgctgcccgttttatctgaaatgtatttcactgtgctgaaaaatagcgtggagttgatggggtatcgcacgaaagacattaacgaagaccaggggggccaatga

SEQ ID NO: 432859 - DNA, 2199 bp, Serratia marcescens
atgagctttaacgccaaggacatgacgcagggcgggcagatcgcctttatgcgcctgcgcatgttcacgcagatcggcaacctgattttctactgcctgtttatcgccttcttcctggtggcgatttgcacgctgttgtggcgcgtgtccatccagaacctcacgaacggcctgatttattggtgggtctggatggtggaaggctggccgagcatatcgccgtcagagaccctctaccatctggattattacggcaagacgttgacctacaccgccaaacaggtgctgctcgacagttacgtctcctactgcggtcagctgatttggcgtgaagggatctttgcctgcatcgtggcggcggccgcgtgtgtgacgggttttgtggtcaccgtgtggatacttggccgtcagggcaagcagcagagcgaggatgaaataaccggcgggcgaacactcaccgataaccctgcggtggtggccaacatgctcaaacgcgatggtatggcgtccgatatcattattgatggcctgccgctgctaaaaaacagcgaggtcaaaaacttctgcgccatgggcagcgtcggtacggggaagtcacggctgtatcgcaaggtgatggactacgcccgcaaacgcggtgacatggttattgtctacgacaagtcctgtgattttgtcaaagactactacgatccgcagcacgataaaatcctcaacccgcaggatgcacgctgcgtcggctgggatttatggtcggaatgtctgacactgccggattttgagaacgtcgccgatatccttatccccatgggcagcaacgaagatccgttctggcaggggtcggcccgcaccatctttgtggaagcggcctaccgcatgcgcaatgacgaagatcgcagctacgccaagttgctcaatacgctgttgtccatcgatctgccgcggctgcgtgcttatctggagggcacgccggcggccaacctggtggacggcaaaatcgagaagaccgccatctccattcgcagcgtgctgaccaactatgccaaggcactgcgttacatgcagggcgtagagaaactgggggcaccgttcaccatccgtgactggatgcgcggcgtgaaggacaacggcaaaaacggctggttgttcctgacctccgattcagccagccacaaggcgctcaaaccgctgatctccatgtggctctctatcgcctcacacagcttgttatcaatgggcgagaacccggaccgccgcgtctggatttttgccgatgaattacccaccctgcacaaactgcctgatctggtgtccatcgtgccggaagcgcgcaagttcggcggatgctttgtgttgggattccagacctactctcagcttgaagatatttatggcgtcaaggcggcggccaccctgttcggggtgctgcgtacccgtttcctcttcagcgtaccggatcgcgtgggtgccgagttcgccgccggcgaggtgggtgaaaaagagtatcgcaaggcctctgagcagttttcctacggggccgaccccgtcagggacggggtgtccgtcggtaaggatttggagcgtatgcaactggtgagctacagcgacatccagacgctgcctgatttgtgctgctatgtgacgctgccggggccgtacccggccgtcaggctgcagatggtatacaaaaaagtcaggcaggtcgcgcacccctatgagcctcgcaagatggatgccgctgccgatgggcggcttgtatcggcgatcgaaatgcgggaagccgaaaccggcaatatggatgccttgttcgctgctacccctatcctgccggtagtcagtgcgagcgaaaccgctgatgcccctgtctctgtcgtgagtacggtgccgacagagaaccctgccagtgatgtgcctgtcgtgtcagctgctgccaccgtgacaggggggcaggaggcggaactgatacagaaaactgcgcccggtgatgttgatgccgaacggggggatatgccccccggtatcagcggcgacggcgaagtggtggacatcgcacaatatgaggcctggcaggcgcagcagcagtcgatggggcagcaagccatgcagcgccgggaagaaaccaacatcaatatcgacaggcatcggcgcgaactgtctgaagttcatcgtggggacagcgaaccaggagatgaattctga

SEQ ID NO: 432860 - DNA, 210 bp, Serratia marcescens
gtggctaagatctctgccaaaacgcataccaccaccctgcgactcgatgacggtacgtttgggcgcctgcagcgtatggtggctgagaaccccctctacagcccctcacatgtgatgcgcggtgccctgctggccctcagtcgattaaccgacagtgaacgtgaagcctgcattctggccgtagcaaagggaggtgttgatgagctttaa

SEQ ID NO: 432861 - DNA, 534 bp, Serratia marcescens
atgatggttacgcataaaatagttcaacaagaagctacagagttaaaaaatattcttaattcggggggtgttcaaattcctgatttttggagttgtgcatggccttgtttggcgctcattttatggcttgtctgcattcctctggttgcctttggagttaccactggcatatcagatgatgaggcattttcttcaatttttgatgccttttttggatttttgctatcaatgatgctttttagtatgagaagtttttatttgtcgatacctgcatcttttcgcaatacttccaaagtgctgggtttgttagttaagaaagcgcgtacatatatattggttgcggccattttaaatttgctctgtatggttttcgctatccgcgctaacctaggaactcttgggtatcatgtgcctaatatatttatattatgcattattggttttgtcttctctgccgatatcggacgttatcgcctgtctgcatttaccgccgctctggagcttattaaatcccgcaaacagggaggtgagtaa

SEQ ID NO: 432862 - DNA, 2832 bp, Serratia marcescens
atgacggaaatctatgttaccgccggctcggagtggctggcgcaaaacctaaacgcggtcgcggccttcatgcagaccgatacctgggactggatacggaattttgcggtggctgtaagcgtgttggtattggccgcgcggtataccgcccgccgcgacctgatggatatcctgggctgggtgtttgtgctggtgttctcctcggcattgctgaccaaagcgcagccggtgcaaatcatcgatctgtccaatcagcgttcgattcagcgagtggccaatgtgccgctgggcattgtgctgccggcgaccatcattacccgcatcagttacgccatggtgctggcttacgaaatggtgttcggtcagccggatgcggtgacctacagcaagaccggcatgctgttcggctcctcactggtgtcccgaagtaccgacttcaccgcccagaacccggagctggccaacctgtttgccgactatgtacagaactgtgtggtgggcgacatgctgctcaatcacaagtacagctttgaggagctgatgcattccgaagatccgtatgcgctgatcttccgccagccgagtccgcttcgcggtgtgttcaacaaggacggccgtttccagacctgtgaagaagctgcgatgccgctgaagaacatgctgggcctggaagcgaaaaccggcagtccgacttacaactattatgcgcggcgcattcttggcggtcgtccagaccgcgatctgctgttcgggcagctgctggggaacagctaccagtatttttaccagaaccagaagacggccagcgacatcatcaagcagaacattgtcatgaacggtctgcgcagcggcatcatgagctactcggcgcgcagcggtgacacggcgggcatgctcaacatcgccagcacgtcgtccatcgagaagcagcgactgtcccaggcgacgctcgggcaggtgatgatgcgctccttaccgatgctgcaggtcattctgatcggcatgatgatggggatgttccccatcctagtgttgatcggtatggtgaaccagggcaaggaagtggccaaagcctacgtgttcggctggctgtgggtgatgagctggccgctgttgtacgccattcttaacagcgctatggcgttctacggccagaaggccggttcgcccgtggtgctgagcaacctgtccacggtgaagctgaactactccgatctggccaataccgccggctatatctccggcatgatcccgtttatctcctggtatatcgccaaagggctggggcaggggctgatgagcgtcagccacagcatgaccggtgcctaccagagttcggctgcgtcggcggcgatgagcgtgtcggatgccaactacagcttcaacaacatgcaaaccgacaacgtgcagggtaacacctgggataccaacagcagcgtacgtgccggccagatgaccgcgcaactgccgaccggcggcacgcagacccgcacgggcgatggcagcagcgtctgggatgcgagcggcgcgatgtccaaactgccggtggatatcggtgtgacgaagcagattgcgaccgcgcagcaggaaatggcgcgggaagccgagacccaggcgcagacatccatgcagggcttcaacagcaatatcagcagcgcctggacgcaactgtcgcagtttaccggtcagcgtggcagcagcgacagcatgacccgcggtgccgatacggcgcaaaacagccagtccagcatcgcggcgcacaaaatggcgagcgcggtggaaagttatgccaaggccaacaatgtcagtaatgaacaggcaacccaggagctggctgcaagagccactgataaatcagcgggatttgatgcaagagttggcgttcgtggttctgcggggctaagagtgttgggaactggggcgacgttagaaggatatggtggaggcaacgccggaattaaatggtctgattctgaatctcattctgcgaggagtggaacgcgggcgagtgatgatgcccgtcacgaccagagcgcccaggctgcggccgactttaaggaagggatggactacctgaccagccagcgcaccagccagtccggcagtcatacggataacaatgcggactcgcgcattgatcagctttcttcgtccttgtcgggcgccaagagcagctacgaacaatacagcagtgcacatacccgcagccaggagctgtcacagcaggcttcgcgtaccgagagtctcagtggcgatatgcgcgagaacctgagccagcagtttgcgcagtacgtgatggacaaggcgccaaacgatgccggcaacattctgaccggtcagtcgcaggacgccgttgccgcgcgtcagtcgcttgcacgtgattttgtgcgtgaacaggtggcgccgcaggtggattcgcaatatcagtccagcagcagttcgcttggcgcagggatggggtctgttggtggcggaggcgccggccaggatattcaggctgattataacaatcaccagagcgcggttgaaaaaagaacagtgcaggccggcatacgcaatgatgtgggaactcaggttaatggtatggttgataataaccaaacagcccaacaaaaaactcagacagatattcatagccaacagcaaaatgttgaagggcagagaaacgaactgcagcaaaatcattcatcagaacaaaccgcacaaaataaaaattataatcttgaaaaagagaagcaggaaagtatatctggagccagtagtaaagatgaaatgatggagcaagcaaaggccatgcaagataaattcaataaagagcggggtggtaaatga

SEQ ID NO: 432863 - DNA, 1368 bp, Serratia marcescens
atgactttacgcactcggtttgggggcatcgcgctggggctgcttttgacggcgccggctgtcgccgacatgaacagcgatatgaaccagttttttgacaagctggggtttgcgtccaacaccacggcaccggcggtttggcaggggcaggcggccgggtatatctcgggcggatcgatttacgcccgcaccggcgtcaaacaaatccagctgatttcgatgtcgttgccggatattaatgccggctgcggcggcatcgatgcgtacctgggggcattcagctttatcaacggcgagcagctgcagcgcttcaccaaacagatcatgtccaacgctgcaggctacttcttcgatctggctttgcagaccacggtgccggagctgaaagacgccaaagacttcatccagaaaatggccagcgacatcaacagcatgaacatgagcagctgtcaggcggcgcagggcattgtcggcgggctgttcccgcgcacgcaggtctctcagcagaaggtctgccaggacattgccggcgaatccaacatcttcgcagactgggctgcctcgcggcagggctgcacggtgggtggcaaaggggactcggtgcgtgaccgggcaggagagaaggataaggagcgtatctcaaagaatattaacatcatgtgggatgcgttatccaaaaaccggatgttcgacggcaacaaggagctgaaggagttcgtgatgacgctgaccggctcgctggtgttcggccccaacggcgaaatcacgccgctaccgccacgcactaccgatcagagcatcatcaaggcactgatggaagggggcgccgcacgcgtttatcactgcaacgacagcgataagtgcctgaaggtggtggccgacagcaccacgacgataagtccggacaatgcgctgaaagggcaaatcaaaaaaatgctgttcagcatcgagagcaaggcccgcagcgacgaacggctgacggatgcggaaaagggactgatttccagcacgcatgtgccgttgctgacttacctgaccgacccgcagatgctcggcgtgtccaacgcgatggtgcaccaactggccgactacgtggggtacgacatcctgatgcagtacttgcaggagttgatgggcggcgcgcgcgccatgctggcgaccgggaactacccggaggccaccgttgagcaaatcaacaacaacttcacgcaggccgggcagcttatcgcctccctgcaatcgcgcgttcaggtgcagaccgatgccctgctggttgtcgagcagcagatgcgttacatgcgtcagcaggtgtcggcacgcctgctgacgcgttaccagaacaactatcagttcggggaggcgcaataa

SEQ ID NO: 432864 - DNA, 537 bp, Serratia marcescens
atgcggatcgttaacatcgcctggctggcgctgctgttaaccgggctggcacatggctccacgattgatgagatagcggcgctgcagaaaaacgccggcgtcaatcgggcgcaatcagcgacgtccgtccccgctccgcggccggctgcagcgccacgctggtttacgctcagcaacggcgcgcgcgtcaacctcaatgactggaaggtggtgttgtttatgcaggggcactgtccgtactgccatcagtttgatccgctgttgaaatcgctgtcggagcgggtcggcttttccgtgttcgcctacaccttcgacggccagggtgatgccacgtttccggaggccatcccggcgccgccggaggtaatgcgtaccttcttccccggcttgccggtggcgtcgccgacaacgtttttggtgaacgtcaatacgctggcgacttacccgatgatccagggggccagtgatgagcgcggctttatggcgcggctggataccgtgttacaggaagcgctgatgaggagaggtcaacaatga

SEQ ID NO: 432865 - DNA, 315 bp, Serratia marcescens
atgcgtaaatttaaattccctgacatcgacgcgaccggcggttgggtcgcggccttcgggatctggttccatattgtggccggcctggtgcaccgggcgccggacatggcggtgacgctggccgagtttatcgcgctcaccctgacggtgtgcggcggctacaaaatcctcgatgagctggcgcgcgtccccaaacggcagcgtgaggaggcggaaaagcaggcctatatcgcggcacatcgtgaacaggcgccgtcgccggcgagcacagacgaacagcacggggccggggaggtgcagaatgcggatcgttaa

SEQ ID NO: 432866 - DNA, 795 bp, Serratia marcescens
gtgaaaacgcgcgggacttcaaatgtcaatttggcggcacgtgggttggccaaccgcagggcggcagcgctgttgggcatgagcctgctgggcgcggcgttcaccgcgcaggccggcggctggcagtggtatgaatgggaggccaaacctgctgacgacgatatgccaccgccggctgcagcccctgtcgcaccggccggggcactgcaaaagctgcagttgctgcagcagtcgctcaaggagcggctggcagacgccatcctgtaccccagcacggagaactttgtgaagtttttccagatgcagaactactttacccagcaggcggggctgtttgagcgctctgcgcagcgggcgtttttagcgcacccggagctggattacaacctgaagcacagccactacaacggcacggtgaaaagccagctggccgccgactttgccgcgcagcgcgaggccatcggccaaatggcgcagcagtacgggctgatgctgttctatcgcggcgcggagccgatcgacggtcagctggtgagcgtggtgaagggctttcgggacagctacgggctgtcggtggtgccggtgaccgtggacggggtggtcaaccctgcgatgccggagagccggcgcgatgtggggcagtcacagcggctgggcatcagccacttcccggcactggtgctggttgacccgcgcagcggcgcggtcaagccgctggcctatggctttatcagccaggacgatctggccaaacagttcctgaacgtctttaccgacttcaaacccaattattaa

SEQ ID NO: 432867 - DNA, 1905 bp, Serratia marcescens
atgacccacctggtgaagtctctgcccggactgctggcaacacatgccctggtgctggggacgtttatcttcgccaccggcgattgccgggcggaaggggatgacgtgttccagaccggcagcgagtttgccaaacaggttgcgggtcaaggcagcgatacgctgcagaacaccaacccggccaatgtgctgccgaactacaccgacaacccaaaagaaaaaggctattacggcggcgtgacggccggggatgccaataacctcaaaaccgatggcggttcggcctggagccagaccgaggtcgggcaggcggtgaccgattcggtgctcaagaaccccaaggagccgatttcgcacgatgcgccctttatccaggccgggaaggagattgagggtaaggccgagagcatcgtcggcaagaccggcccggactgcaaggccgagcaggtgacgcgcagtgagttcacccgccatgtgtgcgagcgcgatacggcggtaatgcgtacctgcgagcgtgccactgaaattgggggccactatgagacccgctatgaagaccgtagcgcgcacatcgataaatcgatgatccgttggtggaaagagggcaaccgcattcacggcaccttcaccgcaccgtttaccggcaagctcactacggggtcgatatacctcgagctgcaggatgatctgcacagctatggcgtgccgctggccttttcactgcttgggaatgaggtgcgctatggccgtcaggattggggcagtcggccgttgaacgtcggtaacgtcacgctcacgcaaggccagcaggttgatattttcatcacgatggaccccggtggccacctggatacctttctggatgcgatggtcaggcagctgagtggcggcgggggcggctcgccgatggtgttctacgtgaagttcgacggcagctcgtcggtgcaggtctgggtaccgaccacgtcgacgccggccgactgtccactggcgcaggaggccggggcggtgaaggtcaataccgtctgcagtgagccaggcggcgagcgaacagttacggtcaacggccagacctacccggtgtgggccagctgctggcgctttaccgacacctatcggctgcaggaggccggccagggcagctgcgaagcctatgccaacaatccggcctgcactatcgctacacacggctgtgccttctccgatgagtatggccagtgcctgcacgagaacgtgacctactcctgcgaaacccgcaccaccgggaatgtgatgttgtgcggcggccagatgtactgcctcgacggggagtgcgacaaggcacagaagggcacccaggggaacgattttgcgcacgccgtttccgagttggccgcggtggcggccgccggcaaggacgtggcggcgctgaacggtatcgatgtgcgcgccttcaccggtaagggacagtcctgccgcaaggcgtttgccggtttcagcgactgctgcaaggactccgggtggggtaacagcgtcgggctggcgcactgcgacagcgaagagaaggcactgggcaaggcgaaagagagcaaattgaccgtcagcgtcggcgaatactgcagcaagaaagtgctgggtgtctgcctgcagaagaagcgcagctactgccagtttgacagcaagctcgcgcagattgttcagcagcaggggcgcgcgtggcagctgggtatcggctttggcgacgcaaaatcccccgactgccggggcattaccgtagacgagctgcagcgcatcaacttcgaccagctggactttgccaatttctatgaagacctgatgaagaaccagaaggtgcccgaagacgcggcactgctggagaaggttaagcagcaaattgcggagcgcatgaaggaggcagccaagtga

SEQ ID NO: 432868 - DNA, 675 bp, Serratia marcescens
atgacgacatacagcaaggtgatagggctgctgacagtgctcctgacgggggcaaccgtaccgatgatcgctgtcgggcaaacggcggcagatcctgttgctaccgcacagcaacaggcggccgtccaggtggacagcaaccgggcatggctgcgcgagcaagaaaaacgttcggccgatctgcaccaaaacacttcggtgccggagtttttacgtaatcagccgccacgttcgctggcgcaggacgaccagtcctttatcgaccagctggcagcgaagcagcgtcaggatgccgccgagcaaccggccgagggggcgctgtacttcgtctccttcgctattcccgaagaggggatgcgtcgcatgctgcaggaagcgcgtcgcttcggcatcccagctacgttgcgcggcatggtgaatggcgacatgcgcgaaacggtgcagcgggtgcaaaaactggtggaagccggcggcatcgacggcgtgcaaatcgatccgcagccctacacacagtacggcattaccgccgtgccggcgttggtcgtgcgctgcgcggccggctttgatgtggtgcgcggcaacctgctgatggcgcaggcgctgaagaaggtcgccaaagacggcgactgcgcggctacggctcaggctctgctggacaaggagagcggaaaatga

SEQ ID NO: 432869 - DNA, 999 bp, Serratia marcescens
atgatccggtgctggctctcggcgttactggttgtggcaggcctgttttcggcaccgtctcaggcggcggatgcggcctgccaggggcgctttgtcaacccgatcaccgatatctgctggcgctgcatcttcccgctctcgatcgggagcattccggtcgggaaaggggatttgccggataccagcaacccgggcagccctatccagttctgccccatgccgcccccgatttttcagcgtatcgggatggcgatggggtactgggagccgatggccatgactgacgtgacccgttcgccgggctgcatggtcaatctggggggcttcagtatcaacctcggcaagattggcaccggcaccggcggcagcagtggcaagggggacgtgaccaccgcgttctatcacgtccattggtacaagtacccgttgacctactggctgaacatcatcacctccgcgggctgcctgcagggtggggatatggacatcgcctacttgtcggaaatcgatccgacctgggtggacagcagcctgaccaccattctcaacccggaagccgtggtctttgccaatccgctggcgcagggcgcctgcgcggccgacgccattgccagcggcttccatctgccgatcgacgcattgttctggtgcgccggcagtcagggttcgatgtacccgttcaacggctgggtggccaaggaaatcagcccgctgcagtcgtccgtgctggtctcggagaagatggcgttcaagctgcatcgccaggggcaaatcatggagtccatcggcaaagaccgggcggtctgcttcgagtatccgtcgccgatcatgccgaaagaacggtggcgttatcagatggtgaacatgtacccggacagcgcccgctgtcatccgatggggcgcagcgtgatgcgctgggaggtgggccacaactcgccggccagcaagaagaacttcggctacgtcatgtggcgcaagcgcaactgcgtctttttataa

SEQ ID NO: 432870 - DNA, 378 bp, Serratia marcescens
atgtttgtgacacgtaaacgttttattgcgaccgagaatcagctgcagagctgtcgccaattgctggccgcgcgccacggcgagttgatggccatccgccaggcagcgtcggcaaagggggggatctacaaatgcattcttgagtgccgtgaggtagctcatgaactgcgtgagcagctgcctgccgatcaggacggtcacagcctttatttgttcgacaagctggcgcttatcgacagtttgctgagcaccctggcagcgttattaccgccgcaggatgaggctcgacccaccgcccggatcgttactgccggtgatgtgcaagagatttaccggggaacgcagtgggcgacacattgccaggagcgtcgcgcatga

SEQ ID NO: 432871 - DNA, 654 bp, Serratia marcescens
gtggctaagcctttacgtaaaagcctgttgatagcggtgctcggactttcacagcttacgagcatggcgacggccaaagacttcggcacctggggcgacctgtatccggtggccgagccggacatgctgcagaccattcacgaacggctgaccgaattgcagcgcagcggccgttgggacgaggaaatgacggcgttcaaagagcgcaccgtgaagcacagccagcggcctgagccggtcgccggcatcggcaagaccgaacgctatgccgaacgcttcttcgacccgagcgtggagctctcttctgacctgaaagacgacaaggggcgagtctttgcccgcaagggcgacgttatcaacccgctggccaccgtgccgttcgcgcagacgctgtatttcatcgacggcgacgatccgcagcaggttgcctggatgaaggcgcagcagccggagaccctgatggtgaaggtcattctggtcaacggcgacattcccaagacctctgccgcgctggacagccgtatctacttcgatcagggcggggcgctgtcgcgccggttcgggctgacgacggtgccggcacgcatcacggcggcgccgagcggcttgcgcctgcgtatcgaatcctttcctgccgccggtagcgcgaactga

SEQ ID NO: 432872 - DNA, 426 bp, Serratia marcescens
atggctaaattgaccaaagcacaacgcgcggtattgcgcgagaagtttggaggacgttgcgcctactgcggttgtgaactgccagagaaaggctggcatgccgatcacctcgagccggtgatgcgagaatccgagcaggacatggctgccgccgaaaaaggtctgttcaaactgaaagcgaccggcaaggttttgcatgaaagccgcgatgcaatcgagaacctcaacccggcgtgcgccccctgcaacctgttcaaaacgactttcagcctcgagacgttccgcgagcagatagcggcgcaagctgagcgagcgcgggcttacagcgtcaatttccgcactgccgagcgcttcgggttgattgaggtcaaacccgcgcccgtcgtgttttggttcgaacggtatcgggaggcagagcgtggctaa

SEQ ID NO: 432873 - DNA, 861 bp, Serratia marcescens
atgaaaagaacactgaccctggttattacagcgggactcttgctcattggctcacttttactgagtaacgtacaagacaagacgtcatcacattccgacaaacagcccggtgatatggcattcacccagcctcaacgcgatgctattggcgttattgcgcgtgattacctgctggcgcacccggacatcctgctgcaaatgagcgagaaactgaaggagcagcagcaacagaccgcggccaatcgcacggtgcaaaccgcgttgaccacgcagccggaactgccggcgacgttattgcacgatccggcgacgccagttgtgcatcctgatggcggcgtgaccgtggtgcagttcttcgactatcagtgcatctggtgcgcgcgtatggcgccggtggtggccgactttgtgcgggacaatcccgatgtgcgctttgtgttcaaggaattccccatttttggcagtcgctggccgatgtcggtgcaggcggcacgcaccggcctgacgctgtggcaactcaagggcggtgacgcctatctggcgtaccacaatgcggtctttgcctccggtgagaacgaaggtcggttgtcgcaaccgacaatcaacgcggcactccacgcggctggcgccgcgctgatgaccgtactgcccgagacggagaaagtactgttggccacacgcgagctggcccagcaactgaacatcagcggcacccccgcctttatcgttatgccgacccgcgatgcgcgggcggatcaggtgacgccgctgtacggcgccgtggatgtgaaggcactgcaggccgctgttgcgcaggcaaaacaagcggatattccctcacaggcggtgccgcatggctaa

SEQ ID NO: 432874 - DNA, 420 bp, Serratia marcescens
atgacactgcctgccattatcaagacgccaaacagcccggcacagaaacgcgccattgtgctgtggggtacggtctgcgtgctgattgccgttctgctcagtgtgggggccacgctgtggctgctgcagcgtcagccggcgatcgtcaccttcgacatgaaacagaccatggaggcgttctacgagagcgccgcgaaacaatccctgccgccggagcgcagcaagctgctggccgaacggtttaccggcgcgctgcaaaccagcatcgcgcaataccagcagcgcaacaacgtgatcatccttgtctcgccggcggtggtgggaggggcaaaggacgtcactcgcgagctgcagcgggatattgctgcccgaatgcagcggggcaataccgcaagtgttaataagggtactcagccatga

SEQ ID NO: 432875 - DNA, 2631 bp, Serratia marcescens
atgaatctgatcgataaagtcacccataccgccaacagcctgctgtcggcactgaaaatgccggatgaagcctccgccgccaacaaggtgttgggtgacatgaactttccccagctgagcagtgtgttgccctaccgggactacgacgaagagagcgggctgttcatcaatgccggctccatcggctttgtgctggaagcgctgccgttggccggcgccaacgaacaggtggttctgacgctcgaaagtctgctgcgcaccaagttgccgcgcgggatcgcgttgtccgttcacctgatggccagcaagcgcgtcggcgatctggtggagtccgggttgcgtgacttctcctggtcgggcaaggacgcggacaaattcaacgctatcacgcgagccttctacctgatggcggcagaaggtcgcttttccctgccgccgggcgtggatatgccgctgacgctgcgtaattaccgggtgttcatctcctactgcgtcaagagcaagcgccgcaacaaggcgctcatcaccgagctggagaacctggtcaaggtgctgcgtgcgtcgctgatgggggcgaaaattccgacagagtcgcttaatgacgaagactttatcaacgttgtgggcgaaatcatcaaccacgatccgagccagctatacaacaagcgtcgcaaactcgacccgctgaaagacctgaacttccagtgcatcgacaacgggtttggcatggacgtgtatcccgattgcgtcaaaataaacctgcgtgatgccggcagcaagaaaggcagcgtggcgcgggtgatgaacttccagctcgagcagaacccggagatggcctttctgtggaacaccgccgacaactacggcaacctgctgtatcccgagctgtcgatcgccacgccgttcattattacgctgacgctggtcgttgaagaacagaccaagacctctttcgaggcgaaccgcaagtacatcgatctggagaaaaaatcccgcacctcctacgccaaattcttccccggcacgctggaggagatgaaggagtggggcgatctgcgccagagtctagcgtccaaccagacggcgatcgtttccttcttctataacgtgacggtgttttgcgaagacaatgacagcgtggcgctgcgctgcgagcaggacgtcatcaacagctaccgcaagaacggttttgacctgatatccccgcgcttcaagcagcactggaatttcctggcctgtctgccgtttatggccgaacacggcgtcttccaggacttggcgatgcatggcgcggtgcaccgcgccaagaccctgaacgtggtcaacctgatgccgatcgtcgccgacaaccgtctggccccctccggtctgctggcgccgacctaccgcaaccagctggcgttcatcgacatctactccgaggtgatgcgcaacaccaactacaacatggcggtggccggtacgtcaggcgccggtaaaaccggtcttattcagccgatgctgcgcagcgtgctggataccggtggcgccgcctgggtgttcgatatgggcgatggttacaagagcctgtgcgaaaacatgggcggggtttacatcgacgcccagacgctgaagttcaacccgttcgccaacgtgaaggacatcaacctgtcggcgacgcagatcgccaacctgatttcggtgatggccagccccgacggcaacctggacgaagttcatgagagcctgctggagatggcggtcaaggctgcctggctgagcaagcaaaagaatgcccgtatcgatgatgtgcgtgactttctgcgcgacgcaatggatgaggaggtttaccgcgattcgccgaccatccgcaatcgcctgcatgaaatgaccatcctgttggataaatactgctccgacggcacttatggtgagttcttcaactccgacgaaccgtcgctgcgcgatgacgtcaacatggtggtactggagatgggcggcctgaaaaatcgccctgatctgctggttgcggtgatgttctcgctgatgatctacatcgaggggcggatgtatcagacatcgcgtcagagcaaaaagctgtgcgttatcgacgaaggctggaagctgctcaacttcaagaacgccaaggcgggcgagtttatcgaagaaggttaccgtactgcgcgccgtcaccgcggggcgtacatcaccattacccagaacatcaaggactttgactctgataccgccagctcggccgcgaaagccgcctggggcaactcctcctacaagatcatcctgatgcaggacgcctccgagttcaaaacctatctgcagaaaaacccggacaacttcacccagctgcagcaggacatgatcgggaagttcgagtcggccaaagaccagtggttcagctccttcatgctgatggtctccggcaaggtcagctggcaccgcctgtttgtcgatccgctgagccgcgccatgtactcctcccagggccaggacttcgagttcatgcaggcccggcgcgaacagggggtatcggtgcatgacgccgtgtatgagctggcgcaccgcaactttggcgaggagatggcgcgcatcgagcgctgggtggaagaaaactacacagggagggcggccgcatga

SEQ ID NO: 432876 - DNA, 324 bp, Serratia marcescens
atgcagggaatatgtgctgtaccggttgagcgtgacgcgcagggattctggacccatccggcgatgctgcaggcaaaccttgagacatcggcagagatgacctattggctgcggtcgcacggcctggaatgctgggtgatgtttatgcgggatgaagaccctgaggcctttcttgcggggtttgatgaggactgtccggatgcccgtggctggaacccttcttctccgccgggggagggctggttcatcggctccatttatgacaacgaggacgggcctatgtgcttgtggtttagggtggccactcgcgaggttgacgcatga

SEQ ID NO: 432877 - DNA, 552 bp, Serratia marcescens
atgaaaacgcacatcatgaaatcactgcttttactccccgccttgggtggcgtgctgctggccggttgtgccggcgtcagcagcgagttcggctgtaacgccaccacctctgacagctgtatgacgatggagcaggccaacgagaaagccaagtcgctggaagagggcagcgaagcaaagccggctgcggccgcattgcctcgcctggctgacggcgactttgcggcagtggggcgagataccggccccggccctgtctcagccggcagcacgtcccgtttgttgcctcgtcagggggccgcatccccggtgccggcagtgccggcgtctccggcgattgcggcgccgtccgccatcgtgacgaccgtcagtacctgcacgttgccgcgctgtgccggtgttggcagcacccgaccggcccgccaggccgagcagaccgcgcagctgtggatcgcgccctggattgacagtcaggacgtctatcaccagccgggcaaggtactgttcgtggttaaaccagccgtctggggcaagccccagtccgtcttttag

SEQ ID NO: 432878 - DNA, 387 bp, Serratia marcescens
atgactgaaagaaaaatgacagggctatatgtctttttattgctggcctggtggggcggctggctggcgctcgatatgtggcgcattgagcacctgctgaccgatgccgacaagtgggccggttttcggcgtgacattctctggtgtgcggggtcgggggcgctctctttatttttcttaatgacgggtcccaacaaaaaatcctctgcttacgcactgtcggtatgcctggcactgatagtgcccatctcggtcgcaatcgttgccgggagttcttttattcactgggaatttgatgtcccgatgtttttgatgatgcatacgtgcgccggatgggtaatgaccctcgttgtaccgttaatgacttttttctcggccaggttttaa

SEQ ID NO: 432879 - DNA, 219 bp, Serratia marcescens
atgaataacaacgacaaacccactatccggcatttcgatgactttccctttactggcagcgatttcgctcgagtggggaacatcatcgactgtggccgaaccggggcggggaaaacgacgctgatgcagtccaccgtggataaatacagcgtggatgccgtgcggcagggcatttctattgcaccgacaccgccttctgaggatgaggccaaatcatga

SEQ ID NO: 432880 - DNA, 1398 bp, Serratia marcescens
atggcgaacatcaatgtgctggtcaagcgcaagcaatatctctggctgggcgcggtcgcgctggcggtcgccgcggccatcggcggcggttattacttctcgcaggatgcggagctggagacacagcaccctgcagaaccggcccccgatctgaccggggtggttgacaatacctttgacgatcgcgtgcagcagcatgccatcacccagactcaggccgcgcaggccgagatcaacaagcagtttaccgccctgcgtcaggaaatcgacctgctgaacaaatcgcgcctggaagatcagaaacgcatgcaggtgctggaagacgaaaacaagaacctgaaacagtttggcggaccggggagtcaagcaacaccagggaacccggcccccggttccgcccccttaccgccgctggttaacggcgtgacgcccgagggcgagccgatgccgacgcagttcccgccggcaccgggcggcgcggttccgccgccgacggcgttctatccgggcaaaggcgtcacaccgccaccgaacgttgactacaagcctatcccggtgcccggccgtctctatcgcaagtcactggtgccgccggagaccggccccaggaaaaagaagtacccctatatcccgaccggcagcttcgccaaatccatcctgattgagggggcggatgccaatgcctcggtgaccgggaacacggccacggtgccgatgcaggtacgggtgaccggccggatcgagatgccgaacagcaagacctatgacgcgaccggctgttttatcagcatggaggcctacggcgacgtctccagcgaacgtgccatcgtgcgcacccgcaaaatcagctgcattcgcggtgacgacattatcgatcaggacatcgacggccacgtctcctttatgggcaagaacggcgtcaagggcgaggtggtgatgcgcaacggcaagatcctcggctttgcctggggagccgggttccttgacgggttgggcgagggggccggccgggcggcgcagccgaccgttggtcttggggcaacggccagcatgggcgccggcgatattgccaaatcggccatcggcgggggggccagtaaagccgcctcgacgctcagcgactactacatcaagcgagccgagcagtatcacccggttattccgatcggcgccggtaacgaagtcacggtggtgttccaggaaggcttccagatgaaaaccatcgaggaagtggcggtggaaaaagagagccgtcagcaggggcagaccgaagggggcgatcagcccaaatccgggcaaagcctgaacgggttcaacaccgatcagatgctgaaccacctcggcaagcttgatccggctcagttcggtctcggcacatcaacaacaggagagcggtga

SEQ ID NO: 432881 - DNA, 729 bp, Serratia marcescens
atgaaaactaaacgacgctatgcgctgatggttgtcggtctgatggcctgcgccggcgcacaggccggtacggttaatgcgccggtcactatcccattgcagaacggcagtcaggcgcatgtttcactcagcaacagcgaacccaatctgttcaacgttcccggcgatcgcgtgacgttcgtcagcggcgtggatgaaagcctggtcaattatgagccggcggccaacggcgggctggtactgagtacgctcaataaaaagccgttcagttttgtgatcgaaaccgagcggggcatgaactattccattcgcgccgtcccgcgtgccggtgtcggccgcacgttctcactggtgggtgagagccagggtgtttctgtggctgccaaaggctgggaagaggggcagccctacgagtccatgctggtctcgctcaacaagtcattgatggagggccggttgccggccggctatgggcagatgccggtcacgcgggaagcgctggccgcgccttacggtttgcgggcacaggcgcagcaggtctggacagggcatcacctgaaggtgattcgttttgaggtcagcaatcccggcagcgccagccagtgggtcaatgagcacgacttctggcaacggggtgtgcgggcggtgatgttcgatacacctacccggcagattatcggcggcggtcgcatgagcgtgtggatcaccttgtccgagggaggtcgctga

SEQ ID NO: 432882 - DNA, 564 bp, Serratia marcescens
atggaacactcagcacgtctcaactcaaaccgtattattgccatcggctttattgtcatggcgctgttgattgctgcgctgacggtggccgtcattatcatggctatcaacaactatcgcctgcagaacgaaaaacaggtggtggcagtccccatgttgttcaaggcgccgttcggcgtctctcaaaacagcgctgatgcatcatatctcgagcaaatggcgctctcctttgtcgcgttacgtctcaatgtgacccctgagacggtcaacgcctcacattccaccctgctcatgatggtcaagccggcggcgcaaaacgctctcaagattgtcctggccgaggaggccaatcgtattagggccagcaacgtcaatgcggctttcttccagaccagcgtgaaagtctatcccgcccagggacgtgttgatattcgcggcgagctacgtacctggatcggtgacagcgcgccggaaaaagcgctcaagcactactccctttatatcgatcgcagcgagggcgtgacctggctggccaagttcgttgaggtaaacgatgaaaactaa

SEQ ID NO: 432883 - DNA, 306 bp, Serratia marcescens
atgtcgggaaacgatctgaataaataccgtttcccgaaaacactgagaacacaagaccgctggtttgggttttgtcttgatgaattaatccccgtggctattactggcggctggtttatctggcagcagaaatatatcacggggattattttggcggcgctggtgttctgggccattcacaaagccaaaaaggggaagggcagtagctggctgcgtgaccttgcatattggtatttaccgacctcgctcggcaaaggcgtctacaaggtggtccctgaatcgtgttttcggaaatggataaaatag

SEQ ID NO: 432884 - DNA, 363 bp, Serratia marcescens
atgaatgcttcattaagcgctcagggctcttctgttgcccaacgtcagggattttcacttcgtaagctgttttctcggcaacgcgtcgtgaatttcctcaaggtgatcctgccgtttaccgtactggcttcgttcttcccggaagtggctctcgccgccggcggtaaggacatgctgcaatccggcgatgccgatgtgaaggcaacggcaggctccggctcaaccatggtcaaatggatcgtcctggtcgaagtgctggttggtgccgtgatgtatatggccaccaagaacctcaaatacctctccggcttcatcgtggtctctgtcctgatcgcggtgggtatgaaagtcgccgggtattaa

SEQ ID NO: 432885 - DNA, 702 bp, Serratia marcescens
atgtcaggaaaaacagcagtagttgtattcagtggaggtcaagattcaactacgtgcttagtgaaggctctcgctgagtatgactccgtgcactgtttaaccttcgactacggccagcgccacagtgaagaaattaaaatagcggagcaacttgcaaagaagctaaacgtaagctcacataaaattttagacgttaatgtaatcaatgagttagcaataagtagtttgactagaaatgagattgaagtgcccgaacacaaaaatgctgattcggatggaataccatcaacgtttgttcctggcagaaacatcgtattccttacccttgccgccatctatgcatttcaagtaaatgcggaagatgtaataacaggtgtttgtgagactgatttttcaggatacccggactgccgtgatgtttttgtgaaagcgttaaaccacgcagtaagtttaggaataggaagagatatcaggtttgtaacgccactaatgtcattaaacaaagctgaaacatgggcattagcagacaatatcggatgtttggaactcatcagagatgaaactttaacttgttacaatggagttaaaagttttgggtgtgggaaatgtgacgcatgttttctacgatcgagggggtttaatgaatacgtacaaaataaagaaaaaataaaaaaaagcctgcaaaaaaaacaggccatatga

SEQ ID NO: 432886 - DNA, 858 bp, Serratia marcescens
atggaagcgaatataaaatataagctaattggatttgatatcctcaatggaaaagctaacgttatggtgttgaatactgggcgggttatgtcaatgccatacgaaagactactatcttcagaggtgattgatgatttcaacgctagagaagtgtcggcggtttgtcgaaaaatatatagctctggtgaaagtgttaaaactgaatatgagtttaaagatagaaatgaaaaacagtggttaacttatgtcgctttttgtttggttattagtgtttgttatatatttagtaatatagctgcagtcaaaccagttcatatacaatactttgatcttatcattacgcctggtacttttgtttatccgtttacattcttagtagtagatttactgaatgaattttatggatttaggctggcaagaaaagccatttatatgtgtgttgttgctaatgcggcaatattagggttgctttatatttctctgaagttacctgttatacctgaatggatattcaatggcccatataatagccttattaatcaaatacaatcaacatttcttgcatcaactatagcttttcttacctccgagctggctaattcatatgtgctttgtaaaatcaaggagctgacgaattctcgctacttatatataaggattctgtccagtatatttgtggcctctgttatagatagtattgtcttttgtttcatagctttcagtggtttgatgacaaacgaacaaataataggaattatcgctgttcaagtaataattaagttggtgtatgcaattgttaatgtttttcctgcgtatggagcaaggtatctatttaataaatacctcactcaagaataa

SEQ ID NO: 432887 - DNA, 597 bp, Serratia marcescens
atgaataataccgagataataaaaaagaatataaattaccttctttcttcgagaaaggagacacaagtttctttgagtgatggtgccggtgttaatcgaactactatatataagatccttgaaggtagggtagagcgcgttcaggaaaatactcttcgaaaagtagccggattctttggtgtttcatttaaagaaattcaatctgttgatttacaagaaaaggagttatctaataagttagtaaccatcgatggtaacatgaacccgttggcggttccgattattaaagatacaactatactctctgcagtaaatgcaaaaattggacggttagttatgtcgtcacctataacttatttcttcggtgaaggtcctaatgtagttggaatacttctaacaaaagagataaaaggatactataataaaggtgatgtgatcatcgttcgtcgtgaggctatcattcatgaggcaaatgttcttgtggttacttcaagcaaaagtttgaaggtgattgatggtagttcggctcatttagttgctgaggatgttgttggtacaataatcgaggaaaggtatggaagcgaatataaaatataa

SEQ ID NO: 432888 - DNA, 363 bp, Serratia marcescens
atgataccaaaaagactaaaagacgccagaatatcaaatggttatacacaggagcagttggctgaacttgtaggtatacaaggggccaattcaagctcaagactgtcaagttacgaagtcggcagaacagaaccacctttcagcttagtagtaaaaatagccaacttattggattacccagagtattacttctatacgatagatgatgatttagcgtcagatcttcttgaaatgcatagaaacagaacaaatccctccaaaaatgaattctacagttcagtaatagaagagaaaaaattagctaaaaaagttgaagatgccaaaagattagcaattgaaataattgactgcctaaacaaatag

SEQ ID NO: 432889 - DNA, 828 bp, Serratia marcescens
atgcgtctgacttcccgttttggccgttataacgccatccgtaaagaccgcccgttaaccaacgacgaattaatgaacgtggtgccgagcgtgttttcggaagataaacacgattcgcgcagtgaccgttatacgtatattcccaccattacgctgctggataaattacgcgaggaaggttttcagccattttatgcctgccagacgcgcgttcgggatgaaagcaaacgcggccataccaaacacatgctgcggctgcgtcgggaaaatatgattgtctccggcaataaggaagtgcccgaaatcgtattattgaacagccacgacgggagcagcagctaccaaatgatccccggcatgttccgctatgtctgtgccaacggaatggtatttggtcaatcgttcggtgatgttcgtgtcccgcataaaggcgacgtggtcgggcaggtgattgaaggtgcctatgaagtgcttggcatatttgaccgcgtcgataatgacctcgataccatgaaatgcatttcactgaccgagcgcgatcaggaattatttgcgcgggcggcgttaagttatcgctacgagtatgaagataaatccccaatcacgccgtcgcaagttttgcgtccgcgtcggcgagaagattacggcaatgatttatggacgacattccagcgcgttcaggaaaacatgattaaaggcggattacccggtaaaagcgcgaccgggaaaaatacccggactcgggcggtcaacggtatcgatggcgatattaaattgaaccgtgcgttatggctgattgcggatgaattcaaaaaccgaatgaagtaa

SEQ ID NO: 432890 - DNA, 372 bp, Serratia marcescens
atgaacacgcaaaacgtcaacaccgccaccaaagaatcttccaaacgatgggcgggaaaataccccgacgcggaaagcatcatgatccgtcaactggcatttatggaggaattacacggcgtgtatttgtcccctgacgaactggcgcaatcgctgtatgaaatttttaacacgatgacggatcgggtggtgtttaacggcgtcgataactcgccgtccgataaaccgaaaattgcgtatgccgtcgcgcaacattggattcaggcgcagcgtctggccggtgcctattttggcgagaccggcgtcgttgcctgggaacatgcgcgttatcggctgcaccttcagctggctatcaatcactcataccgttaa

SEQ ID NO: 432891 - DNA, 636 bp, Serratia marcescens
ttgagtacctttcgtgaaacggcgcgttatcaccatcgctacgaagttttcagcgattttgtgaaactgacggcctgtgcgctggaaaatctgctgttaaagtcgccggacatcgaggcggagtatatggccaccatccagcgctatgaaaaagccgaccagcagcgtatggcgcagctgctttcgtggctggtcatcgggctggatcagggcatgggggattttctcggatcgctgtttatggagctggagctgggcagcggcaacatcggccagtttttcacgccgtttcatctctccgagctgatggcgggactggtggccggtgatcggctggcggcgttggataaagagccgtatatcacgctgtccgaaccgacctgcggcgcgggcgggatggtgatcgcgtttgcaaaagtgatgctggcgcgggggtataacccgcaaacgcagctgcgcgccgactgcgtggacatcgatccggtggcggcgcggatgtgttacatccagctgtcgctgttgggtatcccggcgcgcgtggtgatcggcaacagcctgacactgaagtatcagcgcgagatgtatacgccgttttggtatcgcgtgacgtccacgcgctggccgatgtaccgataa

SEQ ID NO: 432892 - DNA, 261 bp, Serratia marcescens
atgaaatcgaatgtaagcatcatgacagtaaccgacgagtatgtaaagcgcctgcaggcagagtgcgagcaggtgaagcgccaacggcggatcgcgcgcggcgatatagccgccgccgacgtcgatccggatctgcggtcgttcgggcgtcatatcgccgggtgtgtccgcaagggcaaatcggtgcgggtgccgtcgatgcggggcagtgaatgggggcacgttctgcgtgcgctggagttaacgcgggcgatggcctga

SEQ ID NO: 432893 - DNA, 348 bp, Serratia marcescens
atgtatcagaccgaaatcagcaccgaaaaccgcatggcgtgggatgcgagcaccgaggccgcgtactggcaacggcgcgagcagcaggcacgcagcgacgtggaagaaatcacgctggcggcgtttatggatgccatcgcggtgatgtacccgaaagactgggcgggcgacgcacatagcgaaactttcaagctggccgaaatgtactgcggggacgttgcctacatttttgccaaagttggcgatcgctattttaagttccgcgacgtggtgacgttaccgcacagcgccattctggcgcggatcaataaggaggtgttaagccgggagacgcaagcccgtaaatga

SEQ ID NO: 432894 - DNA, 378 bp, Serratia marcescens
atgaacacacaaaacgtcaacgtcaaaaccgccgctcaggaacgctctgaaagatatggggaaaaacacaatgcgctccgtactgacggttttgtccgcaatctgaactcttcaaatgcctttgatgtgatccgcgctgatgtcgtgctggcccggatggagaagcaggccgggcagtcatgtggtctgcattacgaaatctttgaatcacggctgttagagatggcgatgaattatctgtgtgcattgccattgaaagaccggccggtctttatgggcgcggcgtccaagcggggttatatgctgacggaggccgaggcagaccgcgcctacgattcgttcttttccctgatggatgaactgtcggccgattactga

SEQ ID NO: 432895 - DNA, 726 bp, Serratia marcescens
gtgatcccgaatcatctcgctctggtgccgtggcacccgtaccggcaggccgtctggcaggccatcgcacaggtcgaagcccggcgtgaagcaggcaggcggttacccgtttacccctatgccacggcgtttttccgccagttaaccgggcggctcacaatttcagccaaggacatccgcatgatagacgtgacctaccggcccggcgatcgtcgccgcgccacgcgcaaggaagactatatcgacgcgctcgacacgctgattgccagccggggcgagcactgttattccccgttgccgggcgacactcgcgatacgctgttcctggaagtgaaccgccgccgtcgtcagcgcttcgaacaccggctgacgatgaaacacacccgtcaggcgcgcatcgatgccacactccggcggcacaagcggcgacgttaccaggtgcggctggcgcgggcggaaatcgagctggcgttcatcacgccgggcgagcttgaccgctgggtgcggcgtgcgcagcagcagggactggccgaggatgacctgagcgggctggtgctggcgtggacggcgcggtttccctgtctggacgaactggatagttacctctggtcggtcatgccattctgggaggcgcgtcttcaggtcagtctgatcagtgctgagttatctgctgaagcgcatatcgataacgcggcgcggctgccgaatagcctggtaggccgctaa

SEQ ID NO: 432896 - DNA, 405 bp, Serratia marcescens
atgagcgccgacgaactggaggagtaccgcgaccggggcagagagtatcgggtgatgctcaactgcgcggtgctggggcaactggcgctgccggaaggctggcgcgtggtggcggaagagggctgcgagttctgcgggcgcgtgccggtggtatgccggataagcccggcaggggatgaggcgacagcgctctacttgtgcagtgcgggcgcggatgtgccgaactggtcaatgacgctgccgtttgacgacggtcagtcgctggcgtggctgtacctggatgagcattacaccccggccacggtcaaccgggtgctgcataccgtggcgggctattaccggttggggttctggcggccggaaaagctggcggttgcgctgcggatgggagggcactgcctgtga

SEQ ID NO: 432897 - DNA, 2055 bp, Serratia marcescens
atgtctatgactgagtctaaagcaccaatcaagggcaagacaacccgtccggtcaaaaccaccaagaaaaacgccctcacggaaaaaatcgaggcggcgttggccaaggccgtgcgcaaaaccgccacgctcggcctgctggtgctgaccgatttgaacgtgcgcaagaaaaaatcctcgcaggcgtcgatcgaggggctggccgccgccatccgttcagccggtctgctgatgaatctggtggtattcgagatggaggatggccgctacggcgtcgccgcaggtgagcggcgcacgctggcgctgcgctggttgatggaacaggagaacgacgccgacaagaccatcccggacggtatcgtgaccgacgattacccggtcgaggtgctggtcgtcagccgggcgatggcgcgcgtggtgtcgatgatggagaacagccagcgcgaacagatgcacccggccgatcaggttacggcgttccgcgacctgtcggcagacggacaaactccggcgcagatcggcgatctgctggggttcagcacgcgccacgttcaacgctgcctgcgtctggcaacaatggcgctggtgctactcgatgcgctggccgacgaccagatcaccctcgaccagctgcaggcgctgtcggccaccgaagatcatcaacgtcagtgtgacgtgtgggaaaacgcgcacggctgggcggctgcgccgcagcacttgcgcgaggctgtgctgaaaggcgaagtctcggccagagataacaaccaactggcgttcgtcgggcgcgaggtctacgaagcggcgggcggcacattcaaatttgacctgttttccgacgagggctttttgaccgaaccggcgatgttggagcgtcttgcctgtgaaaaactgcacgcgctggcgcagcaggtggccgaggatgagggctggagctgggcggaagggcgtatttcggccattaaaacgtggggggaggatgcggagctgtaccgcgagctggccgaaccgcagccggaatttaccgctgacgaacaggccgagatcacccgcctgaaagcgcggttcagtgagctagaagcggcatttgaagcggcggatgccgataccgatatccacgcactgaacgtcgagagccatgctgtcgaagccgatattgcgcggttgaccgtacaggcaatcgtccgtgcatggccgcaggcgatgcgcagcagcggcggggtagtggcgtccctgcgtgacggggaggtggtttatcagcgcgggatcgtgctgcgggcgagcgaagcaacgaccgggaatggcgctgatgacaacggcgagggcacggcgaccaccgaaacggcggcaccgaaaaccaaggagaaaggcttgtcggcggcgctgatcacctgtttgtcggcggagcgcacgctggcggtgatgggcgcgctggtcgagaacccgaccgtggcgctggcgctacacacccacacgctggccgtgaaagttttcggttcgcgttacgccggatcgctgctccaaaccagcctgaccccaaaacgtggggagctgctgagcaaagccccgacggcggaaggcagccgcgccgatcgccagctgggcgagctgcacacgcagtgggaagccaaattgccgccggagtggaataccgatttctcatggttgctgacgtgggaacaggccgaggtcgtggcgctgctggcgtactgcgtcggcctgtcgctcgatgccgtgcagctgtggcctgcaaaggatggcaaagtcggcgatgccctgacgccgctcgagcacgcgctggatttcacgctgcgcgactggtggcaaccgaccaaggccaattacttcgggcggatcagcaaggagctgatgagcgatgcactacttgatgccgagaaggtggcgcaggcggcctcggtgctcaagatgaagaagggcgacgccgcgcagctggccgaggatgaactgaccgccggcggctgggtgccggagtgcctgctgccgctggccgaggacaccaccactttacaggacgctgacaacagcgccggcacctaa

SEQ ID NO: 432898 - DNA, 291 bp, Serratia marcescens
atgcaaccacaaaacgtccagggcgcgacaacgaagcctacagcagcatctgcacagaccagcagtgccctgaccatcccgcaggtgtatgacctgttttgttatgtgaaggcggtgtgcggtcgttcaaccggcaccattgaaccgccggtcgtaccggcaggggcggaagaggtgttcacggactttggggatttcgacaccatttcggtgtggatcgtcggcggctggccggtggctgccagcgatcagatgacgatgacccactggtgcatgagttcagggcaataa

SEQ ID NO: 432899 - DNA, 540 bp, Serratia marcescens
atgctggtcgactctgaccgtcaaggaaccgcatccaactggattgctgaccgtaatacgatcgaaggtatagcacctatccactgcattcagaaattcgataacattcgcgatacgctactcgatctcgataagcgctatgaatacgtggttgttgacactgctggtcgtgacagtcgagagcttagaacgggcatgacatcagcagatgtgctgctggtccctttccgcccttcacaacccgatttagatacgctgccacggttgacagaaattatgacggaagctaaggatctcaatcccaaactgaaggctatcgccatgctgacgctcgcaccgtccaatccagtcatcaacgagatccaggaagccaaagagtacctcaaagacttccctgagttggggttgatgagcacggtggtacgtgaccgcaaggtttaccgggattgtatgtccgaagggcgtggcgtggtcgaaatggataattcgaaagccaaagccgaaattcaatgtctggtgaaggagttgatgacatggtaa

SEQ ID NO: 432900 - DNA, 258 bp, Serratia marcescens
atggtaaagcgcagggaacccgtcgtcactccagcggcagtggaaaaacgcatcgaagaatttgcagctgcagctgatcatgtcgttacgccactcaagcaaaccgacagtgaagcaccacgtgattacaaggccatccgtgtgccgttcaatcaatatgagtatgagttgctggagaagctatgcaaaaaaaccaaccgctctaaactcaatatgatccggcatgcattgaagttttatgatgagcacggggattaa

SEQ ID NO: 432901 - DNA, 225 bp, Serratia marcescens
atgacacctgatccaatcggtaaacacgttgccatcagagactatcctgtacacctggttgagggggtgtacagctgcaggtataacgacattatttattgccgattcaaaattccgctgcgacagggtgaatttgcctatatggagcaggcgatttccgacaccagtgagaattacatcgtcgttgccgatagggataagttgcttgctgtcagcctggcgtaa

SEQ ID NO: 432902 - DNA, 735 bp, Serratia marcescens
atgaccgctatgtgcgcgtccaaccgcgccgcattgcatggtgatctgccctactacctgctgccgccggaaatcgccgtcttactgtcctgttgccacgatctggaaaagcgcacgctgttcgagtttttgtggaacaccggcgcgcggatcaatgaggcactggcggtacgtccggcggacgtggaatttgatgcggcgtcggcgttcgtcacgctgcgtaccctcaagcaacggctcaaccctagggttggccggccgccggcgctgaaactcaacgcaccgggaccgaccgcccgaacggcatctccggtcaaacgcacggtggcgctcgaagacgggccctttacggcgcggctgcgcgatcacatccacacctttaccgagcacaagaccaaaccgatctggccggtgaccgatggcaccgcgcgcaactggttgaagaaggtgctccgtgaggctgatcgtcagggcgtgcggttcagcctggcgcgcgtcaccccccatacattccggcacagctttgcgatgcatctgttgtttcatggggtggcgccgctgacgctgcaggccgtgatgggtcataaggattttaaatcgacgcaggtctacctgaaggtgttcagtctcgacacggtatcaggccggggtggcgtgccgttctcgatggatgtcggcgtggcggcggagatgctgcagctggccgataatggtgtaaaaaaggtgtttgattag

SEQ ID NO: 432903 - DNA, 1143 bp, Serratia marcescens
atgagcgtgacaatattcagaaaaatgagaggtcgcattgttcccctcaccgttgatgaagagcacgcttcatattacgagtcccatgactataaaaaaacaccgaaacataaagcaaccacgaataaatttgacactttcacatcgttcactgagcccaatgccacttgcaataaatgtggcaaggatgttttctattatgagaattcatacggttcacgggtactctttgatgccttaggtcccccctggccaattcatccgtattatcattcagaaccggtattgaaaaaacaaacgaaaccgtcaagcgcgccggggtgggaacccgttttaattgaaaaaggcgtcatcacatccagtggcgcattacggatacaaggggaaatccgtggcgcgacaatcagatttacgttcgaagcaactgattttttaaaaatgcacgttgacataaaggatgtaaaaaatctcattgtgtttgccgccagggagaaaagcaaggtacagacgcacaacggcaaaatgacgtttacctgtctctacgagcttgtatcagaaaaggaagataatgatgatttccaacgggatactagcgtcacaccagatttaatgtcggtgacgcccgcagagaaaaatacatccgccgctacacaagcccccatttcctccgtatcaacaccgcatattgtgggcacgttaacaataagaaacattgaattggttgttgataaaaaggaaaacatgacggctatcgttaacggtaatcttaataaacgttttcgcgtaaactatcttcttctcgagtatgagaaaatcaatgagctgttgtcagaatcagagagcaacaagaaagaaacccgcatcacaacctgttttgtcaaagactctgaagatgaaataaccttggtatttcctaataaaatcggtggcacagaaaaaacattcaatgtcagtttcgtaaaaaagaaactcgcggacagcttgccccgcgtacagtcgacacacaacgaaaaaccggctccccgtccaatggtacttcatagaaagaaacgagaacgttcattagaggaacagataggcagcttggccacaaaaatatcctcatccatggctgatgcatttctcaatgctaaaaagagatag

SEQ ID NO: 432904 - DNA, 957 bp, Serratia marcescens
atgaaaacgacacccactgcgcacgacgcgctgttcaaacagtttttgacgcacccggaaaccgcccgcgactttctggacgcacacctgccgccggcgttgcgccaggcgtgcgacctgagcaccctgcgtctggaatccggctcattcgtcgaggaagacctgcgtgcgtactactcagacgtgctttattcgctgaaggccgggcagggcgacggctatatttacgccctcatcgagcaccaatcgacgccggacaaaaacatggcgtttcggttgatgcggtatgccattgccgccatgcaacgccatctggctgccggcaatgaacagctgccgctggtgatccccgtcctgttctatcatggtcaggtaacaccctacccgtatccgatgaactggctgcagggcttcagtgattcggcgctggccggccagctgtacgggggcgattttccactcgttgacgtcacggtcattccggacgatcaaatcatgcagcatcgccgcgtcgccattctggagctgctgcaaaagcacgttcgccagcgtgacctggccgatttgctggaacagctggtcacgttgctgctggccggttacactactcaggagcagctgacatcactgatgcattacatgctgcaggttggtgaaacccgcaacccgggcgaattactatcaaccctggcatcacgggtgccggaacacgaggacacgctgatgacgattgcagaaaagttgagagaagaagggcgtcagaaaggacgtcaggaagggcgtcaggaaggacgcatcgaggggctgcaacttggcgaagaaaaagggcgccaggaaggcgagcgcgatgcggcgctgaaaatcgcccgcgccatgctggccagcgggctcgatcgcgagtcggtaatgaaaatgaccgggctgacagccgacgacctggcgcacattcaccactga

SEQ ID NO: 432905 - DNA, 1089 bp, Serratia marcescens
atgtatattccacgacccgcaaagctgttgttccagcatgacgacggctggagccggtatctcgacaaacacggtgacactctcagcgactggacccaactcgccgtcgagcgcatgctcgcctgcggcacctgtgccatgggtgttcgccgctactgctgcgcctcaccggattgcacccatacccgcttcttctgccagagctgcaagtccaaagcctgtagcagttgtggcctcaaggccaccgagcagtggattgccgaacagcagcacatcctgcccgactgtgactggcaacatatcaccttcaccatgccccatctgctgtggccatttttcaacaacaactggccgctgctcaacgagctgttccgctgtgccacccgccccatgctccgctgggcccgccggcagggtatcgaagtggggatcttctgcgcgctccacacctacggccggcagctcaatcagcatcagcacatccatgtctccgtcacccgcggcggcctcaatatcaaacacggcacctggcggcagctgttctttaaaaagaaagaggtcgagcaaatctggcgcagcgccgtggtttacctgctgcgtgacaactacgaccgcatcaatcctggcaccctgccaggcctcggccatatccgtagcgaggaccggtggcacaggtatctgcatgcccaataccggcgttgctggaaagtgcacttcgccaaaaagacccgtggcgcctggcgcagcgggaaatacctgggccggtacctgaagcgcccgccggtggcggcttcacagttgcggtattaccgcggaggcgccgtggtccatcagtattacgatcaccgcacacagcaacacaaacgccagaaaatcagccaggaggagatgctgcaacggtacgtcagccatatccccgcgcggcattttaaaatggtgcggtactacggttttctggccaaccgcaagcggggcacgctgctgccaaaggtttacgacgcgctggagatgacggtacgggagaaaccgaagcggcccgggttcgcggtgctgatgaaaagtttcctgggcaccgacccataccagtga

SEQ ID NO: 432906 - DNA, 264 bp, Serratia marcescens
atgggccatgaggccataaaccaggaggacatcatgcgaaccgtatccatttttaaaaatggcaacaaccgcgccatccgtctgccccgcgatctggattttgagggggtgagcgagctggagatcgtccgggaaggggacagcatcatcctgcgtcccgtccggccgacctggggctcctttgcgcagctggaaaaagctgacgcagattttatggcggagcgggcggatctggtcagcgacgaggggcgagttgacctgtga

SEQ ID NO: 432907 - DNA, 417 bp, Serratia marcescens
gtgaacaagacctatatgctcgacaccaacatctgttcgttcatcatgcgcgagcagccgcaagccgtcattaagcgcctggagcaggcggtgctgcgtaaccaccgtatcgtggtctcggccatcacctatgccgagatgcgttttggggcgatcggcaagaaggcctcgccgcgccatacgcagctggtcgacgcgttctgcgcccgcctcgatgccatcctgccctgggatcgggccgcggtcgacgccaccaccgagatcaaggccaccctgaccgcggccgggacgccgatcggcccgaacgacacggcgatcgccgggcataccattgccgccggcgccatactggtgacgaataatacaagagaatttgcgcgggtgccgggtcttgtactggaagactgggtcagataa

SEQ ID NO: 432908 - DNA, 231 bp, Serratia marcescens
atgagttatggctggcttttcgaaacacaggacgaggaagtttccggaggtattgttattgatctggaacaccttcctcctgagcttaaactgaccgctatccagattttagtgaatcaggttgaccgtgaaacggcagagaaaaaactagcagaagtcatacagcaacttgagtttgatataaccgcagcagaactttcagcatatctttttaaaccgggtcatgcctga

SEQ ID NO: 432909 - DNA, 336 bp, Serratia marcescens
atggtagccgagacgcttgaagagcaagtaatcgccctcgtcagaaagcattatggttcagtcatctctggccgcgcacccgtgataacgccaggttctgatattgatgctgacattggcatggattgggctgaagcagaaggactgatggaggatttttttgaaaagttctcagtcgataaggccagtttcaatatcaaaacctattaccccgatccgccgatggggacattgctcaaaaatttgttcaggcgtgaaaaggacctccccgaagtacccccatttaccgtcaatatgctcatcgagtccgccaagtctgggcgttggttgtactga

SEQ ID NO: 432910 - DNA, 468 bp, Serratia marcescens
atgaaaagcatgatgaaacaaaccgctgccagcctgctggtcctcgccgctatcggcatgccgtatgccgcgcaggccagcgataccacaaattttacagtctcggctaccgtggaggaaacattcagtgtagatcaggtgaaagatgtaacgcttgactttgcaaagggcacgacggatgtggagattaatattcagagcaacgtcccaaacagcacaactcctgcgactgtcacggtttctgccgtggataaaaacggtgacggctttaatctgaaggggccgaaagatcagaaactgaaagttaaggcggaactggaaaagacggtgttttctaatggtcaagccagtattagcacggcaaaagtgggtacaccggttaagctgcacctgaccccggatacgccggagcttgtgggcgtcggtgagtatacaggtactctcaacgtgaaggtctccaagccctga

SEQ ID NO: 432911 - DNA, 2511 bp, Serratia marcescens
atgttttgcagccaggtcccgcaggccggcgagctctggtttccgcctgagctggtgaccggtaccggagacggggttgacctgtcccgctttgaaaatggtcagcagcttcctggcgtctatacagtggcggtgtacctgaaccgggaactgctgtacagccgcgacgtgacctttttcgcggcggacacggacgcgaagcgcgccggtattaccgacgacacgggcctgatggccggcctgacgcaggccgattttattgacgccggcgtgcgcccggaagccttcggagagagagcggaagacggggcgggtcagtacctgtcaccaggcagcgtgattgagcaggccaccacccattttgattttcaggcaatgcgactggacatcagcgtgccccataaatgggtgcacaagcgtccccgtaactggacatcaccggccctgtgggatgacggtatcacggccggtctgctgaactggtccttcagcggctcggaaagtcaggggcgttcaggcagtggacacagtcgctacctgagtctcaacagcgggttcaatgccgggccatggcgtctgcgcgacgaacgtacgctgacggataacagtcatcgccgggagtggcatcacggacgtacctggctggagcgcggcattaaggactggcgcagcacactggttatgggggacaccacgacggaaggcgggatgttcgattccattcagctccgcggcgtcagtctgggcacggatgacggtatgtatccggaccaggagcgcgggtatgccccggtgatccgcggggtggcggtgagcaacgcccgggtcagcatccgtcaaaacggctatgtgatgtacgagaccaacgttgcccccggcgaatttgccattgatgacatcagcccgatgtattccagcggcgacctggaggtcaccgtcacggaggccgatggcgggatacgtgtgtttactgtgccttatgccaccgtccccaatttgctgcgggaagggcgaacgaagtacgccttcagcgccggtcagttacagaatcacggccgtcaggataaggctcatccggtggtgttgcagggcaacctgacccgggggctgccttacggcatcaccgcctttaccggcggtcaatattcccgaaagtatcagtcagtcctgctgggcagcggcatcaatatgggggcgttgggggcgttttcagccgatatcacccatgcgaacagtacgctcgccgatggcagtcgccatcgcgggcagtccgtacgtttcctgtacagccgcggctttgccagcacggggaccacgtttcagttggcggggtatcgctactccacccggggattttacaccctggaggagagctaccgggcgcagatgacgggctggcagagcgaggagcagcgtgacgtaaacgggtgtctgctccctcgtccggttggggactggtatgacctgagggataaccgccgcgagcggatggatgtgagtgtctcccagaatgtgggtgaccgcagctctttgtacctgacgggcagccgccagacgtactggcacggccagggggccagtacctccctgcaggccgggttcagcagcgcgctggggccggtcagttacagcctgaactacagcgaaagctacggcgcatctgccgggcgtacggaccgcaacctgagcctgtcgctgtccctgccgctggagagcctgctcggggagcggggaaaatcaatgtacgcctcgtacggcgccgggcgtgacggtcagggccgaatcagccatcaggcctccctggggggcactgcgctggagcagagcaacctgagctggcatgtctcgcagagccgttcgggtctgggggaggacagcagcaacctgcacctgggttaccagggagggtacggggatatctctgccggttacagccaggggcagggctaccgccaggccagttatgacatgcggggcggagttgttctgcacagcgatggcctgacggcgggtcagccgctgggtaacaccagtgttctggtatcagtgccgggtgccgcgggtattccgctggaaggcggtgccggcgtgcggaccgactggcgtggttacgccgtgcagccctgggccagtgaatatcatgaaaaccgggtggcgctggatgtggcgcacatggatacacagactgaagtggatgagccggttgcccgggtcattccgacaaagggcgctatcgtccgggcaggatttgccgcgaagagcggtctgcgcgtgttgatgacgctgatgaaggacggtaaaccgttaccgtttggcaccaccgtgagcgccggtgacagcaccggtatcaccggggatgacggtcaggtgttcctgaccggtctggcccgcagtggcaccgtgatggcgaagtggggagacggcgcggcacagacctgccaggccgactggcatatcggtgaggctgacccggtcacaccgctggcccgcgtcacggccgtctgccggtaa

SEQ ID NO: 432912 - DNA, 708 bp, Serratia marcescens
atgaaattgattaaaagtattccggccagcgtgattgccgggggcattttatgcctgacggggctgttttccctttctgcctctgccggtggtatcacgctgggtggcagccgggtagtgtacccggccggggcacagcaggccaccctgtcggtcagtaatcgcagtgatgactccacgtacctgattcagtcgtgggtggaaaccccggacggcaaaaaaaccagtgactttgtcctcaccccgccgctgtataccagcgctccaggtaatgaaaacatgctgcgtattattgcggccgacgcggcaaaggcgaccgataaggaaagcctgtactacctgaatgtgaaagctattccgtccgtggacaaaaaagccctgtcgcagggctccggcggtttggtggtggcgacccagatgcagataaagctgtttgttcgtccggccggtctgacgccagcgcgcgataaagcggccgatgcgctggaattcacccgcaagggcggacagttggtcattcataacccgaccccctattacctgaccctgaccgacatgaaggccggtggtcagccgctgaaggatgtgatggtggcaccgcgggccagtgagtctcaggcactgcctgccggcagtgcgggctctgttacctgggtctccgtgaatgactacggcggccaggataaaggccagagccatattcgctaa

SEQ ID NO: 432913 - DNA, 303 bp, Serratia marcescens
atgaacaaaaattacgccgggcagtcatcgacctctgatggatatacttcaggagagatgcgcagtgattatattaacgagaaggtcagactctacggatttattgagtgtggtgatattctgcagtttattcaggtgttctgcccgggcgagctgggtgtcggtgagctgatgtacgtgctgggtaaattaaaagagtgcctgggtaaccatgacaaccaaacgccttatttctccggtctgagaaagctgtcccgggaaatcaacgatgaactgatttatcgtataagcattcagcaataa

SEQ ID NO: 432914 - DNA, 960 bp, Serratia marcescens
atgaccgataccgcaggggccagcgatcttgtttttggccttttctggctgctgggataccagttttccccgcgcctggctgatgccggtgcttcggttttctggcgcatggacaatgacgccgattatggcgtactgaatgatattgccagagggcagtcagatcaccgaaaaatagtccttcagtgggacgaaatgatccgggccgcaggctccctgaaattgggcaagatgcaggcttcggtgctgatccgttcattactgaaaagtgaacgcccctcagggctgactcaggcaatcattgaagtaggacgtattaacaaaacgctgtatctgcttaattatattgatgatgaagattaccgcaggcgcattctgacccaacttaaccggggagaaagccgccatgcggttgccagagcgatctgccaaaaaatgccgacttcaataccctgctggcgagcccagcggagcatggcgtgggtagcacagcgaaacaggtcgttgagcagcggcctgttgttattgaaaaatggccacagctgctgcaggctttggacttgcagctctggcagaagaaacggacctgggtacaatccgatggggcacaagctggtcgccagtatcggtaatgcacatgatttcaagaatgggcgtcaatcccagctggcagcctggctgggattgacgccatcgcaatacagcagcggcggaaaatcaaagcctggcaggataacgaaagcaggtgattcgtatttgcgaactctgctggttcagggggcacgttcagtcctgattggcgccgataaaaagactgattctttcagtcgttgggtttgcactctggttgagcgcagggggtattggcgagctgttgtggccatcgccgccaaaaacgccaggctgtgctgggcgtcattgcattacggtgatgatttcaggctgtactcagccagctaa

SEQ ID NO: 432915 - DNA, 1395 bp, Serratia marcescens
atgcatggtaatggggtaattatgaaatttaatttattaagaggttgtgttttttgtcttgtaagtttatctggggcgggtcaggcagcgggcaaagatattacaaatgagatatatgtaaattctatttacacagcgacccgtcaggcatggccagtgctcgaaaatgtatggggcacgcacgtatatcggcaactcagactcattgttgctgatgcccataatgcctgggcagttgacagtaagagtctaacgaagctcccctacagcgaaatacaacggcgtcatttacctgttgaatatatgtattatcaggaaattcagtggcctgacggccgacccacaatttatgtcagtttgggggccactcttccaccggaagaaaaatcgcgctttcagtcagagaagaatcctgttccaatcctgtttaacgtggctactcatgaagcttttcatttttttgtacagactaacgtatggaaaaatatatcaccggataataattcacgggcaacagcctaccctgtccaggttgcccctagattctatcgtaacagtattattcgatctttacatgccactctgcagggggatcaaaatggactgggtcatgcgcggtattggtttgatctgtggaagacactatatccagatgatgcaagccgcatcaggcaaaccgatattgaagagggtagtgcacggtatattgaaattgctgcggaaataattgctgaaggtaaacgcttcaataccccagaatttcaacatgcgttaataaataaaatgaacgataaagtaaatttcatccacaccagttctgattcagaaagctatctcattggtgcactttcagggtttattctgaacatgaaagatctgagatggcaatcaaatgttgtacagggagtgccaccactcgacattttgctagagggtattcctcccattacacaacaggttgataaaaaacttgagaccgaagtaaatcaggaagtcagaaaaataaacaataaggttggtgccacaatagatcgtttcagtaaagcctataattacccccatgtaataaagattttcgtaagttcagatctgtcgggcagttactcgctgagtggggggttcttccgtactaaaacaattcctcatgaccttatggtcgggttaagttcttcagctaactggacaggtggaagctacagtgtgaaagaggtcgtcgcggcggcggcgattgataaatccacagagtatagaggaaaacaaggttttttgattctttatgctggtaagcttcctccgagtgaaaagggtcggctgatattaaaaacaggaaagttgtcattaaatattccttatcctgacgatattgaaaaatcacatatcgtttacttaccctaa

SEQ ID NO: 432916 - DNA, 525 bp, Serratia marcescens
atggttagcaaatcaaaaatgatattttggtgtagatttatggagctcgcattattgatcggcctgatttccacaccgatacttggtcaggtatttgcttggcttcagaccggaaatgatgtttcggttctggggggggtaatacataaagaatgcgaaatgcttccgggaagttaccttaatgcagcggcatccgctatttgtaactttttgagagattgtattttcagtttaatgttttggcatttttataaagtgtttagagatattcgagcgggagctgttttcaatcagaaacagataaaacgtatttccatttctggatggtgttttattgtgttatccatatattcaatcattagtgatatgtacttatcattattacaaagctcagaggaaaatccgcagtactactttcaaattgacaacttgacatatatcccaataggtgttggattggtgatacttagctatgtactgcagttagcaacagaaataaaagaagagcaggaattggtgatctaa

SEQ ID NO: 432917 - DNA, 405 bp, Serratia marcescens
atgaaggtgctgtcgcgccacgcggagatagcgaaggcgttcgcttatctgttgaaacagtggaatgcgttgaccctctactgcgagaacggctgggcggaaatcgacaacaatatcgcagagaacgccctgcgcggtgtcacgctggggcgcaaaaactggctgttcgcggggtcagatgcaggcggagaacgtgctgcgatactgttcggcacgtgcaaactcaacggcgtggagccggagaggggctgcgttacgtgctcagtcatatccaggacaggccggcgaatcgggtacgcgagctgctgccgtggaaaaccgaccttacctcagcataagtgtcaagacggttcaaatgcgacgcttaccaatctcctaaccatgaacagtcacatttgtacatag

SEQ ID NO: 432918 - DNA, 663 bp, Serratia marcescens
atgccctcaaaacccatcgagcgcagctatgcgggtcccggcctgctggcgcggaacgtcacggcgaagtttgccgagcacacaccgcactaccgccagtcggaaatctaccgccgtcagggcgtggaactgagtcgtgccacgctcgggcgctggtccggcgcggtcagtgagttgctggagccgctgtatgacctgttgcagaagtatgcgctgatgccgggcaaggtgcacacagacgacatcccggtgccggtccaggcgccgggcagcggcaagacgcgaaccagccgtctgtgggtatatgtgcgagatgaccgcaacgcgggctcggtgatgccgccggcggtgtggttcgcgtactcaccggaccgcaagggcatccatccgcagcagcacctagccgggtacagcggtatcctgcaggccgatgcgtatgggggctacaacgcactgtatgagaacgggcgcatcacggaagccacctgcatggcgcctgcgcggcgaaaaatccacgacgttcatgtccgcacaccgaccgacaccaccacggaagcactaagacgcataggtgagctgtacggcatcgaagccgagatacgcggaagcccggcggagaagcggctgtcggtgagaaaagcgaagacggtgccgtggatgtaa

SEQ ID NO: 432919 - DNA, 2757 bp, Serratia marcescens
atgagaatgcattcgtcattagtttttaggctaacgatattcttatcgttgagcttgatgctaatatggttggtttcagtcttgacgaccgtgttcttttcattaagccacgcggataggcatgttattgacgaactttctcatttggcgtcactgcgtgttgagctaagcaaccatcgctttgaaggtgcggaaagagacgcgcaagatctggcaagacgttatgatagtttctgcaagaaacaggagctgaataatatatcgggaaaaagtgatagtcgatacttgccgataaatagtaaggcctgccatctcaatcatgcgattcatcgtgataattggtttatccaggcatacgggtctgcaggtcaaacctactatttggacagttttctcctcaaaccttctcaggggatttcactttacccgccagagaaaattactgacgattacttttctcaacgtcgattggggttatcgcagttccaaacgtatccgcatcacgataatatctattggggaaatccggagtacctttctggcagtggctggagcatttcggtagcggcgggcgataaagccggcggcctgataggttatgccatcaggttggatgacctattatcctatgggcatacggtgacagattttgacgttaatatttggttggatcgccaccaacaaccgttacctttttttcgcggaaaacttccggcggcggaagaggaaatcattttcaactcgttgaaaaaaataaaattacgtgatggttggcagcggatcccgggttacagggtattgcgcattcagctcaaaggcccgggctggcagcaagtggttctttaccccgatcgtggaatattggaagaggcggctgaacaggcaaaagcgcagttgccttttgccttgggcattttattgttgataactctggcacttttttggatgctgcgccgttatttggcacagccactgtggcaattcgttgacgttatttgccaaaccagcgccgagaatttttatcctcgtcttctcgaacacagacgagatgaactggggcaaatcgccatcgcttataatcggctgctggacaagttgaatcagcaatacgctactctggaaaaaaaggtggtggaaagaacgcgtgcgctgaaagaggcgaaacgtaaggctgagttggcgaataaaaggaaaagccgtcatttaaccgcaatcagccatgagttgcgtacaccgctcaatggaactttaggggcactggagctgctgagaaccggtgatatggatcaacaacagcagtggcttgcagataccgcacatcagtgcacgctgtctttaattgagattattaatcagttgctcgatttttctcgcattgaagcggggcaaatagaactgcaatccgcctcctgccaacttctaccgctactcgatcaggcgatgatgacgatacagggggctgctcaaagcaaagggttggtgctgtcagtccatttggcggccaacgtgccgcaccatctttgtctggatgcgctgagggtgcggcaaattctggtgaatttgctcggtaacgcctgcaagttcaccgaccagggccatattaccatgcaggtagagcgcgttggcaagacgctggttttcaacgtggaagatagcggccgcggagtctctgaggaacatctagcctccgtattcatgcctttttaccaggcgcagacgcatgctcaggggacaggattagggcttacgatcgccgccacgctcgccaaaatgatgggaggccggttggacttcagcagcattttaggccgtggcagccgggtggcgttccatatgccgctggggcagttcagcgagcccgagccgctgtgcggcgttgttggagctccggcgatgctgcatccccaattgctgtcttgggggatatcatgcctgacgcaagaccctgccgaaggggggctcaataccgacctggcatttttgccagggcgtctgcatgaagcggtgaaatgcctattggccgacagcgttctgcaaagccggaaccagctcccccttcaaccctggcgcttgcgcgtgttgttggtggacgatacggccactaaccgcgatatcatcagcgtcatgcttgcacgcttggggcacgaggttcatcaagctgaaaacgccaggcaagcgttgcaattaggtcgtgaacatcgctttgacgtggtgttgatggatctgcagatgccggactgcgatggactgacgttggcacggtcatggcgggatgatgcacaggggcaggacggcggttgcatgattgtggctttgtcggcgcatatcggcgcggaggaaaaaaggcgcgcaattcgggctggtatgaacgactacttggcaaaaccggtcacgctcagccagctttctcaactgcttgaactggttgccgaatatcaaataagtcgcgatattagtattataaatcaattggatactggcaagcccattttggcgatggacgacgggctgataggtggcaccgtcacttgcgaattacgcagacttctggtggaagccgagcaaacctgtggccgaaagacggattttgcgaagacggtgcacacgatcaaagggatatgcggccaagccgggttgtcgcaggctatgccgttgatcgttgaattagaacgtcaaattcttgcgaaggagacgccgcagcaagaacgattggtatctctgctccgattgattcgcactcaactcaacattgattga

SEQ ID NO: 432920 - DNA, 735 bp, Serratia marcescens
gtgaaaaaagagattcttgccgtcccgggtatgtctccatcccccttgttcaaaaggacgtataaagccgttcaagatattgatgaaaaattaaccaaattgattcgtagatggcgattcctccatgcaggaccacctatgaaagttactgcatatgatggagcagaaatctgctatcaaggtgtagcatttaaaggttctcccgttcaggttttttggaatggatttatcgaaccttacattgaaaattactcaataaatgtatttgagcagacctcagcgttagcaatcgaatgccaatattcaacagaggaatccattgaagaagctaaaataatattactggtgatggttcgtaggctttaccatgaaatggccgaaacagatagaatattaagaggggatgggttttcatttccacaaaagaaagatgttagcggtcatattgaaagtatgtctcaaaagattatagaacatgcagaaattgagaagttaaaaaagccactggcgaaccagaatatattcaatatagagactgtaaatagcaaatatgcgcaatttggcacaagtaataacatcagtattcaagagttaagtgactttttcggaatgattgcttcttcgggtgaggatgagattattgttctctcgaaaatacttctgagtagcgcccactcaagaaacttactaagtaaagaaaaatatgattttttaatatctatttttaaaaagtag

SEQ ID NO: 432921 - DNA, 510 bp, Serratia marcescens
atggattttgatgctatgacataccctgaaacttttaaaatcgctggagctgaatataaaggcctacggaattcagctgaaaaaaaagtgctaatcccttacactgaagagcccaacattagcattggcgataaaataactcaaaaactaggaaagggcgaaatatctttaaaagtacttgatatgtcattcttacctggaggtacacttaatgttgataccaatcacccacacatgcttacattaaaggttgagaatttaactgccaatgagcaaaaaaccaagcaatctagccaaaatatattcaacataggaagcgtatcaggctcacaagttcaaatcggtgaacgtaaccatcttattgtaaatatcagcataactgaacttgttgaaaaagtatctcaatcacaagaccctcaggcaaaatctttacttaaggatttgctaaataatagcactgtagctagtctcgttggtgctggcgcatcaaccttattagctatgctttga

SEQ ID NO: 432922 - DNA, 582 bp, Serratia marcescens
atgtgggctgtcgaaatacaacacatccgtaaacgttatctgatggggcagatcagggttaacgcgctgaatgatattaatatcaatatttcaccacgttgcttcactgttttatccggcacgtcaggcagcgggaagactaccctgcttaatttaatcggcgggatagataccccggacaacggcaaactgatcgttgccggtcaggatatgggaaagctgaatgacaaccagcgcagcgccttccgggctcatcatatcggttttatcttccagaacttcaaccttatcccggtactcactgcgtatgaaaatatagagctgccactgatattacaacacgccccgcccgcccatcgccggcggttagtcgcagatatgctggaacgcgtcggcctggcggataaagccacggccttacccggccaactttcaggcgggcaacgccagcggctggcaattgccagagcggtggttcaccagcccgccctggttctggcagatgaacccaccgccaatctagacgaaaaaaccagcacctctattttgcagctcctccgtcatttgcaaaaagaacagtag

SEQ ID NO: 432923 - DNA, 663 bp, Serratia marcescens
atgaacaccaccctgaaaatcgctatttccgaggaaaataactatttccgcctggggctgcaggccttgctgacgctgtactttggcaccataggggtagacgtgcagcatgtcaatattcgggatgctcaggaagccaacctgattttctgccactatccggctggcgccttgagttgcttctgtcacctcgcaacacacgccgccaacaggaaaaccctgtactttaccctgcaggaaaaggatcaaagaccaagcttcgccatgcccctacgatgtccacaggaatccggcgtcatctgttacgctatgtctcgggtatctgtactgcgcatagtgagtacggcgctggagtccccttggttatatccgagcgggaaacggaaccgtcacacgggttgcacctgttcgtcccccgtattcactccccgcgaacgggagatcctgcgttacactcgccaggaaatgcaggtgggacaaattgcgcgccggctgggcctcagcgccaaaacggtcagcgggcataaaataagggtgatgcgcaaactggggtttcaccgcgacatggatctgtacaattggctccgccaaacctcaccgacgttataccaccataccggcaaccatcttcaggaaaagtcagccacgtctgatccaggttaa

SEQ ID NO: 432924 - DNA, 1440 bp, Serratia marcescens
atgaatctgcggcgacaattcctgaacggatgttgtgcaactctgctgctttccggtctcgcacaggccgatgatggcgtgcccgccctgttgcagtttgctgaacagtaccaggggcaggctcagagtgacgcagcccccgcccggaaaacggacggtacgcccgagcgcaaagcaggaaaaagcggggaaggagcaggaaaaccaacggcgacgccccgccaacaacaacgtggccatgatgaacggtcatggtccaccagaaccttcaccctgcgaaatgacctgcgagagcgggagcagcagttggctcgccagagcagagagttggcctctctgaggcaggaaattgcggcgttgaaagcgcaaaaatcaccgccgcccgaggtggctaaaccagcattgccggacacgacgctgctgcaaacatggcttgcggatctcggcaaggcatggcgcggaacccctgatgaggcgcatacccgcgccctgttggcgcaggcggaaacgagtgtctctcaggcaaaaaaagcagaaaagcttgccggcaaccagtcggaggcattccgtgccgaaatgaaaacggcacaggcggccctgaagcaacaacagcaacagagcgacaaagcacagggagatctgcacagagcgttacaggaaggagaacaaaaatttgcagagcaacaaaaaacgctgcaaacggcgcaaagcgaactggcggtattgcggcaacagcagcggtgggtgctgaccccggaacagctggccgataaacagcgccgtctgtcgtacgcagcgggcagtgcgctgggtcatgatattcaggacatgatcaatgagcggaaaagttggggggtctctgtcgagcgcgacagcctgctggccggcgttattgacagcgtctcgggccggctgctgttgccgcaggcggaactgagcaaactgacagagcaggcagatgccaccgccagtcaagcgcgagaaaaacgggtcagcgagcaacaacaacgcgataacaactacctgactgccttccgtaaacagaaaggggtgaagcagtctgggctgggcttctggtaccgggtggattatgccgggcgcggagaactggcaaaaaacgcagtcattgatgtggtggtgaaagaaaaactgaccgacggcactgtgattcaggatatggatctcagtggcaaggtcttgtcgcaaccgctctcggattacccgccgttattccgggaagcgataagtcacttgcacgatcacggttctctgacgatggtggtccccccggcgctcgcctacggcgaaacgggttacccacccaaagtgccccccaacgccaccatgatttacgagctgcgcattgacaacagccaggcgcagaaaaacccgtcaactgacgacgaacagagaatcgcggcatcgggagtgcgcggatga

SEQ ID NO: 432925 - DNA, 417 bp, Serratia marcescens
atgatgtccactttcccccatcgcaccatccgttacggaatattgtgtcttctgcttgtcggggcaaccggctgtcagaacgttcgcgccgtgaagaacatcccggctccgcacgccgatcagggcctgtcgccagaagcgcaacgcaaacaatacgaagccgagcggcttaaattgtgccaggaacagttaagcgccctgcgcaacatcgaccagaagcagtatgagcactataagcagggctttgacagcctgatgagtggtgcatcggcttactcccggctgcgttcccgggttaacagtgacacacaagatacggtcgatgccttataccgttataaagtcagctatctgtgcgccggcgtgaatcagtcggtactggccgggctggcggcacagggggagaaggttaaatga

SEQ ID NO: 432926 - DNA, 543 bp, Serratia marcescens
atgtccatgaaaataaataaagtcgttcttgccaccctggtggcgttgggaatgtcggcttctgctgcgaatgcgcagtctaatgttaatcaggggagcggttccgtgaagttcgtgggggcggttattgatgcgccttgctcaattaaggcagaggacgtcaatcaggtcattccattggggcagatttcaaccgccgcgcttaaaaaggccggtggcacagagggaacaaggttcagcattagactcgagcagtgtgataccaccacgttgaagacggtgaccaccacgtttaccggctcagcggataagaccaatccgaaacatctgggtgttctgggttccgccggcggtgtcaacattgcgttgatggggagtaatgatgaagagttcgagctgggcaagaagacaccggctcagacgctgcaagatggtgataatacgctgcaatttgcggccaaattgttaaaagccagcgatacagccaccgttgttccagggagtttcacggcagtcaccaactttaccttgtcctacgagtaa

SEQ ID NO: 432927 - DNA, 531 bp, Serratia marcescens
gtgaaaaataaactttctgtcgtagggctttgtctggtttcctccgtggtattgcccgctcaggccgtttcattttcagaaggccatggcacggtgagcatgctgggttcggttattgccactgcctgcgccatcgatgtggatagcatggcgcaaaccatcgatatgggcgtggtgccgctagccgatattatgcgcgatggtcaggggagcggtaagcccttttcaatcaaattagtggattgttcctacgagcatccggggcatcaggactggcgccagtttcaggtgacattcgatggcgatcgggaggggcatttatttggcgtcagtggcgaagcatcgggtgtcgcgttgcagataatcagtgatgtcgggcttcctgtttttccgggaaaggcattgccgccgcagaatatcgtaccgggaaatatacatctgaattacaccatgaaattggtagcgaacagtcgtgccctgagaacgggagattattattcagccatacgctttaagctggattacttctga

SEQ ID NO: 432928 - DNA, 2544 bp, Serratia marcescens
atgggacattctcctgttggtcatatgactcgcgttggtattttgtgggtctgcatttctttggcactggggtcaccgttcacactggtttatgcggcagaggatattcagtttaatacggatgtgctagatgttcatgaccgggataatatcgacctcagccagttctcgcatggcggttatatcatgccgggcatttacggcatggtggtgcatgtcaataaaaacgatctgccggagcagtctatccctttttatgctggcggtaacggtaataaaggcagccgcgcctgcatcagcaaaagcctggcagggcagttggggtttaaatcccagacgctcagcgcattgacctggtggcaccgcggggagtgtctggatgaaagcagcgtgcaggggatggaggttcggggtgacctgtccacggcatcgctttacctgagtatcccccaggcatctctggaatataccgctgagaactgggacccgccgtcacgctgggataacgggatccccggtctgttgttcgattataacgtcaatgctcgttcgcaaaaacaacagcagcgtggagcgggcggttatcagttgagtggtaacggtacggcaggcgtcaacatgggggcctggcgacttcgtgccgactggcaggggaatctcgaccatcagaccgggtcggggaaatccaccaaccagcggctggactggagccgctattacgcttatcgggctatccccgctttgcgttcaaagctgaccatgggagagagttatctcgattccggcatgttcgacagcttccgttttgccggtgccacgctggtgtcggatgacgcgatgctgccgccgaatctgcgcggttacgcgccggaagtggtgggggtggcccgaaccaacgctcgtgtggtgatcagtcagcagggccgggtgttgtatgaaaccaccgtggcgcaggggccattccgtattcaggacatcaacgatgcggtcagcggcgagctgaatgtgcgggttgaagaacaggatggcagtgtgcaggagttcaccatgaacacctcgaacatcccttatttgacgcgcccgggctcggtcaggttcaagctggcggccggtaaaccctcggattacagccatcattcgcgggggccgttgtttggtaccggtgagttttcctggggggtcagcaacggttggtcattatacggcggcgcgctggtcggcggggattacaacgccctgtcgctgggtatcggtcgcgacctgatgttactgggcgcgctgtcatttgatgtcactcagtcgcgggcccggatgcagcaggaaggcggcacgctcagcggtgggtcataccggctgagttactcgaagaattttgatgaatatgacagtcaggtgacgtttgcgggataccgattctcggagcaggacttcatgagcatgagtgagttccttgatgcccgttattacggctaccggaccggcaacaacaaagaaatgtacaccgtgtccttcaataagcatttccgtgactggggactcagcacgtatctcaactacagccaccaaacgtactgggaccggccggcgaatgaccgctacaacctgatggtgtcccgttatttcgatgtggggcgttttcgtagcgtcagcctctcgttatcggcgtaccggaataagttcaacaacatgcgcgatgacggcggctggttgtccctctctgtgccgtggagcgacggcgcaacggtcagttataacgcctcggccaatcggaatgatgtcactcagcaggtggggtattacagccggattaatgaccgggataactatcagctgaacgtggggggctcgcgtcgtggggcagacgtgtccggttattacgatcatgacggcgatattgccagggtaagcgccaatgccagctatcaggccggacgatacagcgctctgggtctctccgcgcaaggggggatgacaatgaccgctaatggcggcgctctgcaccgggccggtatgccgggcggcacccgcatgctgattgataccgggggggtgccgaatgtgccggtacggggttacggcaacaccagcaagaccaacgcatggggtaaggcggtgatcggtgacgtcaacagttactaccgcaataaggccagcattgacctggataacctgggggataacgcggaagccacgaaatcggtggtgcaggcgaccctgaccgaaggtgcgattggttaccgtaagttcggcgtgattgccggcgagaaagcgatggccattatcaagttggcggatggcagtgagccgccgttcggtgcgacggtgatgaatgctcgtaagcaagaaaccgggctcctgaatgatggcggcagcgtgtatctgagtggtatccaggccggcgaacgcatgacggttcactggagtgggcgggcgcagtgcgaggtccggctgccggccccgttaccggcagagatgttgatgaatacgctgttgctgccctgccatgccctgaacgtgggcgagaacgatgagccagcgcggtag

SEQ ID NO: 432929 - DNA, 786 bp, Serratia marcescens
atgaaacaacacgaatatgacgcaatcgccatgccggcgatttcactgaaggccgtggtgaccggactggttctgaccagtgggttggtggcctggcagagccaggccgcgatagcgctggatcgaacccgggtggtgtttgacggcgcccagaagtcggtgagtctgaatatcagcaaccagaacaagcaattgccctatctggcgcaggggtggcttgaagatgagcaaggcaacaaaattcagagccccctcacggtgttgccgccggtgcagcgtatcgaaccgggcaaggccagccagataaaaattcaggcgctgccggcggcgaagctgttacaccaggatcgtgaaacggtgtactacttcaacctgcgagaaattccgccgaaaagcaccaaacctaacacgctgcagatagccctgcagacacgcatcaaactgttttaccgcccggcggctatcggaacaatggacaaaagcggtccggcgccgcaggagcaactgaccctgacccgtcagggggggaaatatgtggtcaataatcccacgccgtactatgtcaccctggtggatgccgctgtgaagaaaggggtggagggggtgaagggatttgagcccatgatgctgccgccaaaagggaacctgccgttgacggtcagcgctgccagcgtggggaatagcccggttctgacctacatcaatgactacggtggccggccgcagctgaccttccgttgtgccgggatgacatgtgtggtgataccggaaaagacaggcaactag

SEQ ID NO: 432930 - DNA, 657 bp, Serratia marcescens
atggcgaaaataacacacaccctgcgcgcatgcctcagggtgcggaaagtgggggagcattacggtgccatcaccgggctgatgttcatgacgacgttatttatgggaggggttctgtttctggcctttccggtggtcgcgacggataactgggaggtgcaaggcgccaatggtgcgctgtatgtccacggcgcgctgaccgcgagcgcctgccgcctggaaatgggcagtgcgcggcaggatgtggcgctcggggaaataggtacggggcgtctgcaagggctcggcgaccgggggcgtcccgtgtggtttgagctgcggctggaagattgtttgcgcagtccggcaggcacccgtgacgagcgtaccggcgggctgacctgggcgcacgaccagcctgcggtgaccgtcagttttcaggcgccacgggatgccgacaacccgcagttgctgaaagcgcagggggtctccggcctcggtctgaggctggcggacagtacggggcgggatgtccagccgggtgagcggggagcggcgctgttgctggctccggggcagaacacgctgagttataccgtcacccccgaacgcacaccggcagatctggtggcgggcagttaccgggcagtggtggattttcatctggactatgagtga

SEQ ID NO: 432931 - DNA, 492 bp, Serratia marcescens
gtgggcaacgtactgatgaaactgaaggcgcattatttgctggccggggtgctgggggcggtgccgttgatggcgcccgcggtcacgaacgtaaccgtcaaagtgaacgtggtggcgccgacgtgcagcctcaatggcggcaaacctatcgtcattgacttcggggatgttctgaccacgcagatcgatggcaaaaattaccggcaaccggtgtattacaacccggaatgtgaaaagggcgtcagtacggcgatgaagctgcagatagagggaaccccttcggccttcgataatcagcttctgcagacgaacgtgggagggttggggattgaagtgctgaaggagagctcccggctgccggtcaataactggctgaactttacgtactcttccccccctaatttgtatgtggttccggtgaaacaggctggtgtgacactacccggcgggaaattcagcgccacggcgttgctgcaagtggattaccagtaa

SEQ ID NO: 432932 - DNA, 489 bp, Serratia marcescens
atgaagaaactgatgatgattcccctactgctgtcgggttacatgtcatcgctgtgggccgcggggcaagcagatatgacgatgagcggaaccctgattgcgccaccgccttgcaccatcaatgagggaaaacaggtggatgtggactttggcgaccgtgttgggattaaaaaggtggacgggacgaattaccggcagcgcgtgaactaccagatcgcctgtgaaagggggggcgacgctggctgggcgctcaagctcagcttgaacgggacggcggcaggctttgatgcgaaagccctgaagaccagtaaggatggcctgggtatccggatataccagaatgacaagccgtttgtgccggacagcacgctggcgattagtctgaacagcccgcctgtattggaggcggtgccggtgaagcaagccggcgccacgctggaaaaaggcgggtttgaggcctgggccaccctgcaggcagagtatcagtga
